United States Patent Application Publication US 2026/0242757 A1 - sequence listing, part 2

SEQ ID NO: 3004 - protein, 394 aa, synthetic construct
  REGION 1..394: note = Variant of terminal deoxynucleotidyl transferase
MHHHHHHGGSGHPPSNTPEKEVPSVIARPVSQYACQRKTTLNNYNKKFTDALEIMAENYKFKENLIACLEAKRAASIFKYLPFEVTSMKDIQGLPCITDQVRDVIEEIIEEGESSRVKEILNDERYKAFKQFTSVFGVGVKTAEKWYRMGLRTVEEAKASKSLKLSKMQKAGFLYYEDLASMVSKEEADAVTLIVKETVRTFLPDALVTITGGFRRGKPMGHDVDFLITNPGRKEDDELLHKVVDLLKKQGLLLYEDIKESTFVEGQVPSHKIDAMDNFQKCFAILKLYQPKVDNSAVGTSKKSDMAEVKDWKAIRVDLVITPFEQYAYALLGWTGSKQFRRDLRRYAEEERGMLLDNHALYDLKERIFLKAGSEEEIFAHLGLDYVEPWERNA

SEQ ID NO: 3005 - DNA, 1182 bp, synthetic construct
  misc_feature 1..1182: note = Variant of terminal deoxynucleotidyl transferase
  source 1..1182: mol_type = other DNA
atgcatcaccaccatcatcatgggggttctggtcatccgccgagcaataccccggagaaggaggtgccgagcgttatcgcccgtccggttagtcagtacgcgtgccagcgcaagaccacgctgaataactacaacaaaaagttcaccgacgcgctggagatcatggccgagaactacaaatttaaagagaacctgatcgcgtgtctggaagccaagcgcgccgcgagtatttttaaatacctgccgttcgaggttaccagcatgaaagacatccaaggtctgccgtgcattaccgaccaggttcgtgacgtgatcgaggagatcatcgaagaaggcgagagcagccgtgttaaagaaatcctcaatgacgagcgctacaaggcctttaagcagttcaccagcgtgttcggtgtgggcgtgaaaaccgcggaaaagtggtaccgtatgggcctccgtacggttgaagaagcaaaggccagtaagagtctgaagctgagcaagatgcagaaggcgggcttcctgtattacgaggatctggcgagcatggttagtaaagaagaagccgatgccgttacgctcatcgtgaaggaaacggtgcgtacctttctgccggatgcgctggtgaccatcaccggcggtttccgccgtggcaaacctatgggccacgacgttgactttctgatcacgaacccgggccgcaaagaggatgacgagctgctccacaaagtggttgatctgctcaagaagcaaggtctgctgctgtacgaagacatcaaagagagcacgttcgtggaggggcaagtcccaagtcataaaatcgacgccatggacaacttccagaagtgcttcgccattctcaagctgtaccagccgaaggtggataacagtgcggttgggacgagtaagaaaagtgacatggctgaggttaaggattggaaagcgattcgtgtggatctggtgatcacgccatttgagcagttcgcctatgcgctgctcggttggacgggcagcaaacaatttcgtcgcgatctgcgtgcatatgcggaggaagagcgcggcatgattctcgacaaccatgccctctacgacctgaaaaagcgcatctttctgaaagcgggcagcgaagaagagattttcgcgcatctgggtctggattatgtggagccgtgggaacgcaacgcg

SEQ ID NO: 3006 - protein, 394 aa, synthetic construct
  REGION 1..394: note = Variant of terminal deoxynucleotidyl transferase
MHHHHHHGGSGHPPSNTPEKEVPSVIARPVSQYACQRKTTLNNYNKKFTDALEIMAENYKFKENLIACLEAKRAASIFKYLPFEVTSMKDIQGLPCITDQVRDVIEEIIEEGESSRVKEILNDERYKAFKQFTSVFGVGVKTAEKWYRMGLRTVEEAKASKSLKLSKMQKAGFLYYEDLASMVSKEEADAVTLIVKETVRTFLPDALVTITGGFRRGKPMGHDVDFLITNPGRKEDDELLHKVVDLLKKQGLLLYEDIKESTFVEGQVPSHKIDAMDNFQKCFAILKLYQPKVDNSAVGTSKKSDMAEVKDWKAIRVDLVITPFEQFAYALLGWTGSKQFRRDLRAYAEEERGMILDNHALYDLKKRIFLKAGSEEEIFAHLGLDYVEPWERNA

SEQ ID NO: 3007 - DNA, 1182 bp, synthetic construct
  misc_feature 1..1182: note = Variant of terminal deoxynucleotidyl transferase
  source 1..1182: mol_type = other DNA
atgcatcaccaccatcatcatgggggttctggtcatccgccgagcaataccccggagaaggaggtgccgagcgttatcgcccgtccggttagtcagtacgcgtgccagcgcaagaccacgctgaataactacaacaaaaagttcaccgacgcgctggagatcatggccgagaactacaaatttaaagagaacctgatcgcgtgtctggaagccaagcgcgccgcgagtatttttaaaagtctgccgttcgaggttaccagcatgaaagacatccaaggtctgccgtgcattaccgaccaggttcgtgacgtgatcgaggagatcatcgaagagggcgagagcagccgtgttaaagaaatcctcaatgacgagcgctacaaggcctttaagcagttcaccagcgtgttcggtgtgggcgtgaaaaccgcggaaaagtggtaccgtatgggcctccgtacggttgaagaagcaaaggccagtaagagtctgaagctgagcaagatgcagaaggcgggcttcctgtattacgaggatctggcgagcatggttagtaaagaagaagccgatgccgttacgctcatcgtgaaggaaacggtgcgtacctttctgccggatgcgctggtgaccatcaccggcggtttccgccgtggcaaacctatgggccacgacgttgactttctgatcacgaacccgggccgcaaagaggatgacgagctgctccacaaagtggttgatctgctcaagaagcaaggtctgctgctgtacgaagacatcaaagagagcacgttcgtggaggggcaagtcccaagtcataaaatcgacgccatggacaacttccagaagtgcttcgccattctcaagctgtaccagccgaaggtggataacagtgcggttgggacgagtaagaaaagtgacatggctgaggttaaggattggaaagcgattcgtgtggatctggtgatcacgccatttgagcagttcgcctatgcgctgctcggttggacgggcagcaaacaatttcgtcgcgatctgcgtatttatgcggaggaagagcgcggcatgattctcgacaaccatgccctctacgacctgaaagagcgcatctttctgaaagcgggcagcgaagaagagattttcgcgcatctgggtctggattatgtggagccgtgggaacgcaacgcg

SEQ ID NO: 3008 - protein, 394 aa, synthetic construct
  REGION 1..394: note = Variant of terminal deoxynucleotidyl transferase
MHHHHHHGGSGHPPSNTPEKEVPSVIARPVSQYACQRKTTLNNYNKKFTDALEIMAENYKFKENLIACLEAKRAASIFKSLPFEVTSMKDIQGLPCITDQVRDVIEEIIEEGESSRVKEILNDERYKAFKQFTSVFGVGVKTAEKWYRMGLRTVEEAKASKSLKLSKMQKAGFLYYEDLASMVSKEEADAVTLIVKETVRTFLPDALVTITGGFRRGKPMGHDVDFLITNPGRKEDDELLHKVVDLLKKQGLLLYEDIKESTFVEGQVPSHKIDAMDNFQKCFAILKLYQPKVDNSAVGTSKKSDMAEVKDWKAIRVDLVITPFEQFAYALLGWTGSKQFRRDLRIYAEEERGMILDNHALYDLKERIFLKAGSEEEIFAHLGLDYVEPWERNA

SEQ ID NO: 3009 - DNA, 1182 bp, synthetic construct
  misc_feature 1..1182: note = Variant of terminal deoxynucleotidyl transferase
  source 1..1182: mol_type = other DNA
atgcatcaccaccatcatcatgggggttctggtcatccgccgagcaataccccggagaaggaggtgccgagcgttatcgcccgtccggttagtcagtacgcgtgccagcgcaagaccacgctgaataactacaacaaaaagttcaccgacgcgctggagatcatggccgagaactacaaatttaaagagaacctgatcgcgtgtctggaagccaagcgcgccgcgagtatttttaaatatctgccgttcgaggttaccagcatgaaagacatccaaggtctgccgtgcattaccgaccaggttcgtgacgtgatcgaggagatcatcgaagagggcgagagcagccgtgttaaagaaatcctcaatgacgagcgctacaaggcctttaagcagttcaccagcgtgttcggtgtgggcgtgaaaaccgcggaaaagtggtaccgtatgggcctccgtacggttgaagaagcaaaggccagtaagagtctgaagctgagcaagatgcagaaggcgggcttcctgtattacgaggatctggcgagcatggttagtaaagaagaagccgatgccgttacgctcatcgtgaaggaaacggtgcgtacctttctgccggatgcgctggtgaccatcaccggcggtttccgccgtggcaaacctatgggccacgacgttgactttctgatcacgaacccgggccgcaaagaggatgacgagctgctccacaaagtggttgatctgctcaagaagcaaggtctgctgctgtacgaagacatcaaagagagcacgttcgtggaggggcaagtcccaagtcataaaatcgacgccatggacaacttccagaagtgcttcgccattctcaagctgtaccagccgaaggtggataacagtgcggttgggacgagtaagaaaagtgacatggctgaggttaaggattggaaagcggttcgtgtggatctggtgatcacgccatttgagcagttcgcctatgcgctgctcggttggacgggcagcaaacaatttcgtcgcgatctgcgtgtatatgcggaggaagagcgcggcatgattctcgacaaccatgccctctacgacctgaaaaagcgcatctttctgaaagcgggcagcgaagaagagattttcgcgcatctgggtctggattatgtggagccgtgggaacgcaacgcg

SEQ ID NO: 3010 - protein, 394 aa, synthetic construct
  REGION 1..394: note = Variant of terminal deoxynucleotidyl transferase
MHHHHHHGGSGHPPSNTPEKEVPSVIARPVSQYACQRKTTLNNYNKKFTDALEIMAENYKFKENLIACLEAKRAASIFKYLPFEVTSMKDIQGLPCITDQVRDVIEEIIEEGESSRVKEILNDERYKAFKQFTSVFGVGVKTAEKWYRMGLRTVEEAKASKSLKLSKMQKAGFLYYEDLASMVSKEEADAVTLIVKETVRTFLPDALVTITGGFRRGKPMGHDVDFLITNPGRKEDDELLHKVVDLLKKQGLLLYEDIKESTFVEGQVPSHKIDAMDNFQKCFAILKLYQPKVDNSAVGTSKKSDMAEVKDWKAVRVDLVITPFEQFAYALLGWTGSKQFRRDLRVYAEEERGMILDNHALYDLKKRIFLKAGSEEEIFAHLGLDYVEPWERNA

SEQ ID NO: 3011 - DNA, 1182 bp, synthetic construct
  misc_feature 1..1182: note = Variant of terminal deoxynucleotidyl transferase
  source 1..1182: mol_type = other DNA
atgcatcaccaccatcatcatgggggttctggtcatccgccgagcaataccccggagaaggaggtgccgagcgttatcgcccgtccggttagtcagtacgcgtgccagcgcaagaccacgctgaataactacaacaaaaagttcaccgacgcgctggagatcatggccgagaactacaaatttaaagagaacctgatcgcgtgtctggaagccaagcgcgccgcgagtatttttaaatatctgccgttcgaggttaccagcatgaaagacatccaaggtctgccgtgcattaccgaccaggttcgtgacgtgatcgaggagatcatcgaagagggcgagagcagccgtgttaaagaaatcctcaatgacgagcgctacaaggcctttaagcagttcaccagcgtgttcggtgtgggcgtgaaaaccgcggaaaagtggtaccgtatgggcctccgtacggttgaagaagcaaaggccagtaagagtctgaagctgagcaagatgcagaaggcgggcttcctgtattacgaggatctggcgagcatggttagtaaagaagaagccgatgccgttacgctcatcgtgaaggaaacggtgcgtacctttctgccggatgcgctggtgaccatcaccggcggtttccgccgtggcaaacctatgggccacgacgttgactttctgatcacgaacccgggccgcaaagaggatgacgagctgctccacaaagtggttgatctgctcaagaagcaaggtctgctgctgtacgaagacatcaaagagagcacgttcgtggaggggcaagtcccaagtcataaaatcgacgccatggacaacttccagaagtgcttcgccattctcaagctgtaccagccgaaggtggataacagtgcggttgggacgagtaagaaaagtgacatggctgaggttaaggattggaaagcggttcgtgtggatctggtgatcacgccattcgagcagtacgcctatgcgctgctcggttggacgggcagcaaacaatttcgtcgcgatctgcgtgcatatgcggaggaagagcgcggcatgatcctcgacaaccatgccctctacgacctgaaaaagcgcatctttctgaaagcgggcagcgaagaagagattttcgcgcatctgggtctggattatgtggagccgtgggaacgcaacgcg

SEQ ID NO: 3012 - protein, 394 aa, synthetic construct
  REGION 1..394: note = Variant of terminal deoxynucleotidyl transferase
MHHHHHHGGSGHPPSNTPEKEVPSVIARPVSQYACQRKTTLNNYNKKFTDALEIMAENYKFKENLIACLEAKRAASIFKYLPFEVTSMKDIQGLPCITDQVRDVIEEIIEEGESSRVKEILNDERYKAFKQFTSVFGVGVKTAEKWYRMGLRTVEEAKASKSLKLSKMQKAGFLYYEDLASMVSKEEADAVTLIVKETVRTFLPDALVTITGGFRRGKPMGHDVDFLITNPGRKEDDELLHKVVDLLKKQGLLLYEDIKESTFVEGQVPSHKIDAMDNFQKCFAILKLYQPKVDNSAVGTSKKSDMAEVKDWKAVRVDLVITPFEQYAYALLGWTGSKQFRRDLRAYAEEERGMILDNHALYDLKKRIFLKAGSEEEIFAHLGLDYVEPWERNA

SEQ ID NO: 3013 - DNA, 1182 bp, synthetic construct
  misc_feature 1..1182: note = Variant of terminal deoxynucleotidyl transferase
  source 1..1182: mol_type = other DNA
atgcatcaccaccatcatcatgggggttctggtcatccgccgagcaataccccggagaaggaggtgccgagcgttatcgcccgtccggttagtcagtacgcgtgccagcgcaagaccacgctgaataactacaacaaaaagttcaccgacgcgctggagatcatggccgagaactacaaatttaaagagaacctgatcgcgtgtctggaagccaagcgcgccgcgagtatttttaaaagtctgccgttcgaggttaccagcatgaaagacatccaaggtctgccgtgcattaccgaccaggttcgtgacgtgatcgaggagatcatcgaacgcggcgagagcagccgtgttaaagaaatcctcaatgacgagcgctacaaggcctttaagcagttcaccagcgtgttcggtgtgggcgtgaaaaccgcggaaaagtggtaccgtatgggcctccgtacggttgaagaagcaaaggccagtaagagtctgaagctgagcaagatgcagaaggcgggcttcctgtattacgaggatctggcgagcatggttagtaaagaagaagccgatgccgttacgctcatcgtgaaggaaacggtgcgtacctttctgccggatgcgctggtgaccatcaccggcggtttccgccgtggcaaacctatgggccacgacgttgactttctgatcacgaacccgggccgcaaagaggatgacgagctgctccacaaagtggttgatctgctcaagaagcaaggtctgctgctgtacgaagacatcaaagagagcacgttcgtggaggggcaaatcccaagtcataaaatcgacgccatggacaacttccagaagtgcttcgccattctcaagctgtaccagccgaaggtggataacagtgcggttgggacgagtaagaaaagtgacatggctgaggttaaggattggaaagcgattcgtgtggatctggtgatcacgccatgggagcagttcgcctatgcgctgctcggttggacgggcagcaaacaatttcgtcgcgatctgcgtatttatgcggaggaagagcgcggcatgattctcgacaaccatgccctctacgacctgaaagagcgcatctttctgaaagcgagtagcgaagaagagattttcgcgcatctgggtctggattatgtggagccgtgggaacgcaacgcg

SEQ ID NO: 3014 - protein, 394 aa, synthetic construct
  REGION 1..394: note = Variant of terminal deoxynucleotidyl transferase
MHHHHHHGGSGHPPSNTPEKEVPSVIARPVSQYACQRKTTLNNYNKKFTDALEIMAENYKFKENLIACLEAKRAASIFKSLPFEVTSMKDIQGLPCITDQVRDVIEEIIERGESSRVKEILNDERYKAFKQFTSVFGVGVKTAEKWYRMGLRTVEEAKASKSLKLSKMQKAGFLYYEDLASMVSKEEADAVTLIVKETVRTFLPDALVTITGGFRRGKPMGHDVDFLITNPGRKEDDELLHKVVDLLKKQGLLLYEDIKESTFVEGQIPSHKIDAMDNFQKCFAILKLYQPKVDNSAVGTSKKSDMAEVKDWKAIRVDLVITPWEQFAYALLGWTGSKQFRRDLRIYAEEERGMILDNHALYDLKERIFLKASSEEEIFAHLGLDYVEPWERNA

SEQ ID NO: 3015 - DNA, 1182 bp, synthetic construct
  misc_feature 1..1182: note = Variant of terminal deoxynucleotidyl transferase
  source 1..1182: mol_type = other DNA
atgcatcaccaccatcatcatgggggttctggtcatccgccgagcaataccccggagaaggaggtgccgagcgttatcgcccgtccggttagtcagtacgcgtgccagcgcaagaccacgctgaataactacaacaaaaagttcaccgacgcgctggagatcctggccgagaactacaaatttaaagagaacctgatcgcgtgtctggaagccaagcgcgccgcgagtatttttaaatatctgccgttcgaggttaccagcatgaaagacatccaaggtctgccgtgcattaccgaccaggttcgtgacgtgatcgaggagatcatcgaacgcggcgagagcagccgtgttaaagaaatcctcaatgacgagcgctacaaggcctttaagcagttcaccagcgtgttcggtgtgggcgtgaaaaccgcggaaaagtggtaccgtatgggcctccgtacggttgaagcagcaaaggccagtaagagtctgaagctgagcaagatgcagaaggcgggcttcctgtattacgaggatctggcgagcatggttagtaaagaagaagccgatgccgttacgctcatcgtgaaggaaacggtgcgtacctttctgccggatgcgctggtgaccatcaccggcggtttccgccgtggcaaacctatgggccacgacgttgactttctgatcacgaacccgggccgcaaagaggatgacgagctgctccacaaagtggttgatctgctcaagaagcaaggtctgctgctgtacgaagacatcaaagagagcacgttcgtggaggggcaagtcccaagtcataaaatcgacgccatggacaacttccagaagtgcttcgccattctcaagctgtaccagccgaaggtggataacagtgcggttgggacgagtaagaaaagtgacatggctgaggttaaggattggaaagcggttcgtgtggatctggtgatcacgccatgggagcagttcgcctatgcgctgctcggttggacgggcagcaaacaatttcgtcgcgatctgcgtcgctatgcggaggaagagcgcggcatgattctcgacaaccatgccctctacgacctgaaagagcgcatctttctgaaagcgagtagcgaagaagagattttcgcgcatctgggtctggattatgtggagccgtgggaacgcaacgcg

SEQ ID NO: 3016 - protein, 394 aa, synthetic construct
  REGION 1..394: note = Variant of terminal deoxynucleotidyl transferase
MHHHHHHGGSGHPPSNTPEKEVPSVIARPVSQYACQRKTTLNNYNKKFTDALEILAENYKFKENLIACLEAKRAASIFKYLPFEVTSMKDIQGLPCITDQVRDVIEEIIERGESSRVKEILNDERYKAFKQFTSVFGVGVKTAEKWYRMGLRTVEAAKASKSLKLSKMQKAGFLYYEDLASMVSKEEADAVTLIVKETVRTFLPDALVTITGGFRRGKPMGHDVDFLITNPGRKEDDELLHKVVDLLKKQGLLLYEDIKESTFVEGQVPSHKIDAMDNFQKCFAILKLYQPKVDNSAVGTSKKSDMAEVKDWKAVRVDLVITPWEQFAYALLGWTGSKQFRRDLRRYAEEERGMILDNHALYDLKERIFLKASSEEEIFAHLGLDYVEPWERNA

SEQ ID NO: 3017 - DNA, 1182 bp, synthetic construct
  misc_feature 1..1182: note = Variant of terminal deoxynucleotidyl transferase
  source 1..1182: mol_type = other DNA
atgcatcaccaccatcatcatgggggttctggtcatccgccgagcaataccccggagaaggaggtgccgagcgttatcgcccgtccggttagtcagtacgcgtgccagcgcaagaccacgctgaataactacaacaaaaagttcaccgacgcgctggagatcatggccgagaactacaaatttaaagagaacctgatcgcgtgtctggaagccaagcgcgccgcgagtatttttaaatacctgccgttcgaggttaccagcatgaaagacatccaaggtctgccgtgcattaccgaccaggttcgtgacgtgatcgaggagatcatcgaagagggcgagagcagccgtgttaaagaaatcctcaatgacgagcgctacaaggcctttaagcagttcaccagcgtgttcggtgtgggcgtgaaaaccgcggaaaagtggtaccgtatgggcctccgtacggttgaagaagcaaaggccagtaagagtctgaagctgagcaagatgcagaaggcgggcttcctgtattacgaggatctggcgagcatggttagtaaagaagaagccgatgccgttacgctcatcgtgaaggaaacggtgcgtacctttctgccggatgcgctggtgaccatcaccggcggtttccgccgtggcaaacctatgggccacgacgttgactttctgatcacgaacccgggccgcaaagaggatgacgagctgctccacaaagtggttgatctgctcaagaagcaaggtctgctgctgtacgaagacatcaaagagagcacgttcgtggaggggcaaatcccaagtcataaaatcgacgccatggacaacttccagaagtgcttcgccattctcaagctgtaccagccgaaggtggataacagtgcggttgggacgagtaagaaaagtgacatggctgaggttaaggattggaaagcgattcgtgtggatctggtgatcacgccatgggagcagttcgcctatgcgctgctcggttggacgggcagcaaacaatttcgtcgcgatctgcgtgtatatgcggaggaagagcgcggcatgatcctcgacaaccatgccctctacgacctgaaaaagcgcatctttctgaaagcgggcagcgaagaagagattttcgcgcatctgggtctggattatgtggagccgtgggaacgcaacgcg

SEQ ID NO: 3018 - protein, 394 aa, synthetic construct
  REGION 1..394: note = Variant of terminal deoxynucleotidyl transferase
MHHHHHHGGSGHPPSNTPEKEVPSVIARPVSQYACQRKTTLNNYNKKFTDALEIMAENYKFKENLIACLEAKRAASIFKYLPFEVTSMKDIQGLPCITDQVRDVIEEIIEEGESSRVKEILNDERYKAFKQFTSVFGVGVKTAEKWYRMGLRTVEEAKASKSLKLSKMQKAGFLYYEDLASMVSKEEADAVTLIVKETVRTFLPDALVTITGGFRRGKPMGHDVDFLITNPGRKEDDELLHKVVDLLKKQGLLLYEDIKESTFVEGQIPSHKIDAMDNFQKCFAILKLYQPKVDNSAVGTSKKSDMAEVKDWKAIRVDLVITPWEQFAYALLGWTGSKQFRRDLRVYAEEERGMILDNHALYDLKKRIFLKAGSEEEIFAHLGLDYVEPWERNA

SEQ ID NO: 3019 - DNA, 1182 bp, synthetic construct
  misc_feature 1..1182: note = Variant of terminal deoxynucleotidyl transferase
  source 1..1182: mol_type = other DNA
atgcatcaccaccatcatcatgggggttctggtcatccgccgagcaataccccggagaaggaggtgccgagcgttatcgcccgtccggttagtcagtacgcgtgccagcgcaagaccacgctgaataactacaacaaaaagttcaccgacgcgctggagatcctggccgagaactacaaatttaaagagaacctgatcgcgtgtctggaagccaagcgcgccgcgagtatttttaaaagtctgccgttcgaggttaccagcatgaaagacatccaaggtctgccgtgcattaccgaccaggttcgtgacgtgatcgaggagatcatcgaagaaggcgagagcagccgtgttaaagaaatcctcaatgacgagcgctacaaggcctttaagcagttcaccagcgtgttcggtgtgggcgtgaaaaccgcggaaaagtggtaccgtatgggcctccgtacggttgaagaagcaaaggccagtaagagtctgaagctgagcaagatgcagaaggcgggcttccagtattacgaggatctggcgagcatggttagtaaagaagaagccgatgccgttacgctcatcgtgaaggaaacggtgcgtacctttctgccggatgcgctggtgaccatcaccggcggtttccgccgtggcaaacctatgggccacgacgttgactttctgatcacgaacccgggccgcaaagaggatgacgagctgctccacaaagtggttgatctgctcaagaagcaaggtctgctgctgtacgaagacatcaaagagagcacgttcgtggaggggcaaatcccaagtcataaaatcgacgccatggacaacttccagaagtgcttcgccattctcaagctgtaccagccgaaggtggataacagtgcggttgggacgagtaagaaaagtgacatggctgaggttaaggattggaaagcgatccgtgtggatctggtgatcacgccattcgagcagtacgcctatgcgctgctcggttggacgggcagcaaacaatttcgtcgcgatctgcgtcgctatgcggaggaagagcgcggcatgctgctcgacaaccatgccctctacgacctgaaagagcgcatctttctgaaagcgggcagcgaagaagagattttcgcgcatctgggtctggattatgtggagccgtgggaacgcaacgcg

SEQ ID NO: 3020 - protein, 394 aa, synthetic construct
  REGION 1..394: note = Variant of terminal deoxynucleotidyl transferase
MHHHHHHGGSGHPPSNTPEKEVPSVIARPVSQYACQRKTTLNNYNKKFTDALEILAENYKFKENLIACLEAKRAASIFKSLPFEVTSMKDIQGLPCITDQVRDVIEEIIEEGESSRVKEILNDERYKAFKQFTSVFGVGVKTAEKWYRMGLRTVEEAKASKSLKLSKMQKAGFQYYEDLASMVSKEEADAVTLIVKETVRTFLPDALVTITGGFRRGKPMGHDVDFLITNPGRKEDDELLHKVVDLLKKQGLLLYEDIKESTFVEGQIPSHKIDAMDNFQKCFAILKLYQPKVDNSAVGTSKKSDMAEVKDWKAIRVDLVITPFEQYAYALLGWTGSKQFRRDLRRYAEEERGMLLDNHALYDLKERIFLKAGSEEEIFAHLGLDYVEPWERNA

SEQ ID NO: 3021 - DNA, 1182 bp, synthetic construct
  misc_feature 1..1182: note = Variant of terminal deoxynucleotidyl transferase
  source 1..1182: mol_type = other DNA
atgcatcaccaccatcatcatgggggttctggtcatccgccgagcaataccccggagaaggaggtgccgagcgttatcgcccgtccggttagtcagtacgcgtgccagcgcaagaccacgctgaataactacaacaaaaagttcaccgacgcgctggagatcatggccgagaactacaaatttaaagagaacctgatcgcgtgtctggaagccaagcgcgccgcgagtatttttaaatatctgccgttcgaggttaccagcatgaaagacatccaaggtctgccgtgcattaccgacgattgccgtgacgtgatcgaggagatcatcgaagagggcgagagcagccgtgttaaagaaatcctcaatgacgagcgctacaaggcctttaagcagttcaccagcgtgttcggtgtgggcgtgaaaaccgcggaaaagtggtaccgtatgggcctccgtacggttgaagaagcaaaggccagtaagagtctgaagctgagcaagatgcagaaggcgggcttcctgtattacgaggatctggcgagcatggttagtaaagaagaagccgatgccgttacgctcatcgtgaaggaaacggtgcgtacctttctgccggatgcgctggtaaccatcgccggcggtttccgccgtggcaaacctatgggccacgacgttgactttctgatcacgaacccgggccgcaaagaggatgacgagctgctccacaaagtggttgatctgctcaagaagcaaggtctgctgctgtacgaagacatcaaagagagcacgttcgtggaggggcaactgccaagtcataaaatcgacgccatggaccacttccagaagtgcttcgccattctcaagctgtaccagccgaaggtggataacagtgcggttgggacgagtaagaaaagtgacatggctgaggttaaggattggaaagcgatccgtgtggatctggtgatcacgccattcgagcagtacgcctatgcgctgctcggttggacgggcagcggccaatttcgtcgcgatctgcgtcgctatgcggagctggagcgcgacatgatcctcgacaaccatgccctctacgacctgaaaaagcgcatctttctgaaagcgggcagcgaagaagagattttcgcgcatctgggtctggattatgtggagccgtgggaacgcaacgcg

SEQ ID NO: 3022 - protein, 394 aa, synthetic construct
  REGION 1..394: note = Variant of terminal deoxynucleotidyl transferase
MHHHHHHGGSGHPPSNTPEKEVPSVIARPVSQYACQRKTTLNNYNKKFTDALEIMAENYKFKENLIACLEAKRAASIFKYLPFEVTSMKDIQGLPCITDDCRDVIEEIIEEGESSRVKEILNDERYKAFKQFTSVFGVGVKTAEKWYRMGLRTVEEAKASKSLKLSKMQKAGFLYYEDLASMVSKEEADAVTLIVKETVRTFLPDALVTIAGGFRRGKPMGHDVDFLITNPGRKEDDELLHKVVDLLKKQGLLLYEDIKESTFVEGQLPSHKIDAMDHFQKCFAILKLYQPKVDNSAVGTSKKSDMAEVKDWKAIRVDLVITPFEQYAYALLGWTGSGQFRRDLRRYAELERDMILDNHALYDLKKRIFLKAGSEEEIFAHLGLDYVEPWERNA

SEQ ID NO: 3023 - DNA, 1182 bp, synthetic construct
  misc_feature 1..1182: note = Variant of terminal deoxynucleotidyl transferase
  source 1..1182: mol_type = other DNA
atgcatcaccaccatcatcatgggggttctggtcatccgccgagcaataccccggagaaggaggtgccgagcgttatcgcccgtccggttagtcagtacgcgtgccagcgcaagaccacgctgaataactacaacaaaaagttcaccgacgcgctggagatcatggccgagaactacaaatttaaagagaacctgatcgcgtgtctggaagccaagcgcgccgcgagtatttttaaaagtctgccgttcgaggttaccagcatgaaagacatccaaggtctgccgtgcattaccgaccaggttcgtgacgtgatcgaggagatcatcgaagagggcgagagcagccgtgttaaagaaatcctcaatgacgagcgctacaaggcctttaagcagttcaccagcgtgttcggtgtgggcgtgaaaaccgcggaaaagtggtaccgtatgggcctccgtacggttgaagaagcaaaggccagtaagagtctgaagctgagcaagatgcagaaggcgggcttcctgtattacgaggatctggcgagcatggttagtaaagaagaagccgatgccgttacgctcatcgtgaaggaaacggtgcgtacctttctgccggatgcgctggtgaccatcaccggcggtttccgccgtggcaaacctatgggccacgacgttgactttctgatcacgaacccgggccgcaaagaggatgacgagctgctccacaaagtggttgatctgctcaagaagcaaggtctgctgctgtacgaagacatcaaagagagcacgttcgtggaggggcaagtcccaagtcataaaatcgacgccatggacaacttccagaagtgcttcgccattctcaagctgtaccagccgaaggtggataacagtgcggttgggacgagtaagaaaagtgacatggctgaggttaaggattggaaagcgatccgtgtggatctggtgatcacgccattcgagcagtacgcctatgcgctgctcggttggacgggcagcaaacaatttcgtcgcgatctgcgtatttatgcggaggaagagcgcggcatgatcctcgacaaccatgccctctacgacctgaaaaagcgcatctttctgaaagcgggcagcgaagaagagattttcgcgcatctgggtctggattatgtggagccgtgggaacgcaacgcg

SEQ ID NO: 3024 - protein, 394 aa, synthetic construct
  REGION 1..394: note = Variant of terminal deoxynucleotidyl transferase
MHHHHHHGGSGHPPSNTPEKEVPSVIARPVSQYACQRKTTLNNYNKKFTDALEIMAENYKFKENLIACLEAKRAASIFKSLPFEVTSMKDIQGLPCITDQVRDVIEEIIEEGESSRVKEILNDERYKAFKQFTSVFGVGVKTAEKWYRMGLRTVEEAKASKSLKLSKMQKAGFLYYEDLASMVSKEEADAVTLIVKETVRTFLPDALVTITGGFRRGKPMGHDVDFLITNPGRKEDDELLHKVVDLLKKQGLLLYEDIKESTFVEGQVPSHKIDAMDNFQKCFAILKLYQPKVDNSAVGTSKKSDMAEVKDWKAIRVDLVITPFEQYAYALLGWTGSKQFRRDLRIYAEEERGMILDNHALYDLKKRIFLKAGSEEEIFAHLGLDYVEPWERNA

SEQ ID NO: 3025 - DNA, 1182 bp, synthetic construct
  misc_feature 1..1182: note = Variant of terminal deoxynucleotidyl transferase
  source 1..1182: mol_type = other DNA
atgcatcaccaccatcatcatgggggttctggtcatccgccgagcaataccccggagaaggaggtgccgagcgttatcgcccgtccggttagtcagtacgcgtgccagcgcaagaccacgctgaataactacaacaaaaagttcaccgacgcgctggagatcatggccgagaactacaaatttaaagagaacctgatcgcgtgtctggaagccaagcgcgccgcgagtatttttaaaagtctgccgttcgaggttaccagcatgaaagacatccaaggtctgccgtgcattaccgaccaggttcgtgacgtgatcgaggagatcatcgaagagggcgagagcagccgtgttaaagaaatcctcaatgacgagcgctacaaggcctttaagcagttcaccagcgtgttcggtgtgggcgtgaaaaccgcggaaaagtggtaccgtatgggcctccgtacggttgaagaagcaaaggccagtaagagtctgaagctgagcaagatgcagaaggcgggcttcctgtattacgaggatctggcgagcatggttagtaaagaagaagccgatgccgttacgctcatcgtgaaggaaacggtgcgtacctttctgccggatgcgctggtgaccatcaccggcggtttccgccgtggcaaacctatgggccacgacgttgactttctgatcacgaacccgggccgcaaagaggatgacgagctgctccacaaagtggttgatctgctcaagaagcaaggtctgctgctgtacgaagacatcaaagagagcacgttcgtggaggggcaactgccaagtcataaaatcgacgccatggacaacttccagaagtgcttcgccattctcaagctgtaccagccgaaggtggataacagtgcggttgggacgagtaagaaaagtgacatggctgaggttaaggattggaaagcgattcgtgtggatctggtgatcacgccattcgagcagtacgcctatgcgctgctcggttggacgggcagcaaacaatttcgtcgcgatctgcgtgcatatgcggaggaagagcgcggcatgattctcgacaaccatgccctctacgacctgaaagagcgcatctttctgaaagcgggcagcgaagaagagattttcgcgcatctgggtctggattatgtggagccgtgggaacgcaacgcg

SEQ ID NO: 3026 - protein, 394 aa, synthetic construct
  REGION 1..394: note = Variant of terminal deoxynucleotidyl transferase
MHHHHHHGGSGHPPSNTPEKEVPSVIARPVSQYACQRKTTLNNYNKKFTDALEIMAENYKFKENLIACLEAKRAASIFKSLPFEVTSMKDIQGLPCITDQVRDVIEEIIEEGESSRVKEILNDERYKAFKQFTSVFGVGVKTAEKWYRMGLRTVEEAKASKSLKLSKMQKAGFLYYEDLASMVSKEEADAVTLIVKETVRTFLPDALVTITGGFRRGKPMGHDVDFLITNPGRKEDDELLHKVVDLLKKQGLLLYEDIKESTFVEGQLPSHKIDAMDNFQKCFAILKLYQPKVDNSAVGTSKKSDMAEVKDWKAIRVDLVITPFEQYAYALLGWTGSKQFRRDLRAYAEEERGMILDNHALYDLKERIFLKAGSEEEIFAHLGLDYVEPWERNA

SEQ ID NO: 3027 - DNA, 1182 bp, synthetic construct
  misc_feature 1..1182: note = Variant of terminal deoxynucleotidyl transferase
  source 1..1182: mol_type = other DNA
atgcatcaccaccatcatcatgggggttctggtcatccgccgagcaataccccggagaaggaggtgccgagcgttatcgcccgtccggttagtcagtacgcgtgccagcgcaagaccacgctgaataactacaacaaaaagttcaccgacgcgctggagatcatggccgagaactacaaatttaaagagaacctgatcgcgtgtctggaagccaagcgcgccgcgagtatttttaaatatctgccgttcgaggttaccagcatgaaagacatccaaggtctgccgtgcattaccgaccaggttcgtgacgtgatcgaggagatcatcgaagagggcgagagcagccgtgttaaagaaatcctcaatgacgagcgctacaaggcctttaagcagttcaccagcgtgttcggtgtgggcgtgaaaaccgcggaaaagtggtaccgtatgggcctccgtacggttgaagaagcaaaggccagtaagagtctgaagctgagcaagatgcagaaggcgggcttcctgtattacgaggatctggcgagcatggttagtaaagaagaagccgatgccgttacgctcatcgtgaaggaaacggtgcgtacctttctgccggatgcgctggtgaccatcaccggcggtttccgccgtggcaaacctatgggccacgacgttgactttctgatcacgaacccgggccgcaaagaggatgacgagctgctccacaaagtggttgatctgctcaagaagcaaggtctgctgctgtacgaagacatcaaagagagcacgttcgtggaggggcaactgccaagtcataaaatcgacgccatggacaacttccagaagtgcttcgccattctcaagctgtaccagccgaaggtggataacagtgcggttgggacgagtaagaaaagtgacatggctgaggttaaggattggaaagcgattcgtgtggatctggtgatcacgccattcgagcagttcgcctatgcgctgctcggttggacgggcagcaaacaatttcgtcgcgatctgcgtgcatatgcggaggaagagcgcggcatgatcctcgacaaccatgccctctacgacctgaaaaagcgcatctttctgaaagcgggcagcgaagaagagattttcgcgcatctgggtctggattatgtggagccgtgggaacgcaacgcg

SEQ ID NO: 3028 - protein, 394 aa, synthetic construct
  REGION 1..394: note = Variant of terminal deoxynucleotidyl transferase
MHHHHHHGGSGHPPSNTPEKEVPSVIARPVSQYACQRKTTLNNYNKKFTDALEIMAENYKFKENLIACLEAKRAASIFKYLPFEVTSMKDIQGLPCITDQVRDVIEEIIEEGESSRVKEILNDERYKAFKQFTSVFGVGVKTAEKWYRMGLRTVEEAKASKSLKLSKMQKAGFLYYEDLASMVSKEEADAVTLIVKETVRTFLPDALVTITGGFRRGKPMGHDVDFLITNPGRKEDDELLHKVVDLLKKQGLLLYEDIKESTFVEGQLPSHKIDAMDNFQKCFAILKLYQPKVDNSAVGTSKKSDMAEVKDWKAIRVDLVITPFEQFAYALLGWTGSKQFRRDLRAYAEEERGMILDNHALYDLKKRIFLKAGSEEEIFAHLGLDYVEPWERNA

SEQ ID NO: 3029 - DNA, 1182 bp, synthetic construct
  misc_feature 1..1182: note = Variant of terminal deoxynucleotidyl transferase
  source 1..1182: mol_type = other DNA
atgcatcaccaccatcatcatgggggttctggtcatccgccgagcaataccccggagaaggaggtgccgagcgttatcgcccgtccggttagtcagtacgcgtgccagcgcaagaccacgctgaataactacaacaaaaagttcaccgacgcgctggagatcatggccgagaactacaaatttaaagagaacctgatcgcgtgtcatgaagccaagcgcgccgcgagtatttttaaaagcctgccgttcgaggttaccagcatgaaagacatccaaggtctgccgtgcattaccgaccaggttcgtgacgtgatcgaggagatcatcgaagagggcgagagcagccgtgttaaagaaatcctcaatgacgagcgctacaaggcctttaagcagttcaccagcgtgttcggtgtgggcgtgaaaaccgcggaaaagtggtaccgtatgggcctccgtacggttgaagaagcaaaggccagtaagagtctgaagctgagcaagatgcagaaggcgggcttcctgtattacgaggatctggcgagcatggttagtaaagaagaagccgatgccgttacgctcatcgtgaaggaaacggtgcgtacctttgtgccggatgcgctggtgaccatcgccggcggtttccgccgtggcaaacctatgggccacgacgttgactttctgatcacgaacccgggccgcaaagaggatgacgagctgctccacaaagtggttgatctgctcaagaagcaaggtctgctgctgtacgaagacatcaaagagagcacgttcgtggaggggcaactgccaagtcataaaatcgacgccatggaccacttccagaagtgcttcgccattctcaagctgtaccagccgaaggtggataacagtgcggttgggacgagtaagaaaagtgacatggctgaggttaaggattggaaagcgatccgtgtggatctggtgatcacgccattcgagcagtacgcctatgcgctgctcggttggacgggcagcggccaatttcgtcgcgatctgcgtcgctatgcggaggaagagcgcggcatgatcctcgacaaccatgccctctacgacctgaaaaagcgcatctttctgaaagcgggcagcgaagaagagattttcgcgcatctgggtctggattatgtggagccgtgggaacgcaacgcg

SEQ ID NO: 3030 - protein, 394 aa, synthetic construct
  REGION 1..394: note = Variant of terminal deoxynucleotidyl transferase
MHHHHHHGGSGHPPSNTPEKEVPSVIARPVSQYACQRKTTLNNYNKKFTDALEIMAENYKFKENLIACHEAKRAASIFKSLPFEVTSMKDIQGLPCITDQVRDVIEEIIEEGESSRVKEILNDERYKAFKQFTSVFGVGVKTAEKWYRMGLRTVEEAKASKSLKLSKMQKAGFLYYEDLASMVSKEEADAVTLIVKETVRTFVPDALVTIAGGFRRGKPMGHDVDFLITNPGRKEDDELLHKVVDLLKKQGLLLYEDIKESTFVEGQLPSHKIDAMDHFQKCFAILKLYQPKVDNSAVGTSKKSDMAEVKDWKAIRVDLVITPFEQYAYALLGWTGSGQFRRDLRRYAEEERGMILDNHALYDLKKRIFLKAGSEEEIFAHLGLDYVEPWERNA

SEQ ID NO: 3031 - DNA, 1182 bp, synthetic construct
  misc_feature 1..1182: note = Variant of terminal deoxynucleotidyl transferase
  source 1..1182: mol_type = other DNA
atgcatcaccaccatcatcatgggggttctggtcatccgccgagcaataccccggagaaggaggtgccgagcgttatcgcccgtccggttagtcagtacgcgtgccagcgcaagaccacgctgaataactacaacaaaaagttcaccgacgcgctggagatcatggccgagaactacaaatttaaagagaacctgatcgcgtgtctggaagccaagcgcgccgcgagtatttttaaatatctgccgttcgaggttaccagcatgaaagacatccaaggtctgccgtgcattaccgaccaggttcgtgacgtgatcgaggagatcatcgaagaaggcgagagcagccgtgttaaagaaatcctcaatgacgagcgctacaaggcctttaagcagttcaccagcgtgttcggtgtgggcgtgaaaaccgcggaaaagtggtaccgtatgggcctccgtacggttgaagaagcaaaggccagtaagagtctgaagctgagcaagatgcagaaggcgggcttcctgtattacgaggatctggcgagcatggttagtaaagaagaagccgatgccgttacgctcatcgtgaaggaaacggtgcgtacctttctgccggatgcgctggtgaccatcaccggcggtttccgccgtggcaaacctatgggccacgacgttgactttctgatcacgaacccgggccgcaaagaggatgacgagctgctccacaaagtggttgatctgctcaagaagcaaggtctgctgctgtacgaagacatcaaagagagcacgttcgtggaggggcaagtcccaagtcataaaatcgacgccatggacaacttccagaagtgcttcgccattctcaagctgtaccagccgaaggtggataacagtgcggttgggacgagtaagaaaagtgacatggctgaggttaaggattggaaagcgatccgtgtggatctggtgatcacgccatttgagcagtacgcctatgcgctgctcggttggacgggcagcaaacaatttcgtcgcgatctgcgtgtatatgcggaggaagagcgcggcatgatcctcgacaaccatgccctctacgacctgaaaaagcgcatctttctgaaagcgggcagcgaagaagagattttcgcgcatctgggtctggattatgtggagccgtgggaacgcaacgcg

SEQ ID NO: 3032 - protein, 394 aa, synthetic construct
  REGION 1..394: note = Variant of terminal deoxynucleotidyl transferase
MHHHHHHGGSGHPPSNTPEKEVPSVIARPVSQYACQRKTTLNNYNKKFTDALEIMAENYKFKENLIACLEAKRAASIFKYLPFEVTSMKDIQGLPCITDQVRDVIEEIIEEGESSRVKEILNDERYKAFKQFTSVFGVGVKTAEKWYRMGLRTVEEAKASKSLKLSKMQKAGFLYYEDLASMVSKEEADAVTLIVKETVRTFLPDALVTITGGFRRGKPMGHDVDFLITNPGRKEDDELLHKVVDLLKKQGLLLYEDIKESTFVEGQVPSHKIDAMDNFQKCFAILKLYQPKVDNSAVGTSKKSDMAEVKDWKAIRVDLVITPFEQYAYALLGWTGSKQFRRDLRVYAEEERGMILDNHALYDLKKRIFLKAGSEEEIFAHLGLDYVEPWERNA

SEQ ID NO: 3033 - DNA, 1182 bp, synthetic construct
  misc_feature 1..1182: note = Variant of terminal deoxynucleotidyl transferase
  source 1..1182: mol_type = other DNA
atgcatcaccaccatcatcatgggggttctggtcatccgccgagcaataccccggagaaggaggtgccgagcgttatcgcccgtccggttagtcagtacgcgtgccagcgcaagaccacgctgaataactacaacaaaaagttcaccgacgcgctggagatcatggccgagaactacaaatttaaagagaacctgatcgcgtgtctggaagccaagcgcgccgcgagtatttttaaatatctgccgttcgaggttaccagcatgaaagacatccaaggtctgccgtgcattaccgaccaggttcgtgacgtgatcgaggagatcatcgaagagggcgagagcagccgtgttaaagaaatcctcaatgacgagcgctacaaggcctttaagcagttcaccagcgtgttcggtgtgggcgtgaaaaccgcggaaaagtggtaccgtatgggcctccgtacggttgaagaagcaaaggccagtaagagtctgaagctgagcaagatgcagaaggcgggcttcctgtattacgaggatctggcgagcatggttagtaaagaagaagccgatgccgttacgctcatcgtgaaggaaacggtgcgtacctttctgccggatgcgctggtgaccatcaccggcggtttccgccgtggcaaacctatgggccacgacgttgactttctgatcacgaacccgggccgcaaagaggatgacgagctgctccacaaagtggttgatctgctcaagaagcaaggtctgctgctgtacgaagacatcaaagagagcacgttcgtggaggggcaactgccaagtcataaaatcgacgccatggacaacttccagaagtgcttcgccattctcaagctgtaccagccgaaggtggataacagtgcggttgggacgagtaagaaaagtgacatggctgaggttaaggattggaaagcggttcgtgtggatctggtgatcacgccatgggagcagttcgcctatgcgctgctcggttggacgggcagcaaacaatttcgtcgcgatctgcgtcgctatgcggaggaagagcgcggcatgctgctcgacaaccatgccctctacgacctgaaagagcgcatctttctgaaagcgggcagcgaagaagagattttcgcgcatctgggtctggattatgtggagccgtgggaacgcaacgcg

SEQ ID NO: 3034 - protein, 394 aa, synthetic construct
  REGION 1..394: note = Variant of terminal deoxynucleotidyl transferase
MHHHHHHGGSGHPPSNTPEKEVPSVIARPVSQYACQRKTTLNNYNKKFTDALEIMAENYKFKENLIACLEAKRAASIFKYLPFEVTSMKDIQGLPCITDQVRDVIEEIIEEGESSRVKEILNDERYKAFKQFTSVFGVGVKTAEKWYRMGLRTVEEAKASKSLKLSKMQKAGFLYYEDLASMVSKEEADAVTLIVKETVRTFLPDALVTITGGFRRGKPMGHDVDFLITNPGRKEDDELLHKVVDLLKKQGLLLYEDIKESTFVEGQLPSHKIDAMDNFQKCFAILKLYQPKVDNSAVGTSKKSDMAEVKDWKAVRVDLVITPWEQFAYALLGWTGSKQFRRDLRRYAEEERGMLLDNHALYDLKERIFLKAGSEEEIFAHLGLDYVEPWERNA

SEQ ID NO: 3035 - DNA, 1182 bp, synthetic construct
  misc_feature 1..1182: note = Variant of terminal deoxynucleotidyl transferase
  source 1..1182: mol_type = other DNA
atgcatcaccaccatcatcatgggggttctggtcatccgccgagcaataccccggagaaggaggtgccgagcgttatcgcccgtccggttagtcagtacgcgtgccagcgcaagaccacgctgaataactacaacaaaaagttcaccgacgcgctggagatcatggccgagaactacaaatttaaagagaacctgatcgcgtgtctggaagccaagcgcgccgcgagtatttttaaatatctgccgttcgaggttaccagcatgaaagacatccaaggtctgccgtgcattaccgaccaggttcgtgacgtgatcgaggagatcatcgaagagggcgagagcagccgtgttaaagaaatcctcaatgacgagcgctacaaggcctttaagcagttcaccagcgtgttcggtgtgggcgtgaaaaccgcggaaaagtggtaccgtatgggcctccgtacggttgaagaagcaaaggccagtaagagtctgaagctgagcaagatgcagaaggcgggcttcctgtattacgaggatctggcgagcatggttagtaaagaagaagccgatgccgttacgctcatcgtgaaggaaacggtgcgtacctttctgccggatgcgctggtgaccatcaccggcggtttccgccgtggcaaacctatgggccacgacgttgactttctgatcacgaacccgggccgcaaagaggatgacgagctgctccacaaagtggttgatctgctcaagaagcaaggtctgctgctgtacgaagacatcaaagagagcacgttcgtggaggggcaactgccaagtcataaaatcgacgccatggacaacttccagaagtgcttcgccattctcaagctgtaccagccgaaggtggataacagtgcggttgggacgagtaagaaaagtgacatggctgaggttaaggattggaaagcgattcgtgtggatctggtgatcacgccatgggagcagtacgcctatgcgctgctcggttggacgggcagcaaacaatttcgtcgcgatctgcgtatttatgcggaggaagagcgcggcatgctgctcgacaaccatgccctctacgacctgaaagagcgcatctttctgaaagcgggcagcgaagaagagattttcgcgcatctgggtctggattatgtggagccgtgggaacgcaacgcg

SEQ ID NO: 3036 - protein, 394 aa, synthetic construct
  REGION 1..394: note = Variant of terminal deoxynucleotidyl transferase
MHHHHHHGGSGHPPSNTPEKEVPSVIARPVSQYACQRKTTLNNYNKKFTDALEIMAENYKFKENLIACLEAKRAASIFKYLPFEVTSMKDIQGLPCITDQVRDVIEEIIEEGESSRVKEILNDERYKAFKQFTSVFGVGVKTAEKWYRMGLRTVEEAKASKSLKLSKMQKAGFLYYEDLASMVSKEEADAVTLIVKETVRTFLPDALVTITGGFRRGKPMGHDVDFLITNPGRKEDDELLHKVVDLLKKQGLLLYEDIKESTFVEGQLPSHKIDAMDNFQKCFAILKLYQPKVDNSAVGTSKKSDMAEVKDWKAIRVDLVITPWEQYAYALLGWTGSKQFRRDLRIYAEEERGMLLDNHALYDLKERIFLKAGSEEEIFAHLGLDYVEPWERNA

SEQ ID NO: 3037 - DNA, 1182 bp, synthetic construct
  misc_feature 1..1182: note = Variant of terminal deoxynucleotidyl transferase
  source 1..1182: mol_type = other DNA
atgcatcaccaccatcatcatgggggttctggtcatccgccgagcaataccccggagaaggaggtgccgagcgttatcgcccgtccggttagtcagtacgcgtgccagcgcaagaccacgctgaataactacaacaaaaagttcaccgacgcgctggagatcatggccgagaactacaaatttaaagagaacctgatcgcgtgtctggaagccaagcgcgccgcgagtatttttaaatatctgccgttcgaggttaccagcatgaaagacatccaaggtctgccgtgcattaccgaccaggttcgtgacgtgatcgaggagatcatcgaagaaggcgagagcagccgtgttaaagaaatcctcaatgacgagcgctacaaggcctttaagcagttcaccagcgtgttcggtgtgggcgtgaaaaccgcggaaaagtggtaccgtatgggcctccgtacggttgaagaagcaaaggccagtaagagtctgaagctgagcaagatgcagaaggcgggcttcctgtattacgaggatctggcgagcatggttagtaaagaagaagccgatgccgttacgctcatcgtgaaggaaacggtgcgtacctttctgccggatgcgctggtgaccatcaccggcggtttccgccgtggcaaacctatgggccacgacgttgactttctgatcacgaacccgggccgcaaagaggatgacgagctgctccacaaagtggttgatctgctcaagaagcaaggtctgctgctgtacgaagacatcaaagagagcacgttcgtggaggggcaaatcccaagtcataaaatcgacgccatggacaacttccagaagtgcttcgccattctcaagctgtaccagccgaaggtggataacagtgcggttgggacgagtaagaaaagtgacatggctgaggttaaggattggaaagcggttcgtgtggatctggtgatcacgccatttgagcagtacgcctatgcgctgctcggttggacgggcagcaaacaatttcgtcgcgatctgcgtcgctatgcggaggaagagcgcggcatgctgctcgacaaccatgccctctacgacctgaaaaagcgcatctttctgaaagcgggcagcgaagaagagattttcgcgcatctgggtctggattatgtggagccgtgggaacgcaacgcg

SEQ ID NO: 3038 - protein, 394 aa, synthetic construct
  REGION 1..394: note = Variant of terminal deoxynucleotidyl transferase
MHHHHHHGGSGHPPSNTPEKEVPSVIARPVSQYACQRKTTLNNYNKKFTDALEIMAENYKFKENLIACLEAKRAASIFKYLPFEVTSMKDIQGLPCITDQVRDVIEEIIEEGESSRVKEILNDERYKAFKQFTSVFGVGVKTAEKWYRMGLRTVEEAKASKSLKLSKMQKAGFLYYEDLASMVSKEEADAVTLIVKETVRTFLPDALVTITGGFRRGKPMGHDVDFLITNPGRKEDDELLHKVVDLLKKQGLLLYEDIKESTFVEGQIPSHKIDAMDNFQKCFAILKLYQPKVDNSAVGTSKKSDMAEVKDWKAVRVDLVITPFEQYAYALLGWTGSKQFRRDLRRYAEEERGMLLDNHALYDLKKRIFLKAGSEEEIFAHLGLDYVEPWERNA

SEQ ID NO: 3039 - DNA, 1182 bp, synthetic construct
  misc_feature 1..1182: note = Variant of terminal deoxynucleotidyl transferase
  source 1..1182: mol_type = other DNA
atgcatcaccaccatcatcatgggggttctggtcatccgccgagcaataccccggagaaggaggtgccgagcgttatcgcccgtccggttagtcagtacgcgtgccagcgcaagaccacgctgaataactacaacaaaaagttcaccgacgcgctggagatcatggccgagaactacaaatttaaagagaacctgatcgcgtgtctggaagccaagcgcgccgcgagtatttttaaaagtctgccgttcgaggttaccagcatgaaagacatccaaggtctgccgtgcattaccgaccaggttcgtgacgtgatcgaggagatcatcgaagaaggcgagagcagccgtgttaaagaaatcctcaatgacgagcgctacaaggcctttaagcagttcaccagcgtgttcggtgtgggcgtgaaaaccgcggaaaagtggtaccgtatgggcctccgtacggttgaagaagcaaaggccagtaagagtctgaagctgagcaagatgcagaaggcgggcttcctgtattacgaggatctggcgagcatggttagtaaagaagaagccgatgccgttacgctcatcgtgaaggaaacggtgcgtacctttctgccggatgcgctggtgaccatcaccggcggtttccgccgtggcaaacctatgggccacgacgttgactttctgatcacgaacccgggccgcaaagaggatgacgagctgctccacaaagtggttgatctgctcaagaagcaaggtctgctgctgtacgaagacatcaaagagagcacgttcgtggaggggcaactgccaagtcataaaatcgacgccatggacaacttccagaagtgcttcgccattctcaagctgtaccagccgaaggtggataacagtgcggttgggacgagtaagaaaagtgacatggctgaggttaaggattggaaagcggttcgtgtggatctggtgatcacgccattcgagcagtacgcctatgcgctgctcggttggacgggcagcaaacaatttcgtcgcgatctgcgtgcatatgcggaggaagagcgcggcatgatcctcgacaaccatgccctctacgacccgaaaaagcgcatctttctgaaagcgagtagcgaagaagagattttcgcgcatctgggtctggattatgtggagccgtgggaacgcaacgcg

SEQ ID NO: 3040 - protein, 394 aa, synthetic construct
  REGION 1..394: note = Variant of terminal deoxynucleotidyl transferase
MHHHHHHGGSGHPPSNTPEKEVPSVIARPVSQYACQRKTTLNNYNKKFTDALEIMAENYKFKENLIACLEAKRAASIFKSLPFEVTSMKDIQGLPCITDQVRDVIEEIIEEGESSRVKEILNDERYKAFKQFTSVFGVGVKTAEKWYRMGLRTVEEAKASKSLKLSKMQKAGFLYYEDLASMVSKEEADAVTLIVKETVRTFLPDALVTITGGFRRGKPMGHDVDFLITNPGRKEDDELLHKVVDLLKKQGLLLYEDIKESTFVEGQLPSHKIDAMDNFQKCFAILKLYQPKVDNSAVGTSKKSDMAEVKDWKAVRVDLVITPFEQYAYALLGWTGSKQFRRDLRAYAEEERGMILDNHALYDPKKRIFLKASSEEEIFAHLGLDYVEPWERNA

SEQ ID NO: 3041 - DNA, 1182 bp, synthetic construct
  misc_feature 1..1182: note = Variant of terminal deoxynucleotidyl transferase
  source 1..1182: mol_type = other DNA
atgcatcaccaccatcatcatgggggttctggtcatccgccgagcaataccccggagaaggaggtgccgagcgttatcgcccgtccggttagtcagtacgcgtgccagcgcaagaccacgctgaataactacaacaaaaagttcaccgacgcgctggagatcatggccgagaactacaaatttaaagagaacctgatcgcgtgtctggaagccaagcgcgccgcgagtatttttaaatacctgccgttcgaggttaccagcatgaaagacatccaaggtctgccgtgcattaccgaccaggttcgtgacgtgatcgaggagatcatcgaagaaggcgagagcagccgtgttaaagaaatcctcaatgacgagcgctacaaggcctttaagcagttcaccagcgtgttcggtgtgggcgtgaaaaccgcggaaaagtggtaccgtatgggcctccgtacggttgaagaagcaaaggccagtaagagtctgaagctgagcaagatgcagaaggcgggcttcctgtattacgaggatctggcgagcatggttagtaaagaagaagccgatgccgttacgctcatcgtgaaggaaacggtgcgtacctttctgccggatgcgctggtgaccatcaccggcggtttccgccgtggcaaacctatgggccacgacgttgactttctgatcacgaacccgggccgcaaagaggatgacgagctgctccacaaagtggttgatctgctcaagaagcaaggtctgctgctgtacgaagacatcaaagagagcacgttcgtggaggggcaaatcccaagtcataaaatcgacgccatggacaacttccagaagtgcttcgccattctcaagctgtaccagccgaaggtggataacagtgcggttgggacgagtaagaaaagtgacatggctgaggttaaggattggaaagcgatccgtgtggatctggtgatcacgccattcgagcagtacgcctatgcgctgctcggttggacgggcagcaaacaatttcgtcgcgatctgcgtcgctatgcggaggaagagcgcggcatgatcctcgacaaccatgccctctacgacctgaaaaagcgcatctttctgaaagcgggcagcgaagaagagattttcgcgcatctgggtctggattatgtggagccgtgggaacgcaacgcg

SEQ ID NO: 3042 - protein, 394 aa, synthetic construct
  REGION 1..394: note = Variant of terminal deoxynucleotidyl transferase
MHHHHHHGGSGHPPSNTPEKEVPSVIARPVSQYACQRKTTLNNYNKKFTDALEIMAENYKFKENLIACLEAKRAASIFKYLPFEVTSMKDIQGLPCITDQVRDVIEEIIEEGESSRVKEILNDERYKAFKQFTSVFGVGVKTAEKWYRMGLRTVEEAKASKSLKLSKMQKAGFLYYEDLASMVSKEEADAVTLIVKETVRTFLPDALVTITGGFRRGKPMGHDVDFLITNPGRKEDDELLHKVVDLLKKQGLLLYEDIKESTFVEGQIPSHKIDAMDNFQKCFAILKLYQPKVDNSAVGTSKKSDMAEVKDWKAIRVDLVITPFEQYAYALLGWTGSKQFRRDLRRYAEEERGMILDNHALYDLKKRIFLKAGSEEEIFAHLGLDYVEPWERNA

SEQ ID NO: 3043 - DNA, 1182 bp, synthetic construct
  misc_feature 1..1182: note = Variant of terminal deoxynucleotidyl transferase
  source 1..1182: mol_type = other DNA
atgcatcaccaccatcatcatgggggttctggtcatccgccgagcaataccccggagaaggaggtgccgagcgttatcgcccgtccggttagtcagtacgcgtgccagcgcaagaccacgctgaataactacaacaaaaagttcaccgacgcgctggagatcctggccgagaactacaaatttaaagagaacctgatcgcgtgtctggaagccaagcgcgccgcgagtatttttaaatacctgccgttcgaggttaccagcatgaaagacatccaaggtctgccgtgcattaccgaccaggttcgtgacgtgatcgaggagatcatcgaagaaggcgagagcagccgtgttaaagaaatcctcaatgacgagcgctacaaggcctttaagcagttcaccagcgtgttcggtgtgggcgtgaaaaccgcggaaaagtggtaccgtatgggcctccgtacggttgaagaagcaaaggccagtaagagtctgaagctgagcaagatgcagaaggcgggcttcctgtattacgaggatctggcgagcatggttagtaaagaagaagccgatgccgttacgctcatcgtgaaggaaacggtgcgtacctttctgccggatgcgctggtgaccatcaccggcggtttccgccgtggcaaacctatgggccacgacgttgactttctgatcacgaacccgggccgcaaagaggatgacgagctgctccacaaagtggttgatctgctcaagaagcaaggtctgctgctgtacgaagacatcaaagagagcacgttcgtggaggggcaagtcccaagtcataaaatcgacgccatggacaacttccagaagtgcttcgccattctcaagctgtaccagccgaaggtggataacagtgcggttgggacgagtaagaaaagtgacatggctgaggttaaggattggaaagcgattcgtgtggatctggtgatcacgccatgggagcagtacgcctatgcgctgctcggttggacgggcagcaaacaatttcgtcgcgatctgcgtcgctatgcggaggaagagcgcggcatgatcctcgacaaccatgccctctacgacctgaaagagcgcatctttctgaaagcgggcagcgaagaagagattttcgcgcatctgggtctggattatgtggagccgtgggaacgcaacgcg

SEQ ID NO: 3044 - protein, 394 aa, synthetic construct
  REGION 1..394: note = Variant of terminal deoxynucleotidyl transferase
MHHHHHHGGSGHPPSNTPEKEVPSVIARPVSQYACQRKTTLNNYNKKFTDALEILAENYKFKENLIACLEAKRAASIFKYLPFEVTSMKDIQGLPCITDQVRDVIEEIIEEGESSRVKEILNDERYKAFKQFTSVFGVGVKTAEKWYRMGLRTVEEAKASKSLKLSKMQKAGFLYYEDLASMVSKEEADAVTLIVKETVRTFLPDALVTITGGFRRGKPMGHDVDFLITNPGRKEDDELLHKVVDLLKKQGLLLYEDIKESTFVEGQVPSHKIDAMDNFQKCFAILKLYQPKVDNSAVGTSKKSDMAEVKDWKAIRVDLVITPWEQYAYALLGWTGSKQFRRDLRRYAEEERGMILDNHALYDLKERIFLKAGSEEEIFAHLGLDYVEPWERNA

SEQ ID NO: 3045 - DNA, 1182 bp, synthetic construct
  misc_feature 1..1182: note = Variant of terminal deoxynucleotidyl transferase
  source 1..1182: mol_type = other DNA
atgcatcaccaccatcatcatgggggttctggtcatccgccgagcaataccccggagaaggaggtgccgagcgttatcgcccgtccggttagtcagtacgcgtgccagcgcaagaccacgctgaataactacaacaaaaagttcaccgacgcgctggagatcatggccgagaactacaaatttaaagagaacctgatcgcgtgtctggaagccaagcgcgccgcgagtatttttaaaagtctgccgttcgaggttaccagcatgaaagacatccaaggtctgccgtgcattaccgaccaggttcgtgacgtgatcgaggagatcatcgaagaaggcgagagcagccgtgttaaagaaatcctcaatgacgagcgctacaaggcctttaagcagttcaccagcgtgttcggtgtgggcgtgaaaaccgcggaaaagtggtaccgtatgggcctccgtacggttgaagaagcaaaggccagtaagagtctgaagctgagcaagatgcagaaggcgggcttcctgtattacgaggatctggcgagcatggttagtaaagaagaagccgatgccgttacgctcatcgtgaaggaaacggtgcgtacctttctgccggatgcgctggtgaccatcaccggcggtttccgccgtggcaaacctatgggccacgacgttgactttctgatcacgaacccgggccgcaaagaggatgacgagctgctccacaaagtggttgatctgctcaagaagcaaggtctgctgctgtacgaagacatcaaagagagcacgttcgtggaggggcaagtcccaagtcataaaatcgacgccatggacaacttccagaagtgcttcgccattctcaagctgtaccagccgaaggtggataacagtgcggttgggacgagtaagaaaagtgacatggctgaggttaaggattggaaagcgatccgtgtggatctggtgatcacgccatttgagcagtacgcctatgcgctgctcggttggacgggcagcaaacaatttcgtcgcgatctgcgtgtatatgcggaggaagagcgcggcatgattctcgacaaccatgccctctacgacctgaaaaagcgcatctttctgaaagcgggcagcgaagaagagattttcgcgcatctgggtctggattatgtggagccgtgggaacgcaacgcg

SEQ ID NO: 3046 - protein, 394 aa, synthetic construct
  REGION 1..394: note = Variant of terminal deoxynucleotidyl transferase
MHHHHHHGGSGHPPSNTPEKEVPSVIARPVSQYACQRKTTLNNYNKKFTDALEIMAENYKFKENLIACLEAKRAASIFKSLPFEVTSMKDIQGLPCITDQVRDVIEEIIEEGESSRVKEILNDERYKAFKQFTSVFGVGVKTAEKWYRMGLRTVEEAKASKSLKLSKMQKAGFLYYEDLASMVSKEEADAVTLIVKETVRTFLPDALVTITGGFRRGKPMGHDVDFLITNPGRKEDDELLHKVVDLLKKQGLLLYEDIKESTFVEGQVPSHKIDAMDNFQKCFAILKLYQPKVDNSAVGTSKKSDMAEVKDWKAIRVDLVITPFEQYAYALLGWTGSKQFRRDLRVYAEEERGMILDNHALYDLKKRIFLKAGSEEEIFAHLGLDYVEPWERNA

SEQ ID NO: 3047 - DNA, 1182 bp, synthetic construct
  misc_feature 1..1182: note = Variant of terminal deoxynucleotidyl transferase
  source 1..1182: mol_type = other DNA
atgcatcaccaccatcatcatgggggttctggtcatccgccgagcaataccccggagaaggaggtgccgagcgttatcgcccgtccggttagtcagtacgcgtgccagcgcaagaccacgctgaataactacaacaaaaagttcaccgacgcgctggagatcctggccgagaactacaaatttaaagagaacctgatcgcgtgtctggaagccaagcgcgccgcgagtatttttaaatacctgccgttcgaggttaccagcatgaaagacatccaaggtctgccgtgcattaccgaccaggttcgtgacgtgatcgaggagatcatcgaacgcggcgagagcagccgtgttaaagaaatcctcaatgacgagcgctacaaggcctttaagcagttcaccagcgtgttcggtgtgggcgtgaaaaccgcggaaaagtggtaccgtatgggcctccgtacggttgaagaagcaaaggccagtaagagtctgaagctgagcaagatgcagaaggcgggcttcctgtattacgaggatctggcgagcatggttagtaaagaagaagccgatgccgttacgctcatcgtgaaggaaacggtgcgtacctttctgccggatgcgctggtgaccatcaccggcggtttccgccgtggcaaacctatgggccacgacgttgactttctgatcacgaacccgggccgcaaagaggatgacgagctgctccacaaagtggttgatctgctcaagaagcaaggtctgctgctgtacgaagacatcaaagagagcacgttcgtggaggggcaagtcccaagtcataaaatcgacgccatggacaacttccagaagtgcttcgccattctcaagctgtaccagccgaaggtggataacagtgcggttgggacgagtaagaaaagtgacatggctgaggttaaggattggaaagcgattcgtgtggatctggtgatcacgccattcgagcagtacgcctatgcgctgctcggttggacgggcagcaaacaatttcgtcgcgatctgcgtatttatgcggaggaagagcgcggcatgctgctcgacaaccatgccctctacgacctgaaaaagcgcatctttctgaaagcgggcagcgaagaagagattttcgcgcatctgggtctggattatgtggagccgtgggaacgcaacgcg

SEQ ID NO: 3048 - protein, 394 aa, synthetic construct
  REGION 1..394: note = Variant of terminal deoxynucleotidyl transferase
MHHHHHHGGSGHPPSNTPEKEVPSVIARPVSQYACQRKTTLNNYNKKFTDALEILAENYKFKENLIACLEAKRAASIFKYLPFEVTSMKDIQGLPCITDQVRDVIEEIIERGESSRVKEILNDERYKAFKQFTSVFGVGVKTAEKWYRMGLRTVEEAKASKSLKLSKMQKAGFLYYEDLASMVSKEEADAVTLIVKETVRTFLPDALVTITGGFRRGKPMGHDVDFLITNPGRKEDDELLHKVVDLLKKQGLLLYEDIKESTFVEGQVPSHKIDAMDNFQKCFAILKLYQPKVDNSAVGTSKKSDMAEVKDWKAIRVDLVITPFEQYAYALLGWTGSKQFRRDLRIYAEEERGMLLDNHALYDLKKRIFLKAGSEEEIFAHLGLDYVEPWERNA

SEQ ID NO: 3049 - DNA, 1182 bp, synthetic construct
  misc_feature 1..1182: note = Variant of terminal deoxynucleotidyl transferase
  source 1..1182: mol_type = other DNA
atgcatcaccaccatcatcatgggggttctggtcatccgccgagcaataccccggagaaggaggtgccgagcgttatcgcccgtccggttagtcagtacgcgtgccagcgcaagaccacgctgaataactacaacaaaaagttcaccgacgcgctggagatcatggccgagaactacaaatttaaagagaacctgatcgcgtgtctggaagccaagcgcgccgcgagtatttttaaatatctgccgttcgaggttaccagcatgaaagacatccaaggtctgccgtgcattaccgaccaggttcgtgacgtgatcgaggagatcatcgaacgcggcgagagcagccgtgttaaagaaatcctcaatgacgagcgctacaaggcctttaagcagttcaccagcgtgttcggtgtgggcgtgaaaaccgcggaaaagtggtaccgtatgggcctccgtacggttgaagaagcaaaggccagtaagagtctgaagctgagcaagatgcagaaggcgggcttcctgtattacgaggatctggcgagcatggttagtaaagaagaagccgatgccgttacgctcatcgtgaaggaaacggtgcgtacctttctgccggatgcgctggtgaccatcaccggcggtttccgccgtggcaaacctatgggccacgacgttgactttctgatcacgaacccgggccgcaaagaggatgacgagctgctccacaaagtggttgatctgctcaagaagcaaggtctgctgctgtacgaagacatcaaagagagcacgttcgtggaggggcaaatcccaagtcataaaatcgacgccatggacaacttccagaagtgcttcgccattctcaagctgtaccagccgaaggtggataacagtgcggttgggacgagtaagaaaagtgacatggctgaggttaaggattggaaagcgatccgtgtggatctggtgatcacgccattcgagcagtacgcctatgcgctgctcggttggacgggcagcaaacaatttcgtcgcgatctgcgtcgctatgcggaggaagagcgcggcatgatcctcgacaaccatgccctctacgacctgaaaaagcgcatctttctgaaagcgggcagcgaagaagagattttcgcgcatctgggtctggattatgtggagccgtgggaacgcaacgcg

SEQ ID NO: 3050 - protein, 394 aa, synthetic construct
  REGION 1..394: note = Variant of terminal deoxynucleotidyl transferase
MHHHHHHGGSGHPPSNTPEKEVPSVIARPVSQYACQRKTTLNNYNKKFTDALEIMAENYKFKENLIACLEAKRAASIFKYLPFEVTSMKDIQGLPCITDQVRDVIEEIIERGESSRVKEILNDERYKAFKQFTSVFGVGVKTAEKWYRMGLRTVEEAKASKSLKLSKMQKAGFLYYEDLASMVSKEEADAVTLIVKETVRTFLPDALVTITGGFRRGKPMGHDVDFLITNPGRKEDDELLHKVVDLLKKQGLLLYEDIKESTFVEGQIPSHKIDAMDNFQKCFAILKLYQPKVDNSAVGTSKKSDMAEVKDWKAIRVDLVITPFEQYAYALLGWTGSKQFRRDLRRYAEEERGMILDNHALYDLKKRIFLKAGSEEEIFAHLGLDYVEPWERNA

SEQ ID NO: 3051 - DNA, 1182 bp, synthetic construct
  misc_feature 1..1182: note = Variant of terminal deoxynucleotidyl transferase
  source 1..1182: mol_type = other DNA
atgcatcaccaccatcatcatgggggttctggtcatccgccgagcaataccccggagaaggaggtgccgagcgttatcgcccgtccggttagtcagtacgcgtgccagcgcaagaccacgctgaataactacaacaaaaagttcaccgacgcgctggagatcatggccgagaactacaaatttgaagagaacctgcaggcgtgtcatgaagccaagcgcgccgcgagtatttttaaatatctgccgttcgaggttaccagcatgaaagacatccaaggtctgccgtgcattaccgaccaggttcgtgacgtgatcgaggagatcatcgaagagggcgagagcagccgtgttaaagaaatcctcaatgacgagcgctacaaggcctttaagcagttcaccagcgtgttcggtgtgggcgtgaaaacctcggaaaagtggtaccgtatgggcctccgtacggttgaagaagcaaaggccagtaagagtctgaagctgagcaagatgcagaaggcgggcttcctgtattacgaggatctggcgagcatggttagtaaagaagaagccgatgccgttacgctcatcgtgaaggaaacggtgcgtacctttctgccggatgcgctggtgaccatcaccggcggtttccgccgtggcaaacctatgggccacgacgttgactttctgatcacgaacccgggccgcaaagaggatgacgagctgctccacaaagtggttgatctgctcaagaagcaaggtctgctgctgtacgaagacatcaaagagagcacgttcgtggaggggcaactgccaagtcataaaatcgacgccatggacaacttccagaagtgcttcgccattctcaagctgtaccagccgaaggtggataacagtgcggttgggacgagtaagaaaagtgacatggctgaggttaaggattggaaagcgatccgtgtggatctggtgatcacgccattcgagcagtacgcctatgcgctgctcggttggacgggcagcggccaatttcgtcgcgatctgcgtcgctatgcggaggaagagcgcgacatgatcctcgacaaccatgccctctacgacctgaaaaagcgcatctttctgaaagcgggcagcgaagaagagattttcgcgcatctgggtctggattatgtggagccgtgggaacgcaacgcg

SEQ ID NO: 3052 - protein, 394 aa, synthetic construct
  REGION 1..394: note = Variant of terminal deoxynucleotidyl transferase
MHHHHHHGGSGHPPSNTPEKEVPSVIARPVSQYACQRKTTLNNYNKKFTDALEIMAENYKFEENLQACHEAKRAASIFKYLPFEVTSMKDIQGLPCITDQVRDVIEEIIEEGESSRVKEILNDERYKAFKQFTSVFGVGVKTSEKWYRMGLRTVEEAKASKSLKLSKMQKAGFLYYEDLASMVSKEEADAVTLIVKETVRTFLPDALVTITGGFRRGKPMGHDVDFLITNPGRKEDDELLHKVVDLLKKQGLLLYEDIKESTFVEGQLPSHKIDAMDNFQKCFAILKLYQPKVDNSAVGTSKKSDMAEVKDWKAIRVDLVITPFEQYAYALLGWTGSGQFRRDLRRYAEEERDMILDNHALYDLKKRIFLKAGSEEEIFAHLGLDYVEPWERNA

SEQ ID NO: 3053 - DNA, 1182 bp, synthetic construct
  misc_feature 1..1182: note = Variant of terminal deoxynucleotidyl transferase
  source 1..1182: mol_type = other DNA
atgcatcaccaccatcatcatgggggttctggtcatccgccgagcaataccccggagaaggaggtgccgagcgttatcgcccgtccggttagtcagtacgcgtgccagcgcaagaccacgctgaataactacaacaaaaagttcaccgacgcgctggagatcatggccgagaactacaaatttaaagagaacctgatcgcgtgtctggaagccaagcgcgccgcgagtatttttaaaagtctgccgttcgaggttaccagcatgaaagacatccaaggtctgccgtgcattaccgaccaggttcgtgacgtgatcgaggagatcatcgaacgcggcgagagcagccgtgttaaagaaatcctcaatgacgagcgctacaaggcctttaagcagttcaccagcgtgttcggtgtgggcgtgaaaaccgcggaaaagtggtaccgtatgggcctccgtacggttgaagaagcaaaggccagtaagagtctgaagctgagcaagatgcagaaggcgggcttcctgtattacgaggatctggcgagcatggttagtaaagaagaagccgatgccgttacgctcatcgtgaaggaaacggtgcgtacctttctgccggatgcgctggtgaccatcaccggcggtttccgccgtggcaaacctatgggccacgacgttgactttctgatcacgaacccgggccgcaaagaggatgacgagctgctccacaaagtggttgatctgctcaagaagcaaggtctgctgctgtacgaagacatcaaagagagcacgttcgtggaggggcaactgccaagtcataaaatcgacgccatggacaacttccagaagtgcttcgccattctcaagctgtaccagccgaaggtggataacagtgcggttgggacgagtaagaaaagtgacatggctgaggttaaggattggaaagcgattcgtgtggatctggtgatcacgccattcgagcagtacgcctatgcgctgctcggttggacgggcagcaaacaatttcgtcgcgatctgcgtcgttatgcggaggaagagcgcggcatgctgctcgacaaccatgccctctacgacctgaaagagcgcatctttctgaaagcgggtagcgaagaagagattttcgcgcatctgggtctggattatgtggagccgtgggaacgcaacgcg

SEQ ID NO: 3054 - protein, 394 aa, synthetic construct
  REGION 1..394: note = Variant of terminal deoxynucleotidyl transferase
MHHHHHHGGSGHPPSNTPEKEVPSVIARPVSQYACQRKTTLNNYNKKFTDALEIMAENYKFKENLIACLEAKRAASIFKSLPFEVTSMKDIQGLPCITDQVRDVIEEIIERGESSRVKEILNDERYKAFKQFTSVFGVGVKTAEKWYRMGLRTVEEAKASKSLKLSKMQKAGFLYYEDLASMVSKEEADAVTLIVKETVRTFLPDALVTITGGFRRGKPMGHDVDFLITNPGRKEDDELLHKVVDLLKKQGLLLYEDIKESTFVEGQLPSHKIDAMDNFQKCFAILKLYQPKVDNSAVGTSKKSDMAEVKDWKAIRVDLVITPFEQYAYALLGWTGSKQFRRDLRRYAEEERGMLLDNHALYDLKERIFLKAGSEEEIFAHLGLDYVEPWERNA

SEQ ID NO: 3055 - DNA, 1182 bp, synthetic construct
  misc_feature 1..1182: note = Variant of terminal deoxynucleotidyl transferase
  source 1..1182: mol_type = other DNA
atgcatcaccaccatcatcatgggggttctggtcatccgccgagcaataccccggagaaggaggtgccgagcgttatcgcccgtccggttagtcagtacgcgtgccagcgcaagaccacgctgaataactacaacaaaaagttcaccgacgcgctggagatcctggccgagaactacaaatttaaagagaacctgatcgcgtgtctggaagccaagcgcgccgcgagtatttttaaatacctgccgttcgaggttaccagcatgaaagacatccaaggtctgccgtgcattaccgaccaggttcgtgacgtgatcgaggagatcatcgaacgcggcgagagcagccgtgttaaagaaatcctcaatgacgagcgctacaaggcctttaagcagttcaccagcgtgttcggtgtgggcgtgaaaaccgcggaaaagtggtaccgtatgggcctccgtacggttgaagaagcaaaggccagtaagagtctgaagctgagcaagatgcagaaggcgggcttcctgtattacgaggatctggcgagcatggttagtaaagaagaagccgatgccgttacgctcatcgtgaaggaaacggtgcgtacctttctgccggatgcgctggtgaccatcaccggcggtttccgccgtggcaaacctatgggccacgacgttgactttctgatcacgaacccgggccgcaaagaggatgacgagctgctccacaaagtggttgatctgctcaagaagcaaggtctgctgctgtacgaagacatcaaagagagcacgttcgtggaggggcaagtcccaagtcataaaatcgacgccatggacaacttccagaagtgcttcgccattctcaagctgtaccagccgaaggtggataacagtgcggttgggacgagtaagaaaagtgacatggctgaggttaaggattggaaagcgatccgtgtggatctggtgatcacgccattcgagcagtacgcctatgcgctgctcggttggacgggcagcaaacaatttcgtcgcgatctgcgtcgctatgcggaggaagagcgcggcatgctgctcgacaaccatgccctctacgacctgaaagagcgcatctttctgaaagcgggcagcgaagaagagattttcgcgcatctgggtctggattatgtggagccgtgggaacgcaacgcg

SEQ ID NO: 3056 - protein, 394 aa, synthetic construct
  REGION 1..394: note = Variant of terminal deoxynucleotidyl transferase
MHHHHHHGGSGHPPSNTPEKEVPSVIARPVSQYACQRKTTLNNYNKKFTDALEILAENYKFKENLIACLEAKRAASIFKYLPFEVTSMKDIQGLPCITDQVRDVIEEIIERGESSRVKEILNDERYKAFKQFTSVFGVGVKTAEKWYRMGLRTVEEAKASKSLKLSKMQKAGFLYYEDLASMVSKEEADAVTLIVKETVRTFLPDALVTITGGFRRGKPMGHDVDFLITNPGRKEDDELLHKVVDLLKKQGLLLYEDIKESTFVEGQVPSHKIDAMDNFQKCFAILKLYQPKVDNSAVGTSKKSDMAEVKDWKAIRVDLVITPFEQYAYALLGWTGSKQFRRDLRRYAEEERGMLLDNHALYDLKERIFLKAGSEEEIFAHLGLDYVEPWERNA

SEQ ID NO: 3057 - DNA, 1182 bp, synthetic construct
  misc_feature 1..1182: note = Variant of terminal deoxynucleotidyl transferase
  source 1..1182: mol_type = other DNA
atgcatcaccaccatcatcatgggggttctggtcatccgccgagcaataccccggagaaggaggtgccgagcgttatcgcccgtccggttagtcagtacgcgtgccagcgcaagaccacgctgaataactacaacaaaaagttcaccgacgcgctggagatcctggccgagaactacaaatttaaagagaacctgatcgcgtgtctggaagccaagcgcgccgcgagtatttttaaatacctgccgttcgaggttaccagcatgaaagacatccaaggtctgccgtgcattaccgaccaggttcgtgacgtgatcgaggagatcatcgaagagggcgagagcagccgtgttaaagaaatcctcaatgacgagcgctacaaggcctttaagcagttcaccagcgtgttcggtgtgggcgtgaaaaccgcggaaaagtggtaccgtatgggcctccgtacggttgaagaagcaaaggccagtaagagtctgaagctgagcaagatgcagaaggcgggcttcctgtattacgaggatctggcgagcatggttagtaaagaagaagccgatgccgttacgctcatcgtgaaggaaacggtgcgtacctttctgccggatgcgctggtgaccatcaccggcggtttccgccgtggcaaacctatgggccacgacgttgactttctgatcacgaacccgggccgcaaagaggatgacgagctgctccacaaagtggttgatctgctcaagaagcaaggtctgctgctgtacgaagacatcaaagagagcacgttcgtggaggggcaagtcccaagtcataaaatcgacgccatggacaacttccagaagtgcttcgccattctcaagctgtaccagccgaaggtggataacagtgcggttgggacgagtaagaaaagtgacatggctgaggttaaggattggaaagcgattcgtgtggatctggtgatcacgccattcgagcagtacgcctatgcgctgctcggttggacgggcagcaaacaatttcgtcgcgatctgcgtcgctatgcggaggaagagcgcggcatgattctcgacaaccatgccctctacgacctgaaaaagcgcatctttctgaaagcgggcagcgaagaagagattttcgcgcatctgggtctggattatgtggagccgtgggaacgcaacgcg

SEQ ID NO: 3058 - protein, 394 aa, synthetic construct
  REGION 1..394: note = Variant of terminal deoxynucleotidyl transferase
MHHHHHHGGSGHPPSNTPEKEVPSVIARPVSQYACQRKTTLNNYNKKFTDALEILAENYKFKENLIACLEAKRAASIFKYLPFEVTSMKDIQGLPCITDQVRDVIEEIIEEGESSRVKEILNDERYKAFKQFTSVFGVGVKTAEKWYRMGLRTVEEAKASKSLKLSKMQKAGFLYYEDLASMVSKEEADAVTLIVKETVRTFLPDALVTITGGFRRGKPMGHDVDFLITNPGRKEDDELLHKVVDLLKKQGLLLYEDIKESTFVEGQVPSHKIDAMDNFQKCFAILKLYQPKVDNSAVGTSKKSDMAEVKDWKAIRVDLVITPFEQYAYALLGWTGSKQFRRDLRRYAEEERGMILDNHALYDLKKRIFLKAGSEEEIFAHLGLDYVEPWERNA

SEQ ID NO: 3059 - DNA, 1182 bp, synthetic construct
  misc_feature 1..1182: note = Variant of terminal deoxynucleotidyl transferase
  source 1..1182: mol_type = other DNA
atgcatcaccaccatcatcatgggggttctggtcatccgccgagcaataccccggagaaggaggtgccgagcgttatcgcccgtccggttagtcagtacgcgtgccagcgcaagaccacgctgaataactacaacaaaaagttcaccgacgcgctggagatcctggccgagaactacaaatttaaagagaacctgatcgcgtgtctggaagccaagcgcgccgcgagtatttttaaatatctgccgttcgaggttaccagcatgaaagacatccaaggtctgccgtgcattaccgaccaggttcgtgacgtgatcgaggagatcatcgaagaaggcgagagcagccgtgttaaagaaatcctcaatgacgagcgctacaaggcctttaagcagttcaccagcgtgttcggtgtgggcgtgaaaaccgcggaaaagtggtaccgtatgggcctccgtacggttgaagaagcaaaggccagtaagagtctgaagctgagcaagatgcagaaggcgggcttcctgtattacgaggatctggcgagcatggttagtaaagaagaagccgatgccgttacgctcatcgtgaaggaaacggtgcgtacctttctgccggatgcgctggtgaccatcaccggcggtttccgccgtggcaaacctatgggccacgacgttgactttctgatcacgaacccgggccgcaaagaggatgacgagctgctccacaaagtggttgatctgctcaagaagcaaggtctgctgctgtacgaagacatcaaagagagcacgttcgtggaggggcaaatcccaagtcataaaatcgacgccatggacaacttccagaagtgcttcgccattctcaagctgtaccagccgaaggtggataacagtgcggttgggacgagtaagaaaagtgacatggctgaggttaaggattggaaagcgattcgtgtggatctggtgatcacgccattcgagcagtacgcctatgcgctgctcggttggacgggcagcaaacaatttcgtcgcgatctgcgtgtatatgcggaggaagagcgcggcatgctgctcgacaaccatgccctctacgacctgaaaaagcgcatctttctgaaagcgggcagcgaagaagagattttcgcgcatctgggtctggattatgtggagccgtgggaacgcaacgcg

SEQ ID NO: 3060 - protein, 394 aa, synthetic construct
  REGION 1..394: note = Variant of terminal deoxynucleotidyl transferase
MHHHHHHGGSGHPPSNTPEKEVPSVIARPVSQYACQRKTTLNNYNKKFTDALEILAENYKFKENLIACLEAKRAASIFKYLPFEVTSMKDIQGLPCITDQVRDVIEEIIEEGESSRVKEILNDERYKAFKQFTSVFGVGVKTAEKWYRMGLRTVEEAKASKSLKLSKMQKAGFLYYEDLASMVSKEEADAVTLIVKETVRTFLPDALVTITGGFRRGKPMGHDVDFLITNPGRKEDDELLHKVVDLLKKQGLLLYEDIKESTFVEGQIPSHKIDAMDNFQKCFAILKLYQPKVDNSAVGTSKKSDMAEVKDWKAIRVDLVITPFEQYAYALLGWTGSKQFRRDLRVYAEEERGMLLDNHALYDLKKRIFLKAGSEEEIFAHLGLDYVEPWERNA

SEQ ID NO: 3061 - DNA, 1182 bp, synthetic construct
  misc_feature 1..1182: note = Variant of terminal deoxynucleotidyl transferase
  source 1..1182: mol_type = other DNA
atgcatcaccaccatcatcatgggggttctggtcatccgccgagcaataccccggagaaggaggtgccgagcgttatcgcccgtccggttagtcagtacgcgtgccagcgcaagaccacgctgaataactacaacaaaaagttcaccgacgcgctggagatcatggccgagaactacaaatttaaagagaacctgatcgcgtgtctggaagccaagcgcgccgcgagtatttttaaatatctgccgttcgaggttaccagcatgaaagacatccaaggtctgccgtgcattaccgaccaggttcgtgacgtgatcgaggagatcatcgaagaaggcgagagcagccgtgttaaagaaatcctcaatgacgagcgctacaaggcctttaagcagttcaccagcgtgttcggtgtgggcgtgaaaaccgcggaaaagtggtaccgtatgggcctccgtacggttgaagaagcaaaggccagtaagagtctgaagctgagcaagatgcagaaggcgggcttcctgtattacgaggatctggcgagcatggttagtaaagaagaagccgatgccgttacgctcatcgtgaaggaaacggtgcgtacctttctgccggatgcgctggtgaccatcaccggcggtttccgccgtggcaaacctatgggccacgacgttgactttctgatcacgaacccgggccgcaaagaggatgacgagctgctccacaaagtggttgatctgctcaagaagcaaggtctgctgctgtacgaagacatcaaagagagcacgttcgtggaggggcaaatcccaagtcataaaatcgacgccatggacaacttccagaagtgcttcgccattctcaagctgtaccagccgaaggtggataacagtgcggttgggacgagtaagaaaagtgacatggctgaggttaaggattggaaagcgattcgtgtggatctggtgatcacgccatgggagcagtacgcctatgcgctgctcggttggacgggcagcaaacaatttcgtcgcgatctgcgtcgttatgcggaggaagagcgcggcatgatcctcgacaaccatgccctctacgacctgaaaaagcgcatctttctgaaagcgggcagcgaagaagagattttcgcgcatctgggtctggattatgtggagccgtgggaacgcaacgcg

SEQ ID NO: 3062 - protein, 394 aa, synthetic construct
  REGION 1..394: note = Variant of terminal deoxynucleotidyl transferase
MHHHHHHGGSGHPPSNTPEKEVPSVIARPVSQYACQRKTTLNNYNKKFTDALEIMAENYKFKENLIACLEAKRAASIFKYLPFEVTSMKDIQGLPCITDQVRDVIEEIIEEGESSRVKEILNDERYKAFKQFTSVFGVGVKTAEKWYRMGLRTVEEAKASKSLKLSKMQKAGFLYYEDLASMVSKEEADAVTLIVKETVRTFLPDALVTITGGFRRGKPMGHDVDFLITNPGRKEDDELLHKVVDLLKKQGLLLYEDIKESTFVEGQIPSHKIDAMDNFQKCFAILKLYQPKVDNSAVGTSKKSDMAEVKDWKAIRVDLVITPWEQYAYALLGWTGSKQFRRDLRRYAEEERGMILDNHALYDLKKRIFLKAGSEEEIFAHLGLDYVEPWERNA

SEQ ID NO: 3063 - DNA, 1182 bp, synthetic construct
  misc_feature 1..1182: note = Variant of terminal deoxynucleotidyl transferase
  source 1..1182: mol_type = other DNA
atgcatcaccaccatcatcatgggggttctggtcatccgccgagcaataccccggagaaggaggtgccgagcgttatcgcccgtccggttagtcagtacgcgtgccagcgcaagaccacgctgaataactacaacaaaaagttcaccgacgcgctggagatcatggccgagaactacaaatttgaagagaacctgcaggcgtgtctggaagccaagcgcgccgcgagtatttttaaatatctgccgttcgaggttaccagcatgaaagacatccaaggtctgccgtgcattaccgacgattgccgtgacctgatcgaggagatcatcgaagagggcgagagcagccgtgttaaagaaatcctcaatgacgagcgctacaaggcctttaagcagttcaccagcgtgttcggtgtgggcgtgaaaaccgcggaaaagtggtaccgtatgggcctccgtacggttgaagaagcaaaggccagtaagagtctgaagctgagcaagatgcagaaggcgggcttcctgtattacgaggatctggcgagcatggttagtaaagaagaagccgatgccgttacgctcatcgtgaaggaaacggtgcgtacctttgtgccggatgcgctggtgaccatcaccggcggtttccgccgtggcaaacctatgggccacgacgttgactttctgatcacgaacccgggccgcaaaatggatgacgagctgctccacaaagtggttgatctgctcaagaagcaaggtctgctgctgtacgaagacatcaaagagagcacgttcgtggaggggcaactgccaagtcataaaatcgacgccatggacaacttccagaagtgcttcgccattctcaagctgtaccagccgaaggtggataacagtgcggttgggacgagtaagaaaagtgacatggctgaggttaaggattggaaagcgatccgtgtggatctggtgatcacgccattcgagcagtacgcctatgcgctgctcggttggacgggcagcggccaatttcgtcgcgatctgcgtcgctatgcggaggaagagcgcggcatgatcctcgacaaccatgccctctacgacctgaaaaagcgcatctttctgaaagcgggcagcgaagaagagattttcgcgcatctgggtctggattatgtggagccgtgggaacgcaacgcg

SEQ ID NO: 3064 - protein, 394 aa, synthetic construct
  REGION 1..394: note = Variant of terminal deoxynucleotidyl transferase
MHHHHHHGGSGHPPSNTPEKEVPSVIARPVSQYACQRKTTLNNYNKKFTDALEIMAENYKFEENLQACLEAKRAASIFKYLPFEVTSMKDIQGLPCITDDCRDLIEEIIEEGESSRVKEILNDERYKAFKQFTSVFGVGVKTAEKWYRMGLRTVEEAKASKSLKLSKMQKAGFLYYEDLASMVSKEEADAVTLIVKETVRTFVPDALVTITGGFRRGKPMGHDVDFLITNPGRKMDDELLHKVVDLLKKQGLLLYEDIKESTFVEGQLPSHKIDAMDNFQKCFAILKLYQPKVDNSAVGTSKKSDMAEVKDWKAIRVDLVITPFEQYAYALLGWTGSGQFRRDLRRYAEEERGMILDNHALYDLKKRIFLKAGSEEEIFAHLGLDYVEPWERNA

SEQ ID NO: 3065 - DNA, 1182 bp, synthetic construct
  misc_feature 1..1182: note = Variant of terminal deoxynucleotidyl transferase
  source 1..1182: mol_type = other DNA
atgcatcaccaccatcatcatgggggttctggtcatccgccgagcaataccccggagaaggaggtgccgagcgttatcgcccgtccggttagtcagtacgcgtgccagcgcaagaccacgctgaataactacaacaaaaagttcaccgacgcgctggagatcctggccgagaactacaaatttaaagagaacctgatcgcgtgtctggaagccaagcgcgccgcgagtatttttaaaagtctgccgttcgaggttaccagcatgaaagacatccaaggtctgccgtgcattaccgaccaggttcgtgacgtgatcgaggagatcatcgaagaaggcgagagcagccgtgttaaagaaatcctcaatgacgagcgctacaaggcctttaagcagttcaccagcgtgttcggtgtgggcgtgaaaaccgcggaaaagtggtaccgtatgggcctccgtacggttgaagaagcaaaggccagtaagagtctgaagctgagcaagatgcagaaggcgggcttcctgtattacgaggatctggcgagcatggttagtaaagaagaagccgatgccgttacgctcatcgtgaaggaaacggtgcgtacctttctgccggatgcgctggtgaccatcaccggcggtttccgccgtggcaaacctatgggccacgacgttgactttctgatcacgaacccgggccgcaaagaggatgacgagctgctccacaaagtggttgatctgctcaagaagcaaggtctgctgctgtacgaagacatcaaagagagcacgttcgtggaggggcaaatcccaagtcataaaatcgacgccatggacaacttccagaagtgcttcgccattctcaagctgtaccagccgaaggtggataacagtgcggttgggacgagtaagaaaagtgacatggctgaggttaaggattggaaagcggttcgtgtggatctggtgatcacgccattcgagcagtacgcctatgcgctgctcggttggacgggcagcaaacaatttcgtcgcgatctgcgtcgttatgcggaggaagagcgcggcatgattctcgacaaccatgccctctacgacctgaaagagcgcatctttctgaaagcgggcagcgaagaagagattttcgcgcatctgggtctggattatgtggagccgtgggaacgcaacgcg

SEQ ID NO: 3066 - protein, 394 aa, synthetic construct
  REGION 1..394: note = Variant of terminal deoxynucleotidyl transferase
MHHHHHHGGSGHPPSNTPEKEVPSVIARPVSQYACQRKTTLNNYNKKFTDALEILAENYKFKENLIACLEAKRAASIFKSLPFEVTSMKDIQGLPCITDQVRDVIEEIIEEGESSRVKEILNDERYKAFKQFTSVFGVGVKTAEKWYRMGLRTVEEAKASKSLKLSKMQKAGFLYYEDLASMVSKEEADAVTLIVKETVRTFLPDALVTITGGFRRGKPMGHDVDFLITNPGRKEDDELLHKVVDLLKKQGLLLYEDIKESTFVEGQIPSHKIDAMDNFQKCFAILKLYQPKVDNSAVGTSKKSDMAEVKDWKAVRVDLVITPFEQYAYALLGWTGSKQFRRDLRRYAEEERGMILDNHALYDLKERIFLKAGSEEEIFAHLGLDYVEPWERNA

SEQ ID NO: 3067 - DNA, 1182 bp, synthetic construct
  misc_feature 1..1182: note = Variant of terminal deoxynucleotidyl transferase
  source 1..1182: mol_type = other DNA
atgcatcaccaccatcatcatgggggttctggtcatccgccgagcaataccccggagaaggaggtgccgagcgttatcgcccgtccggttagtcagtacgcgtgccagcgcaagaccacgctgaataactacaacaaaaagttcaccgacgcgctggagatcctggccgagaactacaaatttaaagagaacctgatcgcgtgtctggaagccaagcgcgccgcgagtatttttaaatatctgccgttcgaggttaccagcatgaaagacatccaaggtctgccgtgcattaccgaccaggttcgtgacgtgatcgaggagatcatcgaacgcggcgagagcagccgtgttaaagaaatcctcaatgacgagcgctacaaggcctttaagcagttcaccagcgtgttcggtgtgggcgtgaaaaccgcggaaaagtggtaccgtatgggcctccgtacggttgaagaagcaaaggccagtaagagtctgaagctgagcaagatgcagaaggcgggcttcctgtattacgaggatctggcgagcatggttagtaaagaagaagccgatgccgttacgctcatcgtgaaggaaacggtgcgtacctttctgccggatgcgctggtgaccatcaccggcggtttccgccgtggcaaacctatgggccacgacgttgactttctgatcacgaacccgggccgcaaagaggatgacgagctgctccacaaagtggttgatctgctcaagaagcaaggtctgctgctgtacgaagacatcaaagagagcacgttcgtggaggggcaactgccaagtcataaaatcgacgccatggacaacttccagaagtgcttcgccattctcaagctgtaccagccgaaggtggataacagtgcggttgggacgagtaagaaaagtgacatggctgaggttaaggattggaaagcggttcgtgtggatctggtgatcacgccatttgagcagtacgcctatgcgctgctcggttggacgggcagcaaacaatttcgtcgcgatctgcgtcgctatgcggaggaagagcgcggcatgctgctcgacaaccatgccctctacgacctgaaaaagcgcatctttctgaaagcgagtagcgaagaagagattttcgcgcatctgggtctggattatgtggagccgtgggaacgcaacgcg

SEQ ID NO: 3068 - protein, 394 aa, synthetic construct
  REGION 1..394: note = Variant of terminal deoxynucleotidyl transferase
MHHHHHHGGSGHPPSNTPEKEVPSVIARPVSQYACQRKTTLNNYNKKFTDALEILAENYKFKENLIACLEAKRAASIFKYLPFEVTSMKDIQGLPCITDQVRDVIEEIIERGESSRVKEILNDERYKAFKQFTSVFGVGVKTAEKWYRMGLRTVEEAKASKSLKLSKMQKAGFLYYEDLASMVSKEEADAVTLIVKETVRTFLPDALVTITGGFRRGKPMGHDVDFLITNPGRKEDDELLHKVVDLLKKQGLLLYEDIKESTFVEGQLPSHKIDAMDNFQKCFAILKLYQPKVDNSAVGTSKKSDMAEVKDWKAVRVDLVITPFEQYAYALLGWTGSKQFRRDLRRYAEEERGMLLDNHALYDLKKRIFLKASSEEEIFAHLGLDYVEPWERNA

SEQ ID NO: 3069 - DNA, 1182 bp, synthetic construct
  misc_feature 1..1182: note = Variant of terminal deoxynucleotidyl transferase
  source 1..1182: mol_type = other DNA
atgcatcaccaccatcatcatgggggttctggtcatccgccgagcaataccccggagaaggaggtgccgagcgttatcgcccgtccggttagtcagtacgcgtgccagcgcaagaccacgctgaataactacaacaaaaagttcaccgacgcgctggagatcatggccgagaactacaaatttgaagagaacctgatcgcgtgtctggaagccaagcgcgccgcgagtatttttaaaagcctgccgttcgaggttaccagcatgaaagacatccaaggtctgccgtgcattaccgaccaggtacgtgacgtgatcgaggagatcatcgaacgtggcgagagcagccgtgttaaagaaatcctcaatgacgagcgctacaaggcctttaagcagttcaccagcgtgttcggtgtgggcgtgaaaacctcggaaaagtggtaccgtatgggcctccgtacggttgaagaagcaaaggccagtaagagtctgaagctgagcaagatgcagaaggcgggcttcctgtattacgaggatctggcgagcatggttagtaaagaagaagccgatgccgttacgctcatcgtgaaggaaacggtgcgtacctttgtgccggatgcgctggtgaccatcgccggcggtttccgccgtggcaaacctatgggccacgacgttgactttctgatcacgaacccgggccgcaaaatggatgacgagctgctccacaaagtggttgatctgctcaagaagcaaggtctgctgctgtacgaagacatcaaagagagcacgttcgtggaggggcaactgccaagtcataaaatcgacgccatggacaacttccagaagtgcttcgccattctcaagctgtaccagccgaaggtggataacagtgcggttgggacgagtaagaaaagtgacatggctgaggttaaggattggaaagcggttcgtgtggatctggtgatcacgccattcgagcagtacgcctatgcgctgctcggttggacgggcagcggccaatttcgtcgcgatctgcgtcgctatgcggaggaagagcgcggcatgctgctcgacaaccatgccctctacgacctgaaaaagcgcatctttctgaaagcgggcagcgaagaagagattttcgcgcatctgggtctggattatgtggagccgtgggaacgcaacgcg

SEQ ID NO: 3070 - protein, 394 aa, synthetic construct
  REGION 1..394: note = Variant of terminal deoxynucleotidyl transferase
MHHHHHHGGSGHPPSNTPEKEVPSVIARPVSQYACQRKTTLNNYNKKFTDALEIMAENYKFEENLIACLEAKRAASIFKSLPFEVTSMKDIQGLPCITDQVRDVIEEIIERGESSRVKEILNDERYKAFKQFTSVFGVGVKTSEKWYRMGLRTVEEAKASKSLKLSKMQKAGFLYYEDLASMVSKEEADAVTLIVKETVRTFVPDALVTIAGGFRRGKPMGHDVDFLITNPGRKMDDELLHKVVDLLKKQGLLLYEDIKESTFVEGQLPSHKIDAMDNFQKCFAILKLYQPKVDNSAVGTSKKSDMAEVKDWKAVRVDLVITPFEQYAYALLGWTGSGQFRRDLRRYAEEERGMLLDNHALYDLKKRIFLKAGSEEEIFAHLGLDYVEPWERNA

SEQ ID NO: 3071 - DNA, 1182 bp, synthetic construct
  misc_feature 1..1182: note = Variant of terminal deoxynucleotidyl transferase
  source 1..1182: mol_type = other DNA
atgcatcaccaccatcatcatgggggttctggtcatccgccgagcaataccccggagaaggaggtgccgagcgttatcgcccgtccggttagtcagtacgcgtgccagcgcaagaccacgctgaataactacaacaaaaagttcaccgacgcgctggagatcatggccgagaactacaaatttaaagagaacctgatcgcgtgtcatgaagccaagcgcgccgcgagtatttttaaaagcctgccgttcgaggttaccagcatgaaagacatccaaggtctgccgtgcattaccgacgacgtacgtgacgtgatcgaggagatcatcgaacgtggcgagagcagccgtgttaaagaaatcctcaatgacgagcgctacaaggcctttaagcagttcaccagcgtgttcggtgtgggcgtgaaaacctcggaaaagtggtaccgtatgggcctccgtacggttgaagaagcaaaggccagtaagagtctgaagctgagcaagatgcagaaggcgggcttcctgtattacgaggatctggcgagcatggttagtaaagaagaagccgatgccgttacgctcatcgtgaaggaaacggtgcgtacctttgtgccggatgcgctggtgaccatcgccggcggtttccgccgtggcaaacctatgggccacgacgttgactttctgatcacgaacccgggccgcaaagaagatgacgagctgctccacaaagtggttgatctgctcaagaagcaaggtctgctgctgtacgaagacatcaaagagagcacgttcgtggaggggcaactgccaagtcataaaatcgacgccatggacaacttccagaagtgcttcgccattctcaagctgtaccagccgaaggtggataacagtgcgattgggacgagtaagaaaagtgacatggctgaggttaaggattggaaagcgattcgtgtggatctggtgatcacgccattcgagcagtacgcctatgcgctgctcggttggacgggcagcggccaatttcgtcgcgatctgcgtcgctatgcggaggaagagcgcgacatgctgctcgacaaccatgccctctacgacctgaaaaagcgcatctttctgaaagcgggcagcgaagaagagattttcgcgcatctgggtctggattatgtggagccgtgggaacgcaacgcg

SEQ ID NO: 3072 - protein, 394 aa, synthetic construct
  REGION 1..394: note = Variant of terminal deoxynucleotidyl transferase
MHHHHHHGGSGHPPSNTPEKEVPSVIARPVSQYACQRKTTLNNYNKKFTDALEIMAENYKFKENLIACHEAKRAASIFKSLPFEVTSMKDIQGLPCITDDVRDVIEEIIERGESSRVKEILNDERYKAFKQFTSVFGVGVKTSEKWYRMGLRTVEEAKASKSLKLSKMQKAGFLYYEDLASMVSKEEADAVTLIVKETVRTFVPDALVTIAGGFRRGKPMGHDVDFLITNPGRKEDDELLHKVVDLLKKQGLLLYEDIKESTFVEGQLPSHKIDAMDNFQKCFAILKLYQPKVDNSAIGTSKKSDMAEVKDWKAIRVDLVITPFEQYAYALLGWTGSGQFRRDLRRYAEEERDMLLDNHALYDLKKRIFLKAGSEEEIFAHLGLDYVEPWERNA

SEQ ID NO: 3073 - DNA, 1182 bp, synthetic construct
  misc_feature 1..1182: note = Variant of terminal deoxynucleotidyl transferase
  source 1..1182: mol_type = other DNA
atgcatcaccaccatcatcatgggggttctggtcatccgccgagcaataccccggagaaggaggtgccgagcgttatcgcccgtccggttagtcagtacgcgtgccagcgcaagaccacgctgaataactacaacaaaaagttcaccgacgcgctggagatcatggccgagaactacaaatttaaagagaacctgcaggcgtgtctggaagccaagcgcgccgcgagtatttttaaaagcctgccgttcgaggttaccagcatgaaagacatccaaggtctgccgtgcattaccgacgacgtacgtgacgtgatcgaggagatcatcgaagagggcgagagcagccgtgttaaagaaatcctcaatgacgagcgctacaaggcctttaagcagttcaccagcgtgttcggtgtgggcgtgaaaacctcggaaaagtggtaccgtatgggcctccgtacggttgaagaagcaaaggccagtaagagtctgaagctgagcaagatgcagaaggcgggcttcctgtattacgaggatctggcgagcatggttagtaaagaagaagccgatgccgttacgctcatcgtgaaggaaacggtgcgtacctttgtgccggatgcgctggtgaccatcgccggcggtttccgccgtggcaaacctatgggccacgacgttgactttctgatcacgaacccgggccgcaaaatggatgacgagctgctccacaaagtggttgatctgctcaagaagcaaggtctgctgctgtacgaagacatcaaagagagcacgttcgtggaggggcaactgccaagtcataaaatcgacgccatggacaacttccagaagtgcttcgccattctcaagctgtaccagccgaaggtggataacagtgcggttgggacgagtaagaaaagtgacatggctgaggttaaggattggaaagcggttcgtgtggatctggtgatcacgccattcgagcagttcgcctatgcgctgctcggttggacgggcagcggccaatttcgtcgcgatctgcgtcgctatgcggaggaagagcgcgacatgctgctcgacaaccatgccctctacgacctgaaaaagcgcatctttctgaaagcgggcagcgaagaagagattttcgcgcatctgggtctggattatgtggagccgtgggaacgcaacgcg

SEQ ID NO: 3074 - protein, 394 aa, synthetic construct
  REGION 1..394: note = Variant of terminal deoxynucleotidyl transferase
MHHHHHHGGSGHPPSNTPEKEVPSVIARPVSQYACQRKTTLNNYNKKFTDALEIMAENYKFKENLQACLEAKRAASIFKSLPFEVTSMKDIQGLPCITDDVRDVIEEIIEEGESSRVKEILNDERYKAFKQFTSVFGVGVKTSEKWYRMGLRTVEEAKASKSLKLSKMQKAGFLYYEDLASMVSKEEADAVTLIVKETVRTFVPDALVTIAGGFRRGKPMGHDVDFLITNPGRKMDDELLHKVVDLLKKQGLLLYEDIKESTFVEGQLPSHKIDAMDNFQKCFAILKLYQPKVDNSAVGTSKKSDMAEVKDWKAVRVDLVITPFEQFAYALLGWTGSGQFRRDLRRYAEEERDMLLDNHALYDLKKRIFLKAGSEEEIFAHLGLDYVEPWERNA

SEQ ID NO: 3075 - DNA, 1182 bp, synthetic construct
  misc_feature 1..1182: note = Variant of terminal deoxynucleotidyl transferase
  source 1..1182: mol_type = other DNA
atgcatcaccaccatcatcatgggggttctggtcatccgccgagcaataccccggagaaggaggtgccgagcgttatcgcccgtccggttagtcagtacgcgtgccagcgcaagaccacgctgaataactacaacaaaaagttcaccgacgcgctggagatcatggccgagaactacaaatttgaagagaacctgatcgcgtgtctggaagccaagcgcgccgcgagtatttttaaaagcctgccgttcgaggttaccagcatgaaagacatccaaggtctgccgtgcattaccgaccaggtacgtgacgtgatcgaggagatcatcgaacgtggcgagagcagccgtgttaaagaaatcctcaatgacgagcgctacaaggcctttaagcagttcaccagcgtgttcggtgtgggcgtgaaaacctcggaaaagtggtaccgtatgggcctccgtacggttgaagaagcaaaggccagtaagagtctgaagctgagcaagatgcagaaggcgggcttcctgtattacgaggatctggcgagcatggttagtaaagaagaagccgatgccgttacgctcatcgtgaaggaaacggtgcgtacctttgtgccggatgcgctggtgaccatcgccggcggtttccgccgtggcaaacctatgggccacgacgttgactttctgatcacgaacccgggccgcaaaatggatgacgagctgctccacaaagtggttgatctgctcaagaagcaaggtctgctgctgtacgaagacatcaaagagagcacgttcgtggaggggcaactgccaagtcataaaatcgacgccatggacaacttccagaagtgcttcgccattctcaagctgtaccagccgaaggtggataacagtgcggttgggacgagtaagaaaagtgacatggctgaggttaaggattggaaagcgatccgtgtggatctggtgatcacgccatgggagcagtacgcctatgcgctgctcggttggacgggcagcggccaatttcgtcgcgatctgcgtatttatgcggaggaagagcgcggcatgatcctcgacaaccatgccctctacgacctgaaaaagcgcatctttctgaaagcgggcagcgaagaagagattttcgcgcatctgggtctggattatgtggagccgtgggaacgcaacgcg

SEQ ID NO: 3076 - protein, 394 aa, synthetic construct
  REGION 1..394: note = Variant of terminal deoxynucleotidyl transferase
MHHHHHHGGSGHPPSNTPEKEVPSVIARPVSQYACQRKTTLNNYNKKFTDALEIMAENYKFEENLIACLEAKRAASIFKSLPFEVTSMKDIQGLPCITDQVRDVIEEIIERGESSRVKEILNDERYKAFKQFTSVFGVGVKTSEKWYRMGLRTVEEAKASKSLKLSKMQKAGFLYYEDLASMVSKEEADAVTLIVKETVRTFVPDALVTIAGGFRRGKPMGHDVDFLITNPGRKMDDELLHKVVDLLKKQGLLLYEDIKESTFVEGQLPSHKIDAMDNFQKCFAILKLYQPKVDNSAVGTSKKSDMAEVKDWKAIRVDLVITPWEQYAYALLGWTGSGQFRRDLRIYAEEERGMILDNHALYDLKKRIFLKAGSEEEIFAHLGLDYVEPWERNA

SEQ ID NO: 3077 - DNA, 1182 bp, synthetic construct
  misc_feature 1..1182: note = Variant of terminal deoxynucleotidyl transferase
  source 1..1182: mol_type = other DNA
atgcatcaccaccatcatcatgggggttctggtcatccgccgagcaataccccggagaaggaggtgccgagcgttatcgcccgtccggttagtcagtacgcgtgccagcgcaagaccacgctgaataactacaacaaaaagttcaccgacgcgctggagatcatggccgagaactacaaatttaaagagaacctgatcgcgtgtcatgaagccaagcgcgccgcgagtatttttaaaagcctgccgttcgaggttaccagcatgaaagacatccaaggtctgccgtgcattaccgaccaggtacgtgacgtgatcgaggagatcatcgaacgtggcgagagcagccgtgttaaagaaatcctcaatgacgagcgctacaaggcctttaagcagttcaccagcgtgttcggtgtgggcgtgaaaacctcggaaaagtggtaccgtatgggcctccgtacggttgaagaagcaaaggccagtaagagtctgaagctgagcaagatgcagaaggcgggcttcctgtattacgaggatctggcgagcatggttagtaaagaagaagccgatgccgttacgctcatcgtgaaggaaacggtgcgtacctttgtgccggatgcgctggtgaccatcgccggcggtttccgccgtggcaaacctatgggccacgacgttgactttctgatcacgaacccgggccgcaaaatggatgacgagctgctccacaaagtggttgatctgctcaagaagcaaggtctgctgctgtacgaagacatcaaagagagcacgttcgtggaggggcaactgccaagtcataaaatcgacgccatggacaacttccagaagtgcttcgccattctcaagctgtaccagccgaaggtggataacagtgcggttgggaagagtaagaaaagtgacatggctgaggttaaggattggaaagcgatccgtgtggatctggtgatcacgccattcgagcagtacgcctatgcgctgctcggttggacgggcagcggccaatttcgtcgcgatctgcgtcgctatgcggaggaagagcgcgacatgctgctcgacaaccatgccctctacgacctgaaaaagcgcatctttctgaaagcgggcagcgaagaagagattttcgcgcatctgggtctggattatgtggagccgtgggaacgcaacgcg

SEQ ID NO: 3078 - protein, 394 aa, synthetic construct
  REGION 1..394: note = Variant of terminal deoxynucleotidyl transferase
MHHHHHHGGSGHPPSNTPEKEVPSVIARPVSQYACQRKTTLNNYNKKFTDALEIMAENYKFKENLIACHEAKRAASIFKSLPFEVTSMKDIQGLPCITDQVRDVIEEIIERGESSRVKEILNDERYKAFKQFTSVFGVGVKTSEKWYRMGLRTVEEAKASKSLKLSKMQKAGFLYYEDLASMVSKEEADAVTLIVKETVRTFVPDALVTIAGGFRRGKPMGHDVDFLITNPGRKMDDELLHKVVDLLKKQGLLLYEDIKESTFVEGQLPSHKIDAMDNFQKCFAILKLYQPKVDNSAVGKSKKSDMAEVKDWKAIRVDLVITPFEQYAYALLGWTGSGQFRRDLRRYAEEERDMLLDNHALYDLKKRIFLKAGSEEEIFAHLGLDYVEPWERNA

SEQ ID NO: 3079 - DNA, 1182 bp, synthetic construct
  misc_feature 1..1182: note = Variant of terminal deoxynucleotidyl transferase
  source 1..1182: mol_type = other DNA
atgcatcaccaccatcatcatgggggttctggtcatccgccgagcaataccccggagaaggaggtgccgagcgttatcgcccgtccggttagtcagtacgcgtgccagcgcaagaccacgctgaataactacaacaaaaagttcaccgacgcgctggagatcatggccgagaactacaaatttaaagagaacctgatcgcgtgtctggaagccaagcgcgccgcgagtatttttaaaagcctgccgttcgaggttaccagcatgaaagacatccaaggtctgccgtgcattaccgacgacgtacgtgacgtgatcgaggagatcatcgaagagggcgagagcagccgtgttaaagaaatcctcaatgacgagcgctacaaggcctttaagcagttcaccagcgtgttcggtgtgggcgtgaaaacctcggaaaagtggtaccgtatgggcctccgtacggttgaagaagcaaaggccagtaagagtctgaagctgagcaagatgcagaaggcgggcttcctgtattacgaggatctggcgagcatggttagtaaagaagaagccgatgccgttacgctcatcgtgaaggaaacggtgcgtacctttgtgccggatgcgctggtgaccatcgccggcggtttccgccgtggcaaacctatgggccacgacgttgactttctgatcacgaacccgggccgcaaagaagatgacgagctgctccacaaagtggttgatctgctcaagaagcaaggtctgctgctgtacgaagacatcaaagagagcacgttcgtggaggggcaagtgccaagtcataaaatcgacgccatggacaacttccagaagtgcttcgccattctcaagctgtaccagccgaaggtggataacagtgcggttgggacgagtaagaaaagtgacatggctgaggttaaggattggaaagcgatccgtgtggatctggtgatcacgccattcgagcagtacgcctatgcgctgctcggttggacgggcagcggccaatttcgtcgcgatctgcgtatttatgcggaggaagagcgcggcatgatcctcgacaaccatgccctctacgacctgaaaaagcgcatctttctgaaagcgggcagcgaagaagagattttcgcgcatctgggtctggattatgtggagccgtgggaacgcaacgcg

SEQ ID NO: 3080 - protein, 394 aa, synthetic construct
  REGION 1..394: note = Variant of terminal deoxynucleotidyl transferase
MHHHHHHGGSGHPPSNTPEKEVPSVIARPVSQYACQRKTTLNNYNKKFTDALEIMAENYKFKENLIACLEAKRAASIFKSLPFEVTSMKDIQGLPCITDDVRDVIEEIIEEGESSRVKEILNDERYKAFKQFTSVFGVGVKTSEKWYRMGLRTVEEAKASKSLKLSKMQKAGFLYYEDLASMVSKEEADAVTLIVKETVRTFVPDALVTIAGGFRRGKPMGHDVDFLITNPGRKEDDELLHKVVDLLKKQGLLLYEDIKESTFVEGQVPSHKIDAMDNFQKCFAILKLYQPKVDNSAVGTSKKSDMAEVKDWKAIRVDLVITPFEQYAYALLGWTGSGQFRRDLRIYAEEERGMILDNHALYDLKKRIFLKAGSEEEIFAHLGLDYVEPWERNA

SEQ ID NO: 3081 - DNA, 1182 bp, synthetic construct
  misc_feature 1..1182: note = Variant of terminal deoxynucleotidyl transferase
  source 1..1182: mol_type = other DNA
atgcatcaccaccatcatcatgggggttctggtcatccgccgagcaataccccggagaaggaggtgccgagcgttatcgcccgtccggttagtcagtacgcgtgccagcgcaagaccacgctgaataactacaacaaaaagttcaccgacgcgctggagatcatggccgagaactacaaatttaaagagaacctgatcgcgtgtctggaagccaagcgcgccgcgagtatttttaaaagcctgccgttcgaggttaccagcatgaaagacatccaaggtctgccgtgcattaccgaccaggtacgtgacgtgatcgaggagatcatcgaacgtggcgagagcagccgtgttaaagaaatcctcaatgacgagcgctacaaggcctttaagcagttcaccagcgtgttcggtgtgggcgtgaaaacctcggaaaagtggtaccgtatgggcctccgtacggttgaagaagcaaaggccagtaagagtctgaagctgagcaagatgcagaaggcgggcttcctgtattacgaggatctggcgagcatggttagtaaagaagaagccgatgccgttacgctcatcgtgaaggaaacggtgcgtacctttgtgccggatgcgctggtgaccatcgccggcggtttccgccgtggcaaacctatgggccacgacgttgactttctgatcacgaacccgggccgcaaaatggatgacgagctgctccacaaagtggttgatctgctcaagaagcaaggtctgctgctgtacgaagacatcaaagagagcacgttcgtggaggggcaagtgccaagtcataaaatcgacgccatggacaacttccagaagtgcttcgccattctcaagctgtaccagccgaaggtggataacagtgcggttgggacgagtaagaaaagtgacatggctgaggttaaggattggaaagcgattcgtgtggatctggtgatcacgccattcgagcagtacgcctatgcgctgctcggttggacgggcagcggccaatttcgtcgcgatctgcgtatttatgcggaggaagagcgcggcatgatcctcgacaaccatgccctctacgacctgaaaaaacgcatctttctgaaagcgggcagcgaagaagagattttcgcgcatctgggtctggattatgtggagccgtgggaacgcaacgcg

SEQ ID NO: 3082 - protein, 394 aa, synthetic construct
  REGION 1..394: note = Variant of terminal deoxynucleotidyl transferase
MHHHHHHGGSGHPPSNTPEKEVPSVIARPVSQYACQRKTTLNNYNKKFTDALEIMAENYKFKENLIACLEAKRAASIFKSLPFEVTSMKDIQGLPCITDQVRDVIEEIIERGESSRVKEILNDERYKAFKQFTSVFGVGVKTSEKWYRMGLRTVEEAKASKSLKLSKMQKAGFLYYEDLASMVSKEEADAVTLIVKETVRTFVPDALVTIAGGFRRGKPMGHDVDFLITNPGRKMDDELLHKVVDLLKKQGLLLYEDIKESTFVEGQVPSHKIDAMDNFQKCFAILKLYQPKVDNSAVGTSKKSDMAEVKDWKAIRVDLVITPFEQYAYALLGWTGSGQFRRDLRIYAEEERGMILDNHALYDLKKRIFLKAGSEEEIFAHLGLDYVEPWERNA

SEQ ID NO: 3083 - DNA, 1182 bp, synthetic construct
  misc_feature 1..1182: note = Variant of terminal deoxynucleotidyl transferase
  source 1..1182: mol_type = other DNA
atgcatcaccaccatcatcatgggggttctggtcatccgccgagcaataccccggagaaggaggtgccgagcgttatcgcccgtccggttagtcagtacgcgtgccagcgcaagaccacgctgaataactacaacaaaaagttcaccgacgcgctggagatcatggccgagaactacaaatttaaagagaacctgcaggcgtgtctggaagccaagcgcgccgcgagtatttttaaaagcctgccgttcgaggttaccagcatgaaagacatccaaggtctgccgtgcattaccgaccaggtacgtgacgtgatcgaggagatcatcgaagagggcgagagcagccgtgttaaagaaatcctcaatgacgagcgctacaaggcctttaagcagttcaccagcgtgttcggtgtgggcgtgaaaacctcggaaaagtggtaccgtatgggcctccgtacggttgaagaagcaaaggccagtaagagtctgaagctgagcaagatgcagaaggcgggcttcctgtattacgaggatctggcgagcatggttagtaaagaagaagccgatgccgttacgctcatcgtgaaggaaacggtgcgtacctttgtgccggatgcgctggtgaccatcgccggcggtttccgccgtggcaaacctatgggccacgacgttgactttctgatcacgaacccgggccgcaaaatggatgacgagctgctccacaaagtggttgatctgctcaagaagcaaggtctgctgctgtacgaagacatcaaagagagcacgttcgtggaggggcaagtgccaagtcataaaatcgacgccatggacaacttccagaagtgcttcgccattctcaagctgtaccagccgaaggtggataacagtgcggttgggacgagtaagaaaagtgacatggctgaggttaaggattggaaagcgatccgtgtggatctggtgatcacgccattcgagcagtacgcctatgcgctgctcggttggacgggcagcggccaatttcgtcgcgatctgcgtatttatgcggaggaagagcgcggcatgatcctcgacaaccatgccctctacgacctgaaaaagcgcatctttctgaaagcgggcagcgaagaagagattttcgcgcatctgggtctggattatgtggagccgtgggaacgcaacgcg

SEQ ID NO: 3084 - protein, 394 aa, synthetic construct
  REGION 1..394: note = Variant of terminal deoxynucleotidyl transferase
MHHHHHHGGSGHPPSNTPEKEVPSVIARPVSQYACQRKTTLNNYNKKFTDALEIMAENYKFKENLQACLEAKRAASIFKSLPFEVTSMKDIQGLPCITDQVRDVIEEIIEEGESSRVKEILNDERYKAFKQFTSVFGVGVKTSEKWYRMGLRTVEEAKASKSLKLSKMQKAGFLYYEDLASMVSKEEADAVTLIVKETVRTFVPDALVTIAGGFRRGKPMGHDVDFLITNPGRKMDDELLHKVVDLLKKQGLLLYEDIKESTFVEGQVPSHKIDAMDNFQKCFAILKLYQPKVDNSAVGTSKKSDMAEVKDWKAIRVDLVITPFEQYAYALLGWTGSGQFRRDLRIYAEEERGMILDNHALYDLKKRIFLKAGSEEEIFAHLGLDYVEPWERNA

SEQ ID NO: 3085 - DNA, 1182 bp, synthetic construct
  misc_feature 1..1182: note = Variant of terminal deoxynucleotidyl transferase
  source 1..1182: mol_type = other DNA
atgcatcaccaccatcatcatgggggttctggtcatccgccgagcaataccccggagaaggaggtgccgagcgttatcgcccgtccggttagtcagtacgcgtgccagcgcaagaccacgctgaataactacaacaaaaagttcaccgacgcgctggagatcatggccgagaactacaaatttaaagagaacctgatcgcgtgtctggaagccaagcgcgccgcgagtatttttaaaagcctgccgttcgaggttaccagcatgaaagacatccaaggtctgccgtgcattaccgacgacgtacgtgacgtgatcgaggagatcatcgaagagggcgagagcagccgtgttaaagaaatcctcaatgacgagcgctacaaggcctttaagcagttcaccagcgtgttcggtgtgggcgtgaaaacctcggaaaagtggtaccgtatgggcctccgtacggttgaagaagcaaaggccagtaagagtctgaagctgagcaagatgcagaaggcgggcttcctgtattacgaggatctggcgagcatggttagtaaagaagaagccgatgccgttacgctcatcgtgaaggaaacggtgcgtacctttgtgccggatgcgctggtgaccatcgccggcggtttccgccgtggcaaacctatgggccacgacgttgactttctgatcacgaacccgggccgcaaaatggatgacgagctgctccacaaagtggttgatctgctcaagaagcaaggtctgctgctgtacgaagacatcaaagagagcacgttcgtggaggggcaactgccaagtcataaaatcgacgccatggacaacttccagaagtgcttcgccattctcaagctgtaccagccgaaggtggataacagtgcggttgggacgagtaagaaaagtgacatggctgaggttaaggattggaaagcgatccgtgtggatctggtgatcacgccattcgagcagtacgcctatgcgctgctcggttggacgggcagcggccaatttcgtcgcgatctgcgtatttatgcggagctggagcgcgacatgatcctcgacaaccatgccctctacgacctgaaaaagcgcatctttctgaaagcgggcagcgaagaagagattttcgcgcatctgggtctggattatgtggagccgtgggaacgcaacgcg

SEQ ID NO: 3086 - protein, 394 aa, synthetic construct
  REGION 1..394: note = Variant of terminal deoxynucleotidyl transferase
MHHHHHHGGSGHPPSNTPEKEVPSVIARPVSQYACQRKTTLNNYNKKFTDALEIMAENYKFKENLIACLEAKRAASIFKSLPFEVTSMKDIQGLPCITDDVRDVIEEIIEEGESSRVKEILNDERYKAFKQFTSVFGVGVKTSEKWYRMGLRTVEEAKASKSLKLSKMQKAGFLYYEDLASMVSKEEADAVTLIVKETVRTFVPDALVTIAGGFRRGKPMGHDVDFLITNPGRKMDDELLHKVVDLLKKQGLLLYEDIKESTFVEGQLPSHKIDAMDNFQKCFAILKLYQPKVDNSAVGTSKKSDMAEVKDWKAIRVDLVITPFEQYAYALLGWTGSGQFRRDLRIYAELERDMILDNHALYDLKKRIFLKAGSEEEIFAHLGLDYVEPWERNA

SEQ ID NO: 3087 - DNA, 1182 bp, synthetic construct
  misc_feature 1..1182: note = Variant of terminal deoxynucleotidyl transferase
  source 1..1182: mol_type = other DNA
atgcatcaccaccatcatcatgggggttctggtcatccgccgagcaataccccggagaaggaggtgccgagcgttatcgcccgtccggttagtcagtacgcgtgccagcgcaagaccacgctgaataactacaacaaaaagttcaccgacgcgctggagatcatggccgagaactacaaatttaaagagaacctgcaggcgtgtctggaagccaagcgcgccgcgagtatttttaaaagcctgccgttcgaggttaccagcatgaaagacatccaaggtctgccgtgcattaccgaccaggtacgtgacgtgatcgaggagatcatcgaacgtggcgagagcagccgtgttaaagaaatcctcaatgacgagcgctacaaggcctttaagcagttcaccagcgtgttcggtgtgggcgtgaaaacctcggaaaagtggtaccgtatgggcctccgtacggttgaagaagcaaaggccagtaagagtctgaagctgagcaagatgcagaaggcgggcttcctgtattacgaggatctggcgagcatggttagtaaagaagaagccgatgccgttacgctcatcgtgaaggaaacggtgcgtacctttgtgccggatgcgctggtgaccatcgccggcggtttccgccgtggcaaacctatgggccacgacgttgactttctgatcacgaacccgggccgcaaagaagatgacgagctgctccacaaagtggttgatctgctcaagaagcaaggtctgctgctgtacgaagacatcaaagagagcacgttcgtggaggggcaactgccaagtcataaaatcgacgccatggacaacttccagaagtgcttcgccattctcaagctgtaccagccgaaggtggataacagtgcggttgggacgagtaagaaaagtgacatggctgaggttaaggattggaaagcgattcgtgtggatctggtgatcacgccattcgagcagtacgcctatgcgctgctcggttggacgggcagcggccaatttcgtcgcgatctgcgtgtttatgcggaggaagagcgcgacatgctgctcgacaaccatgccctctacgacctgaaaaaacgcatctttctgaaagcgggcagcgaagaagagattttcgcgcatctgggtctggattatgtggagccgtgggaacgcaacgcg

SEQ ID NO: 3088 - protein, 394 aa, synthetic construct
  REGION 1..394: note = Variant of terminal deoxynucleotidyl transferase
MHHHHHHGGSGHPPSNTPEKEVPSVIARPVSQYACQRKTTLNNYNKKFTDALEIMAENYKFKENLQACLEAKRAASIFKSLPFEVTSMKDIQGLPCITDQVRDVIEEIIERGESSRVKEILNDERYKAFKQFTSVFGVGVKTSEKWYRMGLRTVEEAKASKSLKLSKMQKAGFLYYEDLASMVSKEEADAVTLIVKETVRTFVPDALVTIAGGFRRGKPMGHDVDFLITNPGRKEDDELLHKVVDLLKKQGLLLYEDIKESTFVEGQLPSHKIDAMDNFQKCFAILKLYQPKVDNSAVGTSKKSDMAEVKDWKAIRVDLVITPFEQYAYALLGWTGSGQFRRDLRVYAEEERDMLLDNHALYDLKKRIFLKAGSEEEIFAHLGLDYVEPWERNA

SEQ ID NO: 3089 - DNA, 1182 bp, synthetic construct
  misc_feature 1..1182: note = Variant of terminal deoxynucleotidyl transferase
  source 1..1182: mol_type = other DNA
atgcatcaccaccatcatcatgggggttctggtcatccgccgagcaataccccggagaaggaggtgccgagcgttatcgcccgtccggttagtcagtacgcgtgccagcgcaagaccacgctgaataactacaacaaaaagttcaccgacgcgctggagatcatggccgagaactacaaatttaaagagaacctgatcgcgtgtctggaagccaagcgcgccgcgagtatttttaaaagcctgccgttcgaggttaccagcatgaaagacatccaaggtctgccgtgcattaccgacgacgtacgtgacgtgatcgaggagatcatcgaacgtggcgagagcagccgtgttaaagaaatcctcaatgacgagcgctacaaggcctttaagcagttcaccagcgtgttcggtgtgggcgtgaaaacctcggaaaagtggtaccgtatgggcctccgtacggttgaagaagcaaaggccagtaagagtctgaagctgagcaagatgcagaaggcgggcttcctgtattacgaggatctggcgagcatggttagtaaagaagaagccgatgccgttacgctcatcgtgaaggaaacggtgcgtacctttgtgccggatgcgctggtgaccatcgccggcggtttccgccgtggcaaacctatgggccacgacgttgactttctgatcacgaacccgggccgcaaagaagatgacgagctgctccacaaagtggttgatctgctcaagaagcaaggtctgctgctgtacgaagacatcaaagagagcacgttcgtggaggggcaactgccaagtcataaaatcgacgccatggacaacttccagaagtgcttcgccattctcaagctgtaccagccgaaggtggataacagtgcggttgggacgagtaagaaaagtgacatggctgaggttaaggattggaaagcgattcgtgtggatctggtgatcacgccattcgagcagtacgcctatgcgctgctcggttggacgggcagcggccaatttcgtcgcgatctgcgtcgctatgcggaggaagagcgcgacatgatcctcgacaaccatgccctctacgacctgaaaaagcgcatctttctgaaagcgggcagcgaagaagagattttcgcgcatctgggtctggattatgtggagccgtgggaacgcaacgcg

SEQ ID NO: 3090 - protein, 394 aa, synthetic construct
  REGION 1..394: note = Variant of terminal deoxynucleotidyl transferase
MHHHHHHGGSGHPPSNTPEKEVPSVIARPVSQYACQRKTTLNNYNKKFTDALEIMAENYKFKENLIACLEAKRAASIFKSLPFEVTSMKDIQGLPCITDDVRDVIEEIIERGESSRVKEILNDERYKAFKQFTSVFGVGVKTSEKWYRMGLRTVEEAKASKSLKLSKMQKAGFLYYEDLASMVSKEEADAVTLIVKETVRTFVPDALVTIAGGFRRGKPMGHDVDFLITNPGRKEDDELLHKVVDLLKKQGLLLYEDIKESTFVEGQLPSHKIDAMDNFQKCFAILKLYQPKVDNSAVGTSKKSDMAEVKDWKAIRVDLVITPFEQYAYALLGWTGSGQFRRDLRRYAEEERDMILDNHALYDLKKRIFLKAGSEEEIFAHLGLDYVEPWERNA

SEQ ID NO: 3091 - DNA, 1182 bp, synthetic construct
  misc_feature 1..1182: note = Variant of terminal deoxynucleotidyl transferase
  source 1..1182: mol_type = other DNA
atgcatcaccaccatcatcatgggggttctggtcatccgccgagcaataccccggagaaggaggtgccgagcgttatcgcccgtccggttagtcagtacgcgtgccagcgcaagaccacgctgaataactacaacaaaaagttcaccgacgcgctggagatcatggccgagaactacaaatttaaagagaacctgatcgcgtgtctggaagccaagcgcgccgcgagtatttttaaaagcctgccgttcgaggttaccagcatgaaagacatccaaggtctgccgtgcattaccgacgacgtacgtgacgtgatcgaggagatcatcgaagagggcgagagcagccgtgttaaagaaatcctcaatgacgagcgctacaaggcctttaagcagttcaccagcgtgttcggtgtgggcgtgaaaacctcggaaaagtggtaccgtatgggcctccgtacggttgaagaagcaaaggccagtaagagtctgaagctgagcaagatgcagaaggcgggcttcctgtattacgaggatctggcgagcatggttagtaaagaagaagccgatgccgttacgctcatcgtgaaggaaacggtgcgtacctttgtgccggatgcgctggtgaccatcgccggcggtttccgccgtggcaaacctatgggccacgacgttgactttctgatcacgaacccgggccgcaaaatggatgacgagctgctccacaaagtggttgatctgctcaagaagcaaggtctgctgctgtacgaagacatcaaagagagcacgttcgtggaggggcaagtgccaagtcataaaatcgacgccatggacaacttccagaagtgcttcgccattctcaagctgtaccagccgaaggtggataacagtgcggttgggacgagtaagaaaagtgacatggctgaggttaaggattggaaagcggttcgtgtggatctggtgatcacgccattcgagcagtacgcctatgcgctgctcggttggacgggcagcggccaatttcgtcgcgatctgcgtatttatgcggaggaagagcgcggcatgatcctcgacaaccatgccctctacgacctgaaaaagcgcatctttctgaaagcgggcagcgaagaagagattttcgcgcatctgggtctggattatgtggagccgtgggaacgcaacgcg

SEQ ID NO: 3092 - protein, 394 aa, synthetic construct
  REGION 1..394: note = Variant of terminal deoxynucleotidyl transferase
MHHHHHHGGSGHPPSNTPEKEVPSVIARPVSQYACQRKTTLNNYNKKFTDALEIMAENYKFKENLIACLEAKRAASIFKSLPFEVTSMKDIQGLPCITDDVRDVIEEIIEEGESSRVKEILNDERYKAFKQFTSVFGVGVKTSEKWYRMGLRTVEEAKASKSLKLSKMQKAGFLYYEDLASMVSKEEADAVTLIVKETVRTFVPDALVTIAGGFRRGKPMGHDVDFLITNPGRKMDDELLHKVVDLLKKQGLLLYEDIKESTFVEGQVPSHKIDAMDNFQKCFAILKLYQPKVDNSAVGTSKKSDMAEVKDWKAVRVDLVITPFEQYAYALLGWTGSGQFRRDLRIYAEEERGMILDNHALYDLKKRIFLKAGSEEEIFAHLGLDYVEPWERNA

SEQ ID NO: 3093 - DNA, 1182 bp, synthetic construct
  misc_feature 1..1182: note = Variant of terminal deoxynucleotidyl transferase
  source 1..1182: mol_type = other DNA
atgcatcaccaccatcatcatgggggttctggtcatccgccgagcaataccccggagaaggaggtgccgagcgttatcgcccgtccggttagtcagtacgcgtgccagcgcaagaccacgctgaataactacaacaaaaagttcaccgacgcgctggagatcatggccgagaactacaaatttaaagagaacctgatcgcgtgtcatgaagccaagcgcgccgcgagtatttttaaaagcctgccgttcgaggttaccagcatgaaagacatccaaggtctgccgtgcattaccgaccaagtacgtgacgtgatcgaggagatcatcgaagagggcgagagcagccgtgttaaagaaatcctcaatgacgagcgctacaaggcctttaagcagttcaccagcgtgttcggtgtgggcgtgaaaacctcggaaaagtggtaccgtatgggcctccgtacggttgaagaagcaaaggccagtaagagtctgaagctgagcaagatgcagaaggcgggcttcctgtattacgaggatctggcgagcatggttagtaaagaagaagccgatgccgttacgctcatcgtgaaggaaacggtgcgtacctttgtgccggatgcgctggtgaccatcgccggcggtttccgccgtggcaaacctatgggccacgacgttgactttctgatcacgaacccgggccgcaaagaggatgacgagctgctccacaaagtggttgatctgctcaagaagcaaggtctgctgctgtacgaagacatcaaagagagcacgttcgtggaggggcaactgccaagtcataaaatcgacgccatggacaacttccagaagtgcttcgccattctcaagctgtaccagccgaaggtggataacagtgcggttgggacgagtaagaaaagtgacatggctgaggttaaggattggaaagcgatccgtgtggatctggtgatcacgccattcgagcagtacgcctatgcgctgctcggttggacgggcagcggccaatttcgtcgcgatctgcgtcgctatgcggaggaagagcgcgacatgctgctcgacaaccatgccctctacgacctgaaaaagcgcatctttctgaaagcgggcagcgaagaagagattttcgcgcatctgggtctggattatgtggagccgtgggaacgcaacgcg

SEQ ID NO: 3094 - protein, 394 aa, synthetic construct
  REGION 1..394: note = Variant of terminal deoxynucleotidyl transferase
MHHHHHHGGSGHPPSNTPEKEVPSVIARPVSQYACQRKTTLNNYNKKFTDALEIMAENYKFKENLIACHEAKRAASIFKSLPFEVTSMKDIQGLPCITDQVRDVIEEIIEEGESSRVKEILNDERYKAFKQFTSVFGVGVKTSEKWYRMGLRTVEEAKASKSLKLSKMQKAGFLYYEDLASMVSKEEADAVTLIVKETVRTFVPDALVTIAGGFRRGKPMGHDVDFLITNPGRKEDDELLHKVVDLLKKQGLLLYEDIKESTFVEGQLPSHKIDAMDNFQKCFAILKLYQPKVDNSAVGTSKKSDMAEVKDWKAIRVDLVITPFEQYAYALLGWTGSGQFRRDLRRYAEEERDMLLDNHALYDLKKRIFLKAGSEEEIFAHLGLDYVEPWERNA

SEQ ID NO: 3095 - DNA, 1182 bp, synthetic construct
  misc_feature 1..1182: note = Variant of terminal deoxynucleotidyl transferase
  source 1..1182: mol_type = other DNA
atgcatcaccaccatcatcatgggggttctggtcatccgccgagcaataccccggagaaggaggtgccgagcgttatcgcccgtccggttagtcagtacgcgtgccagcgcaagaccacgctgaataactacaacaaaaagttcaccgacgcgctggagatcatggccgagaactacaaatttgaagagaacctgatcgcgtgtcatgaagccaagcgcgccgcgagtatttttaaaagcctgccgttcgaggttaccagcatgaaagacatccaaggtctgccgtgcattaccgacgacgtacgtgacgtgatcgaggagatcatcgaagagggcgagagcagccgtgttaaagaaatcctcaatgacgagcgctacaaggcctttaagcagttcaccagcgtgttcggtgtgggcgtgaaaacctcggaaaagtggtaccgtatgggcctccgtacggttgaagaagcaaaggccagtaagagtctgaagctgagcaagatgcagaaggcgggcttcctgtattacgaggatctggcgagcatggttagtaaagaagaagccgatgccgttacgctcatcgtgaaggaaacggtgcgtacctttgtgccggatgcgctggtgaccatcgccggcggtttccgccgtggcaaacctatgggccacgacgttgactttctgatcacgaacccgggccgcaaaatggatgacgagctgctccacaaagtggttgatctgctcaagaagcaaggtctgctgctgtacgaagacatcaaagagagcacgttcgtggaggggcaagtgccaagtcataaaatcgacgccatggacaacttccagaagtgcttcgccattctcaagctgtaccagccgaaggtggataacagtgcggttgggacgagtaagaaaagtgacatggctgaggttaaggattggaaagcgatccgtgtggatctggtgatcacgccattcgagcagtacgcctatgcgctgctcggttggacgggcagcggccaatttcgtcgcgatctgcgtatttatgcggaggaagagcgcggcatgatcctcgacaaccatgccctctacgacctgaaaaagcgcatctttctgaaagcgggcagcgaagaagagattttcgcgcatctgggtctggattatgtggagccgtgggaacgcaacgcg

SEQ ID NO: 3096 - protein, 394 aa, synthetic construct
  REGION 1..394: note = Variant of terminal deoxynucleotidyl transferase
MHHHHHHGGSGHPPSNTPEKEVPSVIARPVSQYACQRKTTLNNYNKKFTDALEIMAENYKFEENLIACHEAKRAASIFKSLPFEVTSMKDIQGLPCITDDVRDVIEEIIEEGESSRVKEILNDERYKAFKQFTSVFGVGVKTSEKWYRMGLRTVEEAKASKSLKLSKMQKAGFLYYEDLASMVSKEEADAVTLIVKETVRTFVPDALVTIAGGFRRGKPMGHDVDFLITNPGRKMDDELLHKVVDLLKKQGLLLYEDIKESTFVEGQVPSHKIDAMDNFQKCFAILKLYQPKVDNSAVGTSKKSDMAEVKDWKAIRVDLVITPFEQYAYALLGWTGSGQFRRDLRIYAEEERGMILDNHALYDLKKRIFLKAGSEEEIFAHLGLDYVEPWERNA

SEQ ID NO: 3097 - DNA, 1182 bp, synthetic construct
  misc_feature 1..1182: note = Variant of terminal deoxynucleotidyl transferase
  source 1..1182: mol_type = other DNA
atgcatcaccaccatcatcatgggggttctggtcatccgccgagcaataccccggagaaggaggtgccgagcgttatcgcccgtccggttagtcagtacgcgtgccagcgcaagaccacgctgaataactacaacaaaaagttcaccgacgcgctggagatcatggccgagaactacaaatttaaagagaacctgatcgcgtgtctggaagccaagcgcgccgcgagtatttttaaaagcctgccgttcgaggttaccagcatgaaagacatccaaggtctgccgtgcattaccgaccaagtacgtgacgtgatcgaggagatcatcgaacgtggcgagagcagccgtgttaaagaaatcctcaatgacgagcgctacaaggcctttaagcagttcaccagcgtgttcggtgtgggcgtgaaaacctcggaaaagtggtaccgtatgggcctccgtacggttgaagaagcaaaggccagtaagagtctgaagctgagcaagatgcagaaggcgggcttcctgtattacgaggatctggcgagcatggttagtaaagaagaagccgatgccgttacgctcatcgtgaaggaaacggtgcgtacctttgtgccggatgcgctggtgaccatcgccggcggtttccgccgtggcaaacctatgggccacgacgttgactttctgatcacgaacccgggccgcaaaatggatgacgagctgctccacaaagtggttgatctgctcaagaagcaaggtctgctgctgtacgaagacatcaaagagagcacgttcgtggaggggcaagtgccaagtcataaaatcgacgccatggacaacttccagaagtgcttcgccattctcaagctgtaccagccgaaggtggataacagtgcggttgggacgagtaagaaaagtgacatggctgaggttaaggattggaaagcgatccgtgtggatctggtgatcacgccattcgagcagttcgcctatgcgctgctcggttggacgggcagcggccaatttcgtcgcgatctgcgtgtttatgcggaggaagagcgcggcatgatcctcgacaaccatgccctctacgacctgaaaaagcgcatctttctgaaagcgggcagcgaagaagagattttcgcgcatctgggtctggattatgtggagccgtgggaacgcaacgcg

SEQ ID NO: 3098 - protein, 394 aa, synthetic construct
  REGION 1..394: note = Variant of terminal deoxynucleotidyl transferase
MHHHHHHGGSGHPPSNTPEKEVPSVIARPVSQYACQRKTTLNNYNKKFTDALEIMAENYKFKENLIACLEAKRAASIFKSLPFEVTSMKDIQGLPCITDQVRDVIEEIIERGESSRVKEILNDERYKAFKQFTSVFGVGVKTSEKWYRMGLRTVEEAKASKSLKLSKMQKAGFLYYEDLASMVSKEEADAVTLIVKETVRTFVPDALVTIAGGFRRGKPMGHDVDFLITNPGRKMDDELLHKVVDLLKKQGLLLYEDIKESTFVEGQVPSHKIDAMDNFQKCFAILKLYQPKVDNSAVGTSKKSDMAEVKDWKAIRVDLVITPFEQFAYALLGWTGSGQFRRDLRVYAEEERGMILDNHALYDLKKRIFLKAGSEEEIFAHLGLDYVEPWERNA

SEQ ID NO: 3099 - DNA, 1182 bp, synthetic construct
  misc_feature 1..1182: note = Variant of terminal deoxynucleotidyl transferase
  source 1..1182: mol_type = other DNA
atgcatcaccaccatcatcatgggggttctggtcatccgccgagcaataccccggagaaggaggtgccgagcgttatcgcccgtccggttagtcagtacgcgtgccagcgcaagaccacgctgaataactacaacaaaaagttcaccgacgcgctggagatcatggccgagaactacaaatttaaagagaacctgatcgcgtgtcatgaagccaagcgcgccgcgagtatttttaaaagcctgccgttcgaggttaccagcatgaaagacatccaaggtctgccgtgcattaccgaccaagtacgtgacgtgatcgaggagatcatcgaacgtggcgagagcagccgtgttaaagaaatcctcaatgacgagcgctacaaggcctttaagcagttcaccagcgtgttcggtgtgggcgtgaaaacctcggaaaagtggtaccgtatgggcctccgtacggttgaagaagcaaaggccagtaagagtctgaagctgagcaagatgcagaaggcgggcttcctgtattacgaggatctggcgagcatggttagtaaagaagaagccgatgccgttacgctcatcgtgaaggaaacggtgcgtacctttgtgccggatgcgctggtgaccatcgccggcggtttccgccgtggcaaacctatgggccacgacgttgactttctgatcacgaacccgggccgcaaaatggatgacgagctgctccacaaagtggttgatctgctcaagaagcaaggtctgctgctgtacgaagacatcaaagagagcacgttcgtggaggggcaactgccaagtcataaaatcgacgccatggacaacttccagaagtgcttcgccattctcaagctgtaccagccgaaggtggataacagtgcggttgggacgagtaagaaaagtgacatggctgaggttaaggattggaaagcggttcgtgtggatctggtgatcacgccattcgagcagtacgcctatgcgctgctcggttggacgggcagcggccaatttcgtcgcgatctgcgtcgctatgcggaggaagagcgcggcatgatcctcgacaaccatgccctctacgacctgaaaaagcgcatctttctgaaagcgggcagcgaagaagagattttcgcgcatctgggtctggattatgtggagccgtgggaacgcaacgcg

SEQ ID NO: 3100 - protein, 394 aa, synthetic construct
  REGION 1..394: note = Variant of terminal deoxynucleotidyl transferase
MHHHHHHGGSGHPPSNTPEKEVPSVIARPVSQYACQRKTTLNNYNKKFTDALEIMAENYKFKENLIACHEAKRAASIFKSLPFEVTSMKDIQGLPCITDQVRDVIEEIIERGESSRVKEILNDERYKAFKQFTSVFGVGVKTSEKWYRMGLRTVEEAKASKSLKLSKMQKAGFLYYEDLASMVSKEEADAVTLIVKETVRTFVPDALVTIAGGFRRGKPMGHDVDFLITNPGRKMDDELLHKVVDLLKKQGLLLYEDIKESTFVEGQLPSHKIDAMDNFQKCFAILKLYQPKVDNSAVGTSKKSDMAEVKDWKAVRVDLVITPFEQYAYALLGWTGSGQFRRDLRRYAEEERGMILDNHALYDLKKRIFLKAGSEEEIFAHLGLDYVEPWERNA

SEQ ID NO: 3101 - DNA, 1182 bp, synthetic construct
  misc_feature 1..1182: note = Variant of terminal deoxynucleotidyl transferase
  source 1..1182: mol_type = other DNA
atgcatcaccaccatcatcatgggggttctggtcatccgccgagcaataccccggagaaggaggtgccgagcgttatcgcccgtccggttagtcagtacgcgtgccagcgcaagaccacgctgaataactacaacaaaaagttcaccgacgcgctggagatcatggccgagaactacaaatttaaagagaacctgatcgcgtgtcatgaagccaagcgcgccgcgagtatttttaaaagcctgccgttcgaggttaccagcatgaaagacatccaaggtctgccgtgcattaccgaccaggtacgtgacgtgatcgaggagatcatcgaagagggcgagagcagccgtgttaaagaaatcctcaatgacgagcgctacaaggcctttaagcagttcaccagcgtgttcggtgtgggcgtgaaaacctcggaaaagtggtaccgtatgggcctccgtacggttgaagaagcaaaggccagtaagagtctgaagctgagcaagatgcagaaggcgggcttcctgtattacgaggatctggcgagcatggttagtaaagaagaagccgatgccgttacgctcatcgtgaaggaaacggtgcgtacctttgtgccggatgcgctggtgaccatcgccggcggtttccgccgtggcaaacctatgggccacgacgttgactttctgatcacgaacccgggccgcaaagaagatgacgagctgctccacaaagtggttgatctgctcaagaagcaaggtctgctgctgtacgaagacatcaaagagagcacgttcgtggaggggcaagtgccaagtcataaaatcgacgccatggacaacttccagaagtgcttcgccattctcaagctgtaccagccgaaggtggataacagtgcggttgggacgagtaagaaaagtgacatggctgaggttaaggattggaaagcgatccgtgtggatctggtgatcacgccattcgagcagtacgcctatgcgctgctcggttggacgggcagcggccaatttcgtcgcgatctgcgtgtttatgcggaggaagagcgcgacatgatcctcgacaaccatgccctctacgacctgaaaaagcgcatctttctgaaagcgggcagcgaagaagagattttcgcgcatctgggtctggattatgtggagccgtgggaacgcaacgcg

SEQ ID NO: 3102 - protein, 394 aa, synthetic construct
  REGION 1..394: note = Variant of terminal deoxynucleotidyl transferase
MHHHHHHGGSGHPPSNTPEKEVPSVIARPVSQYACQRKTTLNNYNKKFTDALEIMAENYKFKENLIACHEAKRAASIFKSLPFEVTSMKDIQGLPCITDQVRDVIEEIIEEGESSRVKEILNDERYKAFKQFTSVFGVGVKTSEKWYRMGLRTVEEAKASKSLKLSKMQKAGFLYYEDLASMVSKEEADAVTLIVKETVRTFVPDALVTIAGGFRRGKPMGHDVDFLITNPGRKEDDELLHKVVDLLKKQGLLLYEDIKESTFVEGQVPSHKIDAMDNFQKCFAILKLYQPKVDNSAVGTSKKSDMAEVKDWKAIRVDLVITPFEQYAYALLGWTGSGQFRRDLRVYAEEERDMILDNHALYDLKKRIFLKAGSEEEIFAHLGLDYVEPWERNA

SEQ ID NO: 3103 - DNA, 1182 bp, synthetic construct
  misc_feature 1..1182: note = Variant of terminal deoxynucleotidyl transferase
  source 1..1182: mol_type = other DNA
atgcatcaccaccatcatcatgggggttctggtcatccgccgagcaataccccggagaaggaggtgccgagcgttatcgcccgtccggttagtcagtacgcgtgccagcgcaagaccacgctgaataactacaacaaaaagttcaccgacgcgctggagatcatggccgagaactacaaatttaaagagaacctgatcgcgtgtcatgaagccaagcgcgccgcgagtatttttaaaagcctgccgttcgaggttaccagcatgaaagacatccaaggtctgccgtgcattaccgaccaagtacgtgacgtgatcgaggagatcatcgaacgtggcgagagcagccgtgttaaagaaatcctcaatgacgagcgctacaaggcctttaagcagttcaccagcgtgttcggtgtgggcgtgaaaacctcggaaaagtggtaccgtatgggcctccgtacggttgaagaagcaaaggccagtaagagtctgaagctgagcaagatgcagaaggcgggcttcctgtattacgaggatctggcgagcatggttagtaaagaagaagccgatgccgttacgctcatcgtgaaggaaacggtgcgtacctttgtgccggatgcgctggtgaccatcgccggcggtttccgccgtggcaaacctatgggccacgacgttgactttctgatcacgaacccgggccgcaaaatggatgacgagctgctccacaaagtggttgatctgctcaagaagcaaggtctgctgctgtacgaagacatcaaagagagcacgttcgtggaggggcaactgccaagtcataaaatcgacgccatggacaacttccagaagtgcttcgccattctcaagctgtaccagccgaaggtggataacagtgcggttgggacgagtaagaaaagtgacatggctgaggttaaggattggaaagcgatccgtgtggatctggtgatcacgccattcgagcagtacgcctatgcgctgctcggttggacgggcagcggccaatttcgtcgcgatctgcgtcgctatgcggaggaagagcgcggcatgatcctcgacaaccatgccctctacgacctgaaaaagcgcatctttctgaaagcgggcagcgaagaagagattttcgcgcatctgggtctggattatgtggagccgtgggaacgcaacgcg

SEQ ID NO: 3104 - protein, 394 aa, synthetic construct
  REGION 1..394: note = Variant of terminal deoxynucleotidyl transferase
MHHHHHHGGSGHPPSNTPEKEVPSVIARPVSQYACQRKTTLNNYNKKFTDALEIMAENYKFKENLIACHEAKRAASIFKSLPFEVTSMKDIQGLPCITDQVRDVIEEIIERGESSRVKEILNDERYKAFKQFTSVFGVGVKTSEKWYRMGLRTVEEAKASKSLKLSKMQKAGFLYYEDLASMVSKEEADAVTLIVKETVRTFVPDALVTIAGGFRRGKPMGHDVDFLITNPGRKMDDELLHKVVDLLKKQGLLLYEDIKESTFVEGQLPSHKIDAMDNFQKCFAILKLYQPKVDNSAVGTSKKSDMAEVKDWKAIRVDLVITPFEQYAYALLGWTGSGQFRRDLRRYAEEERGMILDNHALYDLKKRIFLKAGSEEEIFAHLGLDYVEPWERNA

SEQ ID NO: 3105 - DNA, 1182 bp, synthetic construct
  misc_feature 1..1182: note = Variant of terminal deoxynucleotidyl transferase
  source 1..1182: mol_type = other DNA
atgcatcaccaccatcatcatgggggttctggtcatccgccgagcaataccccggagaaggaggtgccgagcgttatcgcccgtccggttagtcagtacgcgtgccagcgcaagaccacgctgaataactacaacaaaaagttcaccgacgcgctggagatcatggccgagaactacaaatttaaagagaacctgatcgcgtgtcatgaagccaagcgcgccgcgagtatttttaaaagcctgccgttcgaggttaccagcatgaaagacatccaaggtctgccgtgcattaccgaccaagtacgtgacgtgatcgaggagatcatcgaagagggcgagagcagccgtgttaaagaaatcctcaatgacgagcgctacaaggcctttaagcagttcaccagcgtgttcggtgtgggcgtgaaaacctcggaaaagtggtaccgtatgggcctccgtacggttgaagaagcaaaggccagtaagagtctgaagctgagcaagatgcagaaggcgggcttcctgtattacgaggatctggcgagcatggttagtaaagaagaagccgatgccgttacgctcatcgtgaaggaaacggtgcgtacctttgtgccggatgcgctggtgaccatcgccggcggtttccgccgtggcaaacctatgggccacgacgttgactttctgatcacgaacccgggccgcaaagaagatgacgagctgctccacaaagtggttgatctgctcaagaagcaaggtctgctgctgtacgaagacatcaaagagagcacgttcgtggaggggcaagtgccaagtcataaaatcgacgccatggacaacttccagaagtgcttcgccattctcaagctgtaccagccgaaggtggataacagtgcggttgggacgagtaagaaaagtgacatggctgaggttaaggattggaaagcgattcgtgtggatctggtgatcacgccattcgagcagtacgcctatgcgctgctcggttggacgggcagcggccaatttcgtcgcgatctgcgtatttatgcggaggaagagcgcggcatgatcctcgacaaccatgccctctacgacctgaaaaagcgcatctttctgaaagcgggcagcgaagaagagattttcgcgcatctgggtctggattatgtggagccgtgggaacgcaacgcg

SEQ ID NO: 3106 - protein, 394 aa, synthetic construct
  REGION 1..394: note = Variant of terminal deoxynucleotidyl transferase
MHHHHHHGGSGHPPSNTPEKEVPSVIARPVSQYACQRKTTLNNYNKKFTDALEIMAENYKFKENLIACHEAKRAASIFKSLPFEVTSMKDIQGLPCITDQVRDVIEEIIEEGESSRVKEILNDERYKAFKQFTSVFGVGVKTSEKWYRMGLRTVEEAKASKSLKLSKMQKAGFLYYEDLASMVSKEEADAVTLIVKETVRTFVPDALVTIAGGFRRGKPMGHDVDFLITNPGRKEDDELLHKVVDLLKKQGLLLYEDIKESTFVEGQVPSHKIDAMDNFQKCFAILKLYQPKVDNSAVGTSKKSDMAEVKDWKAIRVDLVITPFEQYAYALLGWTGSGQFRRDLRIYAEEERGMILDNHALYDLKKRIFLKAGSEEEIFAHLGLDYVEPWERNA

SEQ ID NO: 3107 - DNA, 1182 bp, synthetic construct
  misc_feature 1..1182: note = Variant of terminal deoxynucleotidyl transferase
  source 1..1182: mol_type = other DNA
atgcatcaccaccatcatcatgggggttctggtcatccgccgagcaataccccggagaaggaggtgccgagcgttatcgcccgtccggttagtcagtacgcgtgccagcgcaagaccacgctgaataactacaacaaaaagttcaccgacgcgctggagatcatggccgagaactacaaatttaaagagaacctgatcgcgtgtcatgaagccaagcgcgccgcgagtatttttaaaagcctgccgttcgaggttaccagcatgaaagacatccaaggtctgccgtgcattaccgacgacgtacgtgacgtgatcgaggagatcatcgaagagggcgagagcagccgtgttaaagaaatcctcaatgacgagcgctacaaggcctttaagcagttcaccagcgtgttcggtgtgggcgtgaaaacctcggaaaagtggtaccgtatgggcctccgtacggttgaagaagcaaaggccagtaagagtctgaagctgagcaagatgcagaaggcgggcttcctgtattacgaggatctggcgagcatggttagtaaagaagaagccgatgccgttacgctcatcgtgaaggaaacggtgcgtacctttgtgccggatgcgctggtgaccatcgccggcggtttccgccgtggcaaacctatgggccacgacgttgactttctgatcacgaacccgggccgcaaagaagatgacgagctgctccacaaagtggttgatctgctcaagaagcaaggtctgctgctgtacgaagacatcaaagagagcacgttcgtggaggggcaactgccaagtcataaaatcgacgccatggacaacttccagaagtgcttcgccattctcaagctgtaccagccgaaggtggataacagtgcggttgggacgagtaagaaaagtgacatggctgaggttaaggattggaaagcgatccgtgtggatctggtgatcacgccattcgagcagtacgcctatgcgctgctcggttggacgggcagcggccaatttcgtcgcgatctgcgtcgctatgcggaggaagagcgcggcatgatcctcgacaaccatgccctctacgacctgaaaaagcgcatctttctgaaagcgggcagcgaagaagagattttcgcgcatctgggtctggattatgtggagccgtgggaacgcaacgcg

SEQ ID NO: 3108 - protein, 394 aa, synthetic construct
  REGION 1..394: note = Variant of terminal deoxynucleotidyl transferase
MHHHHHHGGSGHPPSNTPEKEVPSVIARPVSQYACQRKTTLNNYNKKFTDALEIMAENYKFKENLIACHEAKRAASIFKSLPFEVTSMKDIQGLPCITDDVRDVIEEIIEEGESSRVKEILNDERYKAFKQFTSVFGVGVKTSEKWYRMGLRTVEEAKASKSLKLSKMQKAGFLYYEDLASMVSKEEADAVTLIVKETVRTFVPDALVTIAGGFRRGKPMGHDVDFLITNPGRKEDDELLHKVVDLLKKQGLLLYEDIKESTFVEGQLPSHKIDAMDNFQKCFAILKLYQPKVDNSAVGTSKKSDMAEVKDWKAIRVDLVITPFEQYAYALLGWTGSGQFRRDLRRYAEEERGMILDNHALYDLKKRIFLKAGSEEEIFAHLGLDYVEPWERNA

SEQ ID NO: 3109 - DNA, 1182 bp, synthetic construct
  misc_feature 1..1182: note = Variant of terminal deoxynucleotidyl transferase
  source 1..1182: mol_type = other DNA
atgcatcaccaccatcatcatgggggttctggtcatccgccgagcaataccccggagaaggaggtgccgagcgttatcgcccgtccggttagtcagtacgcgtgccagcgcaagaccacgctgaataactacaacaaaaagttcaccgacgcgctggagatcatggccgagaactacaaatttaaagagaacctgatcgcgtgtctggaagccaagcgcgccgcgagtatttttaaaagcctgccgttcgaggttaccagcatgaaagacatccaaggtctgccgtgcattaccgaccaggtacgtgacgtgatcgaggagatcatcgaagagggcgagagcagccgtgttaaagaaatcctcaatgacgagcgctacaaggcctttaagcagttcaccagcgtgttcggtgtgggcgtgaaaacctcggaaaagtggtaccgtatgggcctccgtacggttgaagaagcaaaggccagtaagagtctgaagctgagcaagatgcagaaggcgggcttcctgtattacgaggatctggcgagcatggttagtaaagaagaagccgatgccgttacgctcatcgtgaaggaaacggtgcgtacctttgtgccggatgcgctggtgaccatcgccggcggtttccgccgtggcaaacctatgggccacgacgttgactttctgatcacgaacccgggccgcaaagaagatgacgagctgctccacaaagtggttgatctgctcaagaagcaaggtctgctgctgtacgaagacatcaaagagagcacgttcgtggaggggcaactgccaagtcataaaatcgacgccatggacaacttccagaagtgcttcgccattctcaagctgtaccagccgaaggtggataacagtgcggttgggacgagtaagaaaagtgacatggctgaggttaaggattggaaagcgatccgtgtggatctggtgatcacgccattcgagcagtacgcctatgcgctgctcggttggacgggcagcggccaatttcgtcgcgatctgcgtcgctatgcggaggaagagcgcgacatgctgctcgacaaccatgccctctacgacctgaaaaagcgcatctttctgaaagcgggcagcgaagaagagattttcgcgcatctgggtctggattatgtggagccgtgggaacgcaacgcg

SEQ ID NO: 3110 - protein, 394 aa, synthetic construct
  REGION 1..394: note = Variant of terminal deoxynucleotidyl transferase
MHHHHHHGGSGHPPSNTPEKEVPSVIARPVSQYACQRKTTLNNYNKKFTDALEIMAENYKFKENLIACLEAKRAASIFKSLPFEVTSMKDIQGLPCITDQVRDVIEEIIEEGESSRVKEILNDERYKAFKQFTSVFGVGVKTSEKWYRMGLRTVEEAKASKSLKLSKMQKAGFLYYEDLASMVSKEEADAVTLIVKETVRTFVPDALVTIAGGFRRGKPMGHDVDFLITNPGRKEDDELLHKVVDLLKKQGLLLYEDIKESTFVEGQLPSHKIDAMDNFQKCFAILKLYQPKVDNSAVGTSKKSDMAEVKDWKAIRVDLVITPFEQYAYALLGWTGSGQFRRDLRRYAEEERDMLLDNHALYDLKKRIFLKAGSEEEIFAHLGLDYVEPWERNA

SEQ ID NO: 3111 - DNA, 1182 bp, synthetic construct
  misc_feature 1..1182: note = Variant of terminal deoxynucleotidyl transferase
  source 1..1182: mol_type = other DNA
atgcatcaccaccatcatcatgggggttctggtcatccgccgagcaataccccggagaaggaggtgccgagcgttatcgcccgtccggttagtcagtacgcgtgccagcgcaagaccacgctgaataactacaacaaaaagttcaccgacgcgctggagatcatggccgagaactacaaatttaaagagaacctgatcgcgtgtctggaagccaagcgcgccgcgagtatttttaaaagcctgccgttcgaggttaccagcatgaaagacatccaaggtctgccgtgcattaccgaccaggtacgtgacgtgatcgaggagatcatcgaagagggcgagagcagccgtgttaaagaaatcctcaatgacgagcgctacaaggcctttaagcagttcaccagcgtgttcggtgtgggcgtgaaaacctcggaaaagtggtaccgtatgggcctccgtacggttgaagaagcaaaggccagtaagagtctgaagctgagcaagatgcagaaggcgggcttcctgtattacgaggatctggcgagcatggttagtaaagaagaagccgatgccgttacgctcatcgtgaaggaaacggtgcgtacctttgtgccggatgcgctggtgaccatcgccggcggtttccgccgtggcaaacctatgggccacgacgttgactttctgatcacgaacccgggccgcaaaatggatgacgagctgctccacaaagtggttgatctgctcaagaagcaaggtctgctgctgtacgaagacatcaaagagagcacgttcgtggaggggcaactgccaagtcataaaatcgacgccatggacaacttccagaagtgcttcgccattctcaagctgtaccagccgaaggtggataacagtgcggttgggacgagtaagaaaagtgacatggctgaggttaaggattggaaagcggttcgtgtggatctggtgatcacgccattcgagcagtacgcctatgcgctgctcggttggacgggcagcggccaatttcgtcgcgatctgcgtcgctatgcggaggaagagcgcgacatgctgctcgacaaccatgccctctacgacctgaaaaagcgcatctttctgaaagcgggcagcgaagaagagattttcgcgcatctgggtctggattatgtggagccgtgggaacgcaacgcg

SEQ ID NO: 3112 - protein, 394 aa, synthetic construct
  REGION 1..394: note = Variant of terminal deoxynucleotidyl transferase
MHHHHHHGGSGHPPSNTPEKEVPSVIARPVSQYACQRKTTLNNYNKKFTDALEIMAENYKFKENLIACLEAKRAASIFKSLPFEVTSMKDIQGLPCITDQVRDVIEEIIEEGESSRVKEILNDERYKAFKQFTSVFGVGVKTSEKWYRMGLRTVEEAKASKSLKLSKMQKAGFLYYEDLASMVSKEEADAVTLIVKETVRTFVPDALVTIAGGFRRGKPMGHDVDFLITNPGRKMDDELLHKVVDLLKKQGLLLYEDIKESTFVEGQLPSHKIDAMDNFQKCFAILKLYQPKVDNSAVGTSKKSDMAEVKDWKAVRVDLVITPFEQYAYALLGWTGSGQFRRDLRRYAEEERDMLLDNHALYDLKKRIFLKAGSEEEIFAHLGLDYVEPWERNA

SEQ ID NO: 3113 - DNA, 1182 bp, synthetic construct
  misc_feature 1..1182: note = Variant of terminal deoxynucleotidyl transferase
  source 1..1182: mol_type = other DNA
atgcatcaccaccatcatcatgggggttctggtcatccgccgagcaataccccggagaaggaggtgccgagcgttatcgcccgtccggttagtcagtacgcgtgccagcgcaagaccacgctgaataactacaacaaaaagttcaccgacgcgctggagatcatggccgagaactacaaatttaaagagaacctgatcgcgtgtctggaagccaagcgcgccgcgagtatttttaaaagcctgccgttcgaggttaccagcatgaaagacatccaaggtctgccgtgcattaccgaccaggtacgtgacgtgatcgaggagatcatcgaagagggcgagagcagccgtgttaaagaaatcctcaatgacgagcgctacaaggcctttaagcagttcaccagcgtgttcggtgtgggcgtgaaaacctcggaaaagtggtaccgtatgggcctccgtacggttgaagaagcaaaggccagtaagagtctgaagctgagcaagatgcagaaggcgggcttcctgtattacgaggatctggcgagcatggttagtaaagaagaagccgatgccgttacgctcatcgtgaaggaaacggtgcgtacctttgtgccggatgcgctggtgaccatcgccggcggtttccgccgtggcaaacctatgggccacgacgttgactttctgatcacgaacccgggccgcaaaatggatgacgagctgctccacaaagtggttgatctgctcaagaagcaaggtctgctgctgtacgaagacatcaaagagagcacgttcgtggaggggcaagtgccaagtcataaaatcgacgccatggacaacttccagaagtgcttcgccattctcaagctgtaccagccgaaggtggataacagtgcggttgggacgagtaagaaaagtgacatggctgaggttaaggattggaaagcgatccgtgtggatctggtgatcacgccattcgagcagtacgcctatgcgctgctcggttggacgggcagcggccaatttcgtcgcgatctgcgtatttatgcggaggaagagcgcggcatgatcctcgacaaccatgccctctacgacctgaaaaagcgcatctttctgaaagcgggcagcgaagaagagattttcgcgcatctgggtctggattatgtggagccgtgggaacgcaacgcg

SEQ ID NO: 3114 - protein, 394 aa, synthetic construct
  REGION 1..394: note = Variant of terminal deoxynucleotidyl transferase
MHHHHHHGGSGHPPSNTPEKEVPSVIARPVSQYACQRKTTLNNYNKKFTDALEIMAENYKFKENLIACLEAKRAASIFKSLPFEVTSMKDIQGLPCITDQVRDVIEEIIEEGESSRVKEILNDERYKAFKQFTSVFGVGVKTSEKWYRMGLRTVEEAKASKSLKLSKMQKAGFLYYEDLASMVSKEEADAVTLIVKETVRTFVPDALVTIAGGFRRGKPMGHDVDFLITNPGRKMDDELLHKVVDLLKKQGLLLYEDIKESTFVEGQVPSHKIDAMDNFQKCFAILKLYQPKVDNSAVGTSKKSDMAEVKDWKAIRVDLVITPFEQYAYALLGWTGSGQFRRDLRIYAEEERGMILDNHALYDLKKRIFLKAGSEEEIFAHLGLDYVEPWERNA

SEQ ID NO: 3115 - DNA, 1182 bp, synthetic construct
  misc_feature 1..1182: note = Variant of terminal deoxynucleotidyl transferase
  source 1..1182: mol_type = other DNA
atgcatcaccaccatcatcatgggggttctggtcatccgccgagcaataccccggagaaggaggtgccgagcgttatcgcccgtccggttagtcagtacgcgtgccagcgcaagaccacgctgaataactacaacaaaaagttcaccgacgcgctggagatcatggccgagaactacaaatttaaagagaacctgatcgcgtgtctggaagccaagcgcgccgcgagtatttttaaaagcctgccgttcgaggttaccagcatgaaagacatccaaggtctgccgtgcattaccgaccaggtacgtgacgtgatcgaggagatcatcgaagagggcgagagcagccgtgttaaagaaatcctcaatgacgagcgctacaaggcctttaagcagttcaccagcgtgttcggtgtgggcgtgaaaacctcggaaaagtggtaccgtatgggcctccgtacggttgaagaagcaaaggccagtaagagtctgaagctgagcaagatgcagaaggcgggcttcctgtattacgaggatctggcgagcatggttagtaaagaagaagccgatgccgttacgctcatcgtgaaggaaacggtgcgtacctttgtgccggatgcgctggtgaccatcgccggcggtttccgccgtggcaaacctatgggccacgacgttgactttctgatcacgaacccgggccgcaaagaagatgacgagctgctccacaaagtggttgatctgctcaagaagcaaggtctgctgctgtacgaagacatcaaagagagcacgttcgtggaggggcaagtgccaagtcataaaatcgacgccatggacaacttccagaagtgcttcgccattctcaagctgtaccagccgaaggtggataacagtgcggttgggacgagtaagaaaagtgacatggctgaggttaaggattggaaagcgatccgtgtggatctggtgatcacgccattcgagcagtacgcctatgcgctgctcggttggacgggcagcggccaatttcgtcgcgatctgcgtatttatgcggaggaagagcgcggcatgatcctcgacaaccatgccctctacgacctgaaaaagcgcatctttctgaaagcgggcagcgaagaagagattttcgcgcatctgggtctggattatgtggagccgtgggaacgcaacgcg

SEQ ID NO: 3116 - protein, 394 aa, synthetic construct
  REGION 1..394: note = Variant of terminal deoxynucleotidyl transferase
MHHHHHHGGSGHPPSNTPEKEVPSVIARPVSQYACQRKTTLNNYNKKFTDALEIMAENYKFKENLIACLEAKRAASIFKSLPFEVTSMKDIQGLPCITDQVRDVIEEIIEEGESSRVKEILNDERYKAFKQFTSVFGVGVKTSEKWYRMGLRTVEEAKASKSLKLSKMQKAGFLYYEDLASMVSKEEADAVTLIVKETVRTFVPDALVTIAGGFRRGKPMGHDVDFLITNPGRKEDDELLHKVVDLLKKQGLLLYEDIKESTFVEGQVPSHKIDAMDNFQKCFAILKLYQPKVDNSAVGTSKKSDMAEVKDWKAIRVDLVITPFEQYAYALLGWTGSGQFRRDLRIYAEEERGMILDNHALYDLKKRIFLKAGSEEEIFAHLGLDYVEPWERNA

SEQ ID NO: 3117 - DNA, 1182 bp, synthetic construct
  misc_feature 1..1182: note = Variant of terminal deoxynucleotidyl transferase
  source 1..1182: mol_type = other DNA
atgcatcaccaccatcatcatgggggttctggtcatccgccgagcaataccccggagaaggaggtgccgagcgttatcgcccgtccggttagtcagtacgcgtgccagcgcaagaccacgctgaataactacaacaaaaagttcaccgacgcgctggagatcatggccgagaactacaaatttgaagagaacctgatcgcgtgtctggaagccaagcgcgccgcgagtatttttaaaagcctgccgttcgaggttaccagcatgaaagacatccaaggtctgccgtgcattaccgaccaagtacgtgacgtgatcgaggagatcatcgaagagggcgagagcagccgtgttaaagaaatcctcaatgacgagcgctacaaggcctttaagcagttcaccagcgtgttcggtgtgggcgtgaaaacctcggaaaagtggtaccgtatgggcctccgtacggttgaagaagcaaaggccagtaagagtctgaagctgagcaagatgcagaaggcgggcttcctgtattacgaggatctggcgagcatggttagtaaagaagaagccgatgccgttacgctcatcgtgaaggaaacggtgcgtacctttgtgccggatgcgctggtgaccatcgccggcggtttccgccgtggcaaacctatgggccacgacgttgactttctgatcacgaacccgggccgcaaaatggatgacgagctgctccacaaagtggttgatctgctcaagaagcaaggtctgctgctgtacgaagacatcaaagagagcacgttcgtggaggggcaagtgccaagtcataaaatcgacgccatggacaacttccagaagtgcttcgccattctcaagctgtaccagccgaaggtggataacagtgcggttgggacgagtaagaaaagtgacatggctgaggttaaggattggaaagcgatccgtgtggatctggtgatcacgccattcgagcagttcgcctatgcgctgctcggttggacgggcagcggccaatttcgtcgcgatctgcgtatttatgcggagctggagcgcgacatgctgctcgacaaccatgccctctacgacctgaaaaagcgcatctttctgaaagcgggcagcgaagaagagattttcgcgcatctgggtctggattatgtggagccgtgggaacgcaacgcg

SEQ ID NO: 3118 - protein, 394 aa, synthetic construct
  REGION 1..394: note = Variant of terminal deoxynucleotidyl transferase
MHHHHHHGGSGHPPSNTPEKEVPSVIARPVSQYACQRKTTLNNYNKKFTDALEIMAENYKFEENLIACLEAKRAASIFKSLPFEVTSMKDIQGLPCITDQVRDVIEEIIEEGESSRVKEILNDERYKAFKQFTSVFGVGVKTSEKWYRMGLRTVEEAKASKSLKLSKMQKAGFLYYEDLASMVSKEEADAVTLIVKETVRTFVPDALVTIAGGFRRGKPMGHDVDFLITNPGRKMDDELLHKVVDLLKKQGLLLYEDIKESTFVEGQVPSHKIDAMDNFQKCFAILKLYQPKVDNSAVGTSKKSDMAEVKDWKAIRVDLVITPFEQFAYALLGWTGSGQFRRDLRIYAELERDMLLDNHALYDLKKRIFLKAGSEEEIFAHLGLDYVEPWERNA

SEQ ID NO: 3119 - DNA, 1182 bp, synthetic construct
  misc_feature 1..1182: note = Variant of terminal deoxynucleotidyl transferase
  source 1..1182: mol_type = other DNA
atgcatcaccaccatcatcatgggggttctggtcatccgccgagcaataccccggagaaggaggtgccgagcgttatcgcccgtccggttagtcagtacgcgtgccagcgcaagaccacgctgaataactacaacaaaaagttcaccgacgcgctggagatcatggccgagaactacaaatttaaagagaacctgatcgcgtgtctggaagccaagcgcgccgcgagtatttttaaaagcctgccgttcgaggttaccagcatgaaagacatccaaggtctgccgtgcattaccgaccaggtacgtgacgtgatcgaggagatcatcgaacgtggcgagagcagccgtgttaaagaaatcctcaatgacgagcgctacaaggcctttaagcagttcaccagcgtgttcggtgtgggcgtgaaaacctcggaaaagtggtaccgtatgggcctccgtacggttgaagaagcaaaggccagtaagagtctgaagctgagcaagatgcagaaggcgggcttcctgtattacgaggatctggcgagcatggttagtaaagaagaagccgatgccgttacgctcatcgtgaaggaaacggtgcgtacctttgtgccggatgcgctggtgaccatcgccggcggtttccgccgtggcaaacctatgggccacgacgttgactttctgatcacgaacccgggccgcaaagaagatgacgagctgctccacaaagtggttgatctgctcaagaagcaaggtctgctgctgtacgaagacatcaaagagagcacgttcgtggaggggcaagtgccaagtcataaaatcgacgccatggacaacttccagaagtgcttcgccattctcaagctgtaccagccgaaggtggataacagtgcggttgggacgagtaagaaaagtgacatggctgaggttaaggattggaaagcgatccgtgtggatctggtgatcacgccattcgagcagtacgcctatgcgctgctcggttggacgggcagcggccaatttcgtcgcgatctgcgtcgctatgcggaggaagagcgcggcatgatcctcgacaaccatgccctctacgacctgaaaaagcgcatctttctgaaagcgggcagcgaagaagagattttcgcgcatctgggtctggattatgtggagccgtgggaacgcaacgcg

SEQ ID NO: 3120 - protein, 394 aa, synthetic construct
  REGION 1..394: note = Variant of terminal deoxynucleotidyl transferase
MHHHHHHGGSGHPPSNTPEKEVPSVIARPVSQYACQRKTTLNNYNKKFTDALEIMAENYKFKENLIACLEAKRAASIFKSLPFEVTSMKDIQGLPCITDQVRDVIEEIIERGESSRVKEILNDERYKAFKQFTSVFGVGVKTSEKWYRMGLRTVEEAKASKSLKLSKMQKAGFLYYEDLASMVSKEEADAVTLIVKETVRTFVPDALVTIAGGFRRGKPMGHDVDFLITNPGRKEDDELLHKVVDLLKKQGLLLYEDIKESTFVEGQVPSHKIDAMDNFQKCFAILKLYQPKVDNSAVGTSKKSDMAEVKDWKAIRVDLVITPFEQYAYALLGWTGSGQFRRDLRRYAEEERGMILDNHALYDLKKRIFLKAGSEEEIFAHLGLDYVEPWERNA

SEQ ID NO: 3121 - DNA, 1182 bp, synthetic construct
  misc_feature 1..1182: note = Variant of terminal deoxynucleotidyl transferase
  source 1..1182: mol_type = other DNA
atgcatcaccaccatcatcatgggggttctggtcatccgccgagcaataccccggagaaggaggtgccgagcgttatcgcccgtccggttagtcagtacgcgtgccagcgcaagaccacgctgaataactacaacaaaaagttcaccgacgcgctggagatcatggccgagaactacaaatttgaagagaacctgatcgcgtgtcatgaagccaagcgcgccgcgagtatttttaaaagcctgccgttcgaggttaccagcatgaaagacatccaaggtctgccgtgcattaccgaccaagtacgtgacgtgatcgaggagatcatcgaagagggcgagagcagccgtgttaaagaaatcctcaatgacgagcgctacaaggcctttaagcagttcaccagcgtgttcggtgtgggcgtgaaaacctcggaaaagtggtaccgtatgggcctccgtacggttgaagaagcaaaggccagtaagagtctgaagctgagcaagatgcagaaggcgggcttcctgtattacgaggatctggcgagcatggttagtaaagaagaagccgatgccgttacgctcatcgtgaaggaaacggtgcgtacctttgtgccggatgcgctggtgaccatcgccggcggtttccgccgtggcaaacctatgggccacgacgttgactttctgatcacgaacccgggccgcaaagaagatgacgagctgctccacaaagtggttgatctgctcaagaagcaaggtctgctgctgtacgaagacatcaaagagagcacgttcgtggaggggcaactgccaagtcataaaatcgacgccatggacaacttccagaagtgcttcgccattctcaagctgtaccagccgaaggtggataacagtgcggttgggacgagtaagaaaagtgacatggctgaggttaaggattggaaagcgatccgtgtggatctggtgatcacgccattcgagcagtacgcctatgcgctgctcggttggacgggcagcggccaatttcgtcgcgatctgcgtcgctatgcggaggaagagcgcgacatgatcctcgacaaccatgccctctacgacctgaaaaagcgcatctttctgaaagcgggcagcgaagaagagattttcgcgcatctgggtctggattatgtggagccgtgggaacgcaacgcg

SEQ ID NO: 3122 - protein, 394 aa, synthetic construct
  REGION 1..394: note = Variant of terminal deoxynucleotidyl transferase
MHHHHHHGGSGHPPSNTPEKEVPSVIARPVSQYACQRKTTLNNYNKKFTDALEIMAENYKFEENLIACHEAKRAASIFKSLPFEVTSMKDIQGLPCITDQVRDVIEEIIEEGESSRVKEILNDERYKAFKQFTSVFGVGVKTSEKWYRMGLRTVEEAKASKSLKLSKMQKAGFLYYEDLASMVSKEEADAVTLIVKETVRTFVPDALVTIAGGFRRGKPMGHDVDFLITNPGRKEDDELLHKVVDLLKKQGLLLYEDIKESTFVEGQLPSHKIDAMDNFQKCFAILKLYQPKVDNSAVGTSKKSDMAEVKDWKAIRVDLVITPFEQYAYALLGWTGSGQFRRDLRRYAEEERDMILDNHALYDLKKRIFLKAGSEEEIFAHLGLDYVEPWERNA

SEQ ID NO: 3123 - DNA, 1182 bp, synthetic construct
  misc_feature 1..1182: note = Variant of terminal deoxynucleotidyl transferase
  source 1..1182: mol_type = other DNA
atgcatcaccaccatcatcatgggggttctggtcatccgccgagcaataccccggagaaggaggtgccgagcgttatcgcccgtccggttagtcagtacgcgtgccagcgcaagaccacgctgaataactacaacaaaaagttcaccgacgcgctggagatcatggccgagaactacaaatttaaagagaacctgcaggcgtgtctggaagccaagcgcgccgcgagtatttttaaaagcctgccgttcgaggttaccagcatgaaagacatccaaggtctgccgtgcattaccgaccaggtacgtgacgtgatcgaggagatcatcgaagagggcgagagcagccgtgttaaagaaatcctcaatgacgagcgctacaaggcctttaagcagttcaccagcgtgttcggtgtgggcgtgaaaacctcggaaaagtggtaccgtatgggcctccgtacggttgaagaagcaaaggccagtaagagtctgaagctgagcaagatgcagaaggcgggcttcctgtattacgaggatctggcgagcatggttagtaaagaagaagccgatgccgttacgctcatcgtgaaggaaacggtgcgtacctttgtgccggatgcgctggtgaccatcgccggcggtttccgccgtggcaaacctatgggccacgacgttgactttctgatcacgaacccgggccgcaaaatggatgacgagctgctccacaaagtggttgatctgctcaagaagcaaggtctgctgctgtacgaagacatcaaagagagcacgttcgtggaggggcaactgccaagtcataaaatcgacgccatggacaacttccagaagtgcttcgccattctcaagctgtaccagccgaaggtggataacagtgcggttgggacgagtaagaaaagtgacatggctgaggttaaggattggaaagcgatccgtgtggatctggtgatcacgccattcgagcagtacgcctatgcgctgctcggttggacgggcagcggccaatttcgtcgcgatctgcgtagttatgcggaggaagagcgcggcatgatcctcgacaaccatgccctctacgacctgaaaaaacgcatctttctgaaagcgggcagcgaagaagagattttcgcgcatctgggtctggattatgtggagccgtgggaacgcaacgcg

SEQ ID NO: 3124 - protein, 394 aa, synthetic construct
  REGION 1..394: note = Variant of terminal deoxynucleotidyl transferase
MHHHHHHGGSGHPPSNTPEKEVPSVIARPVSQYACQRKTTLNNYNKKFTDALEIMAENYKFKENLQACLEAKRAASIFKSLPFEVTSMKDIQGLPCITDQVRDVIEEIIEEGESSRVKEILNDERYKAFKQFTSVFGVGVKTSEKWYRMGLRTVEEAKASKSLKLSKMQKAGFLYYEDLASMVSKEEADAVTLIVKETVRTFVPDALVTIAGGFRRGKPMGHDVDFLITNPGRKMDDELLHKVVDLLKKQGLLLYEDIKESTFVEGQLPSHKIDAMDNFQKCFAILKLYQPKVDNSAVGTSKKSDMAEVKDWKAIRVDLVITPFEQYAYALLGWTGSGQFRRDLRSYAEEERGMILDNHALYDLKKRIFLKAGSEEEIFAHLGLDYVEPWERNA

SEQ ID NO: 3125 - DNA, 1182 bp, synthetic construct
  misc_feature 1..1182: note = Variant of terminal deoxynucleotidyl transferase
  source 1..1182: mol_type = other DNA
atgcatcaccaccatcatcatgggggttctggtcatccgccgagcaataccccggagaaggaggtgccgagcgttatcgcccgtccggttagtcagtacgcgtgccagcgcaagaccacgctgaataactacaacaaaaagttcaccgacgcgctggagatcatggccgagaactacaaatttaaagagaacctgatcgcgtgtctggaagccaagcgcgccgcgagtatttttaaaagcctgccgttcgaggttaccagcatgaaagacatccaaggtctgccgtgcattaccgaccaagtacgtgacgtgatcgaggagatcatcgaagagggcgagagcagccgtgttaaagaaatcctcaatgacgagcgctacaaggcctttaagcagttcaccagcgtgttcggtgtgggcgtgaaaacctcggaaaagtggtaccgtatgggcctccgtacggttgaagaagcaaaggccagtaagagtctgaagctgagcaagatgcagaaggcgggcttcctgtattacgaggatctggcgagcatggttagtaaagaagaagccgatgccgttacgctcatcgtgaaggaaacggtgcgtacctttgtgccggatgcgctggtgaccatcgccggcggtttccgccgtggcaaacctatgggccacgacgttgactttctgatcacgaacccgggccgcaaagaagatgacgagctgctccacaaagtggttgatctgctcaagaagcaaggtctgctgctgtacgaagacatcaaagagagcacgttcgtggaggggcaagtgccaagtcataaaatcgacgccatggacaacttccagaagtgcttcgccattctcaagctgtaccagccgaaggtggataacagtgcggttgggacgagtaagaaaagtgacatggctgaggttaaggattggaaagcgatccgtgtggatctggtgatcacgccattcgagcagtacgcctatgcgctgctcggttggacgggcagcggccaatttcgtcgcgatctgcgtatttatgcggagctggagcgcgacatgctgctcgacaaccatgccctctacgacctgaaaaaacgcatctttctgaaagcgggcagcgaagaagagattttcgcgcatctgggtctggattatgtggagccgtgggaacgcaacgcg

SEQ ID NO: 3126 - protein, 394 aa, synthetic construct
  REGION 1..394: note = Variant of terminal deoxynucleotidyl transferase
MHHHHHHGGSGHPPSNTPEKEVPSVIARPVSQYACQRKTTLNNYNKKFTDALEIMAENYKFKENLIACLEAKRAASIFKSLPFEVTSMKDIQGLPCITDQVRDVIEEIIEEGESSRVKEILNDERYKAFKQFTSVFGVGVKTSEKWYRMGLRTVEEAKASKSLKLSKMQKAGFLYYEDLASMVSKEEADAVTLIVKETVRTFVPDALVTIAGGFRRGKPMGHDVDFLITNPGRKEDDELLHKVVDLLKKQGLLLYEDIKESTFVEGQVPSHKIDAMDNFQKCFAILKLYQPKVDNSAVGTSKKSDMAEVKDWKAIRVDLVITPFEQYAYALLGWTGSGQFRRDLRIYAELERDMLLDNHALYDLKKRIFLKAGSEEEIFAHLGLDYVEPWERNA

SEQ ID NO: 3127 - DNA, 1182 bp, synthetic construct
  misc_feature 1..1182: note = Variant of terminal deoxynucleotidyl transferase
  source 1..1182: mol_type = other DNA
atgcatcaccaccatcatcatgggggttctggtcatccgccgagcaataccccggagaaggaggtgccgagcgttatcgcccgtccggttagtcagtacgcgtgccagcgcaagaccacgctgaataactacaacaaaaagttcaccgacgcgctggagatcatggccgagaactacaaatttaaagagaacctgatcgcgtgtctggaagccaagcgcgccgcgagtatttttaaaagcctgccgttcgaggttaccagcatgaaagacatccaaggtctgccgtgcattaccgaccaggtacgtgacgtgatcgaggagatcatcgaagagggcgagagcagccgtgttaaagaaatcctcaatgacgagcgctacaaggcctttaagcagttcaccagcgtgttcggtgtgggcgtgaaaacctcggaaaagtggtaccgtatgggcctccgtacggttgaagaagcaaaggccagtaagagtctgaagctgagcaagatgcagaaggcgggcttcctgtattacgaggatctggcgagcatggttagtaaagaagaagccgatgccgttacgctcatcgtgaaggaaacggtgcgtacctttgtgccggatgcgctggtgaccatcgccggcggtttccgccgtggcaaacctatgggccacgacgttgactttctgatcacgaacccgggccgcaaaatggatgacgagctgctccacaaagtggttgatctgctcaagaagcaaggtctgctgctgtacgaagacatcaaagagagcacgttcgtggaggggcaactgccaagtcataaaatcgacgccatggacaacttccagaagtgcttcgccattctcaagctgtaccagccgaaggtggataacagtgcggttgggacgagtaagaaaagtgacatggctgaggttaaggattggaaagcgatccgtgtggatctggtgatcacgccattcgagcagtacgcctatgcgctgctcggttggacgggcagcggccaatttcgtcgcgatctgcgtcgctatgcggaggaagagcgcgacatgctgctcgacaaccatgccctctacgacctgaaaaagcgcatctttctgaaagcgggcagcgaagaagagattttcgcgcatctgggtctggattatgtggagccgtgggaacgcaacgcg

SEQ ID NO: 3128 - protein, 394 aa, synthetic construct
  REGION 1..394: note = Variant of terminal deoxynucleotidyl transferase
MHHHHHHGGSGHPPSNTPEKEVPSVIARPVSQYACQRKTTLNNYNKKFTDALEIMAENYKFKENLIACLEAKRAASIFKSLPFEVTSMKDIQGLPCITDQVRDVIEEIIEEGESSRVKEILNDERYKAFKQFTSVFGVGVKTSEKWYRMGLRTVEEAKASKSLKLSKMQKAGFLYYEDLASMVSKEEADAVTLIVKETVRTFVPDALVTIAGGFRRGKPMGHDVDFLITNPGRKMDDELLHKVVDLLKKQGLLLYEDIKESTFVEGQLPSHKIDAMDNFQKCFAILKLYQPKVDNSAVGTSKKSDMAEVKDWKAIRVDLVITPFEQYAYALLGWTGSGQFRRDLRRYAEEERDMLLDNHALYDLKKRIFLKAGSEEEIFAHLGLDYVEPWERNA

SEQ ID NO: 3129 - DNA, 1182 bp, synthetic construct
  misc_feature 1..1182: note = Variant of terminal deoxynucleotidyl transferase
  source 1..1182: mol_type = other DNA
atgcatcaccaccatcatcatgggggttctggtcatccgccgagcaataccccggagaaggaggtgccgagcgttatcgcccgtccggttagtcagtacgcgtgccagcgcaagaccacgctgaataactacaacaaaaagttcaccgacgcgctggagatcatggccgagaactacaaatttaaagagaacctgatcgcgtgtctggaagccaagcgcgccgcgagtatttttaaaagcctgccgttcgaggttaccagcatgaaagacatccaaggtctgccgtgcattaccgaccaggtacgtgacgtgatcgaggagatcatcgaacgtggcgagagcagccgtgttaaagaaatcctcaatgacgagcgctacaaggcctttaagcagttcaccagcgtgttcggtgtgggcgtgaaaacctcggaaaagtggtaccgtatgggcctccgtacggttgaagaagcaaaggccagtaagagtctgaagctgagcaagatgcagaaggcgggcttcctgtattacgaggatctggcgagcatggttagtaaagaagaagccgatgccgttacgctcatcgtgaaggaaacggtgcgtacctttgtgccggatgcgctggtgaccatcgccggcggtttccgccgtggcaaacctatgggccacgacgttgactttctgatcacgaacccgggccgcaaaatggatgacgagctgctccacaaagtggttgatctgctcaagaagcaaggtctgctgctgtacgaagacatcaaagagagcacgttcgtggaggggcaactgccaagtcataaaatcgacgccatggacaacttccagaagtgcttcgccattctcaagctgtaccagccgaaggtggataacagtgcggttgggacgagtaagaaaagtgacatggctgaggttaaggattggaaagcgatccgtgtggatctggtgatcacgccattcgagcagtacgcctatgcgctgctcggttggacgggcagcggccaatttcgtcgcgatctgcgtgtttatgcggagctggagcgcggcatgatcctcgacaaccatgccctctacgacctgaaaaagcgcatctttctgaaagcgggcagcgaagaagagattttcgcgcatctgggtctggattatgtggagccgtgggaacgcaacgcg

SEQ ID NO: 3130 - protein, 394 aa, synthetic construct
  REGION 1..394: note = Variant of terminal deoxynucleotidyl transferase
MHHHHHHGGSGHPPSNTPEKEVPSVIARPVSQYACQRKTTLNNYNKKFTDALEIMAENYKFKENLIACLEAKRAASIFKSLPFEVTSMKDIQGLPCITDQVRDVIEEIIERGESSRVKEILNDERYKAFKQFTSVFGVGVKTSEKWYRMGLRTVEEAKASKSLKLSKMQKAGFLYYEDLASMVSKEEADAVTLIVKETVRTFVPDALVTIAGGFRRGKPMGHDVDFLITNPGRKMDDELLHKVVDLLKKQGLLLYEDIKESTFVEGQLPSHKIDAMDNFQKCFAILKLYQPKVDNSAVGTSKKSDMAEVKDWKAIRVDLVITPFEQYAYALLGWTGSGQFRRDLRVYAELERGMILDNHALYDLKKRIFLKAGSEEEIFAHLGLDYVEPWERNA

SEQ ID NO: 3131 - DNA, 1182 bp, synthetic construct
  misc_feature 1..1182: note = Variant of terminal deoxynucleotidyl transferase
  source 1..1182: mol_type = other DNA
atgcatcaccaccatcatcatgggggttctggtcatccgccgagcaataccccggagaaggaggtgccgagcgttatcgcccgtccggttagtcagtacgcgtgccagcgcaagaccacgctgaataactacaacaaaaagttcaccgacgcgctggagatcatggccgagaactacaaatttaaagagaacctgcaggcgtgtctggaagccaagcgcgccgcgagtatttttaaaagcctgccgttcgaggttaccagcatgaaagacatccaaggtctgccgtgcattaccgaccaagtacgtgacgtgatcgaggagatcatcgaagagggcgagagcagccgtgttaaagaaatcctcaatgacgagcgctacaaggcctttaagcagttcaccagcgtgttcggtgtgggcgtgaaaacctcggaaaagtggtaccgtatgggcctccgtacggttgaagaagcaaaggccagtaagagtctgaagctgagcaagatgcagaaggcgggcttcctgtattacgaggatctggcgagcatggttagtaaagaagaagccgatgccgttacgctcatcgtgaaggaaacggtgcgtacctttgtgccggatgcgctggtgaccatcgccggcggtttccgccgtggcaaacctatgggccacgacgttgactttctgatcacgaacccgggccgcaaaatggatgacgagctgctccacaaagtggttgatctgctcaagaagcaaggtctgctgctgtacgaagacatcaaagagagcacgttcgtggaggggcaactgccaagtcataaaatcgacgccatggacaacttccagaagtgcttcgccattctcaagctgtaccagccgaaggtggataacagtgcggttgggacgagtaagaaaagtgacatggctgaggttaaggattggaaagcgatccgtgtggatctggtgatcacgccattcgagcagtacgcctatgcgctgctcggttggacgggcagcggccaatttcgtcgcgatctgcgtcgctatgcggaggaagagcgcggcatgatcctcgacaaccatgccctctacgacctgaaaaaacgcatctttctgaaagcgagcagcgaagaagagattttcgcgcatctgggtctggattatgtggagccgtgggaacgcaacgcg

SEQ ID NO: 3132 - protein, 394 aa, synthetic construct
  REGION 1..394: note = Variant of terminal deoxynucleotidyl transferase
MHHHHHHGGSGHPPSNTPEKEVPSVIARPVSQYACQRKTTLNNYNKKFTDALEIMAENYKFKENLQACLEAKRAASIFKSLPFEVTSMKDIQGLPCITDQVRDVIEEIIEEGESSRVKEILNDERYKAFKQFTSVFGVGVKTSEKWYRMGLRTVEEAKASKSLKLSKMQKAGFLYYEDLASMVSKEEADAVTLIVKETVRTFVPDALVTIAGGFRRGKPMGHDVDFLITNPGRKMDDELLHKVVDLLKKQGLLLYEDIKESTFVEGQLPSHKIDAMDNFQKCFAILKLYQPKVDNSAVGTSKKSDMAEVKDWKAIRVDLVITPFEQYAYALLGWTGSGQFRRDLRRYAEEERGMILDNHALYDLKKRIFLKASSEEEIFAHLGLDYVEPWERNA

SEQ ID NO: 3133 - DNA, 1182 bp, synthetic construct
  misc_feature 1..1182: note = Variant of terminal deoxynucleotidyl transferase
  source 1..1182: mol_type = other DNA
atgcatcaccaccatcatcatgggggttctggtcatccgccgagcaataccccggagaaggaggtgccgagcgttatcgcccgtccggttagtcagtacgcgtgccagcgcaagaccacgctgaataactacaacaaaaagttcaccgacgcgctggagatcatggccgagaactacaaatttaaagagaacctgatcgcgtgtctggaagccaagcgcgccgcgagtatttttaaaagcctgccgttcgaggttaccagcatgaaagacatccaaggtctgccgtgcattaccgacgacgtacgtgacgtgatcgaggagatcatcgaagagggcgagagcagccgtgttaaagaaatcctcaatgacgagcgctacaaggcctttaagcagttcaccagcgtgttcggtgtgggcgtgaaaacctcggaaaagtggtaccgtatgggcctccgtacggttgaagaagcaaaggccagtaagagtctgaagctgagcaagatgcagaaggcgggcttcctgtattacgaggatctggcgagcatggttagtaaagaagaagccgatgccgttacgctcatcgtgaaggaaacggtgcgtacctttgtgccggatgcgctggtgaccatcgccggcggtttccgccgtggcaaacctatgggccacgacgttgactttctgatcacgaacccgggccgcaaagaagatgacgagctgctccacaaagtggttgatctgctcaagaagcaaggtctgctgctgtacgaagacatcaaagagagcacgttcgtggaggggcaagtgccaagtcataaaatcgacgccatggacaacttccagaagtgcttcgccattctcaagctgtaccagccgaaggtggataacagtgcggttgggacgagtaagaaaagtgacatggctgaggttaaggattggaaagcgatccgtgtggatctggtgatcacgccattcgagcagtacgcctatgcgctgctcggttggacgggcagcggccaatttcgtcgcgatctgcgtcgctatgcggaggaagagcgcggcatgatcctcgacaaccatgccctctacgacctgaaagaacgcatctttctgaaagcgggcagcgaagaagagattttcgcgcatctgggtctggattatgtggagccgtgggaacgcaacgcg

SEQ ID NO: 3134 - protein, 394 aa, synthetic construct
  REGION 1..394: note = Variant of terminal deoxynucleotidyl transferase
MHHHHHHGGSGHPPSNTPEKEVPSVIARPVSQYACQRKTTLNNYNKKFTDALEIMAENYKFKENLIACLEAKRAASIFKSLPFEVTSMKDIQGLPCITDDVRDVIEEIIEEGESSRVKEILNDERYKAFKQFTSVFGVGVKTSEKWYRMGLRTVEEAKASKSLKLSKMQKAGFLYYEDLASMVSKEEADAVTLIVKETVRTFVPDALVTIAGGFRRGKPMGHDVDFLITNPGRKEDDELLHKVVDLLKKQGLLLYEDIKESTFVEGQVPSHKIDAMDNFQKCFAILKLYQPKVDNSAVGTSKKSDMAEVKDWKAIRVDLVITPFEQYAYALLGWTGSGQFRRDLRRYAEEERGMILDNHALYDLKERIFLKAGSEEEIFAHLGLDYVEPWERNA

SEQ ID NO: 3135 - DNA, 1182 bp, synthetic construct
  misc_feature 1..1182: note = Variant of terminal deoxynucleotidyl transferase
  source 1..1182: mol_type = other DNA
atgcatcaccaccatcatcatgggggttctggtcatccgccgagcaataccccggagaaggaggtgccgagcgttatcgcccgtccggttagtcagtacgcgtgccagcgcaagaccacgctgaataactacaacaaaaagttcaccgacgcgctggagatcatggccgagaactacaaatttaaagagaacctgatcgcgtgtcatgaagccaagcgcgccgcgagtatttttaaaagcctgccgttcgaggttaccagcatgaaagacatccaaggtctgccgtgcattaccgaccaggtacgtgacgtgatcgaggagatcatcgaagagggcgagagcagccgtgttaaagaaatcctcaatgacgagcgctacaaggcctttaagcagttcaccagcgtgttcggtgtgggcgtgaaaacctcggaaaagtggtaccgtatgggcctccgtacggttgaagaagcaaaggccagtaagagtctgaagctgagcaagatgcagaaggcgggcttcctgtattacgaggatctggcgagcatggttagtaaagaagaagccgatgccgttacgctcatcgtgaaggaaacggtgcgtacctttgtgccggatgcgctggtgaccatcgccggcggtttccgccgtggcaaacctatgggccacgacgttgactttctgatcacgaacccgggccgcaaagaagatgacgagctgctccacaaagtggttgatctgctcaagaagcaaggtctgctgctgtacgaagacatcaaagagagcacgttcgtggaggggcaactgccaagtcataaaatcgacgccatggacaacttccagaagtgcttcgccattctcaagctgtaccagccgaaggtggataacagtgcggttgggacgagtaagaaaagtgacatggctgaggttaaggattggaaagcggttcgtgtggatctggtgatcacgccattcgagcagtacgcctatgcgctgctcggttggacgggcagcggccaatttcgtcgcgatctgcgtcgctatgcggaggaagagcgcgacatgatcctcgacaaccatgccctctacgacctgaaaaagcgcatctttctgaaagcgggcagcgaagaagagattttcgcgcatctgggtctggattatgtggagccgtgggaacgcaacgcg

SEQ ID NO: 3136 - protein, 394 aa, synthetic construct
  REGION 1..394: note = Variant of terminal deoxynucleotidyl transferase
MHHHHHHGGSGHPPSNTPEKEVPSVIARPVSQYACQRKTTLNNYNKKFTDALEIMAENYKFKENLIACHEAKRAASIFKSLPFEVTSMKDIQGLPCITDQVRDVIEEIIEEGESSRVKEILNDERYKAFKQFTSVFGVGVKTSEKWYRMGLRTVEEAKASKSLKLSKMQKAGFLYYEDLASMVSKEEADAVTLIVKETVRTFVPDALVTIAGGFRRGKPMGHDVDFLITNPGRKEDDELLHKVVDLLKKQGLLLYEDIKESTFVEGQLPSHKIDAMDNFQKCFAILKLYQPKVDNSAVGTSKKSDMAEVKDWKAVRVDLVITPFEQYAYALLGWTGSGQFRRDLRRYAEEERDMILDNHALYDLKKRIFLKAGSEEEIFAHLGLDYVEPWERNA

SEQ ID NO: 3137 - DNA, 1182 bp, synthetic construct
  misc_feature 1..1182: note = Variant of terminal deoxynucleotidyl transferase
  source 1..1182: mol_type = other DNA
atgcatcaccaccatcatcatgggggttctggtcatccgccgagcaataccccggagaaggaggtgccgagcgttatcgcccgtccggttagtcagtacgcgtgccagcgcaagaccacgctgaataactacaacaaaaagttcaccgacgcgctggagatcatggccgagaactacaaatttaaagagaacctgatcgcgtgtctggaagccaagcgcgccgcgagtatttttaaaagcctgccgttcgaggttaccagcatgaaagacatccaaggtctgccgtgcattaccgaccaggtacgtgacgtgatcgaggagatcatcgaagagggcgagagcagccgtgttaaagaaatcctcaatgacgagcgctacaaggcctttaagcagttcaccagcgtgttcggtgtgggcgtgaaaacctcggaaaagtggtaccgtatgggcctccgtacggttgaagaagcaaaggccagtaagagtctgaagctgagcaagatgcagaaggcgggcttcctgtattacgaggatctggcgagcatggttagtaaagaagaagccgatgccgttacgctcatcgtgaaggaaacggtgcgtacctttgtgccggatgcgctggtgaccatcgccggcggtttccgccgtggcaaacctatgggccacgacgttgactttctgatcacgaacccgggccgcaaaatggatgacgagctgctccacaaagtggttgatctgctcaagaagcaaggtctgctgctgtacgaagacatcaaagagagcacgttcgtggaggggcaactgccaagtcataaaatcgacgccatggacaacttccagaagtgcttcgccattctcaagctgtaccagccgaaggtggataacagtgcggttgggacgagtaagaaaagtgacatggctgaggttaaggattggaaagcgatccgtgtggatctggtgatcacgccattcgagcagtacgcctatgcgctgctcggttggacgggcagcggccaatttcgtcgcgatctgcgtcgctatgcggaggaagagcgcgacatgatcctcgacaaccatgccctctacgacctgaaaaagcgcatctttctgaaagcgggcagcgaagaagagattttcgcgcatctgggtctggattatgtggagccgtgggaacgcaacgcg

SEQ ID NO: 3138 - protein, 394 aa, synthetic construct
  REGION 1..394: note = Variant of terminal deoxynucleotidyl transferase
MHHHHHHGGSGHPPSNTPEKEVPSVIARPVSQYACQRKTTLNNYNKKFTDALEIMAENYKFKENLIACLEAKRAASIFKSLPFEVTSMKDIQGLPCITDQVRDVIEEIIEEGESSRVKEILNDERYKAFKQFTSVFGVGVKTSEKWYRMGLRTVEEAKASKSLKLSKMQKAGFLYYEDLASMVSKEEADAVTLIVKETVRTFVPDALVTIAGGFRRGKPMGHDVDFLITNPGRKMDDELLHKVVDLLKKQGLLLYEDIKESTFVEGQLPSHKIDAMDNFQKCFAILKLYQPKVDNSAVGTSKKSDMAEVKDWKAIRVDLVITPFEQYAYALLGWTGSGQFRRDLRRYAEEERDMILDNHALYDLKKRIFLKAGSEEEIFAHLGLDYVEPWERNA

SEQ ID NO: 3139 - DNA, 1182 bp, synthetic construct
  misc_feature 1..1182: note = Variant of terminal deoxynucleotidyl transferase
  source 1..1182: mol_type = other DNA
atgcatcaccaccatcatcatgggggttctggtcatccgccgagcaataccccggagaaggaggtgccgagcgttatcgcccgtccggttagtcagtacgcgtgccagcgcaagaccacgctgaataactacaacaaaaagttcaccgacgcgctggagatcatggccgagaactacaaatttaaagagaacctgatcgcgtgtctggaagccaagcgcgccgcgagtatttttaaaagcctgccgttcgaggttaccagcatgaaagacatccaaggtctgccgtgcattaccgaccaggtacgtgacgtgatcgaggagatcatcgaagagggcgagagcagccgtgttaaagaaatcctcaatgacgagcgctacaaggcctttaagcagttcaccagcgtgttcggtgtgggcgtgaaaacctcggaaaagtggtaccgtatgggcctccgtacggttgaagaagcaaaggccagtaagagtctgaagctgagcaagatgcagaaggcgggcttcctgtattacgaggatctggcgagcatggttagtaaagaagaagccgatgccgttacgctcatcgtgaaggaaacggtgcgtacctttgtgccggatgcgctggtgaccatcgccggcggtttccgccgtggcaaacctatgggccacgacgttgactttctgatcacgaacccgggccgcaaagaggatgacgagctgctccacaaagtggttgatctgctcaagaagcaaggtctgctgctgtacgaagacatcaaagagagcacgttcgtggaggggcaactgccaagtcataaaatcgacgccatggacaacttccagaagtgcttcgccattctcaagctgtaccagccgaaggtggataacagtgcggttgggacgagtaagaaaagtgacatggctgaggttaaggattggaaagcgattcgtgtggatctggtgatcacgccatgggagcagtacgcctatgcgctgctcggttggacgggcagcggccaatttcgtcgcgatctgcgtcgctatgcggaggaagagcgcggcatgctgctcgacaaccatgccctctacgacctgaaaaagcgcatctttctgaaagcgggcagcgaagaagagattttcgcgcatctgggtctggattatgtggagccgtgggaacgcaacgcg

SEQ ID NO: 3140 - protein, 394 aa, synthetic construct
  REGION 1..394: note = Variant of terminal deoxynucleotidyl transferase
MHHHHHHGGSGHPPSNTPEKEVPSVIARPVSQYACQRKTTLNNYNKKFTDALEIMAENYKFKENLIACLEAKRAASIFKSLPFEVTSMKDIQGLPCITDQVRDVIEEIIEEGESSRVKEILNDERYKAFKQFTSVFGVGVKTSEKWYRMGLRTVEEAKASKSLKLSKMQKAGFLYYEDLASMVSKEEADAVTLIVKETVRTFVPDALVTIAGGFRRGKPMGHDVDFLITNPGRKEDDELLHKVVDLLKKQGLLLYEDIKESTFVEGQLPSHKIDAMDNFQKCFAILKLYQPKVDNSAVGTSKKSDMAEVKDWKAIRVDLVITPWEQYAYALLGWTGSGQFRRDLRRYAEEERGMLLDNHALYDLKKRIFLKAGSEEEIFAHLGLDYVEPWERNA

SEQ ID NO: 3141 - DNA, 1182 bp, synthetic construct
  misc_feature 1..1182: note = Variant of terminal deoxynucleotidyl transferase
  source 1..1182: mol_type = other DNA
atgcatcaccaccatcatcatgggggttctggtcatccgccgagcaataccccggagaaggaggtgccgagcgttatcgcccgtccggttagtcagtacgcgtgccagcgcaagaccacgctgaataactacaacaaaaagttcaccgacgcgctggagatcatggccgagaactacaaatttaaagagaacctgatcgcgtgtctggaagccaagcgcgccgcgagtatttttaaaagcctgccgttcgaggttaccagcatgaaagacatccaaggtctgccgtgcattaccgaccaggtacgtgacgtgatcgaggagatcatcgaagagggcgagagcagccgtgttaaagaaatcctcaatgacgagcgctacaaggcctttaagcagttcaccagcgtgttcggtgtgggcgtgaaaacctcggaaaagtggtaccgtatgggcctccgtacggttgaagaagcaaaggccagtaagagtctgaagctgagcaagatgcagaaggcgggcttcctgtattacgaggatctggcgagcatggttagtaaagaagaagccgatgccgttacgctcatcgtgaaggaaacggtgcgtacctttgtgccggatgcgctggtgaccatcgccggcggtttccgccgtggcaaacctatgggccacgacgttgactttctgatcacgaacccgggccgcaaagaagatgacgagctgctccacaaagtggttgatctgctcaagaagcaaggtctgctgctgtacgaagacatcaaagagagcacgttcgtggaggggcaactgccaagtcataaaatcgacgccatggacaacttccagaagtgcttcgccattctcaagctgtaccagccgaaggtggataacagtgcggttgggacgagtaagaaaagtgacatggctgaggttaaggattggaaagcggttcgtgtggatctggtgatcacgccattcgagcagttcgcctatgcgctgctcggttggacgggcagcggccaatttcgtcgcgatctgcgtatttatgcggaggaagagcgcggcatgatcctcgacaaccatgccctctacgacctgaaaaagcgcatctttctgaaagcgggcagcgaagaagagattttcgcgcatctgggtctggattatgtggagccgtgggaacgcaacgcg

SEQ ID NO: 3142 - protein, 394 aa, synthetic construct
  REGION 1..394: note = Variant of terminal deoxynucleotidyl transferase
MHHHHHHGGSGHPPSNTPEKEVPSVIARPVSQYACQRKTTLNNYNKKFTDALEIMAENYKFKENLIACLEAKRAASIFKSLPFEVTSMKDIQGLPCITDQVRDVIEEIIEEGESSRVKEILNDERYKAFKQFTSVFGVGVKTSEKWYRMGLRTVEEAKASKSLKLSKMQKAGFLYYEDLASMVSKEEADAVTLIVKETVRTFVPDALVTIAGGFRRGKPMGHDVDFLITNPGRKEDDELLHKVVDLLKKQGLLLYEDIKESTFVEGQLPSHKIDAMDNFQKCFAILKLYQPKVDNSAVGTSKKSDMAEVKDWKAVRVDLVITPFEQFAYALLGWTGSGQFRRDLRIYAEEERGMILDNHALYDLKKRIFLKAGSEEEIFAHLGLDYVEPWERNA

SEQ ID NO: 3143 - DNA, 1182 bp, synthetic construct
  misc_feature 1..1182: note = Variant of terminal deoxynucleotidyl transferase
  source 1..1182: mol_type = other DNA
atgcatcaccaccatcatcatgggggttctggtcatccgccgagcaataccccggagaaggaggtgccgagcgttatcgcccgtccggttagtcagtacgcgtgccagcgcaagaccacgctgaataactacaacaaaaagttcaccgacgcgctggagatcatggccgagaactacaaatttaaagagaacctgatcgcgtgtctggaagccaagcgcgccgcgagtatttttaaaagcctgccgttcgaggttaccagcatgaaagacatccaaggtctgccgtgcattaccgaccaggtacgtgacgtgatcgaggagatcatcgaagagggcgagagcagccgtgttaaagaaatcctcaatgacgagcgctacaaggcctttaagcagttcaccagcgtgttcggtgtgggcgtgaaaacctcggaaaagtggtaccgtatgggcctccgtacggttgaagaagcaaaggccagtaagagtctgaagctgagcaagatgcagaaggcgggcttcctgtattacgaggatctggcgagcatggttagtaaagaagaagccgatgccgttacgctcatcgtgaaggaaacggtgcgtacctttgtgccggatgcgctggtgaccatcgccggcggtttccgccgtggcaaacctatgggccacgacgttgactttctgatcacgaacccgggccgcaaaatggatgacgagctgctccacaaagtggttgatctgctcaagaagcaaggtctgctgctgtacgaagacatcaaagagagcacgttcgtggaggggcaactgccaagtcataaaatcgacgccatggacaacttccagaagtgcttcgccattctcaagctgtaccagccgaaggtggataacagtgcggttgggacgagtaagaaaagtgacatggctgaggttaaggattggaaagcgatccgtgtggatctggtgatcacgccattcgagcagtacgcctatgcgctgctcggttggacgggcagcggccaatttcgtcgcgatctgcgtgtttatgcggagctggagcgcggcatgatcctcgacaaccatgccctctacgacctgaaaaagcgcatctttctgaaagcgggcagcgaagaagagattttcgcgcatctgggtctggattatgtggagccgtgggaacgcaacgcg

SEQ ID NO: 3144 - protein, 394 aa, synthetic construct
  REGION 1..394: note = Variant of terminal deoxynucleotidyl transferase
MHHHHHHGGSGHPPSNTPEKEVPSVIARPVSQYACQRKTTLNNYNKKFTDALEIMAENYKFKENLIACLEAKRAASIFKSLPFEVTSMKDIQGLPCITDQVRDVIEEIIEEGESSRVKEILNDERYKAFKQFTSVFGVGVKTSEKWYRMGLRTVEEAKASKSLKLSKMQKAGFLYYEDLASMVSKEEADAVTLIVKETVRTFVPDALVTIAGGFRRGKPMGHDVDFLITNPGRKMDDELLHKVVDLLKKQGLLLYEDIKESTFVEGQLPSHKIDAMDNFQKCFAILKLYQPKVDNSAVGTSKKSDMAEVKDWKAIRVDLVITPFEQYAYALLGWTGSGQFRRDLRVYAELERGMILDNHALYDLKKRIFLKAGSEEEIFAHLGLDYVEPWERNA

SEQ ID NO: 3145 - DNA, 1182 bp, synthetic construct
  misc_feature 1..1182: note = Variant of terminal deoxynucleotidyl transferase
  source 1..1182: mol_type = other DNA
atgcatcaccaccatcatcatgggggttctggtcatccgccgagcaataccccggagaaggaggtgccgagcgttatcgcccgtccggttagtcagtacgcgtgccagcgcaagaccacgctgaataactacaacaaaaagttcaccgacgcgctggagatcatggccgagaactacaaatttaaagagaacctgatcgcgtgtcatgaagccaagcgcgccgcgagtatttttaaaagcctgccgttcgaggttaccagcatgaaagacatccaaggtctgccgtgcattaccgaccaggtacgtgacgtgatcgaggagatcatcgaagagggcgagagcagccgtgttaaagaaatcctcaatgacgagcgctacaaggcctttaagcagttcaccagcgtgttcggtgtgggcgtgaaaacctcggaaaagtggtaccgtatgggcctccgtacggttgaagaagcaaaggccagtaagagtctgaagctgagcaagatgcagaaggcgggcttcctgtattacgaggatctggcgagcatggttagtaaagaagaagccgatgccgttacgctcatcgtgaaggaaacggtgcgtacctttgtgccggatgcgctggtgaccatcgccggcggtttccgccgtggcaaacctatgggccacgacgttgactttctgatcacgaacccgggccgcaaagaagatgacgagctgctccacaaagtggttgatctgctcaagaagcaaggtctgctgctgtacgaagacatcaaagagagcacgttcgtggaggggcaactgccaagtcataaaatcgacgccatggacaacttccagaagtgcttcgccattctcaagctgtaccagccgaaggtggataacagtgcggttgggacgagtaagaaaagtgacatggctgaggttaaggattggaaagcgatccgtgtggatctggtgatcacgccatgggagcagttcgcctatgcgctgctcggttggacgggcagcggccaatttcgtcgcgatctgcgtatttatgcggaggaagagcgcggcatgatcctcgacaaccatgccctctacgacctgaaaaaacgcatctttctgaaagcgggcagcgaagaagagattttcgcgcatctgggtctggattatgtggagccgtgggaacgcaacgcg

SEQ ID NO: 3146 - protein, 394 aa, synthetic construct
  REGION 1..394: note = Variant of terminal deoxynucleotidyl transferase
MHHHHHHGGSGHPPSNTPEKEVPSVIARPVSQYACQRKTTLNNYNKKFTDALEIMAENYKFKENLIACHEAKRAASIFKSLPFEVTSMKDIQGLPCITDQVRDVIEEIIEEGESSRVKEILNDERYKAFKQFTSVFGVGVKTSEKWYRMGLRTVEEAKASKSLKLSKMQKAGFLYYEDLASMVSKEEADAVTLIVKETVRTFVPDALVTIAGGFRRGKPMGHDVDFLITNPGRKEDDELLHKVVDLLKKQGLLLYEDIKESTFVEGQLPSHKIDAMDNFQKCFAILKLYQPKVDNSAVGTSKKSDMAEVKDWKAIRVDLVITPWEQFAYALLGWTGSGQFRRDLRIYAEEERGMILDNHALYDLKKRIFLKAGSEEEIFAHLGLDYVEPWERNA

SEQ ID NO: 3147 - DNA, 1182 bp, synthetic construct
  misc_feature 1..1182: note = Variant of terminal deoxynucleotidyl transferase
  source 1..1182: mol_type = other DNA
atgcatcaccaccatcatcatgggggttctggtcatccgccgagcaataccccggagaaggaggtgccgagcgttatcgcccgtccggttagtcagtacgcgtgccagcgcaagaccacgctgaataactacaacaaaaagttcaccgacgcgctggagatcatggccgagaactacaaatttaaagagaacctgatcgcgtgtctggaagccaagcgcgccgcgagtatttttaaaagcctgccgttcgaggttaccagcatgaaagacatccaaggtctgccgtgcattaccgaccaggtacgtgacgtgatcgaggagatcatcgaagagggcgagagcagccgtgttaaagaaatcctcaatgacgagcgctacaaggcctttaagcagttcaccagcgtgttcggtgtgggcgtgaaaacctcggaaaagtggtaccgtatgggcctccgtacggttgaagaagcaaaggccagtaagagtctgaagctgagcaagatgcagaaggcgggcttcctgtattacgaggatctggcgagcatggttagtaaagaagaagccgatgccgttacgctcatcgtgaaggaaacggtgcgtacctttgtgccggatgcgctggtgaccatcgccggcggtttccgccgtggcaaacctatgggccacgacgttgactttctgatcacgaacccgggccgcaaagaagatgacgagctgctccacaaagtggttgatctgctcaagaagcaaggtctgctgctgtacgaagacatcaaagagagcacgttcgtggaggggcaagtgccaagtcataaaatcgacgccatggacaacttccagaagtgcttcgccattctcaagctgtaccagccgaaggtggataacagtgcggttgggacgagtaagaaaagtgacatggctgaggttaaggattggaaagcgatccgtgtggatctggtgatcacgccattcgagcagtacgcctatgcgctgctcggttggacgggcagcggccaatttcgtcgcgatctgcgtcgctatgcggaggaagagcgcgacatgatcctcgacaaccatgccctctacgacctgaaaaagcgcatctttctgaaagcgggcagcgaagaagagattttcgcgcatctgggtctggattatgtggagccgtgggaacgcaacgcg

SEQ ID NO: 3148 - protein, 394 aa, synthetic construct
  REGION 1..394: note = Variant of terminal deoxynucleotidyl transferase
MHHHHHHGGSGHPPSNTPEKEVPSVIARPVSQYACQRKTTLNNYNKKFTDALEIMAENYKFKENLIACLEAKRAASIFKSLPFEVTSMKDIQGLPCITDQVRDVIEEIIEEGESSRVKEILNDERYKAFKQFTSVFGVGVKTSEKWYRMGLRTVEEAKASKSLKLSKMQKAGFLYYEDLASMVSKEEADAVTLIVKETVRTFVPDALVTIAGGFRRGKPMGHDVDFLITNPGRKEDDELLHKVVDLLKKQGLLLYEDIKESTFVEGQVPSHKIDAMDNFQKCFAILKLYQPKVDNSAVGTSKKSDMAEVKDWKAIRVDLVITPFEQYAYALLGWTGSGQFRRDLRRYAEEERDMILDNHALYDLKKRIFLKAGSEEEIFAHLGLDYVEPWERNA

SEQ ID NO: 3149 - DNA, 1182 bp, synthetic construct
  misc_feature 1..1182: note = Variant of terminal deoxynucleotidyl transferase
  source 1..1182: mol_type = other DNA
atgcatcaccaccatcatcatgggggttctggtcatccgccgagcaataccccggagaaggaggtgccgagcgttatcgcccgtccggttagtcagtacgcgtgccagcgcaagaccacgctgaataactacaacaaaaagttcaccgacgcgctggagatcatggccgagaactacaaatttgaagagaacctgatcgcgtgtctggaagccaagcgcgccgcgagtatttttaaaagcctgccgttcgaggttaccagcatgaaagacatccaaggtctgccgtgcattaccgaccaagtacgtgacgtgatcgaggagatcatcgaagagggcgagagcagccgtgttaaagaaatcctcaatgacgagcgctacaaggcctttaagcagttcaccagcgtgttcggtgtgggcgtgaaaacctcggaaaagtggtaccgtatgggcctccgtacggttgaagaagcaaaggccagtaagagtctgaagctgagcaagatgcagaaggcgggcttcctgtattacgaggatctggcgagcatggttagtaaagaagaagccgatgccgttacgctcatcgtgaaggaaacggtgcgtacctttgtgccggatgcgctggtgaccatcgccggcggtttccgccgtggcaaacctatgggccacgacgttgactttctgatcacgaacccgggccgcaaagaagatgacgagctgctccacaaagtggttgatctgctcaagaagcaaggtctgctgctgtacgaagacatcaaagagagcacgttcgtggaggggcaactgccaagtcataaaatcgacgccatggacaacttccagaagtgcttcgccattctcaagctgtaccagccgaaggtggataacagtgcggttgggacgagtaagaaaagtgacatggctgaggttaaggattggaaagcgattcgtgtggatctggtgatcacgtcattcgagcagtacgcctatgcgctgctcggttggacgggcagcggccaatttcgtcgcgatctgcgtatttatgcggaggaagagcgcgacatgctgctcgacaaccatgccctctacgacctgaaaaagcgcatctttctgaaagcgggcagcgaagaagagattttcgcgcatctgggtctggattatgtggagccgtgggaacgcaacgcg

SEQ ID NO: 3150 - protein, 394 aa, synthetic construct
  REGION 1..394: note = Variant of terminal deoxynucleotidyl transferase
MHHHHHHGGSGHPPSNTPEKEVPSVIARPVSQYACQRKTTLNNYNKKFTDALEIMAENYKFEENLIACLEAKRAASIFKSLPFEVTSMKDIQGLPCITDQVRDVIEEIIEEGESSRVKEILNDERYKAFKQFTSVFGVGVKTSEKWYRMGLRTVEEAKASKSLKLSKMQKAGFLYYEDLASMVSKEEADAVTLIVKETVRTFVPDALVTIAGGFRRGKPMGHDVDFLITNPGRKEDDELLHKVVDLLKKQGLLLYEDIKESTFVEGQLPSHKIDAMDNFQKCFAILKLYQPKVDNSAVGTSKKSDMAEVKDWKAIRVDLVITSFEQYAYALLGWTGSGQFRRDLRIYAEEERDMLLDNHALYDLKKRIFLKAGSEEEIFAHLGLDYVEPWERNA

SEQ ID NO: 3151 - DNA, 1182 bp, synthetic construct
  misc_feature 1..1182: note = Variant of terminal deoxynucleotidyl transferase
  source 1..1182: mol_type = other DNA
atgcatcaccaccatcatcatgggggttctggtcatccgccgagcaataccccggagaaggaggtgccgagcgttatcgcccgtccggttagtcagtacgcgtgccagcgcaagaccacgctgaataactacaacaaaaagttcaccgacgcgctggagatcatggccgagaactacaaatttaaagagaacctgatcgcgtgtcatgaagccaagcgcgccgcgagtatttttaaaagcctgccgttcgaggttaccagcatgaaagacatccaaggtctgccgtgcattaccgacgacgtacgtgacgtgatcgaggagatcatcgaagagggcgagagcagccgtgttaaagaaatcctcaatgacgagcgctacaaggcctttaagcagttcaccagcgtgttcggtgtgggcgtgaaaacctcggaaaagtggtaccgtatgggcctccgtacggttgaagaagcaaaggccagtaagagtctgaagctgagcaagatgcagaaggcgggcttcctgtattacgaggatctggcgagcatggttagtaaagaagaagccgatgccgttacgctcatcgtgaaggaaacggtgcgtacctttgtgccggatgcgctggtgaccatcgccggcggtttccgccgtggcaaacctatgggccacgacgttgactttctgatcacgaacccgggccgcaaagaagatgacgagctgctccacaaagtggttgatctgctcaagaagcaaggtctgctgctgtacgaagacatcaaagagagcacgttcgtggaggggcaactgccaagtcataaaatcgacgccatggacaacttccagaagtgcttcgccattctcaagctgtaccagccgaaggtggataacagtgcggttgggacgagtaagaaaagtgacatggctgaggttaaggattggaaagcgattcgtgtggatctggtgatcacgccattcgagcagtacgcctatgcgctgctcggttggacgggcagcggccaatttcgtcgcgatctgcgtcgctatgcggaggaagagcgcgacatgatcctcgacaaccatgccctctacgacctgaaagaacgcatctttctgaaagcgggcagcgaagaagagattttcgcgcatctgggtctggattatgtggagccgtgggaacgcaacgcg

SEQ ID NO: 3152 - protein, 394 aa, synthetic construct
  REGION 1..394: note = Variant of terminal deoxynucleotidyl transferase
MHHHHHHGGSGHPPSNTPEKEVPSVIARPVSQYACQRKTTLNNYNKKFTDALEIMAENYKFKENLIACHEAKRAASIFKSLPFEVTSMKDIQGLPCITDDVRDVIEEIIEEGESSRVKEILNDERYKAFKQFTSVFGVGVKTSEKWYRMGLRTVEEAKASKSLKLSKMQKAGFLYYEDLASMVSKEEADAVTLIVKETVRTFVPDALVTIAGGFRRGKPMGHDVDFLITNPGRKEDDELLHKVVDLLKKQGLLLYEDIKESTFVEGQLPSHKIDAMDNFQKCFAILKLYQPKVDNSAVGTSKKSDMAEVKDWKAIRVDLVITPFEQYAYALLGWTGSGQFRRDLRRYAEEERDMILDNHALYDLKERIFLKAGSEEEIFAHLGLDYVEPWERNA

SEQ ID NO: 3153 - DNA, 1182 bp, synthetic construct
  misc_feature 1..1182: note = Variant of terminal deoxynucleotidyl transferase
  source 1..1182: mol_type = other DNA
atgcatcaccaccatcatcatgggggttctggtcatccgccgagcaataccccggagaaggaggtgccgagcgttatcgcccgtccggttagtcagtacgcgtgccagcgcaagaccacgctgaataactacaacaaaaagttcaccgacgcgctggagatcatggccgagaactacaaatttgaagagaacctgatcgcgtgtctggaagccaagcgcgccgcgagtatttttaaaagcctgccgttcgaggttaccagcatgaaagacatccaaggtctgccgtgcattaccgaccaagtacgtgacgtgatcgaggagatcatcgaagagggcgagagcagccgtgttaaagaaatcctcaatgacgagcgctacaaggcctttaagcagttcaccagcgtgttcggtgtgggcgtgaaaacctcggaaaagtggtaccgtatgggcctccgtacggttgaagaagcaaaggccagtaagagtctgaagctgagcaagatgcagaaggcgggcttcctgtattacgaggatctggcgagcatggttagtaaagaagaagccgatgccgttacgctcatcgtgaaggaaacggtgcgtacctttgtgccggatgcgctggtgaccatcgccggcggtttccgccgtggcaaacctatgggccacgacgttgactttctgatcacgaacccgggccgcaaaatggatgacgagctgctccacaaagtggttgatctgctcaagaagcaaggtctgctgctgtacgaagacatcaaagagagcacgttcgtggaggggcaactgccaagtcataaaatcgacgccatggacaacttccagaagtgcttcgccattctcaagctgtaccagccgaaggtggataacagtgcggttgggacgagtaagaaaagtgacatggctgaggttaaggattggaaagcgatccgtgtggatctggtgatcacgccattcgagcagtacgcctatgcgctgctcggttggacgggcagcggccaatttcgtcgcgatctgcgtgtttatgcggagctggagcgcggcatgctgctcgacaaccatgccctctacgacctgaaaaagcgcatctttctgaaagcgggcagcgaagaagagattttcgcgcatctgggtctggattatgtggagccgtgggaacgcaacgcg

SEQ ID NO: 3154 - protein, 394 aa, synthetic construct
  REGION 1..394: note = Variant of terminal deoxynucleotidyl transferase
MHHHHHHGGSGHPPSNTPEKEVPSVIARPVSQYACQRKTTLNNYNKKFTDALEIMAENYKFEENLIACLEAKRAASIFKSLPFEVTSMKDIQGLPCITDQVRDVIEEIIEEGESSRVKEILNDERYKAFKQFTSVFGVGVKTSEKWYRMGLRTVEEAKASKSLKLSKMQKAGFLYYEDLASMVSKEEADAVTLIVKETVRTFVPDALVTIAGGFRRGKPMGHDVDFLITNPGRKMDDELLHKVVDLLKKQGLLLYEDIKESTFVEGQLPSHKIDAMDNFQKCFAILKLYQPKVDNSAVGTSKKSDMAEVKDWKAIRVDLVITPFEQYAYALLGWTGSGQFRRDLRVYAELERGMLLDNHALYDLKKRIFLKAGSEEEIFAHLGLDYVEPWERNA

SEQ ID NO: 3155 - DNA, 1182 bp, synthetic construct
  misc_feature 1..1182: note = Variant of terminal deoxynucleotidyl transferase
  source 1..1182: mol_type = other DNA
atgcatcaccaccatcatcatgggggttctggtcatccgccgagcaataccccggagaaggaggtgccgagcgttatcgcccgtccggttagtcagtacgcgtgccagcgcaagaccacgctgaataactacaacaaaaagttcaccgacgcgctggagatcatggccgagaactacaaatttaaagagaacctgatcgcgtgtctggaagccaagcgcgccgcgagtatttttaaaagcctgccgttcgaggttaccagcatgaaagacatccaaggtctgccgtgcattaccgaccaggtacgtgacgtgatcgaggagatcatcgaagagggcgagagcagccgtgttaaagaaatcctcaatgacgagcgctacaaggcctttaagcagttcaccagcgtgttcggtgtgggcgtgaaaacctcggaaaagtggtaccgtatgggcctccgtacggttgaagaagcaaaggccagtaagagtctgaagctgagcaagatgcagaaggcgggcttcctgtattacgaggatctggcgagcatggttagtaaagaagaagccgatgccgttacgctcatcgtgaaggaaacggtgcgtacctttgtgccggatgcgctggtgaccatcgccggcggtttccgccgtggcaaacctatgggccacgacgttgactttctgatcacgaacccgggccgcaaagaagatgacgagctgctccacaaagtggttgatctgctcaagaagcaaggtctgctgctgtacgaagacatcaaagagagcacgttcgtggaggggcaactgccaagtcataaaatcgacgccatggacaacttccagaagtgcttcgccattctcaagctgtaccagccgaaggtggataacagtgcggttgggacgagtaagaaaagtgacatggctgaggttaaggattggaaagcgatccgtgtggatctggtgatcacgccatgggagcagttcgcctatgcgctgctcggttggacgggcagcggccaatttcgtcgcgatctgcgtatttatgcggaggaagagcgcggcatgatcctcgacaaccatgccctctacgacctgaaaaagcgcatctttctgaaagcgggcagcgaagaagagattttcgcgcatctgggtctggattatgtggagccgtgggaacgcaacgcg

SEQ ID NO: 3156 - protein, 394 aa, synthetic construct
  REGION 1..394: note = Variant of terminal deoxynucleotidyl transferase
MHHHHHHGGSGHPPSNTPEKEVPSVIARPVSQYACQRKTTLNNYNKKFTDALEIMAENYKFKENLIACLEAKRAASIFKSLPFEVTSMKDIQGLPCITDQVRDVIEEIIEEGESSRVKEILNDERYKAFKQFTSVFGVGVKTSEKWYRMGLRTVEEAKASKSLKLSKMQKAGFLYYEDLASMVSKEEADAVTLIVKETVRTFVPDALVTIAGGFRRGKPMGHDVDFLITNPGRKEDDELLHKVVDLLKKQGLLLYEDIKESTFVEGQLPSHKIDAMDNFQKCFAILKLYQPKVDNSAVGTSKKSDMAEVKDWKAIRVDLVITPWEQFAYALLGWTGSGQFRRDLRIYAEEERGMILDNHALYDLKKRIFLKAGSEEEIFAHLGLDYVEPWERNA

SEQ ID NO: 3157 - DNA, 1182 bp, synthetic construct
  misc_feature 1..1182: note = Variant of terminal deoxynucleotidyl transferase
  source 1..1182: mol_type = other DNA
atgcatcaccaccatcatcatgggggttctggtcatccgccgagcaataccccggagaaggaggtgccgagcgttatcgcccgtccggttagtcagtacgcgtgccagcgcaagaccacgctgaataactacaacaaaaagttcaccgacgcgctggagatcatggccgagaactacaaatttaaagagaacctgatcgcgtgtctggaagccaagcgcgccgcgagtatttttaaaagcctgccgttcgaggttaccagcatgaaagacatccaaggtctgccgtgcattaccgaccaggtacgtgacgtgatcgaggagatcatcgaagagggcgagagcagccgtgttaaagaaatcctcaatgacgagcgctacaaggcctttaagcagttcaccagcgtgttcggtgtgggcgtgaaaacctcggaaaagtggtaccgtatgggcctccgtacggttgaagaagcaaaggccagtaagagtctgaagctgagcaagatgcagaaggcgggcttcctgtattacgaggatctggcgagcatggttagtaaagaagaagccgatgccgttacgctcatcgtgaaggaaacggtgcgtacctttgtgccggatgcgctggtgaccatcgccggcggtttccgccgtggcaaacctatgggccacgacgttgactttctgatcacgaacccgggccgcaaaatggatgacgagctgctccacaaagtggttgatctgctcaagaagcaaggtctgctgctgtacgaagacatcaaagagagcacgttcgtggaggggcaagtgccaagtcataaaatcgacgccatggacaacttccagaagtgcttcgccattctcaagctgtaccagccgaaggtggataacagtgcggttgggacgagtaagaaaagtgacatggctgaggttaaggattggaaagcgattcgtgtggatctggtgatcacgccattcgagcagttcgcctatgcgctgctcggttggacgggcagcggccaatttcgtcgcgatctgcgtgtttatgcggaggaagagcgcggcatgatcctcgacaaccatgccctctacgacctgaaaaagcgcatctttctgaaagcgggcagcgaagaagagattttcgcgcatctgggtctggattatgtggagccgtgggaacgcaacgcg

SEQ ID NO: 3158 - protein, 394 aa, synthetic construct
  REGION 1..394: note = Variant of terminal deoxynucleotidyl transferase
MHHHHHHGGSGHPPSNTPEKEVPSVIARPVSQYACQRKTTLNNYNKKFTDALEIMAENYKFKENLIACLEAKRAASIFKSLPFEVTSMKDIQGLPCITDQVRDVIEEIIEEGESSRVKEILNDERYKAFKQFTSVFGVGVKTSEKWYRMGLRTVEEAKASKSLKLSKMQKAGFLYYEDLASMVSKEEADAVTLIVKETVRTFVPDALVTIAGGFRRGKPMGHDVDFLITNPGRKMDDELLHKVVDLLKKQGLLLYEDIKESTFVEGQVPSHKIDAMDNFQKCFAILKLYQPKVDNSAVGTSKKSDMAEVKDWKAIRVDLVITPFEQFAYALLGWTGSGQFRRDLRVYAEEERGMILDNHALYDLKKRIFLKAGSEEEIFAHLGLDYVEPWERNA

SEQ ID NO: 3159 - DNA, 1182 bp, synthetic construct
  misc_feature 1..1182: note = Variant of terminal deoxynucleotidyl transferase
  source 1..1182: mol_type = other DNA
atgcatcaccaccatcatcatgggggttctggtcatccgccgagcaataccccggagaaggaggtgccgagcgttatcgcccgtccggttagtcagtacgcgtgccagcgcaagaccacgctgaataactacaacaaaaagttcaccgacgcgctggagatcatggccgagaactacaaatttaaagagaacctgatcgcgtgtcatgaagccaagcgcgccgcgagtatttttaaaagcctgccgttcgaggttaccagcatgaaagacatccaaggtctgccgtgcattaccgaccaggtacgtgacgtgatcgaggagatcatcgaagagggcgagagcagccgtgttaaagaaatcctcaatgacgagcgctacaaggcctttaagcagttcaccagcgtgttcggtgtgggcgtgaaaacctcggaaaagtggtaccgtatgggcctccgtacggttgaagaagcaaaggccagtaagagtctgaagctgagcaagatgcagaaggcgggcttcctgtattacgaggatctggcgagcatggttagtaaagaagaagccgatgccgttacgctcatcgtgaaggaaacggtgcgtacctttgtgccggatgcgctggtgaccatcgccggcggtttccgccgtggcaaacctatgggccacgacgttgactttctgatcacgaacccgggccgcaaagaagatgacgagctgctccacaaagtggttgatctgctcaagaagcaaggtctgctgctgtacgaagacatcaaagagagcacgttcgtggaggggcaactgccaagtcataaaatcgacgccatggacaacttccagaagtgcttcgccattctcaagctgtaccagccgaaggtggataacagtgcggttgggacgagtaagaaaagtgacatggctgaggttaaggattggaaagcgattcgtgtggatctggtgatcacgccatgggagcagtacgcctatgcgctgctcggttggacgggcagcggccaatttcgtcgcgatctgcgtcgctatgcggaggaagagcgcgacatgatcctcgacaaccatgccctctacgacctgaaaaagcgcatctttctgaaagcgggcagcgaagaagagattttcgcgcatctgggtctggattatgtggagccgtgggaacgcaacgcg

SEQ ID NO: 3160 - protein, 394 aa, synthetic construct
  REGION 1..394: note = Variant of terminal deoxynucleotidyl transferase
MHHHHHHGGSGHPPSNTPEKEVPSVIARPVSQYACQRKTTLNNYNKKFTDALEIMAENYKFKENLIACHEAKRAASIFKSLPFEVTSMKDIQGLPCITDQVRDVIEEIIEEGESSRVKEILNDERYKAFKQFTSVFGVGVKTSEKWYRMGLRTVEEAKASKSLKLSKMQKAGFLYYEDLASMVSKEEADAVTLIVKETVRTFVPDALVTIAGGFRRGKPMGHDVDFLITNPGRKEDDELLHKVVDLLKKQGLLLYEDIKESTFVEGQLPSHKIDAMDNFQKCFAILKLYQPKVDNSAVGTSKKSDMAEVKDWKAIRVDLVITPWEQYAYALLGWTGSGQFRRDLRRYAEEERDMILDNHALYDLKKRIFLKAGSEEEIFAHLGLDYVEPWERNA

SEQ ID NO: 3161 - DNA, 1182 bp, synthetic construct
  misc_feature 1..1182: note = Variant of terminal deoxynucleotidyl transferase
  source 1..1182: mol_type = other DNA
atgcatcaccaccatcatcatgggggttctggtcatccgccgagcaataccccggagaaggaggtgccgagcgttatcgcccgtccggttagtcagtacgcgtgccagcgcaagaccacgctgaataactacaacaaaaagttcaccgacgcgctggagatcatggccgagaactacaaatttaaagagaacctgatcgcgtgtcatgaagccaagcgcgccgcgagtatttttaaaagcctgccgttcgaggttaccagcatgaaagacatccaaggtctgccgtgcattaccgaccaagtacgtgacgtgatcgaggagatcatcgaagagggcgagagcagccgtgttaaagaaatcctcaatgacgagcgctacaaggcctttaagcagttcaccagcgtgttcggtgtgggcgtgaaaacctcggaaaagtggtaccgtatgggcctccgtacggttgaagaagcaaaggccagtaagagtctgaagctgagcaagatgcagaaggcgggcttcctgtattacgaggatctggcgagcatggttagtaaagaagaagccgatgccgttacgctcatcgtgaaggaaacggtgcgtacctttgtgccggatgcgctggtgaccatcgccggcggtttccgccgtggcaaacctatgggccacgacgttgactttctgatcacgaacccgggccgcaaagaagatgacgagctgctccacaaagtggttgatctgctcaagaagcaaggtctgctgctgtacgaagacatcaaagagagcacgttcgtggaggggcaactgccaagtcataaaatcgacgccatggacaacttccagaagtgcttcgccattctcaagctgtaccagccgaaggtggataacagtgcggttgggacgagtaagaaaagtgacatggctgaggttaaggattggaaagcgatccgtgtggatctggtgatcacgccatgggagcagtacgcctatgcgctgctcggttggacgggcagcggccaatttcgtcgcgatctgcgtatttatgcggagctggagcgcggcatgatcctcgacaaccatgccctctacgacctgaaaaagcgcatctttctgaaagcgggcagcgaagaagagattttcgcgcatctgggtctggattatgtggagccgtgggaacgcaacgcg

SEQ ID NO: 3162 - protein, 394 aa, synthetic construct
  REGION 1..394: note = Variant of terminal deoxynucleotidyl transferase
MHHHHHHGGSGHPPSNTPEKEVPSVIARPVSQYACQRKTTLNNYNKKFTDALEIMAENYKFKENLIACHEAKRAASIFKSLPFEVTSMKDIQGLPCITDQVRDVIEEIIEEGESSRVKEILNDERYKAFKQFTSVFGVGVKTSEKWYRMGLRTVEEAKASKSLKLSKMQKAGFLYYEDLASMVSKEEADAVTLIVKETVRTFVPDALVTIAGGFRRGKPMGHDVDFLITNPGRKEDDELLHKVVDLLKKQGLLLYEDIKESTFVEGQLPSHKIDAMDNFQKCFAILKLYQPKVDNSAVGTSKKSDMAEVKDWKAIRVDLVITPWEQYAYALLGWTGSGQFRRDLRIYAELERGMILDNHALYDLKKRIFLKAGSEEEIFAHLGLDYVEPWERNA

SEQ ID NO: 3163 - DNA, 1182 bp, synthetic construct
  misc_feature 1..1182: note = Variant of terminal deoxynucleotidyl transferase
  source 1..1182: mol_type = other DNA
atgcatcaccaccatcatcatgggggttctggtcatccgccgagcaataccccggagaaggaggtgccgagcgttatcgcccgtccggttagtcagtacgcgtgccagcgcaagaccacgctgaataactacaacaaaaagttcaccgacgcgctggagatcatggccgagaactacaaatttaaagagaacctgatcgcgtgtcatgaagccaagcgcgccgcgagtatttttaaaagcctgccgttcgaggttaccagcatgaaagacatccaaggtctgccgtgcattaccgaccaagtacgtgacgtgatcgaggagatcatcgaagagggcgagagcagccgtgttaaagaaatcctcaatgacgagcgctacaaggcctttaagcagttcaccagcgtgttcggtgtgggcgtgaaaacctcggaaaagtggtaccgtatgggcctccgtacggttgaagaagcaaaggccagtaagagtctgaagctgagcaagatgcagaaggcgggcttcctgtattacgaggatctggcgagcatggttagtaaagaagaagccgatgccgttacgctcatcgtgaaggaaacggtgcgtacctttgtgccggatgcgctggtgaccatcgccggcggtttccgccgtggcaaacctatgggccacgacgttgactttctgatcacgaacccgggccgcaaaatggatgacgagctgctccacaaagtggttgatctgctcaagaagcaaggtctgctgctgtacgaagacatcaaagagagcacgttcgtggaggggcaactgccaagtcataaaatcgacgccatggacaacttccagaagtgcttcgccattctcaagctgtaccagccgaaggtggataacagtgcggttgggacgagtaagaaaagtgacatggctgaggttaaggattggaaagcggttcgtgtggatctggtgatcacgccattcgagcagtacgcctatgcgctgctcggttggacgggcagcggccaatttcgtcgcgatctgcgtcgctatgcggaggaagagcgcggcatgatcctcgacaaccatgccctctacgacctgaaaaagcgcatctttctgaaagcgggcagcgaagaagagattttcgcgcatctgggtctggattatgtggagccgtgggaacgcaacgcg

SEQ ID NO: 3164 - protein, 394 aa, synthetic construct
  REGION 1..394: note = Variant of terminal deoxynucleotidyl transferase
MHHHHHHGGSGHPPSNTPEKEVPSVIARPVSQYACQRKTTLNNYNKKFTDALEIMAENYKFKENLIACHEAKRAASIFKSLPFEVTSMKDIQGLPCITDQVRDVIEEIIEEGESSRVKEILNDERYKAFKQFTSVFGVGVKTSEKWYRMGLRTVEEAKASKSLKLSKMQKAGFLYYEDLASMVSKEEADAVTLIVKETVRTFVPDALVTIAGGFRRGKPMGHDVDFLITNPGRKMDDELLHKVVDLLKKQGLLLYEDIKESTFVEGQLPSHKIDAMDNFQKCFAILKLYQPKVDNSAVGTSKKSDMAEVKDWKAVRVDLVITPFEQYAYALLGWTGSGQFRRDLRRYAEEERGMILDNHALYDLKKRIFLKAGSEEEIFAHLGLDYVEPWERNA

SEQ ID NO: 3165 - DNA, 1182 bp, synthetic construct
  misc_feature 1..1182: note = Variant of terminal deoxynucleotidyl transferase
  source 1..1182: mol_type = other DNA
atgcatcaccaccatcatcatgggggttctggtcatccgccgagcaataccccggagaaggaggtgccgagcgttatcgcccgtccggttagtcagtacgcgtgccagcgcaagaccacgctgaataactacaacaaaaagttcaccgacgcgctggagatcatggccgagaactacaaatttaaagagaacctgatcgcgtgtctggaagccaagcgcgccgcgagtatttttaaaagcctgccgttcgaggttaccagcatgaaagacatccaaggtctgccgtgcattaccgaccaggtacgtgacgtgatcgaggagatcatcgaagagggcgagagcagccgtgttaaagaaatcctcaatgacgagcgctacaaggcctttaagcagttcaccagcgtgttcggtgtgggcgtgaaaacctcggaaaagtggtaccgtatgggcctccgtacggttgaagaagcaaaggccagtaagagtctgaagctgagcaagatgcagaaggcgggcttcctgtattacgaggatctggcgagcatggttagtaaagaagaagccgatgccgttacgctcatcgtgaaggaaacggtgcgtacctttgtgccggatgcgctggtgaccatcgccggcggtttccgccgtggcaaacctatgggccacgacgttgactttctgatcacgaacccgggccgcaaaatggatgacgagctgctccacaaagtggttgatctgctcaagaagcaaggtctgctgctgtacgaagacatcaaagagagcacgttcgtggaggggcaactgccaagtcataaaatcgacgccatggacaacttccagaagtgcttcgccattctcaagctgtaccagccgaaggtggataacagtgcggttgggacgagtaagaaaagtgacatggctgaggttaaggattggaaagcgatccgtgtggatctggtgatcacgccattcgagcagtacgcctatgcgctgctcggttggacgggcagcggccaatttcgtcgcgatctgcgtatttatgcggaggaagagcgcggcatgatcctcgacaaccatgccctctacgacctgaaaaagcgcatctttctgaaagcgggcagcgaagaagagattttcgcgcatctgggtctggattatgtggagccgtgggaacgcaacgcg

SEQ ID NO: 3166 - protein, 394 aa, synthetic construct
  REGION 1..394: note = Variant of terminal deoxynucleotidyl transferase
MHHHHHHGGSGHPPSNTPEKEVPSVIARPVSQYACQRKTTLNNYNKKFTDALEIMAENYKFKENLIACLEAKRAASIFKSLPFEVTSMKDIQGLPCITDQVRDVIEEIIEEGESSRVKEILNDERYKAFKQFTSVFGVGVKTSEKWYRMGLRTVEEAKASKSLKLSKMQKAGFLYYEDLASMVSKEEADAVTLIVKETVRTFVPDALVTIAGGFRRGKPMGHDVDFLITNPGRKMDDELLHKVVDLLKKQGLLLYEDIKESTFVEGQLPSHKIDAMDNFQKCFAILKLYQPKVDNSAVGTSKKSDMAEVKDWKAIRVDLVITPFEQYAYALLGWTGSGQFRRDLRIYAEEERGMILDNHALYDLKKRIFLKAGSEEEIFAHLGLDYVEPWERNA

SEQ ID NO: 3167 - DNA, 1182 bp, synthetic construct
  misc_feature 1..1182: note = Variant of terminal deoxynucleotidyl transferase
  source 1..1182: mol_type = other DNA
atgcatcaccaccatcatcatgggggttctggtcatccgccgagcaataccccggagaaggaggtgccgagcgttatcgcccgtccggttagtcagtacgcgtgccagcgcaagaccacgctgaataactacaacaaaaagttcaccgacgcgctggagatcatggccgagaactacaaatttaaagagaacctgatcgcgtgtctggaagccaagcgcgccgcgagtatttttaaaagcctgccgttcgaggttaccagcatgaaagacatccaaggtctgccgtgcattaccgaccaggtacgtgacgtgatcgaggagatcatcgaagagggcgagagcagccgtgttaaagaaatcctcaatgacgagcgctacaaggcctttaagcagttcaccagcgtgttcggtgtgggcgtgaaaacctcggaaaagtggtaccgtatgggcctccgtacggttgaagaagcaaaggccagtaagagtctgaagctgagcaagatgcagaaggcgggcttcctgtattacgaggatctggcgagcatggttagtaaagaagaagccgatgccgttacgctcatcgtgaaggaaacggtgcgtacctttgtgccggatgcgctggtgaccatcgccggcggtttccgccgtggcaaacctatgggccacgacgttgactttctgatcacgaacccgggccgcaaagaggatgacgagctgctccacaaagtggttgatctgctcaagaagcaaggtctgctgctgtacgaagacatcaaagagagcacgttcgtggaggggcaactgccaagtcataaaatcgacgccatggacaacttccagaagtgcttcgccattctcaagctgtaccagccgaaggtggataacagtgcggttgggacgagtaagaaaagtgacatggctgaggttaaggattggaaagcgatccgtgtggatctggtgatcacgccattcgagcagtacgcctatgcgctgctcggttggacgggcagcggccaatttcgtcgcgatctgcgtatttatgcggaggaagagcgcggcatgatcctcgacaaccatgccctctacgacctgaaaaagcgcatctttctgaaagcgggcagcgaagaagagattttcgcgcatctgggtctggattatgtggagccgtgggaacgcaacgcg

SEQ ID NO: 3168 - protein, 394 aa, synthetic construct
  REGION 1..394: note = Variant of terminal deoxynucleotidyl transferase
MHHHHHHGGSGHPPSNTPEKEVPSVIARPVSQYACQRKTTLNNYNKKFTDALEIMAENYKFKENLIACLEAKRAASIFKSLPFEVTSMKDIQGLPCITDQVRDVIEEIIEEGESSRVKEILNDERYKAFKQFTSVFGVGVKTSEKWYRMGLRTVEEAKASKSLKLSKMQKAGFLYYEDLASMVSKEEADAVTLIVKETVRTFVPDALVTIAGGFRRGKPMGHDVDFLITNPGRKEDDELLHKVVDLLKKQGLLLYEDIKESTFVEGQLPSHKIDAMDNFQKCFAILKLYQPKVDNSAVGTSKKSDMAEVKDWKAIRVDLVITPFEQYAYALLGWTGSGQFRRDLRIYAEEERGMILDNHALYDLKKRIFLKAGSEEEIFAHLGLDYVEPWERNA

SEQ ID NO: 3169 - DNA, 1182 bp, synthetic construct
  misc_feature 1..1182: note = Variant of terminal deoxynucleotidyl transferase
  source 1..1182: mol_type = other DNA
atgcatcaccaccatcatcatgggggttctggtcatccgccgagcaataccccggagaaggaggtgccgagcgttatcgcccgtccggttagtcagtacgcgtgccagcgcaagaccacgctgaataactacaacaaaaagttcaccgacgcgctggagatcatggccgagaactacaaatttaaagagaacctgatcgcgtgtctggaagccaagcgcgccgcgagtatttttaaaagcctgccgttcgaggttaccagcatgaaagacatccaaggtctgccgtgcattaccgaccaggtacgtgacgtgatcgaggagatcatcgaacgtggcgagagcagccgtgttaaagaaatcctcaatgacgagcgctacaaggcctttaagcagttcaccagcgtgttcggtgtgggcgtgaaaacctcggaaaagtggtaccgtatgggcctccgtacggttgaagaagcaaaggccagtaagagtctgaagctgagcaagatgcagaaggcgggcttcctgtattacgaggatctggcgagcatggttagtaaagaagaagccgatgccgttacgctcatcgtgaaggaaacggtgcgtacctttgtgccggatgcgctggtgaccatcgccggcggtttccgccgtggcaaacctatgggccacgacgttgactttctgatcacgaacccgggccgcaaagaagatgacgagctgctccacaaagtggttgatctgctcaagaagcaaggtctgctgctgtacgaagacatcaaagagagcacgttcgtggaggggcaactgccaagtcataaaatcgacgccatggacaacttccagaagtgcttcgccattctcaagctgtaccagccgaaggtggataacagtgcggttgggacgagtaagaaaagtgacatggctgaggttaaggattggaaagcgatccgtgtggatctggtgatcacgccattcgagcagttcgcctatgcgctgctcggttggacgggcagcggccaatttcgtcgcgatctgcgtcgctatgcggaggaagagcgcggcatgatcctcgacaaccatgccctctacgacctgaaaaagcgcatctttctgaaagcgggcagcgaagaagagattttcgcgcatctgggtctggattatgtggagccgtgggaacgcaacgcg

SEQ ID NO: 3170 - protein, 394 aa, synthetic construct
  REGION 1..394: note = Variant of terminal deoxynucleotidyl transferase
MHHHHHHGGSGHPPSNTPEKEVPSVIARPVSQYACQRKTTLNNYNKKFTDALEIMAENYKFKENLIACLEAKRAASIFKSLPFEVTSMKDIQGLPCITDQVRDVIEEIIERGESSRVKEILNDERYKAFKQFTSVFGVGVKTSEKWYRMGLRTVEEAKASKSLKLSKMQKAGFLYYEDLASMVSKEEADAVTLIVKETVRTFVPDALVTIAGGFRRGKPMGHDVDFLITNPGRKEDDELLHKVVDLLKKQGLLLYEDIKESTFVEGQLPSHKIDAMDNFQKCFAILKLYQPKVDNSAVGTSKKSDMAEVKDWKAIRVDLVITPFEQFAYALLGWTGSGQFRRDLRRYAEEERGMILDNHALYDLKKRIFLKAGSEEEIFAHLGLDYVEPWERNA

SEQ ID NO: 3171 - DNA, 1182 bp, synthetic construct
  misc_feature 1..1182: note = Variant of terminal deoxynucleotidyl transferase
  source 1..1182: mol_type = other DNA
atgcatcaccaccatcatcatgggggttctggtcatccgccgagcaataccccggagaaggaggtgccgagcgttatcgcccgtccggttagtcagtacgcgtgccagcgcaagaccacgctgaataactacaacaaaaagttcaccgacgcgctggagatcatggccgagaactacaaatttaaagagaacctgatcgcgtgtctggaagccaagcgcgccgcgagtatttttaaaagcctgccgttcgaggttaccagcatgaaagacatccaaggtctgccgtgcattaccgacgacgtacgtgacgtgatcgaggagatcatcgaagagggcgagagcagccgtgttaaagaaatcctcaatgacgagcgctacaaggcctttaagcagttcaccagcgtgttcggtgtgggcgtgaaaacctcggaaaagtggtaccgtatgggcctccgtacggttgaagaagcaaaggccagtaagagtctgaagctgagcaagatgcagaaggcgggcttcctgtattacgaggatctggcgagcatggttagtaaagaagaagccgatgccgttacgctcatcgtgaaggaaacggtgcgtacctttgtgccggatgcgctggtgaccatcgccggcggtttccgccgtggcaaacctatgggccacgacgttgactttctgatcacgaacccgggccgcaaagaggatgacgagctgctccacaaagtggttgatctgctcaagaagcaaggtctgctgctgtacgaagacatcaaagagagcacgttcgtggaggggcaactgccaagtcataaaatcgacgccatggacaacttccagaagtgcttcgccattctcaagctgtaccagccgaaggtggataacagtgcggttgggacgagtaagaaaagtgacatggctgaggttaaggattggaaagcgattcgtgtggatctggtgatcacgccattcgagcagtacgcctatgcgctgctcggttggacgggcagcggccaatttcgtcgcgatctgcgtcgctatgcggaggaagagcgcggcatgatcctcgacaaccatgccctctacgacctgaaaaagcgcatctttctgaaagcgggcagcgaagaagagattttcgcgcatctgggtctggattatgtggagccgtgggaacgcaacgcg

SEQ ID NO: 3172 - protein, 394 aa, synthetic construct
  REGION 1..394: note = Variant of terminal deoxynucleotidyl transferase
MHHHHHHGGSGHPPSNTPEKEVPSVIARPVSQYACQRKTTLNNYNKKFTDALEIMAENYKFKENLIACLEAKRAASIFKSLPFEVTSMKDIQGLPCITDDVRDVIEEIIEEGESSRVKEILNDERYKAFKQFTSVFGVGVKTSEKWYRMGLRTVEEAKASKSLKLSKMQKAGFLYYEDLASMVSKEEADAVTLIVKETVRTFVPDALVTIAGGFRRGKPMGHDVDFLITNPGRKEDDELLHKVVDLLKKQGLLLYEDIKESTFVEGQLPSHKIDAMDNFQKCFAILKLYQPKVDNSAVGTSKKSDMAEVKDWKAIRVDLVITPFEQYAYALLGWTGSGQFRRDLRRYAEEERGMILDNHALYDLKKRIFLKAGSEEEIFAHLGLDYVEPWERNA

SEQ ID NO: 3173 - DNA, 1182 bp, synthetic construct
  misc_feature 1..1182: note = Variant of terminal deoxynucleotidyl transferase
  source 1..1182: mol_type = other DNA
atgcatcaccaccatcatcatgggggttctggtcatccgccgagcaataccccggagaaggaggtgccgagcgttatcgcccgtccggttagtcagtacgcgtgccagcgcaagaccacgctgaataactacaacaaaaagttcaccgacgcgctggagatcatggccgagaactacaaatttaaagagaacctgatcgcgtgtctggaagccaagcgcgccgcgagtatttttaaaagcctgccgttcgaggttaccagcatgaaagacatccaaggtctgccgtgcattaccgaccaggtacgtgacgtgatcgaggagatcatcgaagagggcgagagcagccgtgttaaagaaatcctcaatgacgagcgctacaaggcctttaagcagttcaccagcgtgttcggtgtgggcgtgaaaacctcggaaaagtggtaccgtatgggcctccgtacggttgaagaagcaaaggccagtaagagtctgaagctgagcaagatgcagaaggcgggcttcctgtattacgaggatctggcgagcatggttagtaaagaagaagccgatgccgttacgctcatcgtgaaggaaacggtgcgtacctttgtgccggatgcgctggtgaccatcgccggcggtttccgccgtggcaaacctatgggccacgacgttgactttctgatcacgaacccgggccgcaaaatggatgacgagctgctccacaaagtggttgatctgctcaagaagcaaggtctgctgctgtacgaagacatcaaagagagcacgttcgtggaggggcaactgccaagtcataaaatcgacgccatggacaacttccagaagtgcttcgccattctcaagctgtaccagccgaaggtggataacagtgcggttgggacgagtaagaaaagtgacatggctgaggttaaggattggaaagcgatccgtgtggatctggtgatcacgccattcgagcagtacgcctatgcgctgctcggttggacgggcagcggccaatttcgtcgcgatctgcgtgtttatgcggaggaagagcgcggcatgatcctcgacaaccatgccctctacgacctgaaaaagcgcatctttctgaaagcgggcagcgaagaagagattttcgcgcatctgggtctggattatgtggagccgtgggaacgcaacgcg

SEQ ID NO: 3174 - protein, 394 aa, synthetic construct
  REGION 1..394: note = Variant of terminal deoxynucleotidyl transferase
MHHHHHHGGSGHPPSNTPEKEVPSVIARPVSQYACQRKTTLNNYNKKFTDALEIMAENYKFKENLIACLEAKRAASIFKSLPFEVTSMKDIQGLPCITDQVRDVIEEIIEEGESSRVKEILNDERYKAFKQFTSVFGVGVKTSEKWYRMGLRTVEEAKASKSLKLSKMQKAGFLYYEDLASMVSKEEADAVTLIVKETVRTFVPDALVTIAGGFRRGKPMGHDVDFLITNPGRKMDDELLHKVVDLLKKQGLLLYEDIKESTFVEGQLPSHKIDAMDNFQKCFAILKLYQPKVDNSAVGTSKKSDMAEVKDWKAIRVDLVITPFEQYAYALLGWTGSGQFRRDLRVYAEEERGMILDNHALYDLKKRIFLKAGSEEEIFAHLGLDYVEPWERNA

SEQ ID NO: 3175 - DNA, 1182 bp, synthetic construct
  misc_feature 1..1182: note = Variant of terminal deoxynucleotidyl transferase
  source 1..1182: mol_type = other DNA
atgcatcaccaccatcatcatgggggttctggtcatccgccgagcaataccccggagaaggaggtgccgagcgttatcgcccgtccggttagtcagtacgcgtgccagcgcaagaccacgctgaataactacaacaaaaagttcaccgacgcgctggagatcatggccgagaactacaaatttaaagagaacctgatcgcgtgtctggaagccaagcgcgccgcgagtatttttaaaagcctgccgttcgaggttaccagcatgaaagacatccaaggtctgccgtgcattaccgaccaggtacgtgacgtgatcgaggagatcatcgaagagggcgagagcagccgtgttaaagaaatcctcaatgacgagcgctacaaggcctttaagcagttcaccagcgtgttcggtgtgggcgtgaaaacctcggaaaagtggtaccgtatgggcctccgtacggttgaagaagcaaaggccagtaagagtctgaagctgagcaagatgcagaaggcgggcttcctgtattacgaggatctggcgagcatggttagtaaagaagaagccgatgccgttacgctcatcgtgaaggaaacggtgcgtacctttgtgccggatgcgctggtgaccatcgccggcggtttccgccgtggcaaacctatgggccacgacgttgactttctgatcacgaacccgggccgcaaagaagatgacgagctgctccacaaagtggttgatctgctcaagaagcaaggtctgctgctgtacgaagacatcaaagagagcacgttcgtggaggggcaactgccaagtcataaaatcgacgccatggacaacttccagaagtgcttcgccattctcaagctgtaccagccgaaggtggataacagtgcggttgggacgagtaagaaaagtgacatggctgaggttaaggattggaaagcgattcgtgtggatctggtgatcacgccattcgagcagttcgcctatgcgctgctcggttggacgggcagcggccaatttcgtcgcgatctgcgtgtttatgcggaggaagagcgcggcatgatcctcgacaaccatgccctctacgacctgaaaaagcgcatctttctgaaagcgggcagcgaagaagagattttcgcgcatctgggtctggattatgtggagccgtgggaacgcaacgcg

SEQ ID NO: 3176 - protein, 394 aa, synthetic construct
  REGION 1..394: note = Variant of terminal deoxynucleotidyl transferase
MHHHHHHGGSGHPPSNTPEKEVPSVIARPVSQYACQRKTTLNNYNKKFTDALEIMAENYKFKENLIACLEAKRAASIFKSLPFEVTSMKDIQGLPCITDQVRDVIEEIIEEGESSRVKEILNDERYKAFKQFTSVFGVGVKTSEKWYRMGLRTVEEAKASKSLKLSKMQKAGFLYYEDLASMVSKEEADAVTLIVKETVRTFVPDALVTIAGGFRRGKPMGHDVDFLITNPGRKEDDELLHKVVDLLKKQGLLLYEDIKESTFVEGQLPSHKIDAMDNFQKCFAILKLYQPKVDNSAVGTSKKSDMAEVKDWKAIRVDLVITPFEQFAYALLGWTGSGQFRRDLRVYAEEERGMILDNHALYDLKKRIFLKAGSEEEIFAHLGLDYVEPWERNA

SEQ ID NO: 3177 - DNA, 1182 bp, synthetic construct
  misc_feature 1..1182: note = Variant of terminal deoxynucleotidyl transferase
  source 1..1182: mol_type = other DNA
atgcatcaccaccatcatcatgggggttctggtcatccgccgagcaataccccggagaaggaggtgccgagcgttatcgcccgtccggttagtcagtacgcgtgccagcgcaagaccacgctgaataactacaacaaaaagttcaccgacgcgctggagatcatggccgagaactacaaatttaaagagaacctgcaggcgtgtctggaagccaagcgcgccgcgagtatttttaaaagcctgccgttcgaggttaccagcatgaaagacatccaaggtctgccgtgcattaccgaccaggtacgtgacgtgatcgaggagatcatcgaagagggcgagagcagccgtgttaaagaaatcctcaatgacgagcgctacaaggcctttaagcagttcaccagcgtgttcggtgtgggcgtgaaaacctcggaaaagtggtaccgtatgggcctccgtacggttgaagaagcaaaggccagtaagagtctgaagctgagcaagatgcagaaggcgggcttcctgtattacgaggatctggcgagcatggttagtaaagaagaagccgatgccgttacgctcatcgtgaaggaaacggtgcgtacctttgtgccggatgcgctggtgaccatcgccggcggtttccgccgtggcaaacctatgggccacgacgttgactttctgatcacgaacccgggccgcaaagaagatgacgagctgctccacaaagtggttgatctgctcaagaagcaaggtctgctgctgtacgaagacatcaaagagagcacgttcgtggaggggcaactgccaagtcataaaatcgacgccatggacaacttccagaagtgcttcgccattctcaagctgtaccagccgaaggtggataacagtgcggttgggacgagtaagaaaagtgacatggctgaggttaaggattggaaagcgatccgtgtggatctggtgatcacgccattcgagcagtacgcctatgcgctgctcggttggacgggcagcggccaatttcgtcgcgatctgcgtcgctatgcggaggaagagcgcggcatgatcctcgacaaccatgccctctacgacctgaaaaagcgcatctttctgaaagcgggcagcgaagaagagattttcgcgcatctgggtctggattatgtggagccgtgggaacgcaacgcg

SEQ ID NO: 3178 - protein, 394 aa, synthetic construct
  REGION 1..394: note = Variant of terminal deoxynucleotidyl transferase
MHHHHHHGGSGHPPSNTPEKEVPSVIARPVSQYACQRKTTLNNYNKKFTDALEIMAENYKFKENLQACLEAKRAASIFKSLPFEVTSMKDIQGLPCITDQVRDVIEEIIEEGESSRVKEILNDERYKAFKQFTSVFGVGVKTSEKWYRMGLRTVEEAKASKSLKLSKMQKAGFLYYEDLASMVSKEEADAVTLIVKETVRTFVPDALVTIAGGFRRGKPMGHDVDFLITNPGRKEDDELLHKVVDLLKKQGLLLYEDIKESTFVEGQLPSHKIDAMDNFQKCFAILKLYQPKVDNSAVGTSKKSDMAEVKDWKAIRVDLVITPFEQYAYALLGWTGSGQFRRDLRRYAEEERGMILDNHALYDLKKRIFLKAGSEEEIFAHLGLDYVEPWERNA

SEQ ID NO: 3179 - DNA, 1182 bp, synthetic construct
  misc_feature 1..1182: note = Variant of terminal deoxynucleotidyl transferase
  source 1..1182: mol_type = other DNA
atgcatcaccaccatcatcatgggggttctggtcatccgccgagcaataccccggagaaggaggtgccgagcgttatcgcccgtccggttagtcagtacgcgtgccagcgcaagaccacgctgaataactacaacaaaaagttcaccgacgcgctggagatcatggccgagaactacaaatttaaagagaacctgatcgcgtgtcatgaagccaagcgcgccgcgagtatttttaaaagcctgccgttcgaggttaccagcatgaaagacatccaaggtctgccgtgcattaccgaccaggtacgtgacgtgatcgaggagatcatcgaagagggcgagagcagccgtgttaaagaaatcctcaatgacgagcgctacaaggcctttaagcagttcaccagcgtgttcggtgtgggcgtgaaaacctcggaaaagtggtaccgtatgggcctccgtacggttgaagaagcaaaggccagtaagagtctgaagctgagcaagatgcagaaggcgggcttcctgtattacgaggatctggcgagcatggttagtaaagaagaagccgatgccgttacgctcatcgtgaaggaaacggtgcgtacctttgtgccggatgcgctggtgaccatcgccggcggtttccgccgtggcaaacctatgggccacgacgttgactttctgatcacgaacccgggccgcaaagaggatgacgagctgctccacaaagtggttgatctgctcaagaagcaaggtctgctgctgtacgaagacatcaaagagagcacgttcgtggaggggcaactgccaagtcataaaatcgacgccatggacaacttccagaagtgcttcgccattctcaagctgtaccagccgaaggtggataacagtgcggttgggacgagtaagaaaagtgacatggctgaggttaaggattggaaagcgatccgtgtggatctggtgatcacgccattcgagcagtacgcctatgcgctgctcggttggacgggcagcggccaatttcgtcgcgatctgcgtcgctatgcggaggaagagcgcggcatgatcctcgacaaccatgccctctacgacctgaaaaagcgcatctttctgaaagcgggcagcgaagaagagattttcgcgcatctgggtctggattatgtggagccgtgggaacgcaacgcg

SEQ ID NO: 3180 - protein, 394 aa, synthetic construct
  REGION 1..394: note = Variant of terminal deoxynucleotidyl transferase
MHHHHHHGGSGHPPSNTPEKEVPSVIARPVSQYACQRKTTLNNYNKKFTDALEIMAENYKFKENLIACHEAKRAASIFKSLPFEVTSMKDIQGLPCITDQVRDVIEEIIEEGESSRVKEILNDERYKAFKQFTSVFGVGVKTSEKWYRMGLRTVEEAKASKSLKLSKMQKAGFLYYEDLASMVSKEEADAVTLIVKETVRTFVPDALVTIAGGFRRGKPMGHDVDFLITNPGRKEDDELLHKVVDLLKKQGLLLYEDIKESTFVEGQLPSHKIDAMDNFQKCFAILKLYQPKVDNSAVGTSKKSDMAEVKDWKAIRVDLVITPFEQYAYALLGWTGSGQFRRDLRRYAEEERGMILDNHALYDLKKRIFLKAGSEEEIFAHLGLDYVEPWERNA

SEQ ID NO: 3181 - DNA, 1182 bp, synthetic construct
  misc_feature 1..1182: note = Variant of terminal deoxynucleotidyl transferase
  source 1..1182: mol_type = other DNA
atgcatcaccaccatcatcatgggggttctggtcatccgccgagcaataccccggagaaggaggtgccgagcgttatcgcccgtccggttagtcagtacgcgtgccagcgcaagaccacgctgaataactacaacaaaaagttcaccgacgcgctggagatcatggccgagaactacaaatttaaagagaacctgatcgcgtgtctggaagccaagcgcgccgcgagtatttttaaaagcctgccgttcgaggttaccagcatgaaagacatccaaggtctgccgtgcattaccgaccaggtacgtgacgtgatcgaggagatcatcgaagagggcgagagcagccgtgttaaagaaatcctcaatgacgagcgctacaaggcctttaagcagttcaccagcgtgttcggtgtgggcgtgaaaacctcggaaaagtggtaccgtatgggcctccgtacggttgaagaagcaaaggccagtaagagtctgaagctgagcaagatgcagaaggcgggcttcctgtattacgaggatctggcgagcatggttagtaaagaagaagccgatgccgttacgctcatcgtgaaggaaacggtgcgtacctttgtgccggatgcgctggtgaccatcgccggcggtttccgccgtggcaaacctatgggccacgacgttgactttctgatcacgaacccgggccgcaaaatggatgacgagctgctccacaaagtggttgatctgctcaagaagcaaggtctgctgctgtacgaagacatcaaagagagcacgttcgtggaggggcaactgccaagtcataaaatcgacgccatggacaacttccagaagtgcttcgccattctcaagctgtaccagccgaaggtggataacagtgcggttgggacgagtaagaaaagtgacatggctgaggttaaggattggaaagcggttcgtgtggatctggtgatcacgccattcgagcagtacgcctatgcgctgctcggttggacgggcagcggccaatttcgtcgcgatctgcgtcgctatgcggaggaagagcgcggcatgatcctcgacaaccatgccctctacgacctgaaaaagcgcatctttctgaaagcgggcagcgaagaagagattttcgcgcatctgggtctggattatgtggagccgtgggaacgcaacgcg

SEQ ID NO: 3182 - protein, 394 aa, synthetic construct
  REGION 1..394: note = Variant of terminal deoxynucleotidyl transferase
MHHHHHHGGSGHPPSNTPEKEVPSVIARPVSQYACQRKTTLNNYNKKFTDALEIMAENYKFKENLIACLEAKRAASIFKSLPFEVTSMKDIQGLPCITDQVRDVIEEIIEEGESSRVKEILNDERYKAFKQFTSVFGVGVKTSEKWYRMGLRTVEEAKASKSLKLSKMQKAGFLYYEDLASMVSKEEADAVTLIVKETVRTFVPDALVTIAGGFRRGKPMGHDVDFLITNPGRKMDDELLHKVVDLLKKQGLLLYEDIKESTFVEGQLPSHKIDAMDNFQKCFAILKLYQPKVDNSAVGTSKKSDMAEVKDWKAVRVDLVITPFEQYAYALLGWTGSGQFRRDLRRYAEEERGMILDNHALYDLKKRIFLKAGSEEEIFAHLGLDYVEPWERNA

SEQ ID NO: 3183 - DNA, 1182 bp, synthetic construct
  misc_feature 1..1182: note = Variant of terminal deoxynucleotidyl transferase
  source 1..1182: mol_type = other DNA
atgcatcaccaccatcatcatgggggttctggtcatccgccgagcaataccccggagaaggaggtgccgagcgttatcgcccgtccggttagtcagtacgcgtgccagcgcaagaccacgctgaataactacaacaaaaagttcaccgacgcgctggagatcatggccgagaactacaaatttaaagagaacctgatcgcgtgtctggaagccaagcgcgccgcgagtatttttaaaagcctgccgttcgaggttaccagcatgaaagacatccaaggtctgccgtgcattaccgacgacgtacgtgacgtgatcgaggagatcatcgaagagggcgagagcagccgtgttaaagaaatcctcaatgacgagcgctacaaggcctttaagcagttcaccagcgtgttcggtgtgggcgtgaaaacctcggaaaagtggtaccgtatgggcctccgtacggttgaagaagcaaaggccagtaagagtctgaagctgagcaagatgcagaaggcgggcttcctgtattacgaggatctggcgagcatggttagtaaagaagaagccgatgccgttacgctcatcgtgaaggaaacggtgcgtacctttgtgccggatgcgctggtgaccatcgccggcggtttccgccgtggcaaacctatgggccacgacgttgactttctgatcacgaacccgggccgcaaaatggatgacgagctgctccacaaagtggttgatctgctcaagaagcaaggtctgctgctgtacgaagacatcaaagagagcacgttcgtggaggggcaagtgccaagtcataaaatcgacgccatggacaacttccagaagtgcttcgccattctcaagctgtaccagccgaaggtggataacagtgcggttgggacgagtaagaaaagtgacatggctgaggttaaggattggaaagcgattcgtgtggatctggtgatcacgccattcgagcagtacgcctatgcgctgctcggttggacgggcagcggccaatttcgtcgcgatctgcgtcgctatgcggaggaagagcgcggcatgatcctcgacaaccatgccctctacgacctgaaagaacgcatctttctgaaagcgagcagcgaagaagagattttcgcgcatctgggtctggattatgtggagccgtgggaacgcaacgcg

SEQ ID NO: 3184 - protein, 394 aa, synthetic construct
  REGION 1..394: note = Variant of terminal deoxynucleotidyl transferase
MHHHHHHGGSGHPPSNTPEKEVPSVIARPVSQYACQRKTTLNNYNKKFTDALEIMAENYKFKENLIACLEAKRAASIFKSLPFEVTSMKDIQGLPCITDDVRDVIEEIIEEGESSRVKEILNDERYKAFKQFTSVFGVGVKTSEKWYRMGLRTVEEAKASKSLKLSKMQKAGFLYYEDLASMVSKEEADAVTLIVKETVRTFVPDALVTIAGGFRRGKPMGHDVDFLITNPGRKMDDELLHKVVDLLKKQGLLLYEDIKESTFVEGQVPSHKIDAMDNFQKCFAILKLYQPKVDNSAVGTSKKSDMAEVKDWKAIRVDLVITPFEQYAYALLGWTGSGQFRRDLRRYAEEERGMILDNHALYDLKERIFLKASSEEEIFAHLGLDYVEPWERNA

SEQ ID NO: 3185 - DNA, 1182 bp, synthetic construct
  misc_feature 1..1182: note = Variant of terminal deoxynucleotidyl transferase
  source 1..1182: mol_type = other DNA
atgcatcaccaccatcatcatgggggttctggtcatccgccgagcaataccccggagaaggaggtgccgagcgttatcgcccgtccggttagtcagtacgcgtgccagcgcaagaccacgctgaataactacaacaaaaagttcaccgacgcgctggagatcatggccgagaactacaaatttaaagagaacctgatcgcgtgtcatgaagccaagcgcgccgcgagtatttttaaaagcctgccgttcgaggttaccagcatgaaagacatccaaggtctgccgtgcattaccgaccaggtacgtgacgtgatcgaggagatcatcgaagagggcgagagcagccgtgttaaagaaatcctcaatgacgagcgctacaaggcctttaagcagttcaccagcgtgttcggtgtgggcgtgaaaacctcggaaaagtggtaccgtatgggcctccgtacggttgaagaagcaaaggccagtaagagtctgaagctgagcaagatgcagaaggcgggcttcctgtattacgaggatctggcgagcatggttagtaaagaagaagccgatgccgttacgctcatcgtgaaggaaacggtgcgtacctttgtgccggatgcgctggtgaccatcgccggcggtttccgccgtggcaaacctatgggccacgacgttgactttctgatcacgaacccgggccgcaaaatggatgacgagctgctccacaaagtggttgatctgctcaagaagcaaggtctgctgctgtacgaagacatcaaagagagcacgttcgtggaggggcaactgccaagtcataaaatcgacgccatggacaacttccagaagtgcttcgccattctcaagctgtaccagccgaaggtggataacagtgcggttgggacgagtaagaaaagtgacatggctgaggttaaggattggaaagcgatccgtgtggatctggtgatcacgccattcgagcagtacgcctatgcgctgctcggttggacgggcagcggccaatttcgtcgcgatctgcgtcgctatgcggaggaagagcgcgacatgatcctcgacaaccatgccctctacgacctgaaaaagcgcatctttctgaaagcgggcagcgaagaagagattttcgcgcatctgggtctggattatgtggagccgtgggaacgcaacgcg

SEQ ID NO: 3186 - protein, 394 aa, synthetic construct
  REGION 1..394: note = Variant of terminal deoxynucleotidyl transferase
MHHHHHHGGSGHPPSNTPEKEVPSVIARPVSQYACQRKTTLNNYNKKFTDALEIMAENYKFKENLIACHEAKRAASIFKSLPFEVTSMKDIQGLPCITDQVRDVIEEIIEEGESSRVKEILNDERYKAFKQFTSVFGVGVKTSEKWYRMGLRTVEEAKASKSLKLSKMQKAGFLYYEDLASMVSKEEADAVTLIVKETVRTFVPDALVTIAGGFRRGKPMGHDVDFLITNPGRKMDDELLHKVVDLLKKQGLLLYEDIKESTFVEGQLPSHKIDAMDNFQKCFAILKLYQPKVDNSAVGTSKKSDMAEVKDWKAIRVDLVITPFEQYAYALLGWTGSGQFRRDLRRYAEEERDMILDNHALYDLKKRIFLKAGSEEEIFAHLGLDYVEPWERNA

SEQ ID NO: 3187 - DNA, 1182 bp, synthetic construct
  misc_feature 1..1182: note = Variant of terminal deoxynucleotidyl transferase
  source 1..1182: mol_type = other DNA
atgcatcaccaccatcatcatgggggttctggtcatccgccgagcaataccccggagaaggaggtgccgagcgttatcgcccgtccggttagtcagtacgcgtgccagcgcaagaccacgctgaataactacaacaaaaagttcaccgacgcgctggagatcatggccgagaactacaaatttaaagagaacctgatcgcgtgtctggaagccaagcgcgccgcgagtatttttaaaagcctgccgttcgaggttaccagcatgaaagacatccaaggtctgccgtgcattaccgacgacgtacgtgacgtgatcgaggagatcatcgaagagggcgagagcagccgtgttaaagaaatcctcaatgacgagcgctacaaggcctttaagcagttcaccagcgtgttcggtgtgggcgtgaaaacctcggaaaagtggtaccgtatgggcctccgtacggttgaagaagcaaaggccagtaagagtctgaagctgagcaagatgcagaaggcgggcttcctgtattacgaggatctggcgagcatggttagtaaagaagaagccgatgccgttacgctcatcgtgaaggaaacggtgcgtacctttgtgccggatgcgctggtgaccatcgccggcggtttccgccgtggcaaacctatgggccacgacgttgactttctgatcacgaacccgggccgcaaaatggatgacgagctgctccacaaagtggttgatctgctcaagaagcaaggtctgctgctgtacgaagacatcaaagagagcacgttcgtggaggggcaagtgccaagtcataaaatcgacgccatggacaacttccagaagtgcttcgccattctcaagctgtaccagccgaaggtggataacagtgcggttgggacgagtaagaaaagtgacatggctgaggttaaggattggaaagcgatccgtgtggatctggtgatcacgccattcgagcagtacgcctatgcgctgctcggttggacgggcagcggccaatttcgtcgcgatctgcgtgtttatgcggaggaagagcgcggcatgctgctcgacaaccatgccctctacgacctgaaaaagcgcatctttctgaaagcgggcagcgaagaagagattttcgcgcatctgggtctggattatgtggagccgtgggaacgcaacgcg

SEQ ID NO: 3188 - protein, 394 aa, synthetic construct
  REGION 1..394: note = Variant of terminal deoxynucleotidyl transferase
MHHHHHHGGSGHPPSNTPEKEVPSVIARPVSQYACQRKTTLNNYNKKFTDALEIMAENYKFKENLIACLEAKRAASIFKSLPFEVTSMKDIQGLPCITDDVRDVIEEIIEEGESSRVKEILNDERYKAFKQFTSVFGVGVKTSEKWYRMGLRTVEEAKASKSLKLSKMQKAGFLYYEDLASMVSKEEADAVTLIVKETVRTFVPDALVTIAGGFRRGKPMGHDVDFLITNPGRKMDDELLHKVVDLLKKQGLLLYEDIKESTFVEGQVPSHKIDAMDNFQKCFAILKLYQPKVDNSAVGTSKKSDMAEVKDWKAIRVDLVITPFEQYAYALLGWTGSGQFRRDLRVYAEEERGMLLDNHALYDLKKRIFLKAGSEEEIFAHLGLDYVEPWERNA

SEQ ID NO: 3189 - DNA, 1182 bp, synthetic construct
  misc_feature 1..1182: note = Variant of terminal deoxynucleotidyl transferase
  source 1..1182: mol_type = other DNA
atgcatcaccaccatcatcatgggggttctggtcatccgccgagcaataccccggagaaggaggtgccgagcgttatcgcccgtccggttagtcagtacgcgtgccagcgcaagaccacgctgaataactacaacaaaaagttcaccgacgcgctggagatcatggccgagaactacaaatttaaagagaacctgatcgcgtgtcatgaagccaagcgcgccgcgagtatttttaaaagcctgccgttcgaggttaccagcatgaaagacatccaaggtctgccgtgcattaccgacgacgtacgtgacgtgatcgaggagatcatcgaagagggcgagagcagccgtgttaaagaaatcctcaatgacgagcgctacaaggcctttaagcagttcaccagcgtgttcggtgtgggcgtgaaaacctcggaaaagtggtaccgtatgggcctccgtacggttgaagaagcaaaggccagtaagagtctgaagctgagcaagatgcagaaggcgggcttcctgtattacgaggatctggcgagcatggttagtaaagaagaagccgatgccgttacgctcatcgtgaaggaaacggtgcgtacctttgtgccggatgcgctggtgaccatcgccggcggtttccgccgtggcaaacctatgggccacgacgttgactttctgatcacgaacccgggccgcaaaatggatgacgagctgctccacaaagtggttgatctgctcaagaagcaaggtctgctgctgtacgaagacatcaaagagagcacgttcgtggaggggcaactgccaagtcataaaatcgacgccatggacaacttccagaagtgcttcgccattctcaagctgtaccagccgaaggtggataacagtgcggttgggacgagtaagaaaagtgacatggctgaggttaaggattggaaagcgatccgtgtggatctggtgatcacgccattcgagcagtacgcctatgcgctgctcggttggacgggcagcggccaatttcgtcgcgatctgcgtcgctatgcggaggaagagcgcggcatgatcctcgacaaccatgccctctacgacctgaaaaagcgcatctttctgaaagcgggcagcgaagaagagattttcgcgcatctgggtctggattatgtggagccgtgggaacgcaacgcg

SEQ ID NO: 3190 - protein, 394 aa, synthetic construct
  REGION 1..394: note = Variant of terminal deoxynucleotidyl transferase
MHHHHHHGGSGHPPSNTPEKEVPSVIARPVSQYACQRKTTLNNYNKKFTDALEIMAENYKFKENLIACHEAKRAASIFKSLPFEVTSMKDIQGLPCITDDVRDVIEEIIEEGESSRVKEILNDERYKAFKQFTSVFGVGVKTSEKWYRMGLRTVEEAKASKSLKLSKMQKAGFLYYEDLASMVSKEEADAVTLIVKETVRTFVPDALVTIAGGFRRGKPMGHDVDFLITNPGRKMDDELLHKVVDLLKKQGLLLYEDIKESTFVEGQLPSHKIDAMDNFQKCFAILKLYQPKVDNSAVGTSKKSDMAEVKDWKAIRVDLVITPFEQYAYALLGWTGSGQFRRDLRRYAEEERGMILDNHALYDLKKRIFLKAGSEEEIFAHLGLDYVEPWERNA

SEQ ID NO: 3191 - DNA, 1182 bp, synthetic construct
  misc_feature 1..1182: note = Variant of terminal deoxynucleotidyl transferase
  source 1..1182: mol_type = other DNA
atgcatcaccaccatcatcatgggggttctggtcatccgccgagcaataccccggagaaggaggtgccgagcgttatcgcccgtccggttagtcagtacgcgtgccagcgcaagaccacgctgaataactacaacaaaaagttcaccgacgcgctggagatcatggccgagaactacaaatttaaagagaacctgatcgcgtgtcatgaagccaagcgcgccgcgagtatttttaaaagcctgccgttcgaggttaccagcatgaaagacatccaaggtctgccgtgcattaccgaccaggtacgtgacgtgatcgaggagatcatcgaagagggcgagagcagccgtgttaaagaaatcctcaatgacgagcgctacaaggcctttaagcagttcaccagcgtgttcggtgtgggcgtgaaaacctcggaaaagtggtaccgtatgggcctccgtacggttgaagaagcaaaggccagtaagagtctgaagctgagcaagatgcagaaggcgggcttcctgtattacgaggatctggcgagcatggttagtaaagaagaagccgatgccgttacgctcatcgtgaaggaaacggtgcgtacctttgtgccggatgcgctggtgaccatcgccggcggtttccgccgtggcaaacctatgggccacgacgttgactttctgatcacgaacccgggccgcaaagaagatgacgagctgctccacaaagtggttgatctgctcaagaagcaaggtctgctgctgtacgaagacatcaaagagagcacgttcgtggaggggcaagtgccaagtcataaaatcgacgccatggacaacttccagaagtgcttcgccattctcaagctgtaccagccgaaggtggataacagtgcggttgggacgagtaagaaaagtgacatggctgaggttaaggattggaaagcgatccgtgtggatctggtgatcacgccattcgagcagtacgcctatgcgctgctcggttggacgggcagcggccaatttcgtcgcgatctgcgtcgctatgcggaggaagagcgcggcatgatcctcgacaaccatgccctctacgacctgaaaaagcgcatctttctgaaagcgggcagcgaagaagagattttcgcgcatctgggtctggattatgtggagccgtgggaacgcaacgcg

SEQ ID NO: 3192 - protein, 394 aa, synthetic construct
  REGION 1..394: note = Variant of terminal deoxynucleotidyl transferase
MHHHHHHGGSGHPPSNTPEKEVPSVIARPVSQYACQRKTTLNNYNKKFTDALEIMAENYKFKENLIACHEAKRAASIFKSLPFEVTSMKDIQGLPCITDQVRDVIEEIIEEGESSRVKEILNDERYKAFKQFTSVFGVGVKTSEKWYRMGLRTVEEAKASKSLKLSKMQKAGFLYYEDLASMVSKEEADAVTLIVKETVRTFVPDALVTIAGGFRRGKPMGHDVDFLITNPGRKEDDELLHKVVDLLKKQGLLLYEDIKESTFVEGQVPSHKIDAMDNFQKCFAILKLYQPKVDNSAVGTSKKSDMAEVKDWKAIRVDLVITPFEQYAYALLGWTGSGQFRRDLRRYAEEERGMILDNHALYDLKKRIFLKAGSEEEIFAHLGLDYVEPWERNA

SEQ ID NO: 3193 - DNA, 1182 bp, synthetic construct
  misc_feature 1..1182: note = Variant of terminal deoxynucleotidyl transferase
  source 1..1182: mol_type = other DNA
atgcatcaccaccatcatcatgggggttctggtcatccgccgagcaataccccggagaaggaggtgccgagcgttatcgcccgtccggttagtcagtacgcgtgccagcgcaagaccacgctgaataactacaacaaaaagttcaccgacgcgctggagatcatggccgagaactacaaatttgaagagaacctgatcgcgtgtctggaagccaagcgcgccgcgagtatttttaaaagcctgccgttcgaggttaccagcatgaaagacatccaaggtctgccgtgcattaccgaccaggtacgtgacgtgatcgaggagatcatcgaagagggcgagagcagccgtgttaaagaaatcctcaatgacgagcgctacaaggcctttaagcagttcaccagcgtgttcggtgtgggcgtgaaaacctcggaaaagtggtaccgtatgggcctccgtacggttgaagaagcaaaggccagtaagagtctgaagctgagcaagatgcagaaggcgggcttcctgtattacgaggatctggcgagcatggttagtaaagaagaagccgatgccgttacgctcatcgtgaaggaaacggtgcgtacctttgtgccggatgcgctggtgaccatcgccggcggtttccgccgtggcaaacctatgggccacgacgttgactttctgatcacgaacccgggccgcaaagaagatgacgagctgctccacaaagtggttgatctgctcaagaagcaaggtctgctgctgtacgaagacatcaaagagagcacgttcgtggaggggcaactgccaagtcataaaatcgacgccatggacaacttccagaagtgcttcgccattctcaagctgtaccagccgaaggtggataacagtgcggttgggacgagtaagaaaagtgacatggctgaggttaaggattggaaagcggttcgtgtggatctggtgatcacgccattcgagcagttcgcctatgcgctgctcggttggacgggcagcggccaatttcgtcgcgatctgcgtcgctatgcggaggaagagcgcgacatgatcctcgacaaccatgccctctacgacctgaaaaagcgcatctttctgaaagcgggcagcgaagaagagattttcgcgcatctgggtctggattatgtggagccgtgggaacgcaacgcg

SEQ ID NO: 3194 - protein, 394 aa, synthetic construct
  REGION 1..394: note = Variant of terminal deoxynucleotidyl transferase
MHHHHHHGGSGHPPSNTPEKEVPSVIARPVSQYACQRKTTLNNYNKKFTDALEIMAENYKFEENLIACLEAKRAASIFKSLPFEVTSMKDIQGLPCITDQVRDVIEEIIEEGESSRVKEILNDERYKAFKQFTSVFGVGVKTSEKWYRMGLRTVEEAKASKSLKLSKMQKAGFLYYEDLASMVSKEEADAVTLIVKETVRTFVPDALVTIAGGFRRGKPMGHDVDFLITNPGRKEDDELLHKVVDLLKKQGLLLYEDIKESTFVEGQLPSHKIDAMDNFQKCFAILKLYQPKVDNSAVGTSKKSDMAEVKDWKAVRVDLVITPFEQFAYALLGWTGSGQFRRDLRRYAEEERDMILDNHALYDLKKRIFLKAGSEEEIFAHLGLDYVEPWERNA

SEQ ID NO: 3195 - DNA, 1182 bp, synthetic construct
  misc_feature 1..1182: note = Variant of terminal deoxynucleotidyl transferase
  source 1..1182: mol_type = other DNA
atgcatcaccaccatcatcatgggggttctggtcatccgccgagcaataccccggagaaggaggtgccgagcgttatcgcccgtccggttagtcagtacgcgtgccagcgcaagaccacgctgaataactacaacaaaaagttcaccgacgcgctggagatcatggccgagaactacaaatttaaagagaacctgatcgcgtgtctggaagccaagcgcgccgcgagtatttttaaaagcctgccgttcgaggttaccagcatgaaagacatccaaggtctgccgtgcattaccgaccaggtacgtgacgtgatcgaggagatcatcgaagagggcgagagcagccgtgttaaagaaatcctcaatgacgagcgctacaaggcctttaagcagttcaccagcgtgttcggtgtgggcgtgaaaacctcggaaaagtggtaccgtatgggcctccgtacggttgaagaagcaaaggccagtaagagtctgaagctgagcaagatgcagaaggcgggcttcctgtattacgaggatctggcgagcatggttagtaaagaagaagccgatgccgttacgctcatcgtgaaggaaacggtgcgtacctttgtgccggatgcgctggtgaccatcgccggcggtttccgccgtggcaaacctatgggccacgacgttgactttctgatcacgaacccggaccgcaaagaagatgacgagctgctccacaaagtggttgatctgctcaagaagcaaggtctgctgctgtacgaagacatcaaagagagcacgttcgtggaggggcaactgccaagtcataaaatcgacgccatggacaacttccagaagtgcttcgccattctcaagctgtaccagccgaaggtggataacagtgcggttgggacgagtaagaaaagtgacatggctgaggttaaggattggaaagcgatccgtgtggatctggtgatcacgccattcgagcagtacgcctatgcgctgctcggttggacgggcagcggccaatttcgtcgcgatctgcgtatttatgcggagctggagcgcggcatgctgctcgacaaccatgccctctacgacctgaaaaagcgcatctttctgaaagcgggcagcgaagaagagattttcgcgcatctgggtctggattatgtggagccgtgggaacgcaacgcg

SEQ ID NO: 3196 - protein, 394 aa, synthetic construct
  REGION 1..394: note = Variant of terminal deoxynucleotidyl transferase
MHHHHHHGGSGHPPSNTPEKEVPSVIARPVSQYACQRKTTLNNYNKKFTDALEIMAENYKFKENLIACLEAKRAASIFKSLPFEVTSMKDIQGLPCITDQVRDVIEEIIEEGESSRVKEILNDERYKAFKQFTSVFGVGVKTSEKWYRMGLRTVEEAKASKSLKLSKMQKAGFLYYEDLASMVSKEEADAVTLIVKETVRTFVPDALVTIAGGFRRGKPMGHDVDFLITNPDRKEDDELLHKVVDLLKKQGLLLYEDIKESTFVEGQLPSHKIDAMDNFQKCFAILKLYQPKVDNSAVGTSKKSDMAEVKDWKAIRVDLVITPFEQYAYALLGWTGSGQFRRDLRIYAELERGMLLDNHALYDLKKRIFLKAGSEEEIFAHLGLDYVEPWERNA

SEQ ID NO: 3197 - DNA, 1182 bp, synthetic construct
  misc_feature 1..1182: note = Variant of terminal deoxynucleotidyl transferase
  source 1..1182: mol_type = other DNA
atgcatcaccaccatcatcatgggggttctggtcatccgccgagcaataccccggagaaggaggtgccgagcgttatcgcccgtccggttagtcagtacgcgtgccagcgcaagaccacgctgaataactacaacaaaaagttcaccgacgcgctggagatcatggccgagaactacaaatttaaagagaacctgatcgcgtgtcatgaagccaagcgcgccgcgagtatttttaaaagcctgccgttcgaggttaccagcatgaaagacatccaaggtctgccgtgcattaccgaccaagtacgtgacgtgatcgaggagatcatcgaagagggcgagagcagccgtgttaaagaaatcctcaatgacgagcgctacaaggcctttaagcagttcaccagcgtgttcggtgtgggcgtgaaaacctcggaaaagtggtaccgtatgggcctccgtacggttgaagaagcaaaggccagtaagagtctgaagctgagcaagatgcagaaggcgggcttcctgtattacgaggatctggcgagcatggttagtaaagaagaagccgatgccgttacgctcatcgtgaaggaaacggtgcgtacctttgtgccggatgcgctggtgaccatcgccggcggtttccgccgtggcaaacctatgggccacgacgttgactttctgatcacgaacccgggccgcaaagaagatgacgagctgctccacaaagtggttgatctgctcaagaagcaaggtctgctgctgtacgaagacatcaaagagagcacgttcgtggaggggcaagtgccaagtcataaaatcgacgccatggacaacttccagaagtgcttcgccattctcaagctgtaccagccgaaggtggataacagtgcggttgggacgagtaagaaaagtgacatggctgaggttaaggattggaaagcgattcgtgtggatctggtgatcacgccatgggagcagttcgcctatgcgctgctcggttggacgggcagcggccaatttcgtcgcgatctgcgtcgctatgcggaggaagagcgcgacatgctgctcgacaaccatgccctctacgacctgaaaaagcgcatctttctgaaagcgggcagcgaagaagagattttcgcgcatctgggtctggattatgtggagccgtgggaacgcaacgcg

SEQ ID NO: 3198 - protein, 394 aa, synthetic construct
  REGION 1..394: note = Variant of terminal deoxynucleotidyl transferase
MHHHHHHGGSGHPPSNTPEKEVPSVIARPVSQYACQRKTTLNNYNKKFTDALEIMAENYKFKENLIACHEAKRAASIFKSLPFEVTSMKDIQGLPCITDQVRDVIEEIIEEGESSRVKEILNDERYKAFKQFTSVFGVGVKTSEKWYRMGLRTVEEAKASKSLKLSKMQKAGFLYYEDLASMVSKEEADAVTLIVKETVRTFVPDALVTIAGGFRRGKPMGHDVDFLITNPGRKEDDELLHKVVDLLKKQGLLLYEDIKESTFVEGQVPSHKIDAMDNFQKCFAILKLYQPKVDNSAVGTSKKSDMAEVKDWKAIRVDLVITPWEQFAYALLGWTGSGQFRRDLRRYAEEERDMLLDNHALYDLKKRIFLKAGSEEEIFAHLGLDYVEPWERNA

SEQ ID NO: 3199 - DNA, 1182 bp, synthetic construct
  misc_feature 1..1182: note = Variant of terminal deoxynucleotidyl transferase
  source 1..1182: mol_type = other DNA
atgcatcaccaccatcatcatgggggttctggtcatccgccgagcaataccccggagaaggaggtgccgagcgttatcgcccgtccggttagtcagtacgcgtgccagcgcaagaccacgctgaataactacaacaaaaagttcaccgacgcgctggagatcatggccgagaactacaaatttaaagagaacctgatcgcgtgtctggaagccaagcgcgccgcgagtatttttaaaagcctgccgttcgaggttaccagcatgaaagacatccaaggtctgccgtgcattaccgaccaagtacgtgacgtgatcgaggagatcatcgaagagggcgagagcagccgtgttaaagaaatcctcaatgacgagcgctacaaggcctttaagcagttcaccagcgtgttcggtgtgggcgtgaaaacctcggaaaagtggtaccgtatgggcctccgtacggttgaagaagcaaaggccagtaagagtctgaagctgagcaagatgcagaaggcgggcttcctgtattacgaggatctggcgagcatggttagtaaagaagaagccgatgccgttacgctcatcgtgaaggaaacggtgcgtacctttgtgccggatgcgctggtgaccatcgccggcggtttccgccgtggcaaacctatgggccacgacgttgactttctgatcacgaacccgggccgcaaagaagatgacgagctgctccacaaagtggttgatctgctcaagaagcaaggtctgctgctgtacgaagacatcaaagagagcacgttcgtggaggggcaactgccaagtcataaaatcgacgccatggacaacttccagaagtgcttcgccattctcaagctgtaccagccgaaggtggataacagtgcggttgggacgagtaagaaaagtgacatggctgaggttaaggattggaaagcgatccgtgtggatctggtgatcacgccatgggagcagtacgcctatgcgctgctcggttggacgggcagcggccaatttcgtcgcgatctgcgtatttatgcggagctggagcgcggcatgatcctcgacaaccatgccctctacgacctgaaaaaacgcatctttctgaaagcgggcagcgaagaagagattttcgcgcatctgggtctggattatgtggagccgtgggaacgcaacgcg

SEQ ID NO: 3200 - protein, 394 aa, synthetic construct
  REGION 1..394: note = Variant of terminal deoxynucleotidyl transferase
MHHHHHHGGSGHPPSNTPEKEVPSVIARPVSQYACQRKTTLNNYNKKFTDALEIMAENYKFKENLIACLEAKRAASIFKSLPFEVTSMKDIQGLPCITDQVRDVIEEIIEEGESSRVKEILNDERYKAFKQFTSVFGVGVKTSEKWYRMGLRTVEEAKASKSLKLSKMQKAGFLYYEDLASMVSKEEADAVTLIVKETVRTFVPDALVTIAGGFRRGKPMGHDVDFLITNPGRKEDDELLHKVVDLLKKQGLLLYEDIKESTFVEGQLPSHKIDAMDNFQKCFAILKLYQPKVDNSAVGTSKKSDMAEVKDWKAIRVDLVITPWEQYAYALLGWTGSGQFRRDLRIYAELERGMILDNHALYDLKKRIFLKAGSEEEIFAHLGLDYVEPWERNA

SEQ ID NO: 3201 - DNA, 1182 bp, synthetic construct
  misc_feature 1..1182: note = Variant of terminal deoxynucleotidyl transferase
  source 1..1182: mol_type = other DNA
atgcatcaccaccatcatcatgggggttctggtcatccgccgagcaataccccggagaaggaggtgccgagcgttatcgcccgtccggttagtcagtacgcgtgccagcgcaagaccacgctgaataactacaacaaaaagttcaccgacgcgctggagatcatggccgagaactacaaatttaaagagaacctgcaggcgtgtctggaagccaagcgcgccgcgagtatttttaaaagcctgccgttcgaggttaccagcatgaaagacatccaaggtctgccgtgcattaccgacgacgtacgtgacgtgatcgaggagatcatcgaagagggcgagagcagccgtgttaaagaaatcctcaatgacgagcgctacaaggcctttaagcagttcaccagcgtgttcggtgtgggcgtgaaaacctcggaaaagtggtaccgtatgggcctccgtacggttgaagaagcaaaggccagtaagagtctgaagctgagcaagatgcagaaggcgggcttcctgtattacgaggatctggcgagcatggttagtaaagaagaagccgatgccgttacgctcatcgtgaaggaaacggtgcgtacctttgtgccggatgcgctggtgaccatcgccggcggtttccgccgtggcaaacctatgggccacgacgttgactttctgatcacgaacccgggccgcaaaatggatgacgagctgctccacaaagtggttgatctgctcaagaagcaaggtctgctgctgtacgaagacatcaaagagagcacgttcgtggaggggcaactgccaagtcataaaatcgacgccatggacaacttccagaagtgcttcgccattctcaagctgtaccagccgaaggtggataacagtgcggttgggacgagtaagaaaagtgacatggctgaggttaaggattggaaagcggttcgtgtggatctggtgatcacgccattcgagcagttcgcctatgcgctgctcggttggacgggcagcggccaatttcgtcgcgatctgcgtcgctatgcggaggaagagcgcgacatgctgctcgacaaccatgccctctacgacctgaaaaagcgcatctttctgaaagcgaatagcgaagaagagattttcgcgcatctgggtctggattatgtggagccgtgggaacgcaacgcg

SEQ ID NO: 3202 - protein, 394 aa, synthetic construct
  REGION 1..394: note = Variant of terminal deoxynucleotidyl transferase
MHHHHHHGGSGHPPSNTPEKEVPSVIARPVSQYACQRKTTLNNYNKKFTDALEIMAENYKFKENLQACLEAKRAASIFKSLPFEVTSMKDIQGLPCITDDVRDVIEEIIEEGESSRVKEILNDERYKAFKQFTSVFGVGVKTSEKWYRMGLRTVEEAKASKSLKLSKMQKAGFLYYEDLASMVSKEEADAVTLIVKETVRTFVPDALVTIAGGFRRGKPMGHDVDFLITNPGRKMDDELLHKVVDLLKKQGLLLYEDIKESTFVEGQLPSHKIDAMDNFQKCFAILKLYQPKVDNSAVGTSKKSDMAEVKDWKAVRVDLVITPFEQFAYALLGWTGSGQFRRDLRRYAEEERDMLLDNHALYDLKKRIFLKANSEEEIFAHLGLDYVEPWERNA

SEQ ID NO: 3203 - DNA, 1182 bp, synthetic construct
  misc_feature 1..1182: note = Variant of terminal deoxynucleotidyl transferase
  source 1..1182: mol_type = other DNA
atgcatcaccaccatcatcatgggggttctggtcatccgccgagcatgaccccggagaaggaggtgccgagcgttatcgcccgtccggttagtcagtacgcgtgccagcgcaagaccacgctgaataactacaacaaaaagttcaccgacgcgctggagatcatggccgagaactacaaatttaaagagaacctgcaggcgtgtctggaagccaagcgcgccgcgagtatttttaaaagcctgccgttcgaggttaccagcatgaaagacatccaaggtctgccgtgcattaccgacgacgtacgtgacgtgatcgaggagatcatcgaagagggcgagagcagccgtgttaaagaaatcctcaatgacgagcgctacaaggcctttaagcagttcaccagcgtgttcggtgtgggcgtgaaaacctcggaaaagtggtaccgtatgggcctccgtacggttgaagaagcaaaggccagtaagagtctgaagctgagcaagatgcagaaggcgggcttcctgtattacgaggatctggcgagcatggttagtaaagaagaagccgatgccgttacgctcatcgtgaaggaaacggtgcgtacctttgtgccggatgcgctggtgaccatcgccggcggtttccgccgtggcaaacctatgggccacgacgttgactttctgatcacgaacccgggccgcaaaatggatgacgagctgctccacaaagtggttgatctgctcaagaagcaaggtctgctgctgtacgaagacatcaaagagagcacgttcgtggaggggcaactgccaagtcataaaatcgacgccatggacaacttccagaagtgcttcgccattctcaagctgtaccagccgaaggtggataacagtgcggttgggacgagtaagaaaagtgacatggctgaggttaaggattggaaagcggttcgtgtggatctggtgatcacgccattcgagcagttcgcctatgcgctgctcggttggacgggcagcggccaatttcgtcgcgatctgcgtcgctatgcggaggaagagcgcgacatgctgctcgacaaccatgccctctacgacctgaaaaagcgcatctttctgaaagcgggcagcgaagaagagattttcgcgcatctgggtctggattatgtggagccgtgggaacgcaacgcg

SEQ ID NO: 3204 - protein, 394 aa, synthetic construct
  REGION 1..394: note = Variant of terminal deoxynucleotidyl transferase
MHHHHHHGGSGHPPSMTPEKEVPSVIARPVSQYACQRKTTLNNYNKKFTDALEIMAENYKFKENLQACLEAKRAASIFKSLPFEVTSMKDIQGLPCITDDVRDVIEEIIEEGESSRVKEILNDERYKAFKQFTSVFGVGVKTSEKWYRMGLRTVEEAKASKSLKLSKMQKAGFLYYEDLASMVSKEEADAVTLIVKETVRTFVPDALVTIAGGFRRGKPMGHDVDFLITNPGRKMDDELLHKVVDLLKKQGLLLYEDIKESTFVEGQLPSHKIDAMDNFQKCFAILKLYQPKVDNSAVGTSKKSDMAEVKDWKAVRVDLVITPFEQFAYALLGWTGSGQFRRDLRRYAEEERDMLLDNHALYDLKKRIFLKAGSEEEIFAHLGLDYVEPWERNA

SEQ ID NO: 3205 - DNA, 1182 bp, synthetic construct
  misc_feature 1..1182: note = Variant of terminal deoxynucleotidyl transferase
  source 1..1182: mol_type = other DNA
atgcatcaccaccatcatcatgggggttctggtcatccgccgagcaataccccggagaaggaggtgccgagcgttatcgcccgtccggttagtcagtacgcgtgccagcgcaagaccacgctgaataactacaacaaaaagttcaccgacgcgctggagatcatggccgagaactacaaatttaaagagaacctgcaggcgtgtctggaagccaagcgcgccgcgagtatttttaaaagcctgccgttcgaggttaccagcatgaaagacatccaaggtctgccgtgcattaccgacgacgtacgtgacgtgatcgaggagatcatcgaagagggcgagagcagccgtgttaaagaaatcctcaatgacgagcgctacaaggcctttaagcagttcaccagcgtgttcggtgtgggcgtgaaaacctcggaaaagtggtaccgtatgggcctccgtacggttgaagaagcaaaggccagtaagagtctgaagctgagcaagatgcagaaggcgggcttcctgtattacgaggatctggcgagcatggttagtaaagaagaagccgatgccgttacgctcatcgtgaaggaaacggtgcgtacctttgtgccggatgcgctggtgaccatcgccggcggtttccgccgtggcaaacctatgggccacgacgttgactttctgatcacgaacccgggccgcgctatggatgacgagctgctccacaaagtggttgatctgctcaagaagcaaggtctgctgctgtacgaagacatcaaagagagcacgttcgtggaggggcaactgccaagtcataaaatcgacgccatggacaacttccagaagtgcttcgccattctcaagctgtaccagccgaaggtggataacagtgcggttgggacgagtaagaaaagtgacatggctgaggttaaggattggaaagcggttcgtgtggatctggtgatcacgccattcgagcagttcgcctatgcgctgctcggttggacgggcagcggccaatttcgtcgcgatctgcgtcgctatgcggaggaagagcgcgacatgctgctcgacaaccatgccctctacgacctgaaaaagcgcatctttctgaaagcgggcagcgaagaagagattttcgcgcatctgggtctggattatgtggagccgtgggaacgcaacgcg

SEQ ID NO: 3206 - protein, 394 aa, synthetic construct
  REGION 1..394: note = Variant of terminal deoxynucleotidyl transferase
MHHHHHHGGSGHPPSNTPEKEVPSVIARPVSQYACQRKTTLNNYNKKFTDALEIMAENYKFKENLQACLEAKRAASIFKSLPFEVTSMKDIQGLPCITDDVRDVIEEIIEEGESSRVKEILNDERYKAFKQFTSVFGVGVKTSEKWYRMGLRTVEEAKASKSLKLSKMQKAGFLYYEDLASMVSKEEADAVTLIVKETVRTFVPDALVTIAGGFRRGKPMGHDVDFLITNPGRAMDDELLHKVVDLLKKQGLLLYEDIKESTFVEGQLPSHKIDAMDNFQKCFAILKLYQPKVDNSAVGTSKKSDMAEVKDWKAVRVDLVITPFEQFAYALLGWTGSGQFRRDLRRYAEEERDMLLDNHALYDLKKRIFLKAGSEEEIFAHLGLDYVEPWERNA

SEQ ID NO: 3207 - DNA, 1182 bp, synthetic construct
  misc_feature 1..1182: note = Variant of terminal deoxynucleotidyl transferase
  source 1..1182: mol_type = other DNA
atgcatcaccaccatcatcatgggggttctggtcatccgccgagcaataccccggagaaggaggtgccgagcgttatcgcccgtccggttagtcagtacgcgtgccagcgcaagaccacgctgaataactacaacaaaaagttcaccgacgcgctggagatcatggccgagaactacaaatttaaagagaacctgcaggcgtgtctggaagccaagcgcgccgcgagtatttttaaaagcctgccgttcgaggttaccagcatgaaagacatccaaggtctgccgtgcattaccgacgacgtacgtgacgtgatcgaggagatcatcgaagagggcgagagcagccgtgttaaagaaatcctcaatgacgagcgctacaaggcctttaagcagttcaccagcgtgttcggtgtgggcgtgaaaacctcggaaaagtggtaccgtatgggcctccgtacggttgaagaagcaaaggccagtaagagtctgaagctgagcaagatgcagaaggcgggcttcctgtattacgaggatctggcgagcatggttagtaaagaagaagccgatgccgttacgctcatcgtgaaggaaacggtgcgtacctttgtgccggatgcgctggtgaccatcgccggcggtttccgccgtggcaaacctatgggccacgacgttgactttctgatcacgaacccgggccgccagatggatgacgagctgctccacaaagtggttgatctgctcaagaagcaaggtctgctgctgtacgaagacatcaaagagagcacgttcgtggaggggcaactgccaagtcataaaatcgacgccatggacaacttccagaagtgcttcgccattctcaagctgtaccagccgaaggtggataacagtgcggttgggacgagtaagaaaagtgacatggctgaggttaaggattggaaagcggttcgtgtggatctggtgatcacgccattcgagcagttcgcctatgcgctgctcggttggacgggcagcggccaatttcgtcgcgatctgcgtcgctatgcggaggaagagcgcgacatgctgctcgacaaccatgccctctacgacctgaaaaagcgcatctttctgaaagcgggcagcgaagaagagattttcgcgcatctgggtctggattatgtggagccgtgggaacgcaacgcg

SEQ ID NO: 3208 - protein, 394 aa, synthetic construct
  REGION 1..394: note = Variant of terminal deoxynucleotidyl transferase
MHHHHHHGGSGHPPSNTPEKEVPSVIARPVSQYACQRKTTLNNYNKKFTDALEIMAENYKFKENLQACLEAKRAASIFKSLPFEVTSMKDIQGLPCITDDVRDVIEEIIEEGESSRVKEILNDERYKAFKQFTSVFGVGVKTSEKWYRMGLRTVEEAKASKSLKLSKMQKAGFLYYEDLASMVSKEEADAVTLIVKETVRTFVPDALVTIAGGFRRGKPMGHDVDFLITNPGRQMDDELLHKVVDLLKKQGLLLYEDIKESTFVEGQLPSHKIDAMDNFQKCFAILKLYQPKVDNSAVGTSKKSDMAEVKDWKAVRVDLVITPFEQFAYALLGWTGSGQFRRDLRRYAEEERDMLLDNHALYDLKKRIFLKAGSEEEIFAHLGLDYVEPWERNA

SEQ ID NO: 3209 - DNA, 1182 bp, synthetic construct
  misc_feature 1..1182: note = Variant of terminal deoxynucleotidyl transferase
  source 1..1182: mol_type = other DNA
atgcatcaccaccatcatcatgggggttctggtcatccgccgagcaataccccggagaaggaggtgccgagcgttatcgcccgtccggttagtcagtacgcgtgccagcgcaagaccacgctgaataactacaacaaaaagttcaccgacgcgctggagatcatggccgagaactacaaatttaaagagaacctgcaggcgtgtctggaagccaagcgcgccgcgagtatttttaaaagcctgccgttcgaggttaccagcatgaaagacatccaaggtctgccgtgcattaccgacgacgtacgtgacgtgatcgaggagatcatcgaagagggcgagagcagccgtgttaaagaaatcctcaatgacgagcgctacaaggcctttaagcagttcaccagcgtgttcggtgtgggcgtgaaaacctcggaaaagtggtaccgtatgggcctccgtacggttgaagaagcaaaggccagtaagagtctgaagctgagcaagatgcagaaggcgggcttcctgtattacgaggatctggcgagcatggttagtaaagaagaagccgatgccgttacgctcatcgtgaaggaaacggtgcgtacctttgtgccggatgcgctggtgaccatcgccggcggtttccgccgtggcaaacctatgggccacgacgttgactttctgatcacgaacccgggccgcaaaatggatgacgagctgctccacaaagtggttgatctgctcaagaagcaaggtctgctgctgtacgaagacatcaaagagagcacgttcgtggaggggcaactgccaagtcataaaatcgacgccatggacaacttccagaagtgcttcgccattctcaagctgtaccagccgaaggtggataacagtgcggttgggacgagtaagaaaagtgacatggctgaggttaaggattggaaagcggttcgtgtggatctggtgatcacgccattcgagcagttcgcctatgcgctgctcggttggacgggcagcggccaatttcgtcgcgatctgcgtcgctatgcggaggaagagcgcgacatgctgctcgacaaccatgccctctacgacctgaaaaagcgcatctttctgaaagcgggcagcgaagaagagattttcagtcatctgggtctggattatgtggagccgtgggaacgcaacgcg

SEQ ID NO: 3210 - protein, 394 aa, synthetic construct
  REGION 1..394: note = Variant of terminal deoxynucleotidyl transferase
MHHHHHHGGSGHPPSNTPEKEVPSVIARPVSQYACQRKTTLNNYNKKFTDALEIMAENYKFKENLQACLEAKRAASIFKSLPFEVTSMKDIQGLPCITDDVRDVIEEIIEEGESSRVKEILNDERYKAFKQFTSVFGVGVKTSEKWYRMGLRTVEEAKASKSLKLSKMQKAGFLYYEDLASMVSKEEADAVTLIVKETVRTFVPDALVTIAGGFRRGKPMGHDVDFLITNPGRKMDDELLHKVVDLLKKQGLLLYEDIKESTFVEGQLPSHKIDAMDNFQKCFAILKLYQPKVDNSAVGTSKKSDMAEVKDWKAVRVDLVITPFEQFAYALLGWTGSGQFRRDLRRYAEEERDMLLDNHALYDLKKRIFLKAGSEEEIFSHLGLDYVEPWERNA

SEQ ID NO: 3211 - DNA, 1182 bp, synthetic construct
  misc_feature 1..1182: note = Variant of terminal deoxynucleotidyl transferase
  source 1..1182: mol_type = other DNA
atgcatcaccaccatcatcatgggggttctggtcatccgccgagcaataggccggagaaggaggtgccgagcgttatcgcccgtccggttagtcagtacgcgtgccagcgcaagaccacgctgaataactacaacaaaaagttcaccgacgcgctggagatcatggccgagaactacaaatttaaagagaacctgcaggcgtgtctggaagccaagcgcgccgcgagtatttttaaaagcctgccgttcgaggttaccagcatgaaagacatccaaggtctgccgtgcattaccgacgacgtacgtgacgtgatcgaggagatcatcgaagagggcgagagcagccgtgttaaagaaatcctcaatgacgagcgctacaaggcctttaagcagttcaccagcgtgttcggtgtgggcgtgaaaacctcggaaaagtggtaccgtatgggcctccgtacggttgaagaagcaaaggccagtaagagtctgaagctgagcaagatgcagaaggcgggcttcctgtattacgaggatctggcgagcatggttagtaaagaagaagccgatgccgttacgctcatcgtgaaggaaacggtgcgtacctttgtgccggatgcgctggtgaccatcgccggcggtttccgccgtggcaaacctatgggccacgacgttgactttctgatcacgaacccgggccgcaaaatggatgacgagctgctccacaaagtggttgatctgctcaagaagcaaggtctgctgctgtacgaagacatcaaagagagcacgttcgtggaggggcaactgccaagtcataaaatcgacgccatggacaacttccagaagtgcttcgccattctcaagctgtaccagccgaaggtggataacagtgcggttgggacgagtaagaaaagtgacatggctgaggttaaggattggaaagcggttcgtgtggatctggtgatcacgccattcgagcagttcgcctatgcgctgctcggttggacgggcagcggccaatttcgtcgcgatctgcgtcgctatgcggaggaagagcgcgacatgctgctcgacaaccatgccctctacgacctgaaaaagcgcatctttctgaaagcgggcagcgaagaagagattttcgcgcatctgggtctggattatgtggagccgtgggaacgcaacgcg

SEQ ID NO: 3212 - protein, 394 aa, synthetic construct
  REGION 1..394: note = Variant of terminal deoxynucleotidyl transferase
MHHHHHHGGSGHPPSNRPEKEVPSVIARPVSQYACQRKTTLNNYNKKFTDALEIMAENYKFKENLQACLEAKRAASIFKSLPFEVTSMKDIQGLPCITDDVRDVIEEIIEEGESSRVKEILNDERYKAFKQFTSVFGVGVKTSEKWYRMGLRTVEEAKASKSLKLSKMQKAGFLYYEDLASMVSKEEADAVTLIVKETVRTFVPDALVTIAGGFRRGKPMGHDVDFLITNPGRKMDDELLHKVVDLLKKQGLLLYEDIKESTFVEGQLPSHKIDAMDNFQKCFAILKLYQPKVDNSAVGTSKKSDMAEVKDWKAVRVDLVITPFEQFAYALLGWTGSGQFRRDLRRYAEEERDMLLDNHALYDLKKRIFLKAGSEEEIFAHLGLDYVEPWERNA

SEQ ID NO: 3213 - DNA, 1182 bp, synthetic construct
  misc_feature 1..1182: note = Variant of terminal deoxynucleotidyl transferase
  source 1..1182: mol_type = other DNA
atgcatcaccaccatcatcatgggggttctggtcatccgccgagcaataccccggagaaggaggtgccgagcgttatcgcccgtccggttagtcagtacgcgtgccagcgcaagaccacgctgaataactacaacaaaaagttcaccgacgcgctggagatcatggccgagaactacaaatttaaagagaacctgcaggcgtgtctggaagccaagcgcgccgcgagtatttttaaaagcctgccgttcgaggttaccagcatgaaagacatccaaggtctgccgtgcattaccgacgacgtacgtgacgtgatcgaggagatcatcgaagagggcgagagcagccgtgttaaagaaatcctcaatgacgagcgctacaaggcctttaagcagttcaccagcgtgttcggtgtgggcgtgaaaacctcggaaaagtggtaccgtatgggcctccgtacggttgaagaagcaaaggccagtaagagtctgaagctgagcaagatgcagaaggcgggcttcctgtattacgaggatctggcgagcatggttagtaaagaagaagccgatgccgttacgctcatcgtgaaggaaacggtgcgtacctttgtgccggatgcgctggtgaccctggccggcggtttccgccgtggcaaacctatgggccacgacgttgactttctgatcacgaacccgggccgcaaaatggatgacgagctgctccacaaagtggttgatctgctcaagaagcaaggtctgctgctgtacgaagacatcaaagagagcacgttcgtggaggggcaactgccaagtcataaaatcgacgccatggacaacttccagaagtgcttcgccattctcaagctgtaccagccgaaggtggataacagtgcggttgggacgagtaagaaaagtgacatggctgaggttaaggattggaaagcggttcgtgtggatctggtgatcacgccattcgagcagttcgcctatgcgctgctcggttggacgggcagcggccaatttcgtcgcgatctgcgtcgctatgcggaggaagagcgcgacatgctgctcgacaaccatgccctctacgacctgaaaaagcgcatctttctgaaagcgggcagcgaagaagagattttcgcgcatctgggtctggattatgtggagccgtgggaacgcaacgcg

SEQ ID NO: 3214 - protein, 394 aa, synthetic construct
  REGION 1..394: note = Variant of terminal deoxynucleotidyl transferase
MHHHHHHGGSGHPPSNTPEKEVPSVIARPVSQYACQRKTTLNNYNKKFTDALEIMAENYKFKENLQACLEAKRAASIFKSLPFEVTSMKDIQGLPCITDDVRDVIEEIIEEGESSRVKEILNDERYKAFKQFTSVFGVGVKTSEKWYRMGLRTVEEAKASKSLKLSKMQKAGFLYYEDLASMVSKEEADAVTLIVKETVRTFVPDALVTLAGGFRRGKPMGHDVDFLITNPGRKMDDELLHKVVDLLKKQGLLLYEDIKESTFVEGQLPSHKIDAMDNFQKCFAILKLYQPKVDNSAVGTSKKSDMAEVKDWKAVRVDLVITPFEQFAYALLGWTGSGQFRRDLRRYAEEERDMLLDNHALYDLKKRIFLKAGSEEEIFAHLGLDYVEPWERNA

SEQ ID NO: 3215 - DNA, 1182 bp, synthetic construct
  misc_feature 1..1182: note = Variant of terminal deoxynucleotidyl transferase
  source 1..1182: mol_type = other DNA
atgcatcaccaccatcatcatgggggttctggtcatccgccgagcaataccccggagaaggaggtgccgagcgttatcgcccgtccggttagtcagtacgcgtgccagcgcaagaccacgctgaataactacaacaaaaagttcaccgacgcgctggagatcatggccgagaactacaaatttaaagagaacctgcaggcgtgtctggaagccaagcgcgccgcgagtgtttttaaaagcctgccgttcgaggttaccagcatgaaagacatccaaggtctgccgtgcattaccgacgacgtacgtgacgtgatcgaggagatcatcgaagagggcgagagcagccgtgttaaagaaatcctcaatgacgagcgctacaaggcctttaagcagttcaccagcgtgttcggtgtgggcgtgaaaacctcggaaaagtggtaccgtatgggcctccgtacggttgaagaagcaaaggccagtaagagtctgaagctgagcaagatgcagaaggcgggcttcctgtattacgaggatctggcgagcatggttagtaaagaagaagccgatgccgttacgctcatcgtgaaggaaacggtgcgtacctttgtgccggatgcgctggtgaccatcgccggcggtttccgccgtggcaaacctatgggccacgacgttgactttctgatcacgaacccgggccgcaaaatggatgacgagctgctccacaaagtggttgatctgctcaagaagcaaggtctgctgctgtacgaagacatcaaagagagcacgttcgtggaggggcaactgccaagtcataaaatcgacgccatggacaacttccagaagtgcttcgccattctcaagctgtaccagccgaaggtggataacagtgcggttgggacgagtaagaaaagtgacatggctgaggttaaggattggaaagcggttcgtgtggatctggtgatcacgccattcgagcagttcgcctatgcgctgctcggttggacgggcagcggccaatttcgtcgcgatctgcgtcgctatgcggaggaagagcgcgacatgctgctcgacaaccatgccctctacgacctgaaaaagcgcatctttctgaaagcgggcagcgaagaagagattttcgcgcatctgggtctggattatgtggagccgtgggaacgcaacgcg

SEQ ID NO: 3216 - protein, 394 aa, synthetic construct
  REGION 1..394: note = Variant of terminal deoxynucleotidyl transferase
MHHHHHHGGSGHPPSNTPEKEVPSVIARPVSQYACQRKTTLNNYNKKFTDALEIMAENYKFKENLQACLEAKRAASVFKSLPFEVTSMKDIQGLPCITDDVRDVIEEIIEEGESSRVKEILNDERYKAFKQFTSVFGVGVKTSEKWYRMGLRTVEEAKASKSLKLSKMQKAGFLYYEDLASMVSKEEADAVTLIVKETVRTFVPDALVTIAGGFRRGKPMGHDVDFLITNPGRKMDDELLHKVVDLLKKQGLLLYEDIKESTFVEGQLPSHKIDAMDNFQKCFAILKLYQPKVDNSAVGTSKKSDMAEVKDWKAVRVDLVITPFEQFAYALLGWTGSGQFRRDLRRYAEEERDMLLDNHALYDLKKRIFLKAGSEEEIFAHLGLDYVEPWERNA

SEQ ID NO: 3217 - DNA, 1182 bp, synthetic construct
  misc_feature 1..1182: note = Variant of terminal deoxynucleotidyl transferase
  source 1..1182: mol_type = other DNA
atgcatcaccaccatcatcatgggggttctggtcatccgccgagcaataccccggagaaggaggtgccgagcgttatcgcccgtccggttagttgttacgcgtgccagcgcaagaccacgctgaataactacaacaaaaagttcaccgacgcgctggagatcatggccgagaactacaaatttaaagagaacctgcaggcgtgtctggaagccaagcgcgccgcgagtatttttaaaagcctgccgttcgaggttaccagcatgaaagacatccaaggtctgccgtgcattaccgacgacgtacgtgacgtgatcgaggagatcatcgaagagggcgagagcagccgtgttaaagaaatcctcaatgacgagcgctacaaggcctttaagcagttcaccagcgtgttcggtgtgggcgtgaaaacctcggaaaagtggtaccgtatgggcctccgtacggttgaagaagcaaaggccagtaagagtctgaagctgagcaagatgcagaaggcgggcttcctgtattacgaggatctggcgagcatggttagtaaagaagaagccgatgccgttacgctcatcgtgaaggaaacggtgcgtacctttgtgccggatgcgctggtgaccatcgccggcggtttccgccgtggcaaacctatgggccacgacgttgactttctgatcacgaacccgggccgcaaaatggatgacgagctgctccacaaagtggttgatctgctcaagaagcaaggtctgctgctgtacgaagacatcaaagagagcacgttcgtggaggggcaactgccaagtcataaaatcgacgccatggacaacttccagaagtgcttcgccattctcaagctgtaccagccgaaggtggataacagtgcggttgggacgagtaagaaaagtgacatggctgaggttaaggattggaaagcggttcgtgtggatctggtgatcacgccattcgagcagttcgcctatgcgctgctcggttggacgggcagcggccaatttcgtcgcgatctgcgtcgctatgcggaggaagagcgcgacatgctgctcgacaaccatgccctctacgacctgaaaaagcgcatctttctgaaagcgggcagcgaagaagagattttcgcgcatctgggtctggattatgtggagccgtgggaacgcaacgcg

SEQ ID NO: 3218 - protein, 394 aa, synthetic construct
  REGION 1..394: note = Variant of terminal deoxynucleotidyl transferase
MHHHHHHGGSGHPPSNTPEKEVPSVIARPVSCYACQRKTTLNNYNKKFTDALEIMAENYKFKENLQACLEAKRAASIFKSLPFEVTSMKDIQGLPCITDDVRDVIEEIIEEGESSRVKEILNDERYKAFKQFTSVFGVGVKTSEKWYRMGLRTVEEAKASKSLKLSKMQKAGFLYYEDLASMVSKEEADAVTLIVKETVRTFVPDALVTIAGGFRRGKPMGHDVDFLITNPGRKMDDELLHKVVDLLKKQGLLLYEDIKESTFVEGQLPSHKIDAMDNFQKCFAILKLYQPKVDNSAVGTSKKSDMAEVKDWKAVRVDLVITPFEQFAYALLGWTGSGQFRRDLRRYAEEERDMLLDNHALYDLKKRIFLKAGSEEEIFAHLGLDYVEPWERNA

SEQ ID NO: 3219 - DNA, 1182 bp, synthetic construct
  misc_feature 1..1182: note = Variant of terminal deoxynucleotidyl transferase
  source 1..1182: mol_type = other DNA
atgcatcaccaccatcatcatgggggttctggtcatccgccgagcaataccccggagaaggaggtgccgagcgttatcgcccgtccggttagtcagtacgcgtgccagcgcaagaccacgctgaataactacaacaaaaagttcaccgacgcgctggagatcatggccgagaactacaaatttaaagagaacctgcaggcgtgtctggaagccaagcgcgccgcgagtattctgaaaagcctgccgttcgaggttaccagcatgaaagacatccaaggtctgccgtgcattaccgacgacgtacgtgacgtgatcgaggagatcatcgaagagggcgagagcagccgtgttaaagaaatcctcaatgacgagcgctacaaggcctttaagcagttcaccagcgtgttcggtgtgggcgtgaaaacctcggaaaagtggtaccgtatgggcctccgtacggttgaagaagcaaaggccagtaagagtctgaagctgagcaagatgcagaaggcgggcttcctgtattacgaggatctggcgagcatggttagtaaagaagaagccgatgccgttacgctcatcgtgaaggaaacggtgcgtacctttgtgccggatgcgctggtgaccatcgccggcggtttccgccgtggcaaacctatgggccacgacgttgactttctgatcacgaacccgggccgcaaaatggatgacgagctgctccacaaagtggttgatctgctcaagaagcaaggtctgctgctgtacgaagacatcaaagagagcacgttcgtggaggggcaactgccaagtcataaaatcgacgccatggacaacttccagaagtgcttcgccattctcaagctgtaccagccgaaggtggataacagtgcggttgggacgagtaagaaaagtgacatggctgaggttaaggattggaaagcggttcgtgtggatctggtgatcacgccattcgagcagttcgcctatgcgctgctcggttggacgggcagcggccaatttcgtcgcgatctgcgtcgctatgcggaggaagagcgcgacatgctgctcgacaaccatgccctctacgacctgaaaaagcgcatctttctgaaagcgggcagcgaagaagagattttcgcgcatctgggtctggattatgtggagccgtgggaacgcaacgcg

SEQ ID NO: 3220 - protein, 394 aa, synthetic construct
  REGION 1..394: note = Variant of terminal deoxynucleotidyl transferase
MHHHHHHGGSGHPPSNTPEKEVPSVIARPVSQYACQRKTTLNNYNKKFTDALEIMAENYKFKENLQACLEAKRAASILKSLPFEVTSMKDIQGLPCITDDVRDVIEEIIEEGESSRVKEILNDERYKAFKQFTSVFGVGVKTSEKWYRMGLRTVEEAKASKSLKLSKMQKAGFLYYEDLASMVSKEEADAVTLIVKETVRTFVPDALVTIAGGFRRGKPMGHDVDFLITNPGRKMDDELLHKVVDLLKKQGLLLYEDIKESTFVEGQLPSHKIDAMDNFQKCFAILKLYQPKVDNSAVGTSKKSDMAEVKDWKAVRVDLVITPFEQFAYALLGWTGSGQFRRDLRRYAEEERDMLLDNHALYDLKKRIFLKAGSEEEIFAHLGLDYVEPWERNA

SEQ ID NO: 3221 - DNA, 1182 bp, synthetic construct
  misc_feature 1..1182: note = Variant of terminal deoxynucleotidyl transferase
  source 1..1182: mol_type = other DNA
atgcatcaccaccatcatcatgggggttctggtcatccgccgagcaataccccggagaaggaggtgccgagcgttatcgcccgtccggttagtcagtacgcgtgccagcgcaagaccacgctgaataactacaacaaaaagttcaccgacgcgctggagatcatggccgagaactacaaatttaaagagaacctgcaggcgtgtctggaagccaagcgcgccgcgagtatttttaaaagcctgccgttcgaggttaccagcatgaaagacatccaaggtctgccgtgcattaccgacgacgtacgtgacgtgatcgaggagatcatcgaagagggcgagagcagccgtgttaaagaaatcctcaatgacgagcgctacaaggcctttaagcagttcaccagcgtgttcggtgtgggcgtgaaaacctcggaaaagtggtaccgtatgggcctccgtacggttgaagaagcaaaggccagtaagagtctgaagctgagcaagatgcagaaggcgggcttcctgtattacgaggatctggcgagcatggttagtaaagaagaagccgatgccgttacgctcatcgtgaaggaaacggtgcgtacctttgtgccggatgcgctggtgaccatcgccggcggtttccgccgtggcaaacctatgggccacgacgttgactttctgatcacgaacccgggccgcaaaatggatgacgagctgctccacaaagtggttgatctgctcaagaagcaaggtctgctgctgtacgaagacatcaaagagagcacgttcgtggaggggcaactgccaagtcatgatatcgacgccatggacaacttccagaagtgcttcgccattctcaagctgtaccagccgaaggtggataacagtgcggttgggacgagtaagaaaagtgacatggctgaggttaaggattggaaagcggttcgtgtggatctggtgatcacgccattcgagcagttcgcctatgcgctgctcggttggacgggcagcggccaatttcgtcgcgatctgcgtcgctatgcggaggaagagcgcgacatgctgctcgacaaccatgccctctacgacctgaaaaagcgcatctttctgaaagcgggcagcgaagaagagattttcgcgcatctgggtctggattatgtggagccgtgggaacgcaacgcg

SEQ ID NO: 3222 - protein, 394 aa, synthetic construct
  REGION 1..394: note = Variant of terminal deoxynucleotidyl transferase
MHHHHHHGGSGHPPSNTPEKEVPSVIARPVSQYACQRKTTLNNYNKKFTDALEIMAENYKFKENLQACLEAKRAASIFKSLPFEVTSMKDIQGLPCITDDVRDVIEEIIEEGESSRVKEILNDERYKAFKQFTSVFGVGVKTSEKWYRMGLRTVEEAKASKSLKLSKMQKAGFLYYEDLASMVSKEEADAVTLIVKETVRTFVPDALVTIAGGFRRGKPMGHDVDFLITNPGRKMDDELLHKVVDLLKKQGLLLYEDIKESTFVEGQLPSHDIDAMDNFQKCFAILKLYQPKVDNSAVGTSKKSDMAEVKDWKAVRVDLVITPFEQFAYALLGWTGSGQFRRDLRRYAEEERDMLLDNHALYDLKKRIFLKAGSEEEIFAHLGLDYVEPWERNA

SEQ ID NO: 3223 - DNA, 1182 bp, synthetic construct
  misc_feature 1..1182: note = Variant of terminal deoxynucleotidyl transferase
  source 1..1182: mol_type = other DNA
atgcatcaccaccatcatcatgggggttctggtcatccgccgagcaataccccggagaaggaggtgccgagcgttatcgcccgtccggttagtcagtacgcgtgccagcgcaagaccacgctgaataactacaacaaaaagttcaccgacgcgctggagatcatggccgagaactacaaatttaaagagaacctgcaggcgtgtctggaagccaagcgcgccgcgagtatttttaaaagcctgccgttcgaggttaccagcatgaaagacatccaaggtctgccgtgcattaccgacgacgtacgttctgtgatcgaggagatcatcgaagagggcgagagcagccgtgttaaagaaatcctcaatgacgagcgctacaaggcctttaagcagttcaccagcgtgttcggtgtgggcgtgaaaacctcggaaaagtggtaccgtatgggcctccgtacggttgaagaagcaaaggccagtaagagtctgaagctgagcaagatgcagaaggcgggcttcctgtattacgaggatctggcgagcatggttagtaaagaagaagccgatgccgttacgctcatcgtgaaggaaacggtgcgtacctttgtgccggatgcgctggtgaccatcgccggcggtttccgccgtggcaaacctatgggccacgacgttgactttctgatcacgaacccgggccgcaaaatggatgacgagctgctccacaaagtggttgatctgctcaagaagcaaggtctgctgctgtacgaagacatcaaagagagcacgttcgtggaggggcaactgccaagtcataaaatcgacgccatggacaacttccagaagtgcttcgccattctcaagctgtaccagccgaaggtggataacagtgcggttgggacgagtaagaaaagtgacatggctgaggttaaggattggaaagcggttcgtgtggatctggtgatcacgccattcgagcagttcgcctatgcgctgctcggttggacgggcagcggccaatttcgtcgcgatctgcgtcgctatgcggaggaagagcgcgacatgctgctcgacaaccatgccctctacgacctgaaaaagcgcatctttctgaaagcgggcagcgaagaagagattttcgcgcatctgggtctggattatgtggagccgtgggaacgcaacgcg

SEQ ID NO: 3224 - protein, 394 aa, synthetic construct
  REGION 1..394: note = Variant of terminal deoxynucleotidyl transferase
MHHHHHHGGSGHPPSNTPEKEVPSVIARPVSQYACQRKTTLNNYNKKFTDALEIMAENYKFKENLQACLEAKRAASIFKSLPFEVTSMKDIQGLPCITDDVRSVIEEIIEEGESSRVKEILNDERYKAFKQFTSVFGVGVKTSEKWYRMGLRTVEEAKASKSLKLSKMQKAGFLYYEDLASMVSKEEADAVTLIVKETVRTFVPDALVTIAGGFRRGKPMGHDVDFLITNPGRKMDDELLHKVVDLLKKQGLLLYEDIKESTFVEGQLPSHKIDAMDNFQKCFAILKLYQPKVDNSAVGTSKKSDMAEVKDWKAVRVDLVITPFEQFAYALLGWTGSGQFRRDLRRYAEEERDMLLDNHALYDLKKRIFLKAGSEEEIFAHLGLDYVEPWERNA

SEQ ID NO: 3225 - DNA, 1182 bp, synthetic construct
  misc_feature 1..1182: note = Variant of terminal deoxynucleotidyl transferase
  source 1..1182: mol_type = other DNA
atgcatcaccaccatcatcatgggggttctggtcatccgccgagcaataccccggagaaggaggtgccgagcgttatcgcccgtccggttagtcagtacgcgtgccagcgcaagaccacgctgaataactacaacaaaaagttcaccgacgcgctggagatcatggccgagaactacaaatttaaagagaacctgcaggcgtgtctggaagccaagcgcgccgcgagtatttttaaaagcctgccgttcgaggttaccagcatgaaagacatccaaggtctgccgtgcattaccgacgacgtacgtgacgtgatcagggagatcatcgaagagggcgagagcagccgtgttaaagaaatcctcaatgacgagcgctacaaggcctttaagcagttcaccagcgtgttcggtgtgggcgtgaaaacctcggaaaagtggtaccgtatgggcctccgtacggttgaagaagcaaaggccagtaagagtctgaagctgagcaagatgcagaaggcgggcttcctgtattacgaggatctggcgagcatggttagtaaagaagaagccgatgccgttacgctcatcgtgaaggaaacggtgcgtacctttgtgccggatgcgctggtgaccatcgccggcggtttccgccgtggcaaacctatgggccacgacgttgactttctgatcacgaacccgggccgcaaaatggatgacgagctgctccacaaagtggttgatctgctcaagaagcaaggtctgctgctgtacgaagacatcaaagagagcacgttcgtggaggggcaactgccaagtcataaaatcgacgccatggacaacttccagaagtgcttcgccattctcaagctgtaccagccgaaggtggataacagtgcggttgggacgagtaagaaaagtgacatggctgaggttaaggattggaaagcggttcgtgtggatctggtgatcacgccattcgagcagttcgcctatgcgctgctcggttggacgggcagcggccaatttcgtcgcgatctgcgtcgctatgcggaggaagagcgcgacatgctgctcgacaaccatgccctctacgacctgaaaaagcgcatctttctgaaagcgggcagcgaagaagagattttcgcgcatctgggtctggattatgtggagccgtgggaacgcaacgcg

SEQ ID NO: 3226 - protein, 394 aa, synthetic construct
  REGION 1..394: note = Variant of terminal deoxynucleotidyl transferase
MHHHHHHGGSGHPPSNTPEKEVPSVIARPVSQYACQRKTTLNNYNKKFTDALEIMAENYKFKENLQACLEAKRAASIFKSLPFEVTSMKDIQGLPCITDDVRDVIREIIEEGESSRVKEILNDERYKAFKQFTSVFGVGVKTSEKWYRMGLRTVEEAKASKSLKLSKMQKAGFLYYEDLASMVSKEEADAVTLIVKETVRTFVPDALVTIAGGFRRGKPMGHDVDFLITNPGRKMDDELLHKVVDLLKKQGLLLYEDIKESTFVEGQLPSHKIDAMDNFQKCFAILKLYQPKVDNSAVGTSKKSDMAEVKDWKAVRVDLVITPFEQFAYALLGWTGSGQFRRDLRRYAEEERDMLLDNHALYDLKKRIFLKAGSEEEIFAHLGLDYVEPWERNA

SEQ ID NO: 3227 - DNA, 1182 bp, synthetic construct
  misc_feature 1..1182: note = Variant of terminal deoxynucleotidyl transferase
  source 1..1182: mol_type = other DNA
atgcatcaccaccatcatcatgggggttctggtcatccgccgagcaataccccggagaaggaggtgccgagcgttatcgcccgtccggttagtcagtacgcgtgccagcgcaagaccacgctgaataactacaacaaaaagttcaccgacgcgctggagatcatggccgagaactacaaatttaaagagaacctgcaggcgtgtctggaagccaagcgcgccgcgagtatttttaaaagcctgccgttcgaggttaccagcatgaaagacatccaaggtctgccgtgcattaccgacgacgtacgtgacgtgatcgaggagatcatcgaacatggcgagagcagccgtgttaaagaaatcctcaatgacgagcgctacaaggcctttaagcagttcaccagcgtgttcggtgtgggcgtgaaaacctcggaaaagtggtaccgtatgggcctccgtacggttgaagaagcaaaggccagtaagagtctgaagctgagcaagatgcagaaggcgggcttcctgtattacgaggatctggcgagcatggttagtaaagaagaagccgatgccgttacgctcatcgtgaaggaaacggtgcgtacctttgtgccggatgcgctggtgaccatcgccggcggtttccgccgtggcaaacctatgggccacgacgttgactttctgatcacgaacccgggccgcaaaatggatgacgagctgctccacaaagtggttgatctgctcaagaagcaaggtctgctgctgtacgaagacatcaaagagagcacgttcgtggaggggcaactgccaagtcataaaatcgacgccatggacaacttccagaagtgcttcgccattctcaagctgtaccagccgaaggtggataacagtgcggttgggacgagtaagaaaagtgacatggctgaggttaaggattggaaagcggttcgtgtggatctggtgatcacgccattcgagcagttcgcctatgcgctgctcggttggacgggcagcggccaatttcgtcgcgatctgcgtcgctatgcggaggaagagcgcgacatgctgctcgacaaccatgccctctacgacctgaaaaagcgcatctttctgaaagcgggcagcgaagaagagattttcgcgcatctgggtctggattatgtggagccgtgggaacgcaacgcg

SEQ ID NO: 3228 - protein, 394 aa, synthetic construct
  REGION 1..394: note = Variant of terminal deoxynucleotidyl transferase
MHHHHHHGGSGHPPSNTPEKEVPSVIARPVSQYACQRKTTLNNYNKKFTDALEIMAENYKFKENLQACLEAKRAASIFKSLPFEVTSMKDIQGLPCITDDVRDVIEEIIEHGESSRVKEILNDERYKAFKQFTSVFGVGVKTSEKWYRMGLRTVEEAKASKSLKLSKMQKAGFLYYEDLASMVSKEEADAVTLIVKETVRTFVPDALVTIAGGFRRGKPMGHDVDFLITNPGRKMDDELLHKVVDLLKKQGLLLYEDIKESTFVEGQLPSHKIDAMDNFQKCFAILKLYQPKVDNSAVGTSKKSDMAEVKDWKAVRVDLVITPFEQFAYALLGWTGSGQFRRDLRRYAEEERDMLLDNHALYDLKKRIFLKAGSEEEIFAHLGLDYVEPWERNA

SEQ ID NO: 3229 - DNA, 1182 bp, synthetic construct
  misc_feature 1..1182: note = Variant of terminal deoxynucleotidyl transferase
  source 1..1182: mol_type = other DNA
atgcatcaccaccatcatcatgggggttctggtcatccgccgagcaataccccggagaaggaggtgccgagcgttatcgcccgtcatgttagtcagtacgcgtgccagcgcaagaccacgctgaataactacaacaaaaagttcaccgacgcgctggagatcatggccgagaactacaaatttaaagagaacctgcaggcgtgtctggaagccaagcgcgccgcgagtatttttaaaagcctgccgttcgaggttaccagcatgaaagacatccaaggtctgccgtgcattaccgacgacgtacgtgacgtgatcgaggagatcatcgaagagggcgagagcagccgtgttaaagaaatcctcaatgacgagcgctacaaggcctttaagcagttcaccagcgtgttcggtgtgggcgtgaaaacctcggaaaagtggtaccgtatgggcctccgtacggttgaagaagcaaaggccagtaagagtctgaagctgagcaagatgcagaaggcgggcttcctgtattacgaggatctggcgagcatggttagtaaagaagaagccgatgccgttacgctcatcgtgaaggaaacggtgcgtacctttgtgccggatgcgctggtgaccatcgccggcggtttccgccgtggcaaacctatgggccacgacgttgactttctgatcacgaacccgggccgcaaaatggatgacgagctgctccacaaagtggttgatctgctcaagaagcaaggtctgctgctgtacgaagacatcaaagagagcacgttcgtggaggggcaactgccaagtcataaaatcgacgccatggacaacttccagaagtgcttcgccattctcaagctgtaccagccgaaggtggataacagtgcggttgggacgagtaagaaaagtgacatggctgaggttaaggattggaaagcggttcgtgtggatctggtgatcacgccattcgagcagttcgcctatgcgctgctcggttggacgggcagcggccaatttcgtcgcgatctgcgtcgctatgcggaggaagagcgcgacatgctgctcgacaaccatgccctctacgacctgaaaaagcgcatctttctgaaagcgggcagcgaagaagagattttcgcgcatctgggtctggattatgtggagccgtgggaacgcaacgcg

SEQ ID NO: 3230 - protein, 394 aa, synthetic construct
  REGION 1..394: note = Variant of terminal deoxynucleotidyl transferase
MHHHHHHGGSGHPPSNTPEKEVPSVIARHVSQYACQRKTTLNNYNKKFTDALEIMAENYKFKENLQACLEAKRAASIFKSLPFEVTSMKDIQGLPCITDDVRDVIEEIIEEGESSRVKEILNDERYKAFKQFTSVFGVGVKTSEKWYRMGLRTVEEAKASKSLKLSKMQKAGFLYYEDLASMVSKEEADAVTLIVKETVRTFVPDALVTIAGGFRRGKPMGHDVDFLITNPGRKMDDELLHKVVDLLKKQGLLLYEDIKESTFVEGQLPSHKIDAMDNFQKCFAILKLYQPKVDNSAVGTSKKSDMAEVKDWKAVRVDLVITPFEQFAYALLGWTGSGQFRRDLRRYAEEERDMLLDNHALYDLKKRIFLKAGSEEEIFAHLGLDYVEPWERNA

SEQ ID NO: 3231 - DNA, 1182 bp, synthetic construct
  misc_feature 1..1182: note = Variant of terminal deoxynucleotidyl transferase
  source 1..1182: mol_type = other DNA
atgcatcaccaccatcatcatgggggttctggtcatccgccgagcaataccccggagaaggaggtgccgagcgttatcgcccgtccggttagtcagtacgcgtgccagcgcaagaccacgctgaataactacaacaaaaagttcaccgacgcgctggagatcatggccgagaactacaaatttaaagagaacctgcaggcgtgtctggaagccaagcgcgccgcgagtatttttaggagcctgccgttcgaggttaccagcatgaaagacatccaaggtctgccgtgcattaccgacgacgtacgtgacgtgatcgaggagatcatcgaagagggcgagagcagccgtgttaaagaaatcctcaatgacgagcgctacaaggcctttaagcagttcaccagcgtgttcggtgtgggcgtgaaaacctcggaaaagtggtaccgtatgggcctccgtacggttgaagaagcaaaggccagtaagagtctgaagctgagcaagatgcagaaggcgggcttcctgtattacgaggatctggcgagcatggttagtaaagaagaagccgatgccgttacgctcatcgtgaaggaaacggtgcgtacctttgtgccggatgcgctggtgaccatcgccggcggtttccgccgtggcaaacctatgggccacgacgttgactttctgatcacgaacccgggccgcaaaatggatgacgagctgctccacaaagtggttgatctgctcaagaagcaaggtctgctgctgtacgaagacatcaaagagagcacgttcgtggaggggcaactgccaagtcataaaatcgacgccatggacaacttccagaagtgcttcgccattctcaagctgtaccagccgaaggtggataacagtgcggttgggacgagtaagaaaagtgacatggctgaggttaaggattggaaagcggttcgtgtggatctggtgatcacgccattcgagcagttcgcctatgcgctgctcggttggacgggcagcggccaatttcgtcgcgatctgcgtcgctatgcggaggaagagcgcgacatgctgctcgacaaccatgccctctacgacctgaaaaagcgcatctttctgaaagcgggcagcgaagaagagattttcgcgcatctgggtctggattatgtggagccgtgggaacgcaacgcg

SEQ ID NO: 3232 - protein, 394 aa, synthetic construct
  REGION 1..394: note = Variant of terminal deoxynucleotidyl transferase
MHHHHHHGGSGHPPSNTPEKEVPSVIARPVSQYACQRKTTLNNYNKKFTDALEIMAENYKFKENLQACLEAKRAASIFRSLPFEVTSMKDIQGLPCITDDVRDVIEEIIEEGESSRVKEILNDERYKAFKQFTSVFGVGVKTSEKWYRMGLRTVEEAKASKSLKLSKMQKAGFLYYEDLASMVSKEEADAVTLIVKETVRTFVPDALVTIAGGFRRGKPMGHDVDFLITNPGRKMDDELLHKVVDLLKKQGLLLYEDIKESTFVEGQLPSHKIDAMDNFQKCFAILKLYQPKVDNSAVGTSKKSDMAEVKDWKAVRVDLVITPFEQFAYALLGWTGSGQFRRDLRRYAEEERDMLLDNHALYDLKKRIFLKAGSEEEIFAHLGLDYVEPWERNA

SEQ ID NO: 3233 - DNA, 1182 bp, synthetic construct
  misc_feature 1..1182: note = Variant of terminal deoxynucleotidyl transferase
  source 1..1182: mol_type = other DNA
atgcatcaccaccatcatcatgggggttctggtcatccgccgagcaataccccggagaaggaggtgccgagcgttatcgcccgtccggttagtcagtacgcgtgccagcgcaagaccacgctgaataactacaacaaaaagttcaccgacgcgctggagatcatggccgagaactacaaatttaaagagaacctgcaggcgtgtctggaagccaagcgcgccgcgagtatttttaaaagcctgccgttcgaggttaccagcatgaaagacatccaaggtctgccgtgcattaccgacgacgtacgtggtgtgatcgaggagatcatcgaagagggcgagagcagccgtgttaaagaaatcctcaatgacgagcgctacaaggcctttaagcagttcaccagcgtgttcggtgtgggcgtgaaaacctcggaaaagtggtaccgtatgggcctccgtacggttgaagaagcaaaggccagtaagagtctgaagctgagcaagatgcagaaggcgggcttcctgtattacgaggatctggcgagcatggttagtaaagaagaagccgatgccgttacgctcatcgtgaaggaaacggtgcgtacctttgtgccggatgcgctggtgaccatcgccggcggtttccgccgtggcaaacctatgggccacgacgttgactttctgatcacgaacccgggccgcaaaatggatgacgagctgctccacaaagtggttgatctgctcaagaagcaaggtctgctgctgtacgaagacatcaaagagagcacgttcgtggaggggcaactgccaagtcataaaatcgacgccatggacaacttccagaagtgcttcgccattctcaagctgtaccagccgaaggtggataacagtgcggttgggacgagtaagaaaagtgacatggctgaggttaaggattggaaagcggttcgtgtggatctggtgatcacgccattcgagcagttcgcctatgcgctgctcggttggacgggcagcggccaatttcgtcgcgatctgcgtcgctatgcggaggaagagcgcgacatgctgctcgacaaccatgccctctacgacctgaaaaagcgcatctttctgaaagcgggcagcgaagaagagattttcgcgcatctgggtctggattatgtggagccgtgggaacgcaacgcg

SEQ ID NO: 3234 - protein, 394 aa, synthetic construct
  REGION 1..394: note = Variant of terminal deoxynucleotidyl transferase
MHHHHHHGGSGHPPSNTPEKEVPSVIARPVSQYACQRKTTLNNYNKKFTDALEIMAENYKFKENLQACLEAKRAASIFKSLPFEVTSMKDIQGLPCITDDVRGVIEEIIEEGESSRVKEILNDERYKAFKQFTSVFGVGVKTSEKWYRMGLRTVEEAKASKSLKLSKMQKAGFLYYEDLASMVSKEEADAVTLIVKETVRTFVPDALVTIAGGFRRGKPMGHDVDFLITNPGRKMDDELLHKVVDLLKKQGLLLYEDIKESTFVEGQLPSHKIDAMDNFQKCFAILKLYQPKVDNSAVGTSKKSDMAEVKDWKAVRVDLVITPFEQFAYALLGWTGSGQFRRDLRRYAEEERDMLLDNHALYDLKKRIFLKAGSEEEIFAHLGLDYVEPWERNA

SEQ ID NO: 3235 - DNA, 1182 bp, synthetic construct
  misc_feature 1..1182: note = Variant of terminal deoxynucleotidyl transferase
  source 1..1182: mol_type = other DNA
atgcatcaccaccatcatcatgggggttctggtcatccgccgagcaatggtccggagaaggaggtgccgagcgttatcgcccgtccggttagtcagtacgcgtgccagcgcaagaccacgctgaataactacaacaaaaagttcaccgacgcgctggagatcatggccgagaactacaaatttaaagagaacctgcaggcgtgtctggaagccaagcgcgccgcgagtatttttaaaagcctgccgttcgaggttaccagcatgaaagacatccaaggtctgccgtgcattaccgacgacgtacgtgacgtgatcgaggagatcatcgaagagggcgagagcagccgtgttaaagaaatcctcaatgacgagcgctacaaggcctttaagcagttcaccagcgtgttcggtgtgggcgtgaaaacctcggaaaagtggtaccgtatgggcctccgtacggttgaagaagcaaaggccagtaagagtctgaagctgagcaagatgcagaaggcgggcttcctgtattacgaggatctggcgagcatggttagtaaagaagaagccgatgccgttacgctcatcgtgaaggaaacggtgcgtacctttgtgccggatgcgctggtgaccatcgccggcggtttccgccgtggcaaacctatgggccacgacgttgactttctgatcacgaacccgggccgcaaaatggatgacgagctgctccacaaagtggttgatctgctcaagaagcaaggtctgctgctgtacgaagacatcaaagagagcacgttcgtggaggggcaactgccaagtcataaaatcgacgccatggacaacttccagaagtgcttcgccattctcaagctgtaccagccgaaggtggataacagtgcggttgggacgagtaagaaaagtgacatggctgaggttaaggattggaaagcggttcgtgtggatctggtgatcacgccattcgagcagttcgcctatgcgctgctcggttggacgggcagcggccaatttcgtcgcgatctgcgtcgctatgcggaggaagagcgcgacatgctgctcgacaaccatgccctctacgacctgaaaaagcgcatctttctgaaagcgggcagcgaagaagagattttcgcgcatctgggtctggattatgtggagccgtgggaacgcaacgcg

SEQ ID NO: 3236 - protein, 394 aa, synthetic construct
  REGION 1..394: note = Variant of terminal deoxynucleotidyl transferase
MHHHHHHGGSGHPPSNGPEKEVPSVIARPVSQYACQRKTTLNNYNKKFTDALEIMAENYKFKENLQACLEAKRAASIFKSLPFEVTSMKDIQGLPCITDDVRDVIEEIIEEGESSRVKEILNDERYKAFKQFTSVFGVGVKTSEKWYRMGLRTVEEAKASKSLKLSKMQKAGFLYYEDLASMVSKEEADAVTLIVKETVRTFVPDALVTIAGGFRRGKPMGHDVDFLITNPGRKMDDELLHKVVDLLKKQGLLLYEDIKESTFVEGQLPSHKIDAMDNFQKCFAILKLYQPKVDNSAVGTSKKSDMAEVKDWKAVRVDLVITPFEQFAYALLGWTGSGQFRRDLRRYAEEERDMLLDNHALYDLKKRIFLKAGSEEEIFAHLGLDYVEPWERNA

SEQ ID NO: 3237 - DNA, 1182 bp, synthetic construct
  misc_feature 1..1182: note = Variant of terminal deoxynucleotidyl transferase
  source 1..1182: mol_type = other DNA
atgcatcaccaccatcatcatgggggttctggtcatccgccgagcaataccccggagaaggaggtgccgagcgttatcgcccgtccggttagtcagtacgcgtgccagcgcaagaccacgctgaataactacaacaaaaagattaccgacgcgctggagatcatggccgagaactacaaatttaaagagaacctgcaggcgtgtctggaagccaagcgcgccgcgagtatttttaaaagcctgccgttcgaggttaccagcatgaaagacatccaaggtctgccgtgcattaccgacgacgtacgtgacgtgatcgaggagatcatcgaagagggcgagagcagccgtgttaaagaaatcctcaatgacgagcgctacaaggcctttaagcagttcaccagcgtgttcggtgtgggcgtgaaaacctcggaaaagtggtaccgtatgggcctccgtacggttgaagaagcaaaggccagtaagagtctgaagctgagcaagatgcagaaggcgggcttcctgtattacgaggatctggcgagcatggttagtaaagaagaagccgatgccgttacgctcatcgtgaaggaaacggtgcgtacctttgtgccggatgcgctggtgaccatcgccggcggtttccgccgtggcaaacctatgggccacgacgttgactttctgatcacgaacccgggccgcaaaatggatgacgagctgctccacaaagtggttgatctgctcaagaagcaaggtctgctgctgtacgaagacatcaaagagagcacgttcgtggaggggcaactgccaagtcataaaatcgacgccatggacaacttccagaagtgcttcgccattctcaagctgtaccagccgaaggtggataacagtgcggttgggacgagtaagaaaagtgacatggctgaggttaaggattggaaagcggttcgtgtggatctggtgatcacgccattcgagcagttcgcctatgcgctgctcggttggacgggcagcggccaatttcgtcgcgatctgcgtcgctatgcggaggaagagcgcgacatgctgctcgacaaccatgccctctacgacctgaaaaagcgcatctttctgaaagcgggcagcgaagaagagattttcgcgcatctgggtctggattatgtggagccgtgggaacgcaacgcg

SEQ ID NO: 3238 - protein, 394 aa, synthetic construct
  REGION 1..394: note = Variant of terminal deoxynucleotidyl transferase
MHHHHHHGGSGHPPSNTPEKEVPSVIARPVSQYACQRKTTLNNYNKKITDALEIMAENYKFKENLQACLEAKRAASIFKSLPFEVTSMKDIQGLPCITDDVRDVIEEIIEEGESSRVKEILNDERYKAFKQFTSVFGVGVKTSEKWYRMGLRTVEEAKASKSLKLSKMQKAGFLYYEDLASMVSKEEADAVTLIVKETVRTFVPDALVTIAGGFRRGKPMGHDVDFLITNPGRKMDDELLHKVVDLLKKQGLLLYEDIKESTFVEGQLPSHKIDAMDNFQKCFAILKLYQPKVDNSAVGTSKKSDMAEVKDWKAVRVDLVITPFEQFAYALLGWTGSGQFRRDLRRYAEEERDMLLDNHALYDLKKRIFLKAGSEEEIFAHLGLDYVEPWERNA

SEQ ID NO: 3239 - DNA, 1182 bp, synthetic construct
  misc_feature 1..1182: note = Variant of terminal deoxynucleotidyl transferase
  source 1..1182: mol_type = other DNA
atgcatcaccaccatcatcatgggggttctggtcatccgccgagcaataccccggagaaggaggtgccgagcgttatcgcccgtccggttagtccttacgcgtgccagcgcaagaccacgctgaataactacaacaaaaagttcaccgacgcgctggagatcatggccgagaactacaaatttaaagagaacctgcaggcgtgtctggaagccaagcgcgccgcgagtatttttaaaagcctgccgttcgaggttaccagcatgaaagacatccaaggtctgccgtgcattaccgacgacgtacgtgacgtgatcgaggagatcatcgaagagggcgagagcagccgtgttaaagaaatcctcaatgacgagcgctacaaggcctttaagcagttcaccagcgtgttcggtgtgggcgtgaaaacctcggaaaagtggtaccgtatgggcctccgtacggttgaagaagcaaaggccagtaagagtctgaagctgagcaagatgcagaaggcgggcttcctgtattacgaggatctggcgagcatggttagtaaagaagaagccgatgccgttacgctcatcgtgaaggaaacggtgcgtacctttgtgccggatgcgctggtgaccatcgccggcggtttccgccgtggcaaacctatgggccacgacgttgactttctgatcacgaacccgggccgcaaaatggatgacgagctgctccacaaagtggttgatctgctcaagaagcaaggtctgctgctgtacgaagacatcaaagagagcacgttcgtggaggggcaactgccaagtcataaaatcgacgccatggacaacttccagaagtgcttcgccattctcaagctgtaccagccgaaggtggataacagtgcggttgggacgagtaagaaaagtgacatggctgaggttaaggattggaaagcggttcgtgtggatctggtgatcacgccattcgagcagttcgcctatgcgctgctcggttggacgggcagcggccaatttcgtcgcgatctgcgtcgctatgcggaggaagagcgcgacatgctgctcgacaaccatgccctctacgacctgaaaaagcgcatctttctgaaagcgggcagcgaagaagagattttcgcgcatctgggtctggattatgtggagccgtgggaacgcaacgcg

SEQ ID NO: 3240 - protein, 394 aa, synthetic construct
  REGION 1..394: note = Variant of terminal deoxynucleotidyl transferase
MHHHHHHGGSGHPPSNTPEKEVPSVIARPVSPYACQRKTTLNNYNKKFTDALEIMAENYKFKENLQACLEAKRAASIFKSLPFEVTSMKDIQGLPCITDDVRDVIEEIIEEGESSRVKEILNDERYKAFKQFTSVFGVGVKTSEKWYRMGLRTVEEAKASKSLKLSKMQKAGFLYYEDLASMVSKEEADAVTLIVKETVRTFVPDALVTIAGGFRRGKPMGHDVDFLITNPGRKMDDELLHKVVDLLKKQGLLLYEDIKESTFVEGQLPSHKIDAMDNFQKCFAILKLYQPKVDNSAVGTSKKSDMAEVKDWKAVRVDLVITPFEQFAYALLGWTGSGQFRRDLRRYAEEERDMLLDNHALYDLKKRIFLKAGSEEEIFAHLGLDYVEPWERNA

SEQ ID NO: 3241 - DNA, 1182 bp, synthetic construct
  misc_feature 1..1182: note = Variant of terminal deoxynucleotidyl transferase
  source 1..1182: mol_type = other DNA
atgcatcaccaccatcatcatgggggttctggtcatccgccgagcaataccccggagaaggaggtgccgagcgttatcgcccgtccggttagtcagtacgcgtgccagcgcaagaccacgctgaataactacaacaaaaagttcaccgacgcgctggagatcatggccgagaactacaaatttaaagagaacctgcaggcgtgtctggaagccaagcgcgccgcgagtatttttaaaagcctgccgttcgaggttaccagcatgaaagacatccaaggtctgccgtgcattaccgacgacgtacgtgacgtgatccaggagatcatcgaagagggcgagagcagccgtgttaaagaaatcctcaatgacgagcgctacaaggcctttaagcagttcaccagcgtgttcggtgtgggcgtgaaaacctcggaaaagtggtaccgtatgggcctccgtacggttgaagaagcaaaggccagtaagagtctgaagctgagcaagatgcagaaggcgggcttcctgtattacgaggatctggcgagcatggttagtaaagaagaagccgatgccgttacgctcatcgtgaaggaaacggtgcgtacctttgtgccggatgcgctggtgaccatcgccggcggtttccgccgtggcaaacctatgggccacgacgttgactttctgatcacgaacccgggccgcaaaatggatgacgagctgctccacaaagtggttgatctgctcaagaagcaaggtctgctgctgtacgaagacatcaaagagagcacgttcgtggaggggcaactgccaagtcataaaatcgacgccatggacaacttccagaagtgcttcgccattctcaagctgtaccagccgaaggtggataacagtgcggttgggacgagtaagaaaagtgacatggctgaggttaaggattggaaagcggttcgtgtggatctggtgatcacgccattcgagcagttcgcctatgcgctgctcggttggacgggcagcggccaatttcgtcgcgatctgcgtcgctatgcggaggaagagcgcgacatgctgctcgacaaccatgccctctacgacctgaaaaagcgcatctttctgaaagcgggcagcgaagaagagattttcgcgcatctgggtctggattatgtggagccgtgggaacgcaacgcg

SEQ ID NO: 3242 - protein, 394 aa, synthetic construct
  REGION 1..394: note = Variant of terminal deoxynucleotidyl transferase
MHHHHHHGGSGHPPSNTPEKEVPSVIARPVSQYACQRKTTLNNYNKKFTDALEIMAENYKFKENLQACLEAKRAASIFKSLPFEVTSMKDIQGLPCITDDVRDVIQEIIEEGESSRVKEILNDERYKAFKQFTSVFGVGVKTSEKWYRMGLRTVEEAKASKSLKLSKMQKAGFLYYEDLASMVSKEEADAVTLIVKETVRTFVPDALVTIAGGFRRGKPMGHDVDFLITNPGRKMDDELLHKVVDLLKKQGLLLYEDIKESTFVEGQLPSHKIDAMDNFQKCFAILKLYQPKVDNSAVGTSKKSDMAEVKDWKAVRVDLVITPFEQFAYALLGWTGSGQFRRDLRRYAEEERDMLLDNHALYDLKKRIFLKAGSEEEIFAHLGLDYVEPWERNA

SEQ ID NO: 3243 - DNA, 1182 bp, synthetic construct
  misc_feature 1..1182: note = Variant of terminal deoxynucleotidyl transferase
  source 1..1182: mol_type = other DNA
atgcatcaccaccatcatcatgggggttctggtcatccgccgagcaataccccggagaaggaggtgccgagcgttatcgcccgtccggttagtcagtacgcgtgccagcgcaagaccacgctgaataaccggaacaaaaagttcaccgacgcgctggagatcatggccgagaactacaaatttaaagagaacctgcaggcgtgtctggaagccaagcgcgccgcgagtatttttaaaagcctgccgttcgaggttaccagcatgaaagacatccaaggtctgccgtgcattaccgacgacgtacgtgacgtgatcgaggagatcatcgaagagggcgagagcagccgtgttaaagaaatcctcaatgacgagcgctacaaggcctttaagcagttcaccagcgtgttcggtgtgggcgtgaaaacctcggaaaagtggtaccgtatgggcctccgtacggttgaagaagcaaaggccagtaagagtctgaagctgagcaagatgcagaaggcgggcttcctgtattacgaggatctggcgagcatggttagtaaagaagaagccgatgccgttacgctcatcgtgaaggaaacggtgcgtacctttgtgccggatgcgctggtgaccatcgccggcggtttccgccgtggcaaacctatgggccacgacgttgactttctgatcacgaacccgggccgcaaaatggatgacgagctgctccacaaagtggttgatctgctcaagaagcaaggtctgctgctgtacgaagacatcaaagagagcacgttcgtggaggggcaactgccaagtcataaaatcgacgccatggacaacttccagaagtgcttcgccattctcaagctgtaccagccgaaggtggataacagtgcggttgggacgagtaagaaaagtgacatggctgaggttaaggattggaaagcggttcgtgtggatctggtgatcacgccattcgagcagttcgcctatgcgctgctcggttggacgggcagcggccaatttcgtcgcgatctgcgtcgctatgcggaggaagagcgcgacatgctgctcgacaaccatgccctctacgacctgaaaaagcgcatctttctgaaagcgggcagcgaagaagagattttcgcgcatctgggtctggattatgtggagccgtgggaacgcaacgcg

SEQ ID NO: 3244 - protein, 394 aa, synthetic construct
  REGION 1..394: note = Variant of terminal deoxynucleotidyl transferase
MHHHHHHGGSGHPPSNTPEKEVPSVIARPVSQYACQRKTTLNNRNKKFTDALEIMAENYKFKENLQACLEAKRAASIFKSLPFEVTSMKDIQGLPCITDDVRDVIEEIIEEGESSRVKEILNDERYKAFKQFTSVFGVGVKTSEKWYRMGLRTVEEAKASKSLKLSKMQKAGFLYYEDLASMVSKEEADAVTLIVKETVRTFVPDALVTIAGGFRRGKPMGHDVDFLITNPGRKMDDELLHKVVDLLKKQGLLLYEDIKESTFVEGQLPSHKIDAMDNFQKCFAILKLYQPKVDNSAVGTSKKSDMAEVKDWKAVRVDLVITPFEQFAYALLGWTGSGQFRRDLRRYAEEERDMLLDNHALYDLKKRIFLKAGSEEEIFAHLGLDYVEPWERNA

SEQ ID NO: 3245 - DNA, 1182 bp, synthetic construct
  misc_feature 1..1182: note = Variant of terminal deoxynucleotidyl transferase
  source 1..1182: mol_type = other DNA
atgcatcaccaccatcatcatgggggttctggtcatccgccgagcaataccccggagaaggaggtgccgagcgttatcgcccgtccggttagtcagtacgcgtgccagcgcaagaccacgctgaataactacaacaaaaagttcaccgacgcgctggagatcatggccgagaactacaaatttaaagagaacctgcaggcgtgtctggaagccaagcgcgccgcgagtatttttaaaagcctgccgttcgaggttaccagcatgaaagacatccaaggtctgccgtgcattaccgacgacgtacgtgacgtgatcgaggagatcatcgaagtgggcgagagcagccgtgttaaagaaatcctcaatgacgagcgctacaaggcctttaagcagttcaccagcgtgttcggtgtgggcgtgaaaacctcggaaaagtggtaccgtatgggcctccgtacggttgaagaagcaaaggccagtaagagtctgaagctgagcaagatgcagaaggcgggcttcctgtattacgaggatctggcgagcatggttagtaaagaagaagccgatgccgttacgctcatcgtgaaggaaacggtgcgtacctttgtgccggatgcgctggtgaccatcgccggcggtttccgccgtggcaaacctatgggccacgacgttgactttctgatcacgaacccgggccgcaaaatggatgacgagctgctccacaaagtggttgatctgctcaagaagcaaggtctgctgctgtacgaagacatcaaagagagcacgttcgtggaggggcaactgccaagtcataaaatcgacgccatggacaacttccagaagtgcttcgccattctcaagctgtaccagccgaaggtggataacagtgcggttgggacgagtaagaaaagtgacatggctgaggttaaggattggaaagcggttcgtgtggatctggtgatcacgccattcgagcagttcgcctatgcgctgctcggttggacgggcagcggccaatttcgtcgcgatctgcgtcgctatgcggaggaagagcgcgacatgctgctcgacaaccatgccctctacgacctgaaaaagcgcatctttctgaaagcgggcagcgaagaagagattttcgcgcatctgggtctggattatgtggagccgtgggaacgcaacgcg

SEQ ID NO: 3246 - protein, 394 aa, synthetic construct
  REGION 1..394: note = Variant of terminal deoxynucleotidyl transferase
MHHHHHHGGSGHPPSNTPEKEVPSVIARPVSQYACQRKTTLNNYNKKFTDALEIMAENYKFKENLQACLEAKRAASIFKSLPFEVTSMKDIQGLPCITDDVRDVIEEIIEVGESSRVKEILNDERYKAFKQFTSVFGVGVKTSEKWYRMGLRTVEEAKASKSLKLSKMQKAGFLYYEDLASMVSKEEADAVTLIVKETVRTFVPDALVTIAGGFRRGKPMGHDVDFLITNPGRKMDDELLHKVVDLLKKQGLLLYEDIKESTFVEGQLPSHKIDAMDNFQKCFAILKLYQPKVDNSAVGTSKKSDMAEVKDWKAVRVDLVITPFEQFAYALLGWTGSGQFRRDLRRYAEEERDMLLDNHALYDLKKRIFLKAGSEEEIFAHLGLDYVEPWERNA

SEQ ID NO: 3247 - DNA, 1182 bp, synthetic construct
  misc_feature 1..1182: note = Variant of terminal deoxynucleotidyl transferase
  source 1..1182: mol_type = other DNA
atgcatcaccaccatcatcatgggggttctggtcatccgccgagcaataccccggagaaggaggtgccgagcgttatcgcccgtccggttagtcagtacgcgtgccagcgccgtaccacgctgaataactacaacaaaaagttcaccgacgcgctggagatcatggccgagaactacaaatttaaagagaacctgcaggcgtgtctggaagccaagcgcgccgcgagtatttttaaaagcctgccgttcgaggttaccagcatgaaagacatccaaggtctgccgtgcattaccgacgacgtacgtgacgtgatcgaggagatcatcgaagagggcgagagcagccgtgttaaagaaatcctcaatgacgagcgctacaaggcctttaagcagttcaccagcgtgttcggtgtgggcgtgaaaacctcggaaaagtggtaccgtatgggcctccgtacggttgaagaagcaaaggccagtaagagtctgaagctgagcaagatgcagaaggcgggcttcctgtattacgaggatctggcgagcatggttagtaaagaagaagccgatgccgttacgctcatcgtgaaggaaacggtgcgtacctttgtgccggatgcgctggtgaccatcgccggcggtttccgccgtggcaaacctatgggccacgacgttgactttctgatcacgaacccgggccgcaaaatggatgacgagctgctccacaaagtggttgatctgctcaagaagcaaggtctgctgctgtacgaagacatcaaagagagcacgttcgtggaggggcaactgccaagtcataaaatcgacgccatggacaacttccagaagtgcttcgccattctcaagctgtaccagccgaaggtggataacagtgcggttgggacgagtaagaaaagtgacatggctgaggttaaggattggaaagcggttcgtgtggatctggtgatcacgccattcgagcagttcgcctatgcgctgctcggttggacgggcagcggccaatttcgtcgcgatctgcgtcgctatgcggaggaagagcgcgacatgctgctcgacaaccatgccctctacgacctgaaaaagcgcatctttctgaaagcgggcagcgaagaagagattttcgcgcatctgggtctggattatgtggagccgtgggaacgcaacgcg

SEQ ID NO: 3248 - protein, 394 aa, synthetic construct
  REGION 1..394: note = Variant of terminal deoxynucleotidyl transferase
MHHHHHHGGSGHPPSNTPEKEVPSVIARPVSQYACQRRTTLNNYNKKFTDALEIMAENYKFKENLQACLEAKRAASIFKSLPFEVTSMKDIQGLPCITDDVRDVIEEIIEEGESSRVKEILNDERYKAFKQFTSVFGVGVKTSEKWYRMGLRTVEEAKASKSLKLSKMQKAGFLYYEDLASMVSKEEADAVTLIVKETVRTFVPDALVTIAGGFRRGKPMGHDVDFLITNPGRKMDDELLHKVVDLLKKQGLLLYEDIKESTFVEGQLPSHKIDAMDNFQKCFAILKLYQPKVDNSAVGTSKKSDMAEVKDWKAVRVDLVITPFEQFAYALLGWTGSGQFRRDLRRYAEEERDMLLDNHALYDLKKRIFLKAGSEEEIFAHLGLDYVEPWERNA

SEQ ID NO: 3249 - DNA, 1182 bp, synthetic construct
  misc_feature 1..1182: note = Variant of terminal deoxynucleotidyl transferase
  source 1..1182: mol_type = other DNA
atgcatcaccaccatcatcatgggggttctggtcatccgccgagcaataccccggagaaggaggtgccgagcgttatcgcccgtccggttagtcagtacgcgtgccagcgcaagaccacgctgaataactacaacaaaaagttcaccgacgcgctggagatcatggccgagaactacaaatttaaagagaacctgcaggcgtgtctggaagccaagcgcgccgcgagtatttttaaatggctgccgttcgaggttaccagcatgaaagacatccaaggtctgccgtgcattaccgacgacgtacgtgacgtgatcgaggagatcatcgaagagggcgagagcagccgtgttaaagaaatcctcaatgacgagcgctacaaggcctttaagcagttcaccagcgtgttcggtgtgggcgtgaaaacctcggaaaagtggtaccgtatgggcctccgtacggttgaagaagcaaaggccagtaagagtctgaagctgagcaagatgcagaaggcgggcttcctgtattacgaggatctggcgagcatggttagtaaagaagaagccgatgccgttacgctcatcgtgaaggaaacggtgcgtacctttgtgccggatgcgctggtgaccatcgccggcggtttccgccgtggcaaacctatgggccacgacgttgactttctgatcacgaacccgggccgcaaaatggatgacgagctgctccacaaagtggttgatctgctcaagaagcaaggtctgctgctgtacgaagacatcaaagagagcacgttcgtggaggggcaactgccaagtcataaaatcgacgccatggacaacttccagaagtgcttcgccattctcaagctgtaccagccgaaggtggataacagtgcggttgggacgagtaagaaaagtgacatggctgaggttaaggattggaaagcggttcgtgtggatctggtgatcacgccattcgagcagttcgcctatgcgctgctcggttggacgggcagcggccaatttcgtcgcgatctgcgtcgctatgcggaggaagagcgcgacatgctgctcgacaaccatgccctctacgacctgaaaaagcgcatctttctgaaagcgggcagcgaagaagagattttcgcgcatctgggtctggattatgtggagccgtgggaacgcaacgcg

SEQ ID NO: 3250 - protein, 394 aa, synthetic construct
  REGION 1..394: note = Variant of terminal deoxynucleotidyl transferase
MHHHHHHGGSGHPPSNTPEKEVPSVIARPVSQYACQRKTTLNNYNKKFTDALEIMAENYKFKENLQACLEAKRAASIFKWLPFEVTSMKDIQGLPCITDDVRDVIEEIIEEGESSRVKEILNDERYKAFKQFTSVFGVGVKTSEKWYRMGLRTVEEAKASKSLKLSKMQKAGFLYYEDLASMVSKEEADAVTLIVKETVRTFVPDALVTIAGGFRRGKPMGHDVDFLITNPGRKMDDELLHKVVDLLKKQGLLLYEDIKESTFVEGQLPSHKIDAMDNFQKCFAILKLYQPKVDNSAVGTSKKSDMAEVKDWKAVRVDLVITPFEQFAYALLGWTGSGQFRRDLRRYAEEERDMLLDNHALYDLKKRIFLKAGSEEEIFAHLGLDYVEPWERNA

SEQ ID NO: 3251 - DNA, 1182 bp, synthetic construct
  misc_feature 1..1182: note = Variant of terminal deoxynucleotidyl transferase
  source 1..1182: mol_type = other DNA
atgcatcaccaccatcatcatgggggttctggtcatccgccgagcaataccccggagaaggaggtgccgagcgttatcgcccgtccggttagtcagtacgcgtgccagcgcaagaccacgctgaataactacaacaaaaagttcaccgacgcgctggagatcatggccgagaactacaaatttaaagagaacctgcaggcgtgtctggaagccaagcgcgccgcgagtatttttaaaagcctgccgttcgaggttaccagcatgaaagacatccaaggtctgccgtgcattaccgacgacgtacgtgacgtgatcgaggagatcatcgaaaatggcgagagcagccgtgttaaagaaatcctcaatgacgagcgctacaaggcctttaagcagttcaccagcgtgttcggtgtgggcgtgaaaacctcggaaaagtggtaccgtatgggcctccgtacggttgaagaagcaaaggccagtaagagtctgaagctgagcaagatgcagaaggcgggcttcctgtattacgaggatctggcgagcatggttagtaaagaagaagccgatgccgttacgctcatcgtgaaggaaacggtgcgtacctttgtgccggatgcgctggtgaccatcgccggcggtttccgccgtggcaaacctatgggccacgacgttgactttctgatcacgaacccgggccgcaaaatggatgacgagctgctccacaaagtggttgatctgctcaagaagcaaggtctgctgctgtacgaagacatcaaagagagcacgttcgtggaggggcaactgccaagtcataaaatcgacgccatggacaacttccagaagtgcttcgccattctcaagctgtaccagccgaaggtggataacagtgcggttgggacgagtaagaaaagtgacatggctgaggttaaggattggaaagcggttcgtgtggatctggtgatcacgccattcgagcagttcgcctatgcgctgctcggttggacgggcagcggccaatttcgtcgcgatctgcgtcgctatgcggaggaagagcgcgacatgctgctcgacaaccatgccctctacgacctgaaaaagcgcatctttctgaaagcgggcagcgaagaagagattttcgcgcatctgggtctggattatgtggagccgtgggaacgcaacgcg

SEQ ID NO: 3252 - protein, 394 aa, synthetic construct
  REGION 1..394: note = Variant of terminal deoxynucleotidyl transferase
MHHHHHHGGSGHPPSNTPEKEVPSVIARPVSQYACQRKTTLNNYNKKFTDALEIMAENYKFKENLQACLEAKRAASIFKSLPFEVTSMKDIQGLPCITDDVRDVIEEIIENGESSRVKEILNDERYKAFKQFTSVFGVGVKTSEKWYRMGLRTVEEAKASKSLKLSKMQKAGFLYYEDLASMVSKEEADAVTLIVKETVRTFVPDALVTIAGGFRRGKPMGHDVDFLITNPGRKMDDELLHKVVDLLKKQGLLLYEDIKESTFVEGQLPSHKIDAMDNFQKCFAILKLYQPKVDNSAVGTSKKSDMAEVKDWKAVRVDLVITPFEQFAYALLGWTGSGQFRRDLRRYAEEERDMLLDNHALYDLKKRIFLKAGSEEEIFAHLGLDYVEPWERNA

SEQ ID NO: 3253 - DNA, 1182 bp, synthetic construct
  misc_feature 1..1182: note = Variant of terminal deoxynucleotidyl transferase
  source 1..1182: mol_type = other DNA
atgcatcaccaccatcatcatgggggttctggtcatccgccgagcaataccccggagaaggaggtgccgagcgttatcgcccgtccggttagtcagtacgcgtgccagcgcaagaccacgctgaataactacaacaaaaagttcaccgacgcgctggagatcatggccgagaactacaaatttaaagagaacctgcaggcgtgtctggaagccaagcgcgccgcgagtatttttaaaagcctgccgttcgaggttaccagcatgaaagacatccaaggtctgccgtgcattaccgacgacgtacgtgacgtgatcgaggagatcatcgaagagggcgagagcagccgtgttaaagaaatcctcaatgacgagcgctacaaggcctttaagcagttcaccagcgtgttcggtgtgggcgtgaaaacctcggaaaagtggtaccgtatgggcctccgtacggttgaagaagcaaaggccagtaagagtctgaagctgagcaagatgcagaaggcgggcttcctgtattacgaggatctggcgagcatggttagtaaagaagaagccgatgccgttacgctcatcgtgaaggaaacggtgcgtacctttgtgccggatgcgctggtgaccatcgccggcggtttccgccgtggcaaacctatgggccacgacgttgactttctgatcacgaacccgggccgcaaaatggatgacgatctgctccacaaagtggttgatctgctcaagaagcaaggtctgctgctgtacgaagacatcaaagagagcacgttcgtggaggggcaactgccaagtcataaaatcgacgccatggacaacttccagaagtgcttcgccattctcaagctgtaccagccgaaggtggataacagtgcggttgggacgagtaagaaaagtgacatggctgaggttaaggattggaaagcggttcgtgtggatctggtgatcacgccattcgagcagttcgcctatgcgctgctcggttggacgggcagcggccaatttcgtcgcgatctgcgtcgctatgcggaggaagagcgcgacatgctgctcgacaaccatgccctctacgacctgaaaaagcgcatctttctgaaagcgggcagcgaagaagagattttcgcgcatctgggtctggattatgtggagccgtgggaacgcaacgcg

SEQ ID NO: 3254 - protein, 394 aa, synthetic construct
  REGION 1..394: note = Variant of terminal deoxynucleotidyl transferase
MHHHHHHGGSGHPPSNTPEKEVPSVIARPVSQYACQRKTTLNNYNKKFTDALEIMAENYKFKENLQACLEAKRAASIFKSLPFEVTSMKDIQGLPCITDDVRDVIEEIIEEGESSRVKEILNDERYKAFKQFTSVFGVGVKTSEKWYRMGLRTVEEAKASKSLKLSKMQKAGFLYYEDLASMVSKEEADAVTLIVKETVRTFVPDALVTIAGGFRRGKPMGHDVDFLITNPGRKMDDDLLHKVVDLLKKQGLLLYEDIKESTFVEGQLPSHKIDAMDNFQKCFAILKLYQPKVDNSAVGTSKKSDMAEVKDWKAVRVDLVITPFEQFAYALLGWTGSGQFRRDLRRYAEEERDMLLDNHALYDLKKRIFLKAGSEEEIFAHLGLDYVEPWERNA

SEQ ID NO: 3255 - DNA, 1182 bp, synthetic construct
  misc_feature 1..1182: note = Variant of terminal deoxynucleotidyl transferase
  source 1..1182: mol_type = other DNA
atgcatcaccaccatcatcatgggggttctggtcatccgccgagcaataccccggagaaggaggtgccgagcgttatcgcccgtccggttagtcagtacgcgtgccagcgcaagaccacgctgaataactacaacaaaaagttcaccgacgcgctggagatcatggccgagaactacaaatttaaagagaacctgcaggcgtgtctggaagccaagcgcgccgcgagtatttttaaaagcctgccgttcgaggttaccagcatgaaagacatccaaggtctgccgtgcattaccgacgacgtacgtgacgtgatcgaggagatcatcgaagagggcgagagcagccgtattaaagaaatcctcaatgacgagcgctacaaggcctttaagcagttcaccagcgtgttcggtgtgggcgtgaaaacctcggaaaagtggtaccgtatgggcctccgtacggttgaagaagcaaaggccagtaagagtctgaagctgagcaagatgcagaaggcgggcttcctgtattacgaggatctggcgagcatggttagtaaagaagaagccgatgccgttacgctcatcgtgaaggaaacggtgcgtacctttgtgccggatgcgctggtgaccatcgccggcggtttccgccgtggcaaacctatgggccacgacgttgactttctgatcacgaacccgggccgcaaaatggatgacgagctgctccacaaagtggttgatctgctcaagaagcaaggtctgctgctgtacgaagacatcaaagagagcacgttcgtggaggggcaactgccaagtcataaaatcgacgccatggacaacttccagaagtgcttcgccattctcaagctgtaccagccgaaggtggataacagtgcggttgggacgagtaagaaaagtgacatggctgaggttaaggattggaaagcggttcgtgtggatctggtgatcacgccattcgagcagttcgcctatgcgctgctcggttggacgggcagcggccaatttcgtcgcgatctgcgtcgctatgcggaggaagagcgcgacatgctgctcgacaaccatgccctctacgacctgaaaaagcgcatctttctgaaagcgggcagcgaagaagagattttcgcgcatctgggtctggattatgtggagccgtgggaacgcaacgcg

SEQ ID NO: 3256 - protein, 394 aa, synthetic construct
  REGION 1..394: note = Variant of terminal deoxynucleotidyl transferase
MHHHHHHGGSGHPPSNTPEKEVPSVIARPVSQYACQRKTTLNNYNKKFTDALEIMAENYKFKENLQACLEAKRAASIFKSLPFEVTSMKDIQGLPCITDDVRDVIEEIIEEGESSRIKEILNDERYKAFKQFTSVFGVGVKTSEKWYRMGLRTVEEAKASKSLKLSKMQKAGFLYYEDLASMVSKEEADAVTLIVKETVRTFVPDALVTIAGGFRRGKPMGHDVDFLITNPGRKMDDELLHKVVDLLKKQGLLLYEDIKESTFVEGQLPSHKIDAMDNFQKCFAILKLYQPKVDNSAVGTSKKSDMAEVKDWKAVRVDLVITPFEQFAYALLGWTGSGQFRRDLRRYAEEERDMLLDNHALYDLKKRIFLKAGSEEEIFAHLGLDYVEPWERNA

SEQ ID NO: 3257 - DNA, 1182 bp, synthetic construct
  misc_feature 1..1182: note = Variant of terminal deoxynucleotidyl transferase
  source 1..1182: mol_type = other DNA
atgcatcaccaccatcatcatgggggttctggtcatccgccgagcaataccccggagaaggaggtgccgagcgttatcgcccgtccggttagtcagtacgcgtgccagcgcaagaccacgctgaataactacaacaaaaagttcaccgacgcgctggagatcatggccgagaactacaaatttaaagagaacctgcaggcgtgtctggaagccaagcgcgccgcgagtattttgaaaagcctgccgttcgaggttaccagcatgaaagacatccaaggtctgccgtgcattaccgacgacgtacgtgacgtgatcgaggagatcatcgaagagggcgagagcagccgtgttaaagaaatcctcaatgacgagcgctacagggcctttaagcagttcaccagcgtgttcggtgtgggcgtgaaaacctcggaaaagtggtaccgtatgggcctccgtacggttgaagaagcaaaggccagtaagagtctgaagctgagcaagatgcagaaggcgggcttcctgtattacgaggatctggcgagcatggttagtaaagaagaagccgatgccgttacgctcatcgtgaaggaaacggtgcgtacctttgtgccggatgcgctggtgaccatcgccggcggtttccgccgtggcaaacctatgggccacgacgttgactttctgatcacgaacccgggccgcaaaatggatgacgagctgctccacaaagtggttgatctgctcaagaagcaaggtctgctgctgtacgaagacatcaaagagagcacgttcgtggaggggcaactgccaagtcataaaatcgacgccatggacaacttccagaagtgcttcgccattctcaagctgtaccagccgaaggtggataacagtgcggttgggacgagtaagaaaagtgacatggctgaggttaaggattggaaagcggttcgtgtggatctggtgatcacgccattcgagcagttcgcctatgcgctgctcggttggacgggcagcggccaatttcgtcgcgatctgcgtcgctatgcggaggaagagcgcgacatgctgctcgacaaccatgccctctacgacctgaaaaagcgcatctttctgaaagcgggcagcgaagaagagattttcgcgcatctgggtctggattatgtggagccgtgggaacgcaacgcg

SEQ ID NO: 3258 - protein, 394 aa, synthetic construct
  REGION 1..394: note = Variant of terminal deoxynucleotidyl transferase
MHHHHHHGGSGHPPSNTPEKEVPSVIARPVSQYACQRKTTLNNYNKKFTDALEIMAENYKFKENLQACLEAKRAASILKSLPFEVTSMKDIQGLPCITDDVRDVIEEIIEEGESSRVKEILNDERYRAFKQFTSVFGVGVKTSEKWYRMGLRTVEEAKASKSLKLSKMQKAGFLYYEDLASMVSKEEADAVTLIVKETVRTFVPDALVTIAGGFRRGKPMGHDVDFLITNPGRKMDDELLHKVVDLLKKQGLLLYEDIKESTFVEGQLPSHKIDAMDNFQKCFAILKLYQPKVDNSAVGTSKKSDMAEVKDWKAVRVDLVITPFEQFAYALLGWTGSGQFRRDLRRYAEEERDMLLDNHALYDLKKRIFLKAGSEEEIFAHLGLDYVEPWERNA

SEQ ID NO: 3259 - DNA, 1182 bp, synthetic construct
  misc_feature 1..1182: note = Variant of terminal deoxynucleotidyl transferase
  source 1..1182: mol_type = other DNA
atgcatcaccaccatcatcatgggggttctggtcatccgccgagcaataccccggagaaggaggtgccgagcgttatcgcccgtccggttagtcagtacgcgtgccagcgcaagaccacgctgaataactacaacaaaaagttcaccgacgcgctggagatcatggccgagaactacaaatttaaagagaacctgcaggcgtgtctggaagccaagcgcgccgcgagtatttttaaaagcctgccgttcgaggttaccagcatgaaagacatccaaggtctgccgtgcattaccgacgacgtacgtgacgtgatcgaggagatcatcgaaagtggcgagagcagccgtgttaaagaaatcctcaatgacgagcgctacaaggcctttaagcagttcaccagcgtgttcggtgtgggcgtgaaaacctcggaaaagtggtaccgtatgggcctccgtacggttgaagaagcaaaggccagtaagagtctgaagctgagcaagatgcagaaggcgggcttcctgtattacgaggatctggcgagcatggttagtaaagaagaagccgatgccgttacgctcatcgtgaaggaaacggtgcgtacctttgtgccggatgcgctggtgaccatcgccggcggtttccgccgtggcaaacctatgggccacgacgttgactttctgatcacgaacccgggccgcaaaatggatgacgagctgctccacaaagtggttgatctgctcaagaagcaaggtctgctgctgtacgaagacatcaaagagagcacgttcgtggaggggcaactgccaagtcataaaatcgacgccatggacaacttccagaagtgcttcgccattctcaagctgtaccagccgaaggtggataacagtgcggttgggacgagtaagaaaagtgacatggctgaggttaaggattggaaagcggttcgtgtggatctggtgatcacgccattcgagcagttcgcctatgcgctgctcggttggacgggcagcggccaatttcgtcgcgatctgcgtcgctatgcggaggaagagcgcgacatgctgctcgacaaccatgccctctacgacctgaaaaagcgcatctttctgaaagcgggcagcgaagaagagattttcgcgcatctgggtctggattatgtggagccgtgggaacgcaacgcg

SEQ ID NO: 3260 - protein, 394 aa, synthetic construct
  REGION 1..394: note = Variant of terminal deoxynucleotidyl transferase
MHHHHHHGGSGHPPSNTPEKEVPSVIARPVSQYACQRKTTLNNYNKKFTDALEIMAENYKFKENLQACLEAKRAASIFKSLPFEVTSMKDIQGLPCITDDVRDVIEEIIESGESSRVKEILNDERYKAFKQFTSVFGVGVKTSEKWYRMGLRTVEEAKASKSLKLSKMQKAGFLYYEDLASMVSKEEADAVTLIVKETVRTFVPDALVTIAGGFRRGKPMGHDVDFLITNPGRKMDDELLHKVVDLLKKQGLLLYEDIKESTFVEGQLPSHKIDAMDNFQKCFAILKLYQPKVDNSAVGTSKKSDMAEVKDWKAVRVDLVITPFEQFAYALLGWTGSGQFRRDLRRYAEEERDMLLDNHALYDLKKRIFLKAGSEEEIFAHLGLDYVEPWERNA

SEQ ID NO: 3261 - DNA, 1182 bp, synthetic construct
  misc_feature 1..1182: note = Variant of terminal deoxynucleotidyl transferase
  source 1..1182: mol_type = other DNA
atgcatcaccaccatcatcatgggggttctggtcatccgccgagcaataccccggagaagaatgtgccgagcgttatcgcccgtccggttagtcagtacgcgtgccagcgcaagaccacgctgaataactacaacaaaaagttcaccgacgcgctggagatcatggccgagaactacaaatttaaagagaacctgcaggcgtgtctggaagccaagcgcgccgcgagtatttttaaaagcctgccgttcgaggttaccagcatgaaagacatccaaggtctgccgtgcattaccgacgacgtacgtgacgtgatcgaggagatcatcgaagagggcgagagcagccgtgttaaagaaatcctcaatgacgagcgctacaaggcctttaagcagttcaccagcgtgttcggtgtgggcgtgaaaacctcggaaaagtggtaccgtatgggcctccgtacggttgaagaagcaaaggccagtaagagtctgaagctgagcaagatgcagaaggcgggcttcctgtattacgaggatctggcgagcatggttagtaaagaagaagccgatgccgttacgctcatcgtgaaggaaacggtgcgtacctttgtgccggatgcgctggtgaccatcgccggcggtttccgccgtggcaaacctatgggccacgacgttgactttctgatcacgaacccgggccgcaaaatggatgacgagctgctccacaaagtggttgatctgctcaagaagcaaggtctgctgctgtacgaagacatcaaagagagcacgttcgtggaggggcaactgccaagtcataaaatcgacgccatggacaacttccagaagtgcttcgccattctcaagctgtaccagccgaaggtggataacagtgcggttgggacgagtaagaaaagtgacatggctgaggttaaggattggaaagcggttcgtgtggatctggtgatcacgccattcgagcagttcgcctatgcgctgctcggttggacgggcagcggccaatttcgtcgcgatctgcgtcgctatgcggaggaagagcgcgacatgctgctcgacaaccatgccctctacgacctgaaaaagcgcatctttctgaaagcgggcagcgaagaagagattttcgcgcatctgggtctggattatgtggagccgtgggaacgcaacgcg

SEQ ID NO: 3262 - protein, 394 aa, synthetic construct
  REGION 1..394: note = Variant of terminal deoxynucleotidyl transferase
MHHHHHHGGSGHPPSNTPEKNVPSVIARPVSQYACQRKTTLNNYNKKFTDALEIMAENYKFKENLQACLEAKRAASIFKSLPFEVTSMKDIQGLPCITDDVRDVIEEIIEEGESSRVKEILNDERYKAFKQFTSVFGVGVKTSEKWYRMGLRTVEEAKASKSLKLSKMQKAGFLYYEDLASMVSKEEADAVTLIVKETVRTFVPDALVTIAGGFRRGKPMGHDVDFLITNPGRKMDDELLHKVVDLLKKQGLLLYEDIKESTFVEGQLPSHKIDAMDNFQKCFAILKLYQPKVDNSAVGTSKKSDMAEVKDWKAVRVDLVITPFEQFAYALLGWTGSGQFRRDLRRYAEEERDMLLDNHALYDLKKRIFLKAGSEEEIFAHLGLDYVEPWERNA

SEQ ID NO: 3263 - DNA, 1182 bp, synthetic construct
  misc_feature 1..1182: note = Variant of terminal deoxynucleotidyl transferase
  source 1..1182: mol_type = other DNA
atgcatcaccaccatcatcatgggggttctggtcatccgccgagcaataccccggagaaggaggtgccgacggttatcgcccgtccggttagtcagtacgcgtgccagcgcaagaccacgctgaataactacaacaaaaagttcaccgacgcgctggagatcatggccgagaactacaaatttaaagagaacctgcaggcgtgtctggaagccaagcgcgccgcgagtatttttaaaagcctgccgttcgaggttaccagcatgaaagacatccaaggtctgccgtgcattaccgacgacgtacgtgacgtgatcgaggagatcatcgaagagggcgagagcagccgtgttaaagaaatcctcaatgacgagcgctacaaggcctttaagcagttcaccagcgtgttcggtgtgggcgtgaaaacctcggaaaagtggtaccgtatgggcctccgtacggttgaagaagcaaaggccagtaagagtctgaagctgagcaagatgcagaaggcgggcttcctgtattacgaggatctggcgagcatggttagtaaagaagaagccgatgccgttacgctcatcgtgaaggaaacggtgcgtacctttgtgccggatgcgctggtgaccatcgccggcggtttccgccgtggcaaacctatgggccacgacgttgactttctgatcacgaacccgggccgcaaaatggatgacgagctgctccacaaagtggttgatctgctcaagaagcaaggtctgctgctgtacgaagacatcaaagagagcacgttcgtggaggggcaactgccaagtcataaaatcgacgccatggacaacttccagaagtgcttcgccattctcaagctgtaccagccgaaggtggataacagtgcggttgggacgagtaagaaaagtgacatggctgaggttaaggattggaaagcggttcgtgtggatctggtgatcacgccattcgagcagttcgcctatgcgctgctcggttggacgggcagcggccaatttcgtcgcgatctgcgtcgctatgcggaggaagagcgcgacatgctgctcgacaaccatgccctctacgacctgaaaaagcgcatctttctgaaagcgggcagcgaagaagagattttcgcgcatctgggtctggattatgtggagccgtgggaacgcaacgcg

SEQ ID NO: 3264 - protein, 394 aa, synthetic construct
  REGION 1..394: note = Variant of terminal deoxynucleotidyl transferase
MHHHHHHGGSGHPPSNTPEKEVPTVIARPVSQYACQRKTTLNNYNKKFTDALEIMAENYKFKENLQACLEAKRAASIFKSLPFEVTSMKDIQGLPCITDDVRDVIEEIIEEGESSRVKEILNDERYKAFKQFTSVFGVGVKTSEKWYRMGLRTVEEAKASKSLKLSKMQKAGFLYYEDLASMVSKEEADAVTLIVKETVRTFVPDALVTIAGGFRRGKPMGHDVDFLITNPGRKMDDELLHKVVDLLKKQGLLLYEDIKESTFVEGQLPSHKIDAMDNFQKCFAILKLYQPKVDNSAVGTSKKSDMAEVKDWKAVRVDLVITPFEQFAYALLGWTGSGQFRRDLRRYAEEERDMLLDNHALYDLKKRIFLKAGSEEEIFAHLGLDYVEPWERNA

SEQ ID NO: 3265 - DNA, 1182 bp, synthetic construct
  misc_feature 1..1182: note = Variant of terminal deoxynucleotidyl transferase
  source 1..1182: mol_type = other DNA
atgcatcaccaccatcatcatgggggttctggtcatccgccgagcaataccccggagaaggaggtgccgagcgttatcgcccgtccggttagtcagtacgcgtgccagcgcaagaccacgctgaataactacaacaaaaagttcaccgacgcgctggagatcatggccgagaactacaaatttaaagagaacctgcaggcgtgtctggaagccaagcgcgccgcgagtttgtttaaaagcctgccgttcgaggttaccagcatgaaagacatccaaggtctgccgtgcattaccgacgacgtacgtgacgtgatcgaggagatcatcgaagagggcgagagcagccgtgttaaagaaatcctcaatgacgagcgctacaaggcctttaagcagttcaccagcgtgttcggtgtgggcgtgaaaacctcggaaaagtggtaccgtatgggcctccgtacggttgaagaagcaaaggccagtaagagtctgaagctgagcaagatgcagaaggcgggcttcctgtattacgaggatctggcgagcatggttagtaaagaagaagccgatgccgttacgctcatcgtgaaggaaacggtgcgtacctttgtgccggatgcgctggtgaccatcgccggcggtttccgccgtggcaaacctatgggccacgacgttgactttctgatcacgaacccgggccgcaaaatggatgacgagctgctccacaaagtggttgatctgctcaagaagcaaggtctgctgctgtacgaagacatcaaagagagcacgttcgtggaggggcaactgccaagtcataaaatcgacgccatggacaacttccagaagtgcttcgccattctcaagctgtaccagccgaaggtggataacagtgcggttgggacgagtaagaaaagtgacatggctgaggttaaggattggaaagcggttcgtgtggatctggtgatcacgccattcgagcagttcgcctatgcgctgctcggttggacgggcagcggccaatttcgtcgcgatctgcgtcgctatgcggaggaagagcgcgacatgctgctcgacaaccatgccctctacgacctgaaaaagcgcatctttctgaaagcgggcagcgaagaagagattttcgcgcatctgggtctggattatgtggagccgtgggaacgcaacgcg

SEQ ID NO: 3266 - protein, 394 aa, synthetic construct
  REGION 1..394: note = Variant of terminal deoxynucleotidyl transferase
MHHHHHHGGSGHPPSNTPEKEVPSVIARPVSQYACQRKTTLNNYNKKFTDALEIMAENYKFKENLQACLEAKRAASLFKSLPFEVTSMKDIQGLPCITDDVRDVIEEIIEEGESSRVKEILNDERYKAFKQFTSVFGVGVKTSEKWYRMGLRTVEEAKASKSLKLSKMQKAGFLYYEDLASMVSKEEADAVTLIVKETVRTFVPDALVTIAGGFRRGKPMGHDVDFLITNPGRKMDDELLHKVVDLLKKQGLLLYEDIKESTFVEGQLPSHKIDAMDNFQKCFAILKLYQPKVDNSAVGTSKKSDMAEVKDWKAVRVDLVITPFEQFAYALLGWTGSGQFRRDLRRYAEEERDMLLDNHALYDLKKRIFLKAGSEEEIFAHLGLDYVEPWERNA

SEQ ID NO: 3267 - DNA, 1182 bp, synthetic construct
  misc_feature 1..1182: note = Variant of terminal deoxynucleotidyl transferase
  source 1..1182: mol_type = other DNA
atgcatcaccaccatcatcatgggggttctggtcatccgccgagcaataccccggagaaggaggtgccgagcgttatcgcccgtagtgttagtcagtacgcgtgccagcgcaagaccacgctgaataactacaacaaaaagttcaccgacgcgctggagatcatggccgagaactacaaatttaaagagaacctgcaggcgtgtctggaagccaagcgcgccgcgagtatttttaaaagcctgccgttcgaggttaccagcatgaaagacatccaaggtctgccgtgtattaccgacgacgtacgtgacgtgatcgaggagatcatcgaagagggcgagagcagccgtgttaaagaaatcctcaatgacgagcgctacaaggcctttaagcagttcaccagcgtgttcggtgtgggcgtgaaaacctcggaaaagtggtaccgtatgggcctccgtacggttgaagaagcaaaggccagtaagagtctgaagctgagcaagatgcagaaggcgggcttcctgtattacgaggatctggcgagcatggttagtaaagaagaagccgatgccgttacgctcatcgtgaaggaaacggtgcgtacctttgtgccggatgcgctggtgaccatcgccggcggtttccgccgtggcaaacctatgggccacgacgttgactttctgatcacgaacccgggccgcaaaatggatgacgagctgctccacaaagtggttgatctgctcaagaagcaaggtctgctgctgtacgaagacatcaaagagagcacgttcgtggaggggcaactgccaagtcataaaatcgacgccatggacaacttccagaagtgcttcgccattctcaagctgtaccagccgaaggtggataacagtgcggttgggacgagtaagaaaagtgacatggctgaggttaaggattggaaagcggttcgtgtggatctggtgatcacgccattcgagcagttcgcctatgcgctgctcggttggacgggcagcggccaatttcgtcgcgatctgcgtcgctatgcggaggaagagcgcgacatgctgctcgacaaccatgccctctacgacctgaaaaagcgcatctttctgaaagcgggcagcgaagaagagattttcgcgcatctgggtctggattatgtggagccgtgggaacgcaacgcg

SEQ ID NO: 3268 - protein, 394 aa, synthetic construct
  REGION 1..394: note = Variant of terminal deoxynucleotidyl transferase
MHHHHHHGGSGHPPSNTPEKEVPSVIARSVSQYACQRKTTLNNYNKKFTDALEIMAENYKFKENLQACLEAKRAASIFKSLPFEVTSMKDIQGLPCITDDVRDVIEEIIEEGESSRVKEILNDERYKAFKQFTSVFGVGVKTSEKWYRMGLRTVEEAKASKSLKLSKMQKAGFLYYEDLASMVSKEEADAVTLIVKETVRTFVPDALVTIAGGFRRGKPMGHDVDFLITNPGRKMDDELLHKVVDLLKKQGLLLYEDIKESTFVEGQLPSHKIDAMDNFQKCFAILKLYQPKVDNSAVGTSKKSDMAEVKDWKAVRVDLVITPFEQFAYALLGWTGSGQFRRDLRRYAEEERDMLLDNHALYDLKKRIFLKAGSEEEIFAHLGLDYVEPWERNA

SEQ ID NO: 3269 - DNA, 1182 bp, synthetic construct
  misc_feature 1..1182: note = Variant of terminal deoxynucleotidyl transferase
  source 1..1182: mol_type = other DNA
atgcatcaccaccatcatcatgggggttctggtcatccgccgagcaataccccggagaaggaggtgccgagcgttatcgcccgtccggttagtcagtacgcgtgccagcgcaagaccacgctgaataactacaacaaaaagttcaccgacgcgctggagatcatggccgagaactacaaatttaaagagaacctgcaggcgtgtctggaagccaagcgcgccgcgagtatttttaaaagcctgccgttcgaggttaccagcatgaaagacatccaaggtctgccgtgcattaccgacgacgtacgtgacgtgatcgaggagatcatcgaaatgggcgagagcagccgtgttaaagaaatcctcaatgacgagcgctacaaggcctttaagcagttcaccagcgtgttcggtgtgggcgtgaaaacctcggaaaagtggtaccgtatgggcctccgtacggttgaagaagcaaaggccagtaagagtctgaagctgagcaagatgcagaaggcgggcttcctgtattacgaggatctggcgagcatggttagtaaagaagaagccgatgccgttacgctcatcgtgaaggaaacggtgcgtacctttgtgccggatgcgctggtgaccatcgccggcggtttccgccgtggcaaacctatgggccacgacgttgactttctgatcacgaacccgggccgcaaaatggatgacgagctgctccacaaagtggttgatctgctcaagaagcaaggtctgctgctgtacgaagacatcaaagagagcacgttcgtggaggggcaactgccaagtcataaaatcgacgccatggacaacttccagaagtgcttcgccattctcaagctgtaccagccgaaggtggataacagtgcggttgggacgagtaagaaaagtgacatggctgaggttaaggattggaaagcggttcgtgtggatctggtgatcacgccattcgagcagttcgcctatgcgctgctcggttggacgggcagcggccaatttcgtcgcgatctgcgtcgctatgcggaggaagagcgcgacatgctgctcgacaaccatgccctctacgacctgaaaaagcgcatctttctgaaagcgggcagcgaagaagagattttcgcgcatctgggtctggattatgtggagccgtgggaacgcaacgcg

SEQ ID NO: 3270 - protein, 394 aa, synthetic construct
  REGION 1..394: note = Variant of terminal deoxynucleotidyl transferase
MHHHHHHGGSGHPPSNTPEKEVPSVIARPVSQYACQRKTTLNNYNKKFTDALEIMAENYKFKENLQACLEAKRAASIFKSLPFEVTSMKDIQGLPCITDDVRDVIEEIIEMGESSRVKEILNDERYKAFKQFTSVFGVGVKTSEKWYRMGLRTVEEAKASKSLKLSKMQKAGFLYYEDLASMVSKEEADAVTLIVKETVRTFVPDALVTIAGGFRRGKPMGHDVDFLITNPGRKMDDELLHKVVDLLKKQGLLLYEDIKESTFVEGQLPSHKIDAMDNFQKCFAILKLYQPKVDNSAVGTSKKSDMAEVKDWKAVRVDLVITPFEQFAYALLGWTGSGQFRRDLRRYAEEERDMLLDNHALYDLKKRIFLKAGSEEEIFAHLGLDYVEPWERNA

SEQ ID NO: 3271 - DNA, 1182 bp, synthetic construct
  misc_feature 1..1182: note = Variant of terminal deoxynucleotidyl transferase
  source 1..1182: mol_type = other DNA
atgcatcaccaccatcatcatgggggttctggtcatccgccgagcaataccccggagaaggaggtgccgagcgttatcgcccgtccggttagtcagtacgcgtgccagcgcaagaccacgctgaataactacaacaaaaagttcaccgacgcgctggagatcatggccgagaactacaaatttaaagagaacctgcaggcgtgtctggaagccaagcgcgccgcgagtatttttaaaagcctgccgttcgaggttaccagcatgaaagacatccaaggtctgccgtgcattaccgacgacgtacgtgacgtgatcgaggagatcatcgaagagggcgagagcagccgtgttaaagctatcctcaatgacgagcgctacaaggcctttaagcagttcaccagcgtgttcggtgtgggcgtgaaaacctcggaaaagtggtaccgtatgggcctccgtacggttgaagaagcaaaggccagtaagagtctgaagctgagcaagatgcagaaggcgggcttcctgtattacgaggatctggcgagcatggttagtaaagaagaagccgatgccgttacgctcatcgtgaaggaaacggtgcgtacctttgtgccggatgcgctggtgaccatcgccggcggtttccgccgtggcaaacctatgggccacgacgttgactttctgatcacgaacccgggccgcaaaatggatgacgagctgctccacaaagtggttgatctgctcaagaagcaaggtctgctgctgtacgaagacatcaaagagagcacgttcgtggaggggcaactgccaagtcataaaatcgacgccatggacaacttccagaagtgcttcgccattctcaagctgtaccagccgaaggtggataacagtgcggttgggacgagtaagaaaagtgacatggctgaggttaaggattggaaagcggttcgtgtggatctggtgatcacgccattcgagcagttcgcctatgcgctgctcggttggacgggcagcggccaatttcgtcgcgatctgcgtcgctatgcggaggaagagcgcgacatgctgctcgacaaccatgccctctacgacctgaaaaagcgcatctttctgaaagcgggcagcgaagaagagattttcgcgcatctgggtctggattatgtggagccgtgggaacgcaacgcg

SEQ ID NO: 3272 - protein, 394 aa, synthetic construct
  REGION 1..394: note = Variant of terminal deoxynucleotidyl transferase
MHHHHHHGGSGHPPSNTPEKEVPSVIARPVSQYACQRKTTLNNYNKKFTDALEIMAENYKFKENLQACLEAKRAASIFKSLPFEVTSMKDIQGLPCITDDVRDVIEEIIEEGESSRVKAILNDERYKAFKQFTSVFGVGVKTSEKWYRMGLRTVEEAKASKSLKLSKMQKAGFLYYEDLASMVSKEEADAVTLIVKETVRTFVPDALVTIAGGFRRGKPMGHDVDFLITNPGRKMDDELLHKVVDLLKKQGLLLYEDIKESTFVEGQLPSHKIDAMDNFQKCFAILKLYQPKVDNSAVGTSKKSDMAEVKDWKAVRVDLVITPFEQFAYALLGWTGSGQFRRDLRRYAEEERDMLLDNHALYDLKKRIFLKAGSEEEIFAHLGLDYVEPWERNA

SEQ ID NO: 3273 - DNA, 1182 bp, synthetic construct
  misc_feature 1..1182: note = Variant of terminal deoxynucleotidyl transferase
  source 1..1182: mol_type = other DNA
atgcatcaccaccatcatcatgggggttctggtcatccgccgagcaataccccggagaaggaggtgccgagcgttatcgcccgtccggttagtcagtacgcgtgccagcgcaagaccacgctgaataactacaacaaaaagttcaccgacgcgctggagatcatggccgagaactacaaatttaaagagaacctgcaggcgtgtctggaagccaagcgcgccgcgagtatttttaaaagcctgccgttcgaggttaccagcatgaaagacatccaaggtctgccgtgcattaccgacgacgtacgtgacgtgatcgaggagatcatcgaagagggcgagagcaggcgtgttaaagaaatcctcaatgacgagcgctacaaggcctttaagcagttcaccagcgtgttcggtgtgggcgtgaaaacctcggaaaagtggtaccgtatgggcctccgtacggttgaagaagcaaaggccagtaagagtctgaagctgagcaagatgcagaaggcgggcttcctgtattacgaggatctggcgagcatggttagtaaagaagaagccgatgccgttacgctcatcgtgaaggaaacggtgcgtacctttgtgccggatgcgctggtgaccatcgccggcggtttccgccgtggcaaacctatgggccacgacgttgactttctgatcacgaacccgggccgcaaaatggatgacgagctgctccacaaagtggttgatctgctcaagaagcaaggtctgctgctgtacgaagacatcaaagagagcacgttcgtggaggggcaactgccaagtcataaaatcgacgccatggacaacttccagaagtgcttcgccattctcaagctgtaccagccgaaggtggataacagtgcggttgggacgagtaagaaaagtgacatggctgaggttaaggattggaaagcggttcgtgtggatctggtgatcacgccattcgagcagttcgcctatgcgctgctcggttggacgggcagcggccaatttcgtcgcgatctgcgtcgctatgcggaggaagagcgcgacatgctgctcgacaaccatgccctctacgacctgaaaaagcgcatctttctgaaagcgggcagcgaagaagagattttcgcgcatctgggtctggattatgtggagccgtgggaacgcaacgcg

SEQ ID NO: 3274 - protein, 394 aa, synthetic construct
  REGION 1..394: note = Variant of terminal deoxynucleotidyl transferase
MHHHHHHGGSGHPPSNTPEKEVPSVIARPVSQYACQRKTTLNNYNKKFTDALEIMAENYKFKENLQACLEAKRAASIFKSLPFEVTSMKDIQGLPCITDDVRDVIEEIIEEGESRRVKEILNDERYKAFKQFTSVFGVGVKTSEKWYRMGLRTVEEAKASKSLKLSKMQKAGFLYYEDLASMVSKEEADAVTLIVKETVRTFVPDALVTIAGGFRRGKPMGHDVDFLITNPGRKMDDELLHKVVDLLKKQGLLLYEDIKESTFVEGQLPSHKIDAMDNFQKCFAILKLYQPKVDNSAVGTSKKSDMAEVKDWKAVRVDLVITPFEQFAYALLGWTGSGQFRRDLRRYAEEERDMLLDNHALYDLKKRIFLKAGSEEEIFAHLGLDYVEPWERNA

SEQ ID NO: 3275 - DNA, 1182 bp, synthetic construct
  misc_feature 1..1182: note = Variant of terminal deoxynucleotidyl transferase
  source 1..1182: mol_type = other DNA
atgcatcaccaccatcatcatgggggttctggtcatccgccgagcaataccccggagaaggagcagccgagcgttatcgcccgtccggttagtcagtacgcgtgccagcgcaagaccacgctgaataactacaacaaaaagttcaccgacgcgctggagatcatggccgagaactacaaatttaaagagaacctgcaggcgtgtctggaagccaagcgcgccgcgagtatttttaaaagcctgccgttcgaggttaccagcatgaaagacatccaaggtctgccgtgcattaccgacgacgtacgtgacgtgatcgaggagatcatcgaagagggcgagagcagccgtgttaaagaaatcctcaatgacgagcgctacaaggcctttaagcagttcaccagcgtgttcggtgtgggcgtgaaaacctcggaaaagtggtaccgtatgggcctccgtacggttgaagaagcaaaggccagtaagagtctgaagctgagcaagatgcagaaggcgggcttcctgtattacgaggatctggcgagcatggttagtaaagaagaagccgatgccgttacgctcatcgtgaaggaaacggtgcgtacctttgtgccggatgcgctggtgaccatcgccggcggtttccgccgtggcaaacctatgggccacgacgttgactttctgatcacgaacccgggccgcaaaatggatgacgagctgctccacaaagtggttgatctgctcaagaagcaaggtctgctgctgtacgaagacatcaaagagagcacgttcgtggaggggcaactgccaagtcataaaatcgacgccatggacaacttccagaagtgcttcgccattctcaagctgtaccagccgaaggtggataacagtgcggttgggacgagtaagaaaagtgacatggctgaggttaaggattggaaagcggttcgtgtggatctggtgatcacgccattcgagcagttcgcctatgcgctgctcggttggacgggcagcggccaatttcgtcgcgatctgcgtcgctatgcggaggaagagcgcgacatgctgctcgacaaccatgccctctacgacctgaaaaagcgcatctttctgaaagcgggcagcgaagaagagattttcgcgcatctgggtctggattatgtggagccgtgggaacgcaacgcg

SEQ ID NO: 3276 - protein, 394 aa, synthetic construct
  REGION 1..394: note = Variant of terminal deoxynucleotidyl transferase
MHHHHHHGGSGHPPSNTPEKEQPSVIARPVSQYACQRKTTLNNYNKKFTDALEIMAENYKFKENLQACLEAKRAASIFKSLPFEVTSMKDIQGLPCITDDVRDVIEEIIEEGESSRVKEILNDERYKAFKQFTSVFGVGVKTSEKWYRMGLRTVEEAKASKSLKLSKMQKAGFLYYEDLASMVSKEEADAVTLIVKETVRTFVPDALVTIAGGFRRGKPMGHDVDFLITNPGRKMDDELLHKVVDLLKKQGLLLYEDIKESTFVEGQLPSHKIDAMDNFQKCFAILKLYQPKVDNSAVGTSKKSDMAEVKDWKAVRVDLVITPFEQFAYALLGWTGSGQFRRDLRRYAEEERDMLLDNHALYDLKKRIFLKAGSEEEIFAHLGLDYVEPWERNA

SEQ ID NO: 3277 - DNA, 1182 bp, synthetic construct
  misc_feature 1..1182: note = Variant of terminal deoxynucleotidyl transferase
  source 1..1182: mol_type = other DNA
atgcatcaccaccatcatcatgggggttctggtcatccgccgagcaataccccggagaaggaggtgccgagcgttatcgcccgtccggttagtcagtacgcgtgccagcgcaagaccacgctgaataactacaacaaaaagttcaccgacgcgctggagatcatggccgagaactacaaatttaaagagaacctgcaggcgtgtctggaagccaagcgcgccgcgagtatttttaaaagcctgccgttcgaggttaccagcatgaaagacatccaaggtctgccgtgcattaccgacgacgtacgttgtgtgatcgaggagatcatcgaagagggcgagagcagccgtgttaaagaaatcctcaatgacgagcgctacaaggcctttaagcagttcaccagcgtgttcggtgtgggcgtgaaaacctcggaaaagtggtaccgtatgggcctccgtacggttgaagaagcaaaggccagtaagagtctgaagctgagcaagatgcagaaggcgggcttcctgtattacgaggatctggcgagcatggttagtaaagaagaagccgatgccgttacgctcatcgtgaaggaaacggtgcgtacctttgtgccggatgcgctggtgaccatcgccggcggtttccgccgtggcaaacctatgggccacgacgttgactttctgatcacgaacccgggccgcaaaatggatgacgagctgctccacaaagtggttgatctgctcaagaagcaaggtctgctgctgtacgaagacatcaaagagagcacgttcgtggaggggcaactgccaagtcataaaatcgacgccatggacaacttccagaagtgcttcgccattctcaagctgtaccagccgaaggtggataacagtgcggttgggacgagtaagaaaagtgacatggctgaggttaaggattggaaagcggttcgtgtggatctggtgatcacgccattcgagcagttcgcctatgcgctgctcggttggacgggcagcggccaatttcgtcgcgatctgcgtcgctatgcggaggaagagcgcgacatgctgctcgacaaccatgccctctacgacctgaaaaagcgcatctttctgaaagcgggcagcgaagaagagattttcgcgcatctgggtctggattatgtggagccgtgggaacgcaacgcg

SEQ ID NO: 3278 - protein, 394 aa, synthetic construct
  REGION 1..394: note = Variant of terminal deoxynucleotidyl transferase
MHHHHHHGGSGHPPSNTPEKEVPSVIARPVSQYACQRKTTLNNYNKKFTDALEIMAENYKFKENLQACLEAKRAASIFKSLPFEVTSMKDIQGLPCITDDVRCVIEEIIEEGESSRVKEILNDERYKAFKQFTSVFGVGVKTSEKWYRMGLRTVEEAKASKSLKLSKMQKAGFLYYEDLASMVSKEEADAVTLIVKETVRTFVPDALVTIAGGFRRGKPMGHDVDFLITNPGRKMDDELLHKVVDLLKKQGLLLYEDIKESTFVEGQLPSHKIDAMDNFQKCFAILKLYQPKVDNSAVGTSKKSDMAEVKDWKAVRVDLVITPFEQFAYALLGWTGSGQFRRDLRRYAEEERDMLLDNHALYDLKKRIFLKAGSEEEIFAHLGLDYVEPWERNA

SEQ ID NO: 3279 - DNA, 1182 bp, synthetic construct
  misc_feature 1..1182: note = Variant of terminal deoxynucleotidyl transferase
  source 1..1182: mol_type = other DNA
atgcatcaccaccatcatcatgggggttctggtcatccgccgagcaataccccggagggggaggtgccgagcgttatcgcccgtccggttagtcagtacgcgtgccagcgcaagaccacgctgaataactacaacaaaaagttcaccgacgcgctggagatcatggccgagaactacaaatttaaagagaacctgcaggcgtgtctggaagccaagcgcgccgcgagtatttttaaaagcctgccgttcgaggttaccagcatgaaagacatccaaggtctgccgtgcattaccgacgacgtacgtgacgtgatcgaggagatcatcgaagagggcgagagcagccgtgttaaagaaatcctcaatgacgagcgctacaaggcctttaagcagttcaccagcgtgttcggtgtgggcgtgaaaacctcggaaaagtggtaccgtatgggcctccgtacggttgaagaagcaaaggccagtaagagtctgaagctgagcaagatgcagaaggcgggcttcctgtattacgaggatctggcgagcatggttagtaaagaagaagccgatgccgttacgctcatcgtgaaggaaacggtgcgtacctttgtgccggatgcgctggtgaccatcgccggcggtttccgccgtggcaaacctatgggccacgacgttgactttctgatcacgaacccgggccgcaaaatggatgacgagctgctccacaaagtggttgatctgctcaagaagcaaggtctgctgctgtacgaagacatcaaagagagcacgttcgtggaggggcaactgccaagtcataaaatcgacgccatggacaacttccagaagtgcttcgccattctcaagctgtaccagccgaaggtggataacagtgcggttgggacgagtaagaaaagtgacatggctgaggttaaggattggaaagcggttcgtgtggatctggtgatcacgccattcgagcagttcgcctatgcgctgctcggttggacgggcagcggccaatttcgtcgcgatctgcgtcgctatgcggaggaagagcgcgacatgctgctcgacaaccatgccctctacgacctgaaaaagcgcatctttctgaaagcgggcagcgaagaagagattttcgcgcatctgggtctggattatgtggagccgtgggaacgcaacgcg

SEQ ID NO: 3280 - protein, 394 aa, synthetic construct
  REGION 1..394: note = Variant of terminal deoxynucleotidyl transferase
MHHHHHHGGSGHPPSNTPEGEVPSVIARPVSQYACQRKTTLNNYNKKFTDALEIMAENYKFKENLQACLEAKRAASIFKSLPFEVTSMKDIQGLPCITDDVRDVIEEIIEEGESSRVKEILNDERYKAFKQFTSVFGVGVKTSEKWYRMGLRTVEEAKASKSLKLSKMQKAGFLYYEDLASMVSKEEADAVTLIVKETVRTFVPDALVTIAGGFRRGKPMGHDVDFLITNPGRKMDDELLHKVVDLLKKQGLLLYEDIKESTFVEGQLPSHKIDAMDNFQKCFAILKLYQPKVDNSAVGTSKKSDMAEVKDWKAVRVDLVITPFEQFAYALLGWTGSGQFRRDLRRYAEEERDMLLDNHALYDLKKRIFLKAGSEEEIFAHLGLDYVEPWERNA

SEQ ID NO: 3281 - DNA, 1182 bp, synthetic construct
  misc_feature 1..1182: note = Variant of terminal deoxynucleotidyl transferase
  source 1..1182: mol_type = other DNA
atgcatcaccaccatcatcatgggggttctggtcatccgccgagcaataccccggagaaggagcctccgagcgttatcgcccgtccggttagtcagtacgcgtgccagcgcaagaccacgctgaataactacaacaaaaagttcaccgacgcgctggagatcatggccgagaactacaaatttaaagagaacctgcaggcgtgtctggaagccaagcgcgccgcgagtatttttaaaagcctgccgttcgaggttaccagcatgaaagacatccaaggtctgccgtgcattaccgacgacgtacgtgacgtgatcgaggagatcatcgaagagggcgagagcagccgtgttaaagaaatcctcaatgacgagcgctacaaggcctttaagcagttcaccagcgtgttcggtgtgggcgtgaaaacctcggaaaagtggtaccgtatgggcctccgtacggttgaagaagcaaaggccagtaagagtctgaagctgagcaagatgcagaaggcgggcttcctgtattacgaggatctggcgagcatggttagtaaagaagaagccgatgccgttacgctcatcgtgaaggaaacggtgcgtacctttgtgccggatgcgctggtgaccatcgccggcggtttccgccgtggcaaacctatgggccacgacgttgactttctgatcacgaacccgggccgcaaaatggatgacgagctgctccacaaagtggttgatctgctcaagaagcaaggtctgctgctgtacgaagacatcaaagagagcacgttcgtggaggggcaactgccaagtcataaaatcgacgccatggacaacttccagaagtgcttcgccattctcaagctgtaccagccgaaggtggataacagtgcggttgggacgagtaagaaaagtgacatggctgaggttaaggattggaaagcggttcgtgtggatctggtgatcacgccattcgagcagttcgcctatgcgctgctcggttggacgggcagcggccaatttcgtcgcgatctgcgtcgctatgcggaggaagagcgcgacatgctgctcgacaaccatgccctctacgacctgaaaaagcgcatctttctgaaagcgggcagcgaagaagagattttcgcgcatctgggtctggattatgtggagccgtgggaacgcaacgcg

SEQ ID NO: 3282 - protein, 394 aa, synthetic construct
  REGION 1..394: note = Variant of terminal deoxynucleotidyl transferase
MHHHHHHGGSGHPPSNTPEKEPPSVIARPVSQYACQRKTTLNNYNKKFTDALEIMAENYKFKENLQACLEAKRAASIFKSLPFEVTSMKDIQGLPCITDDVRDVIEEIIEEGESSRVKEILNDERYKAFKQFTSVFGVGVKTSEKWYRMGLRTVEEAKASKSLKLSKMQKAGFLYYEDLASMVSKEEADAVTLIVKETVRTFVPDALVTIAGGFRRGKPMGHDVDFLITNPGRKMDDELLHKVVDLLKKQGLLLYEDIKESTFVEGQLPSHKIDAMDNFQKCFAILKLYQPKVDNSAVGTSKKSDMAEVKDWKAVRVDLVITPFEQFAYALLGWTGSGQFRRDLRRYAEEERDMLLDNHALYDLKKRIFLKAGSEEEIFAHLGLDYVEPWERNA

SEQ ID NO: 3283 - DNA, 1182 bp, synthetic construct
  misc_feature 1..1182: note = Variant of terminal deoxynucleotidyl transferase
  source 1..1182: mol_type = other DNA
atgcatcaccaccatcatcatgggggttctggtcatccgccgagcaataccccggaggcggaggtgccgagcgttatcgcccgtccggttagtcagtacgcgtgccagcgcaagaccacgctgaataactacaacaaaaagttcaccgacgcgctggagatcatggccgagaactacaaatttaaagagaacctgcaggcgtgtctggaagccaagcgcgccgcgagtatttttaaaagcctgccgttcgaggttaccagcatgaaagacatccaaggtctgccgtgcattaccgacgacgtacgtgacgtgatcgaggagatcatcgaagagggcgagagcagccgtgttaaagaaatcctcaatgacgagcgctacaaggcctttaagcagttcaccagcgtgttcggtgtgggcgtgaaaacctcggaaaagtggtaccgtatgggcctccgtacggttgaagaagcaaaggccagtaagagtctgaagctgagcaagatgcagaaggcgggcttcctgtattacgaggatctggcgagcatggttagtaaagaagaagccgatgccgttacgctcatcgtgaaggaaacggtgcgtacctttgtgccggatgcgctggtgaccatcgccggcggtttccgccgtggcaaacctatgggccacgacgttgactttctgatcacgaacccgggccgcaaaatggatgacgagctgctccacaaagtggttgatctgctcaagaagcaaggtctgctgctgtacgaagacatcaaagagagcacgttcgtggaggggcaactgccaagtcataaaatcgacgccatggacaacttccagaagtgcttcgccattctcaagctgtaccagccgaaggtggataacagtgcggttgggacgagtaagaaaagtgacatggctgaggttaaggattggaaagcggttcgtgtggatctggtgatcacgccattcgagcagttcgcctatgcgctgctcggttggacgggcagcggccaatttcgtcgcgatctgcgtcgctatgcggaggaagagcgcgacatgctgctcgacaaccatgccctctacgacctgaaaaagcgcatctttctgaaagcgggcagcgaagaagagattttcgcgcatctgggtctggattatgtggagccgtgggaacgcaacgcg

SEQ ID NO: 3284 - protein, 394 aa, synthetic construct
  REGION 1..394: note = Variant of terminal deoxynucleotidyl transferase
MHHHHHHGGSGHPPSNTPEAEVPSVIARPVSQYACQRKTTLNNYNKKFTDALEIMAENYKFKENLQACLEAKRAASIFKSLPFEVTSMKDIQGLPCITDDVRDVIEEIIEEGESSRVKEILNDERYKAFKQFTSVFGVGVKTSEKWYRMGLRTVEEAKASKSLKLSKMQKAGFLYYEDLASMVSKEEADAVTLIVKETVRTFVPDALVTIAGGFRRGKPMGHDVDFLITNPGRKMDDELLHKVVDLLKKQGLLLYEDIKESTFVEGQLPSHKIDAMDNFQKCFAILKLYQPKVDNSAVGTSKKSDMAEVKDWKAVRVDLVITPFEQFAYALLGWTGSGQFRRDLRRYAEEERDMLLDNHALYDLKKRIFLKAGSEEEIFAHLGLDYVEPWERNA

SEQ ID NO: 3285 - DNA, 1182 bp, synthetic construct
  misc_feature 1..1182: note = Variant of terminal deoxynucleotidyl transferase
  source 1..1182: mol_type = other DNA
atgcatcaccaccatcatcatgggggttctggtcatccgccgagcaataccttggagaaggaggtgccgagcgttatcgcccgtccggttagtcagtacgcgtgccagcgcaagaccacgctgaataactacaacaaaaagttcaccgacgcgctggagatcatggccgagaactacaaatttaaagagaacctgcaggcgtgtctggaagccaagcgcgccgcgagtatttttaaaagcctgccgttcgaggttaccagcatgaaagacatccaaggtctgccgtgcattaccgacgacgtacgtgacgtgatcgaggagatcatcgaagagggcgagagcagccgtgttaaagaaatcctcaatgacgagcgctacaaggcctttaagcagttcaccagcgtgttcggtgtgggcgtgaaaacctcggaaaagtggtaccgtatgggcctccgtacggttgaagaagcaaaggccagtaagagtctgaagctgagcaagatgcagaaggcgggcttcctgtattacgaggatctggcgagcatggttagtaaagaagaagccgatgccgttacgctcatcgtgaaggaaacggtgcgtacctttgtgccggatgcgctggtgaccatcgccggcggtttccgccgtggcaaacctatgggccacgacgttgactttctgatcacgaacccgggccgcaaaatggatgacgagctgctccacaaagtggttgatctgctcaagaagcaaggtctgctgctgtacgaagacatcaaagagagcacgttcgtggaggggcaactgccaagtcataaaatcgacgccatggacaacttccagaagtgcttcgccattctcaagctgtaccagccgaaggtggataacagtgcggttgggacgagtaagaaaagtgacatggctgaggttaaggattggaaagcggttcgtgtggatctggtgatcacgccattcgagcagttcgcctatgcgctgctcggttggacgggcagcggccaatttcgtcgcgatctgcgtcgctatgcggaggaagagcgcgacatgctgctcgacaaccatgccctctacgacctgaaaaagcgcatctttctgaaagcgggcagcgaagaagagattttcgcgcatctgggtctggattatgtggagccgtgggaacgcaacgcg

SEQ ID NO: 3286 - protein, 394 aa, synthetic construct
  REGION 1..394: note = Variant of terminal deoxynucleotidyl transferase
MHHHHHHGGSGHPPSNTLEKEVPSVIARPVSQYACQRKTTLNNYNKKFTDALEIMAENYKFKENLQACLEAKRAASIFKSLPFEVTSMKDIQGLPCITDDVRDVIEEIIEEGESSRVKEILNDERYKAFKQFTSVFGVGVKTSEKWYRMGLRTVEEAKASKSLKLSKMQKAGFLYYEDLASMVSKEEADAVTLIVKETVRTFVPDALVTIAGGFRRGKPMGHDVDFLITNPGRKMDDELLHKVVDLLKKQGLLLYEDIKESTFVEGQLPSHKIDAMDNFQKCFAILKLYQPKVDNSAVGTSKKSDMAEVKDWKAVRVDLVITPFEQFAYALLGWTGSGQFRRDLRRYAEEERDMLLDNHALYDLKKRIFLKAGSEEEIFAHLGLDYVEPWERNA

SEQ ID NO: 3287 - DNA, 1182 bp, synthetic construct
  misc_feature 1..1182: note = Variant of terminal deoxynucleotidyl transferase
  source 1..1182: mol_type = other DNA
atgcatcaccaccatcatcatgggggttctggtcatccgccgagcaataccccggagaaggaggtgccgagcgttatcgcccgtccggttagtcagtacgcgtgccagcgcaagaccacgctgaataactacaacaaaaagttcaccgacgcgctggagatcatggccgagaactacaaatttaaagagaacctgcaggcgtgtctggaagccaagcgcgccgcgagtatttttaaaagcctgccgttcgaggttaccagcatgaaagacatccaaggtctgccgtgcattaccgacgacgtacgtcctgtgatcgaggagatcatcgaagagggcgagagcagccgtgttaaagaaatcctcaatgacgagcgctacaaggcctttaagcagttcaccagcgtgttcggtgtgggcgtgaaaacctcggaaaagtggtaccgtatgggcctccgtacggttgaagaagcaaaggccagtaagagtctgaagctgagcaagatgcagaaggcgggcttcctgtattacgaggatctggcgagcatggttagtaaagaagaagccgatgccgttacgctcatcgtgaaggaaacggtgcgtacctttgtgccggatgcgctggtgaccatcgccggcggtttccgccgtggcaaacctatgggccacgacgttgactttctgatcacgaacccgggccgcaaaatggatgacgagctgctccacaaagtggttgatctgctcaagaagcaaggtctgctgctgtacgaagacatcaaagagagcacgttcgtggaggggcaactgccaagtcataaaatcgacgccatggacaacttccagaagtgcttcgccattctcaagctgtaccagccgaaggtggataacagtgcggttgggacgagtaagaaaagtgacatggctgaggttaaggattggaaagcggttcgtgtggatctggtgatcacgccattcgagcagttcgcctatgcgctgctcggttggacgggcagcggccaatttcgtcgcgatctgcgtcgctatgcggaggaagagcgcgacatgctgctcgacaaccatgccctctacgacctgaaaaagcgcatctttctgaaagcgggcagcgaagaagagattttcgcgcatctgggtctggattatgtggagccgtgggaacgcaacgcg

SEQ ID NO: 3288 - protein, 394 aa, synthetic construct
  REGION 1..394: note = Variant of terminal deoxynucleotidyl transferase
MHHHHHHGGSGHPPSNTPEKEVPSVIARPVSQYACQRKTTLNNYNKKFTDALEIMAENYKFKENLQACLEAKRAASIFKSLPFEVTSMKDIQGLPCITDDVRPVIEEIIEEGESSRVKEILNDERYKAFKQFTSVFGVGVKTSEKWYRMGLRTVEEAKASKSLKLSKMQKAGFLYYEDLASMVSKEEADAVTLIVKETVRTFVPDALVTIAGGFRRGKPMGHDVDFLITNPGRKMDDELLHKVVDLLKKQGLLLYEDIKESTFVEGQLPSHKIDAMDNFQKCFAILKLYQPKVDNSAVGTSKKSDMAEVKDWKAVRVDLVITPFEQFAYALLGWTGSGQFRRDLRRYAEEERDMLLDNHALYDLKKRIFLKAGSEEEIFAHLGLDYVEPWERNA

SEQ ID NO: 3289 - DNA, 1182 bp, synthetic construct
  misc_feature 1..1182: note = Variant of terminal deoxynucleotidyl transferase
  source 1..1182: mol_type = other DNA
atgcatcaccaccatcatcatgggggttctggtcatccgccgagcaataccccggagaaggaggtgccgagcgttatcgccggtccggttagtcagtacgcgtgccagcgcaagaccacgctgaataactacaacaaaaagttcaccgacgcgctggagatcatggccgagaactacaaatttaaagagaacctgcaggcgtgtctggaagccaagcgcgccgcgagtatttttaaaagcctgccgttcgaggttaccagcatgaaagacatccaaggtctgccgtgcattaccgacgacgtacgtgacgtgatcgaggagatcatcgaagagggcgagagcagccgtgttaaagaaatcctcaatgacgagcgctacaaggcctttaagcagttcaccagcgtgttcggtgtgggcgtgaaaacctcggaaaagtggtaccgtatgggcctccgtacggttgaagaagcaaaggccagtaagagtctgaagctgagcaagatgcagaaggcgggcttcctgtattacgaggatctggcgagcatggttagtaaagaagaagccgatgccgttacgctcatcgtgaaggaaacggtgcgtacctttgtgccggatgcgctggtgaccatcgccggcggtttccgccgtggcaaacctatgggccacgacgttgactttctgatcacgaacccgggccgcaaaatggatgacgagctgctccacaaagtggttgatctgctcaagaagcaaggtctgctgctgtacgaagacatcaaagagagcacgttcgtggaggggcaactgccaagtcataaaatcgacgccatggacaacttccagaagtgcttcgccattctcaagctgtaccagccgaaggtggataacagtgcggttgggacgagtaagaaaagtgacatggctgaggttaaggattggaaagcggttcgtgtggatctggtgatcacgccattcgagcagttcgcctatgcgctgctcggttggacgggcagcggccaatttcgtcgcgatctgcgtcgctatgcggaggaagagcgcgacatgctgctcgacaaccatgccctctacgacctgaaaaagcgcatctttctgaaagcgggcagcgaagaagagattttcgcgcatctgggtctggattatgtggagccgtgggaacgcaacgcg

SEQ ID NO: 3290 - protein, 394 aa, synthetic construct
  REGION 1..394: note = Variant of terminal deoxynucleotidyl transferase
MHHHHHHGGSGHPPSNTPEKEVPSVIAGPVSQYACQRKTTLNNYNKKFTDALEIMAENYKFKENLQACLEAKRAASIFKSLPFEVTSMKDIQGLPCITDDVRDVIEEIIEEGESSRVKEILNDERYKAFKQFTSVFGVGVKTSEKWYRMGLRTVEEAKASKSLKLSKMQKAGFLYYEDLASMVSKEEADAVTLIVKETVRTFVPDALVTIAGGFRRGKPMGHDVDFLITNPGRKMDDELLHKVVDLLKKQGLLLYEDIKESTFVEGQLPSHKIDAMDNFQKCFAILKLYQPKVDNSAVGTSKKSDMAEVKDWKAVRVDLVITPFEQFAYALLGWTGSGQFRRDLRRYAEEERDMLLDNHALYDLKKRIFLKAGSEEEIFAHLGLDYVEPWERNA

SEQ ID NO: 3291 - DNA, 1182 bp, synthetic construct
  misc_feature 1..1182: note = Variant of terminal deoxynucleotidyl transferase
  source 1..1182: mol_type = other DNA
atgcatcaccaccatcatcatgggggttctggtcatccgccgagcaataccccggagaaggaggtgccgagcgttatcgcccgtccggttagtcagtacgcgtgccagcgcaagaccacgctgaataactacaacaaaaagttcaccgacgcgctggagatcatggccgagaactacaaatttaaagagaacctgcaggcgtgtctggaagccaagcgcgccgcgagtatttttaaaagcctgccgttcgaggttaccagcatgaaagacatccaaggtctgccgtgcattaccgacgacgtacgtgacgtgatctatgagatcatcgaagagggcgagagcagccgtgttaaagaaatcctcaatgacgagcgctacaaggcctttaagcagttcaccagcgtgttcggtgtgggcgtgaaaacctcggaaaagtggtaccgtatgggcctccgtacggttgaagaagcaaaggccagtaagagtctgaagctgagcaagatgcagaaggcgggcttcctgtattacgaggatctggcgagcatggttagtaaagaagaagccgatgccgttacgctcatcgtgaaggaaacggtgcgtacctttgtgccggatgcgctggtgaccatcgccggcggtttccgccgtggcaaacctatgggccacgacgttgactttctgatcacgaacccgggccgcaaaatggatgacgagctgctccacaaagtggttgatctgctcaagaagcaaggtctgctgctgtacgaagacatcaaagagagcacgttcgtggaggggcaactgccaagtcataaaatcgacgccatggacaacttccagaagtgcttcgccattctcaagctgtaccagccgaaggtggataacagtgcggttgggacgagtaagaaaagtgacatggctgaggttaaggattggaaagcggttcgtgtggatctggtgatcacgccattcgagcagttcgcctatgcgctgctcggttggacgggcagcggccaatttcgtcgcgatctgcgtcgctatgcggaggaagagcgcgacatgctgctcgacaaccatgccctctacgacctgaaaaagcgcatctttctgaaagcgggcagcgaagaagagattttcgcgcatctgggtctggattatgtggagccgtgggaacgcaacgcg

SEQ ID NO: 3292 - protein, 394 aa, synthetic construct
  REGION 1..394: note = Variant of terminal deoxynucleotidyl transferase
MHHHHHHGGSGHPPSNTPEKEVPSVIARPVSQYACQRKTTLNNYNKKFTDALEIMAENYKFKENLQACLEAKRAASIFKSLPFEVTSMKDIQGLPCITDDVRDVIYEIIEEGESSRVKEILNDERYKAFKQFTSVFGVGVKTSEKWYRMGLRTVEEAKASKSLKLSKMQKAGFLYYEDLASMVSKEEADAVTLIVKETVRTFVPDALVTIAGGFRRGKPMGHDVDFLITNPGRKMDDELLHKVVDLLKKQGLLLYEDIKESTFVEGQLPSHKIDAMDNFQKCFAILKLYQPKVDNSAVGTSKKSDMAEVKDWKAVRVDLVITPFEQFAYALLGWTGSGQFRRDLRRYAEEERDMLLDNHALYDLKKRIFLKAGSEEEIFAHLGLDYVEPWERNA

SEQ ID NO: 3293 - DNA, 1182 bp, synthetic construct
  misc_feature 1..1182: note = Variant of terminal deoxynucleotidyl transferase
  source 1..1182: mol_type = other DNA
atgcatcaccaccatcatcatgggggttctggtcatccgccgagcaataccccggagaaggaggtgccgagcgttatcgcccgtccggttagtcagtacgcgtgccagcgcaagaccacgctgaataactacaacaaaaagttcaccgacgcgctggagatcatggccgagaactacaaatttaaagagaacctgcaggcgtgtctggaagccaagcgcgccgcgagtatttttaaaagcctgccgttcgaggttaccagcatgaaagacatccaaggtctgccgtgcattaccgacgacgtacgtgacgtgatcgaggagatcatcgaagagggcgagagcagccgtgttaaagaaatcctcaatgacgagcgctacaaggcctttaagcagttcaccagcgtgttcggtgtgggcgtgaaaacctcggaaaagtggtaccgtatgggcctccgtacggttgaagaagcaaaggccagtaagagtctgaagctgagcaagatgcagaaggcgggcttcctgtattacgaggatctggcgagcatggttagtaaagaagaagccgatgccgttacgctcatcgtgaaggaaacggtgcgtacctttgtgccggatgcgctggtgaccatcgccggcggtttccgccgtggcaaacctatgggccacgacgttgactttctgatcacgaacccgactcgcaaaatggatgacgagctgctccacaaagtggttgatctgctcaagaagcaaggtctgctgctgtacgaagacatcaaagagagcacgttcgtggaggggcaactgccaagtcataaaatcgacgccatggacaacttccagaagtgcttcgccattctcaagctgtaccagccgaaggtggataacagtgcggttgggacgagtaagaaaagtgacatggctgaggttaaggattggaaagcggttcgtgtggatctggtgatcacgccattcgagcagttcgcctatgcgctgctcggttggacgggcagcggccaatttcgtcgcgatctgcgtcgctatgcggaggaagagcgcgacatgctgctcgacaaccatgccctctacgacctgaaaaagcgcatctttctgaaagcgggcagcgaagaagagattttcgcgcatctgggtctggattatgtggagccgtgggaacgcaacgcg

SEQ ID NO: 3294 - protein, 394 aa, synthetic construct
  REGION 1..394: note = Variant of terminal deoxynucleotidyl transferase
MHHHHHHGGSGHPPSNTPEKEVPSVIARPVSQYACQRKTTLNNYNKKFTDALEIMAENYKFKENLQACLEAKRAASIFKSLPFEVTSMKDIQGLPCITDDVRDVIEEIIEEGESSRVKEILNDERYKAFKQFTSVFGVGVKTSEKWYRMGLRTVEEAKASKSLKLSKMQKAGFLYYEDLASMVSKEEADAVTLIVKETVRTFVPDALVTIAGGFRRGKPMGHDVDFLITNPTRKMDDELLHKVVDLLKKQGLLLYEDIKESTFVEGQLPSHKIDAMDNFQKCFAILKLYQPKVDNSAVGTSKKSDMAEVKDWKAVRVDLVITPFEQFAYALLGWTGSGQFRRDLRRYAEEERDMLLDNHALYDLKKRIFLKAGSEEEIFAHLGLDYVEPWERNA

SEQ ID NO: 3295 - DNA, 1182 bp, synthetic construct
  misc_feature 1..1182: note = Variant of terminal deoxynucleotidyl transferase
  source 1..1182: mol_type = other DNA
atgcatcaccaccatcatcatgggggttctggtcatccgccgagcaataccccggagaaggaggtgccgagcgttatcgcccgtccggttagtcagtacgcgtgccagcgcaagaccacgctgaataacgtgaacaaaaagttcaccgacgcgctggagatcatggccgagaactacaaatttaaagagaacctgcaggcgtgtctggaagccaagcgcgccgcgagtatttttaaaagcctgccgttcgaggttaccagcatgaaagacatccaaggtctgccgtgcattaccgacgacgtacgtgacgtgatcgaggagatcatcgaagagggcgagagcagccgtgttaaagaaatcctcaatgacgagcgctacaaggcctttaagcagttcaccagcgtgttcggtgtgggcgtgaaaacctcggaaaagtggtaccgtatgggcctccgtacggttgaagaagcaaaggccagtaagagtctgaagctgagcaagatgcagaaggcgggcttcctgtattacgaggatctggcgagcatggttagtaaagaagaagccgatgccgttacgctcatcgtgaaggaaacggtgcgtacctttgtgccggatgcgctggtgaccatcgccggcggtttccgccgtggcaaacctatgggccacgacgttgactttctgatcacgaacccgggccgcaaaatggatgacgagctgctccacaaagtggttgatctgctcaagaagcaaggtctgctgctgtacgaagacatcaaagagagcacgttcgtggaggggcaactgccaagtcataaaatcgacgccatggacaacttccagaagtgcttcgccattctcaagctgtaccagccgaaggtggataacagtgcggttgggacgagtaagaaaagtgacatggctgaggttaaggattggaaagcggttcgtgtggatctggtgatcacgccattcgagcagttcgcctatgcgctgctcggttggacgggcagcggccaatttcgtcgcgatctgcgtcgctatgcggaggaagagcgcgacatgctgctcgacaaccatgccctctacgacctgaaaaagcgcatctttctgaaagcgggcagcgaagaagagattttcgcgcatctgggtctggattatgtggagccgtgggaacgcaacgcg

SEQ ID NO: 3296 - protein, 394 aa, synthetic construct
  REGION 1..394: note = Variant of terminal deoxynucleotidyl transferase
MHHHHHHGGSGHPPSNTPEKEVPSVIARPVSQYACQRKTTLNNVNKKFTDALEIMAENYKFKENLQACLEAKRAASIFKSLPFEVTSMKDIQGLPCITDDVRDVIEEIIEEGESSRVKEILNDERYKAFKQFTSVFGVGVKTSEKWYRMGLRTVEEAKASKSLKLSKMQKAGFLYYEDLASMVSKEEADAVTLIVKETVRTFVPDALVTIAGGFRRGKPMGHDVDFLITNPGRKMDDELLHKVVDLLKKQGLLLYEDIKESTFVEGQLPSHKIDAMDNFQKCFAILKLYQPKVDNSAVGTSKKSDMAEVKDWKAVRVDLVITPFEQFAYALLGWTGSGQFRRDLRRYAEEERDMLLDNHALYDLKKRIFLKAGSEEEIFAHLGLDYVEPWERNA

SEQ ID NO: 3297 - DNA, 1182 bp, synthetic construct
  misc_feature 1..1182: note = Variant of terminal deoxynucleotidyl transferase
  source 1..1182: mol_type = other DNA
atgcatcaccaccatcatcatgggggttctggtcatccgccgagcaataccccggagaaggagtgtccgagcgttatcgcccgtccggttagtcagtacgcgtgccagcgcaagaccacgctgaataactacaacaaaaagttcaccgacgcgctggagatcatggccgagaactacaaatttaaagagaacctgcaggcgtgtctggaagccaagcgcgccgcgagtatttttaaaagcctgccgttcgaggttaccagcatgaaagacatccaaggtctgccgtgcattaccgacgacgtacgtgacgtgatcgaggagatcatcgaagagggcgagagcagccgtgttaaagaaatcctcaatgacgagcgctacaaggcctttaagcagttcaccagcgtgttcggtgtgggcgtgaaaacctcggaaaagtggtaccgtatgggcctccgtacggttgaagaagcaaaggccagtaagagtctgaagctgagcaagatgcagaaggcgggcttcctgtattacgaggatctggcgagcatggttagtaaagaagaagccgatgccgttacgctcatcgtgaaggaaacggtgcgtacctttgtgccggatgcgctggtgaccatcgccggcggtttccgccgtggcaaacctatgggccacgacgttgactttctgatcacgaacccgggccgcaaaatggatgacgagctgctccacaaagtggttgatctgctcaagaagcaaggtctgctgctgtacgaagacatcaaagagagcacgttcgtggaggggcaactgccaagtcataaaatcgacgccatggacaacttccagaagtgcttcgccattctcaagctgtaccagccgaaggtggataacagtgcggttgggacgagtaagaaaagtgacatggctgaggttaaggattggaaagcggttcgtgtggatctggtgatcacgccattcgagcagttcgcctatgcgctgctcggttggacgggcagcggccaatttcgtcgcgatctgcgtcgctatgcggaggaagagcgcgacatgctgctcgacaaccatgccctctacgacctgaaaaagcgcatctttctgaaagcgggcagcgaagaagagattttcgcgcatctgggtctggattatgtggagccgtgggaacgcaacgcg

SEQ ID NO: 3298 - protein, 394 aa, synthetic construct
  REGION 1..394: note = Variant of terminal deoxynucleotidyl transferase
MHHHHHHGGSGHPPSNTPEKECPSVIARPVSQYACQRKTTLNNYNKKFTDALEIMAENYKFKENLQACLEAKRAASIFKSLPFEVTSMKDIQGLPCITDDVRDVIEEIIEEGESSRVKEILNDERYKAFKQFTSVFGVGVKTSEKWYRMGLRTVEEAKASKSLKLSKMQKAGFLYYEDLASMVSKEEADAVTLIVKETVRTFVPDALVTIAGGFRRGKPMGHDVDFLITNPGRKMDDELLHKVVDLLKKQGLLLYEDIKESTFVEGQLPSHKIDAMDNFQKCFAILKLYQPKVDNSAVGTSKKSDMAEVKDWKAVRVDLVITPFEQFAYALLGWTGSGQFRRDLRRYAEEERDMLLDNHALYDLKKRIFLKAGSEEEIFAHLGLDYVEPWERNA

SEQ ID NO: 3299 - DNA, 1182 bp, synthetic construct
  misc_feature 1..1182: note = Variant of terminal deoxynucleotidyl transferase
  source 1..1182: mol_type = other DNA
atgcatcaccaccatcatcatgggggttctggtcatccgccgagcaataccccggagaaggaggtgccgagcgttatctcgcgtccggttagtcagtacgcgtgccagcgcaagaccacgctgaataactacaacaaaaagttcaccgacgcgctggagatcatggccgagaactacaaatttaaagagaacctgcaggcgtgtctggaagccaagcgcgccgcgagtatttttaaaagcctgccgttcgaggttaccagcatgaaagacatccaaggtctgccgtgcattaccgacgacgtacgtgacgtgatcgaggagatcatcgaagagggcgagagcagccgtgttaaagaaatcctcaatgacgagcgctacaaggcctttaagcagttcaccagcgtgttcggtgtgggcgtgaaaacctcggaaaagtggtaccgtatgggcctccgtacggttgaagaagcaaaggccagtaagagtctgaagctgagcaagatgcagaaggcgggcttcctgtattacgaggatctggcgagcatggttagtaaagaagaagccgatgccgttacgctcatcgtgaaggaaacggtgcgtacctttgtgccggatgcgctggtgaccatcgccggcggtttccgccgtggcaaacctatgggccacgacgttgactttctgatcacgaacccgggccgcaaaatggatgacgagctgctccacaaagtggttgatctgctcaagaagcaaggtctgctgctgtacgaagacatcaaagagagcacgttcgtggaggggcaactgccaagtcataaaatcgacgccatggacaacttccagaagtgcttcgccattctcaagctgtaccagccgaaggtggataacagtgcggttgggacgagtaagaaaagtgacatggctgaggttaaggattggaaagcggttcgtgtggatctggtgatcacgccattcgagcagttcgcctatgcgctgctcggttggacgggcagcggccaatttcgtcgcgatctgcgtcgctatgcggaggaagagcgcgacatgctgctcgacaaccatgccctctacgacctgaaaaagcgcatctttctgaaagcgggcagcgaagaagagattttcgcgcatctgggtctggattatgtggagccgtgggaacgcaacgcg

SEQ ID NO: 3300 - protein, 394 aa, synthetic construct
  REGION 1..394: note = Variant of terminal deoxynucleotidyl transferase
MHHHHHHGGSGHPPSNTPEKEVPSVISRPVSQYACQRKTTLNNYNKKFTDALEIMAENYKFKENLQACLEAKRAASIFKSLPFEVTSMKDIQGLPCITDDVRDVIEEIIEEGESSRVKEILNDERYKAFKQFTSVFGVGVKTSEKWYRMGLRTVEEAKASKSLKLSKMQKAGFLYYEDLASMVSKEEADAVTLIVKETVRTFVPDALVTIAGGFRRGKPMGHDVDFLITNPGRKMDDELLHKVVDLLKKQGLLLYEDIKESTFVEGQLPSHKIDAMDNFQKCFAILKLYQPKVDNSAVGTSKKSDMAEVKDWKAVRVDLVITPFEQFAYALLGWTGSGQFRRDLRRYAEEERDMLLDNHALYDLKKRIFLKAGSEEEIFAHLGLDYVEPWERNA

SEQ ID NO: 3301 - DNA, 1182 bp, synthetic construct
  misc_feature 1..1182: note = Variant of terminal deoxynucleotidyl transferase
  source 1..1182: mol_type = other DNA
atgcatcaccaccatcatcatgggggttctggtcatccgccgagcaataccccggagaaggaggtgccgagcgttatcgcccgtccggttagtcagtacgcgtgccagcgcaagaccacgctgaataactacaacaaaaagttcaccgacgcgctggagatcatggccgagaactacaaatttaaagagaacctgcaggcgtgtctggaagccaagcgcgccgcgagtatttttaaaagcctgccgttcgaggttaccagcatgaaagacatccaaggtctgccgtgcattaccgacgacgtacgtgacgtgatcgaggagatcatcgaagagggcgagagcagccgtgttaaagaaatcctcaatgacgagcgctacaaggcctttaagcagttcaccagcgtgttcggtgtgggcgtgaaaacctcggaaaagtggtaccgtatgggcctccgtacggttgaagaagcaaaggccagtaagagtctgaagctgagcaagatgcagaaggcgggcttcctgtattacgaggatctggcgagcatggttagtaaagaagaagccgatgccgttacgctcatcgtgaaggaaacggtgcgtaccgttgtgccggatgcgctggtgaccatcgccggcggtttccgccgtggcaaacctatgggccacgacgttgactttctgatcacgaacccgggccgtaaagaagatgacgagctgctccacaaagtggttgatctgctcaagaagcaaggtctgctgctgtacgaagacatcaaagagagcacgttcgtggaggggcaactgccaagtcataaaatcgacgccatggacaacttccagaagtgcttcgccattctcaagctgtaccagccgaaggtggataacagtgcggttgggacgagtaagaaaagtgacatggctgaggttaaggattggaaagcggttcgtgtggatctggtgatcacgccattcgagcagttcgcctatgcgctgctcggttggacgggcagcggccaatttcgtcgcgatctgcgtcgctatgcggaggaagagcgcgacatgctgctcgacaaccatcgtctctacgacctgaaaaagggcatctttctgagtgcgggcagcgaagaagagattttcgcgcatctgggtctggattatgtggagccgtgggaacgcaacgcg

SEQ ID NO: 3302 - protein, 394 aa, synthetic construct
  REGION 1..394: note = Variant of terminal deoxynucleotidyl transferase
MHHHHHHGGSGHPPSNTPEKEVPSVIARPVSQYACQRKTTLNNYNKKFTDALEIMAENYKFKENLQACLEAKRAASIFKSLPFEVTSMKDIQGLPCITDDVRDVIEEIIEEGESSRVKEILNDERYKAFKQFTSVFGVGVKTSEKWYRMGLRTVEEAKASKSLKLSKMQKAGFLYYEDLASMVSKEEADAVTLIVKETVRTVVPDALVTIAGGFRRGKPMGHDVDFLITNPGRKEDDELLHKVVDLLKKQGLLLYEDIKESTFVEGQLPSHKIDAMDNFQKCFAILKLYQPKVDNSAVGTSKKSDMAEVKDWKAVRVDLVITPFEQFAYALLGWTGSGQFRRDLRRYAEEERDMLLDNHRLYDLKKGIFLSAGSEEEIFAHLGLDYVEPWERNA

SEQ ID NO: 3303 - DNA, 1182 bp, synthetic construct
  misc_feature 1..1182: note = Variant of terminal deoxynucleotidyl transferase
  source 1..1182: mol_type = other DNA
atgcatcaccaccatcatcatgggggttctggtcatccgccgagcaataccccggagaaggaggtgccgagcgttatcgcccgtccggttagtcagtacgcgtgccagcgcaagaccacgctgaataactacaacaaaaagttcaccgacgcgctggagatcatggccgagaactacaaatttaaagagaacctgcaggcgtgtctggaagccaagcgcgccgcgagtatttttaaaagcctgccgttcgaggttaccagcatgaaagacatccaaggtctgccgtgcattaccgacgacgtacgtgacgtgatcgaggagatcatcgaagagggcgagagcagccgtgttaaagaaatcctcaatgacgagcgctacaaggcctttaagcagttcaccagcgtgttcggtgtgggcgtgaaaacctcggaaaagtggtaccgtatgggcctccgtacggttgaagaagcaaaggccagtaagagtctgaagctgagcaagatgcagaaggcgggcttcctgtattacgaggatctggcgagcatggttagtaaagaagaagccgatgccgttacgctcatcgtgaaggaaacggtgcgtacctttgtgccggatgcgctggtgaccatcgccggcggtttccgccgtggcaaacctatgggccacgacgttgacctgctgatcacgaacccgggccgcaaaatggatgacgagctgctccacaaagtggttgatctgctcaagaagcaaggtctgctgctgtacgaagacatcaaagagagcacgttcgtggaggggcaactgccaagtcataaaatcgacgccatggacaacttccagaagtgcttcgccattctcaagctgtaccagccgaaggtggataacagtgcggttgggacgagtaagaaaagtgacatggctgaggttaaggattggaaagcggttcgtgtggatctggtgattacgccattcgagcagttcgcctatgcgctgctcggttggacgggcagcggccaatttcgtcgcgatctgcgtcgctatgcggaggaagagcgcgacatgctgctcgacaaccatgccctctacgacctgaaagaacgcatctatctgaaagcgggcagcgaagaagagattttcgcgcatctgggtctggattatctggagccgtgggaacgcaacgcg

SEQ ID NO: 3304 - protein, 394 aa, synthetic construct
  REGION 1..394: note = Variant of terminal deoxynucleotidyl transferase
MHHHHHHGGSGHPPSNTPEKEVPSVIARPVSQYACQRKTTLNNYNKKFTDALEIMAENYKFKENLQACLEAKRAASIFKSLPFEVTSMKDIQGLPCITDDVRDVIEEIIEEGESSRVKEILNDERYKAFKQFTSVFGVGVKTSEKWYRMGLRTVEEAKASKSLKLSKMQKAGFLYYEDLASMVSKEEADAVTLIVKETVRTFVPDALVTIAGGFRRGKPMGHDVDLLITNPGRKMDDELLHKVVDLLKKQGLLLYEDIKESTFVEGQLPSHKIDAMDNFQKCFAILKLYQPKVDNSAVGTSKKSDMAEVKDWKAVRVDLVITPFEQFAYALLGWTGSGQFRRDLRRYAEEERDMLLDNHALYDLKERIYLKAGSEEEIFAHLGLDYLEPWERNA

SEQ ID NO: 3305 - DNA, 1182 bp, synthetic construct
  misc_feature 1..1182: note = Variant of terminal deoxynucleotidyl transferase
  source 1..1182: mol_type = other DNA
atgcatcaccaccatcatcatgggggttctggtcatccgccgagcaataccccggagaaggaggtgccgagcgttatcgcccgtccggttagtcagtacgcgtgccagcgcaagaccacgctgaataactacaacaaaaagttcaccgacgcgctggagatcatggccgagaactacaaatttaaagagaacctgcaggcgtgtctggaagccaagcgcgccgcgagtatttttaaaagcctgccgttcgaggttaccagcatgaaagacatccaaggtctgccgtgcattaccgacgacgtacgtgacgtgatcgaggagatcatcgaagagggcgagagcagccgtgttaaagaaatcctcaatgacgagcgctacaaggcctttaagcagttcaccagcgtgttcggtgtgggcgtgaaaacctcggaaaagtggtaccgtatgggcctccgtacggttgaagaagcaaaggccagtaagagtctgaagctgagcaagatgcagaaggcgggcttcctgtattacgaggatctggcgagcatggttagtaaagaagaagccgatgccgttacgctcatcgtgaaggaaacggtgcgtacctttgtgccggatgcgctggtgaccatcgccggcggtttccgccgtggcaaacctatgggccacgacgttgactttctgatcacgaacccgggcagtaaaatggatgacgagctgctccacaaagtggttgatctgctcaagaagcaaggtctgctgctgtacgaagacatcaaagagagcacgttcgtggaggggcaactgccaagtcataaaatcgacgccatggacaacttccagaagtgcttcgccattctcaagctgtaccagccgaaggtggataacagtgcggttgggacgagtaagaaaagtgacatggctgaggttaaggattggaaagcggttcgtgtggatctggtgatcacgccattcgagcagttcgcctatgcgctgctcggttggacgggcagcggccaatttcgtcgcgatctgcgtcgctatgcggaggaagagcgcgacatgctgctcgacaaccatgcactctacgacctgaaaaagcgcatctttctgagtgcgggcagcgaagaagagattttcgctcatctgggtctggattatgtggagccgtgggaacgcaacgcg

SEQ ID NO: 3306 - protein, 394 aa, synthetic construct
  REGION 1..394: note = Variant of terminal deoxynucleotidyl transferase
MHHHHHHGGSGHPPSNTPEKEVPSVIARPVSQYACQRKTTLNNYNKKFTDALEIMAENYKFKENLQACLEAKRAASIFKSLPFEVTSMKDIQGLPCITDDVRDVIEEIIEEGESSRVKEILNDERYKAFKQFTSVFGVGVKTSEKWYRMGLRTVEEAKASKSLKLSKMQKAGFLYYEDLASMVSKEEADAVTLIVKETVRTFVPDALVTIAGGFRRGKPMGHDVDFLITNPGSKMDDELLHKVVDLLKKQGLLLYEDIKESTFVEGQLPSHKIDAMDNFQKCFAILKLYQPKVDNSAVGTSKKSDMAEVKDWKAVRVDLVITPFEQFAYALLGWTGSGQFRRDLRRYAEEERDMLLDNHALYDLKKRIFLSAGSEEEIFAHLGLDYVEPWERNA

SEQ ID NO: 3307 - DNA, 1182 bp, synthetic construct
  misc_feature 1..1182: note = Variant of terminal deoxynucleotidyl transferase
  source 1..1182: mol_type = other DNA
atgcatcaccaccatcatcatgggggttctggtcatccgccgagcaataccccggagaaggaggtgccgagcgttatcgcccgtccggttagtcagtacgcgtgccagcgcaagaccacgctgaataactacaacaaaaagttcaccgacgcgctggagatcatggccgagaactacaaatttaaagagaacctgcaggcgtgtctggaagccaagcgcgccgcgagtatttttaaaagcctgccgttcgaggttaccagcatgaaagacatccaaggtctgccgtgcattaccgacgacgtacgtgacgtgatcgaggagatcatcgaacgtggcgagagcagccgtgttaaagaaatcctcaatgacgagcgctacaaggcctttaagcagttcaccagcgtgttcggtgtgggcgtgaaaacctcggaaaagtggtaccgtatgggcctccgtacggttgaagaagcaaaggccagtaagagtctgaagctgagcaagatgcagaaggcgggcttcctgtattacgaggatctggcgagcatggttagtaaagaagaagccgatgccgttacgctcatcgtgaaggaaacggtgcgtacctttgtgccggatgcgctggtgaccatcgccggcggtttccgccgtggcaaacctatgggccacgacgttgacctgctgatcacgaacccgggccgcaaaatggatgacgagctgctccacaaagtggttgatctgctcaagaagcaaggtctgctgctgtacgaagacatcaaagagagcacgttcgtggaggggcaactgccaagtcataagatcgacgccatggacaacttccagaagtgcttcgccattctcaagctgtaccagccgaaggtggataacagtgcggttgggacgagtaagaaaagtgacatggctgaggttaaggattggaaagcggttcgtgtggatctggtgtgcacgccattcgagcagttcgcctatgcgctgctcggttggacgggcagcggccaatttcgtcgcgatactcgtatttatgcggaggaagagcgcgacatgctgctcgacaaccatgccctctacgacctgaaaaaacgcatctatctgaaagcgggcagcgaagaagagattttcgcgcatctgggtctggattatctggagccgtgggaacgcaacgcg

SEQ ID NO: 3308 - protein, 394 aa, synthetic construct
  REGION 1..394: note = Variant of terminal deoxynucleotidyl transferase
MHHHHHHGGSGHPPSNTPEKEVPSVIARPVSQYACQRKTTLNNYNKKFTDALEIMAENYKFKENLQACLEAKRAASIFKSLPFEVTSMKDIQGLPCITDDVRDVIEEIIERGESSRVKEILNDERYKAFKQFTSVFGVGVKTSEKWYRMGLRTVEEAKASKSLKLSKMQKAGFLYYEDLASMVSKEEADAVTLIVKETVRTFVPDALVTIAGGFRRGKPMGHDVDLLITNPGRKMDDELLHKVVDLLKKQGLLLYEDIKESTFVEGQLPSHKIDAMDNFQKCFAILKLYQPKVDNSAVGTSKKSDMAEVKDWKAVRVDLVCTPFEQFAYALLGWTGSGQFRRDTRIYAEEERDMLLDNHALYDLKKRIYLKAGSEEEIFAHLGLDYLEPWERNA

SEQ ID NO: 3309 - DNA, 1182 bp, synthetic construct
  misc_feature 1..1182: note = Variant of terminal deoxynucleotidyl transferase
  source 1..1182: mol_type = other DNA
atgcatcaccaccatcatcatgggggttctggtcatccgccgagcaataccccggagaaggaggtgccgagcgttatcgcccgtccggttagtcagtacgcgtgccagcgcaagaccacgctgaataactacaacaaaaagttcaccgacgcgctggagatcatggccgagaactacaaatttaaagagaacctgcaggcgtgtctggaagccaagcgcgccgcgagtatttttaaaagcctgccgttcgaggttaccagcatgaaagacatccaaggtctgccgtgcattaccgacgacgtacgtgacgtgatcgaggagatcatcgaagagggcgagagcagccgtgttaaagaaatcctcaatgacgagcgctacaaggcctttaagcagttcaccagcgtgttcggtgtgggcgtgaaaacctcggaaaagtggtaccgtatgggcctccgtacggttgaagaagcaaaggccagtaagagtctgaagctgagcaagatgcagaaggcgggcttcctgtattacgaggatctggcgagcatggttagtaaagaagaagccgatgccgttacgctcatcgtgaaggaaacggtgcgtacctttgtgccggatgcgctggtgaccatcgccggcggtttccgccgtggcaaacctatgggccacgacgttgactttctgatcacgaacccgggcagtaaaatggatgacgagctgctccacaaagtggttgatctgctcaagaagcaaggtctgctgctgtacgaagacatcaaagagagcacgttcgtggaggggcaactgccaagtcataaaatcgacgccatggacaacttccagaagtgcttcgccattctcaagctgtaccagccgaaggtggataacagtgcggttgggacgagtaagaaaagtgacatggctgaggttaaggattggaaagcggttcgtgtggatctggtgatcacgccattcgagcagttcgcctatgcgctgctcggttggacgggcagcggccaatttcgtcgcgatctgcgtcgctatgcggaggaagagcgcgacatgctgctcgacaaccatgccctctacgacctgaaaaagggcatctttctgagtgcgggcagcgaagaagagattttcgcgcatctgggtctggattatgtggagccgtgggaacgcaacgcg

SEQ ID NO: 3310 - protein, 394 aa, synthetic construct
  REGION 1..394: note = Variant of terminal deoxynucleotidyl transferase
MHHHHHHGGSGHPPSNTPEKEVPSVIARPVSQYACQRKTTLNNYNKKFTDALEIMAENYKFKENLQACLEAKRAASIFKSLPFEVTSMKDIQGLPCITDDVRDVIEEIIEEGESSRVKEILNDERYKAFKQFTSVFGVGVKTSEKWYRMGLRTVEEAKASKSLKLSKMQKAGFLYYEDLASMVSKEEADAVTLIVKETVRTFVPDALVTIAGGFRRGKPMGHDVDFLITNPGSKMDDELLHKVVDLLKKQGLLLYEDIKESTFVEGQLPSHKIDAMDNFQKCFAILKLYQPKVDNSAVGTSKKSDMAEVKDWKAVRVDLVITPFEQFAYALLGWTGSGQFRRDLRRYAEEERDMLLDNHALYDLKKGIFLSAGSEEEIFAHLGLDYVEPWERNA

SEQ ID NO: 3311 - DNA, 1182 bp, synthetic construct
  misc_feature 1..1182: note = Variant of terminal deoxynucleotidyl transferase
  source 1..1182: mol_type = other DNA
atgcatcaccaccatcatcatgggggttctggtcatccgccgagcaataccccggagaaggaggtgccgagcgttatcgcccgtccggttagtcagtacgcgtgccagcgcaagaccacgctgaataactacaacaaaaagttcaccgacgcgctggagatcatggccgagaactacaaatttaaagagaacctgcaggcgtgtctggaagccaagcgcgccgcgagtatttttaaaagcctgccgttcgaggttaccagcatgaaagacatccaaggtctgccgtgcattaccgacgacgtacgtgacgtgatcgaggagatcatcgaagagggcgagagcagccgtgttaaagaaatcctcaatgacgagcgctacaaggcctttaagcagttcaccagcgtgttcggtgtgggcgtgaaaacctcggaaaagtggtaccgtatgggcctccgtacggttgaagaagcaaaggccagtaagagtctgaagctgagcaagatgcagaaggcgggcttcctgtattacgaggatctggcgagcatggttagtaaagaagaagccgatgccgttacgctcatcgtgaaggaaacggtgcgtggtgttgtgccggatgcgctggtgaccatcgccggcggtttccgccgtggcaaacctatgggccacgacgttgactttctgatcacgaacccgggccgtaaaatggatgacgagctgctccacaaagtggttgatctgctcaagaagcaaggtctgctgctgtacgaagacatcaaagagagcacgttcgtggaggggcaactgccaagtcatgggatcgacgccatggacaacttccagaagtgcttcgccattctcaagctgtaccagccgaaggtggataacagtgcggttgggacgagtaagaaaagtgacatggctgaggttaaggattggaaagcggttcgtgtggatctggtgatcacgccattcgagcagttcgcctatgcgctgctcggttggacgggcagcggccaatttcgtcgcgatctgcgtcgctatgcggaggaagagcgcgacatgctgctcgacaaccatcgtctctacgacctgaaaaagcgcatctttctgaaagcgggcagcgaagaagagattttcgcgcatctgggtctggattatgtggagccgtgggaacgcaacgcg

SEQ ID NO: 3312 - protein, 394 aa, synthetic construct
  REGION 1..394: note = Variant of terminal deoxynucleotidyl transferase
MHHHHHHGGSGHPPSNTPEKEVPSVIARPVSQYACQRKTTLNNYNKKFTDALEIMAENYKFKENLQACLEAKRAASIFKSLPFEVTSMKDIQGLPCITDDVRDVIEEIIEEGESSRVKEILNDERYKAFKQFTSVFGVGVKTSEKWYRMGLRTVEEAKASKSLKLSKMQKAGFLYYEDLASMVSKEEADAVTLIVKETVRGVVPDALVTIAGGFRRGKPMGHDVDFLITNPGRKMDDELLHKVVDLLKKQGLLLYEDIKESTFVEGQLPSHGIDAMDNFQKCFAILKLYQPKVDNSAVGTSKKSDMAEVKDWKAVRVDLVITPFEQFAYALLGWTGSGQFRRDLRRYAEEERDMLLDNHRLYDLKKRIFLKAGSEEEIFAHLGLDYVEPWERNA

SEQ ID NO: 3313 - DNA, 1182 bp, synthetic construct
  misc_feature 1..1182: note = Variant of terminal deoxynucleotidyl transferase
  source 1..1182: mol_type = other DNA
atgcatcaccaccatcatcatgggggttctggtcatccgccgagcaataccccggagaaggaggtgccgagcgttatcgcccgtccggttagtcagtacgcgtgccagcgcaagaccacgctgaataactacaacaaaaagttcaccgacgcgctggagatcatggccgagaactacaaatttaaagagaacctgcaggcgtgtctggaagccaagcgcgccgcgagtatttttaaaagcctgccgttcgaggttaccagcatgaaagacatccaaggtctgccgtgcattaccgacgacgtacgtgacgtgatcgaggagatcatcgaagagggcgagagcagccgtgttaaagaaatcctcaatgacgagcgctacaaggcctttaagcagttcaccagcgtgttcggtgtgggcgtgaaaacctcggaaaagtggtaccgtatgggcctccgtacggttgaagaagcaaaggccagtaagagtctgaagctgagcaagatgcagaaggcgggcttcctgtattacgaggatctggcgagcatggttagtaaagaagaagccgatgccgttacgctcatcgtgaaggaaacggtgcgtacctttgtgccggatgcgctggtgaccatcgccggcggtttccgccgtggcaaacctatgggccacgacgttgacctgctgatcacgaacccgggccgcaaaatggatgacgagctgctccacaaagtggttgatctgctcaagaagcaaggtctgctgctgtacgaagacatcaaagagagcacgttcgtggaggggcaactgccaagtcataaaatcgacgccatggacaacttccagaagtgcttcgccattctcaagctgtaccagccgaaggtggataacagtgcggttgggacgagtaagaaaagtgacatggctgaggttaaggattggaaagcggttcgtgtggatctggtgatcacgccattcgagcagttcgcctatgcgctgctcggttggacgggcagcggccaatttcgtcgcgatctgcgtcgctatgcggaggaagagcgcgacatgctgctcgacaaccatgccctctacgacctgaaaaagcgcatctttctgaaagcgggcagcgaagaagagattttcgcgcatctgggtctggattatgtggagccgtgggaacgcaacgcg

SEQ ID NO: 3314 - protein, 394 aa, synthetic construct
  REGION 1..394: note = Variant of terminal deoxynucleotidyl transferase
MHHHHHHGGSGHPPSNTPEKEVPSVIARPVSQYACQRKTTLNNYNKKFTDALEIMAENYKFKENLQACLEAKRAASIFKSLPFEVTSMKDIQGLPCITDDVRDVIEEIIEEGESSRVKEILNDERYKAFKQFTSVFGVGVKTSEKWYRMGLRTVEEAKASKSLKLSKMQKAGFLYYEDLASMVSKEEADAVTLIVKETVRTFVPDALVTIAGGFRRGKPMGHDVDLLITNPGRKMDDELLHKVVDLLKKQGLLLYEDIKESTFVEGQLPSHKIDAMDNFQKCFAILKLYQPKVDNSAVGTSKKSDMAEVKDWKAVRVDLVITPFEQFAYALLGWTGSGQFRRDLRRYAEEERDMLLDNHALYDLKKRIFLKAGSEEEIFAHLGLDYVEPWERNA

SEQ ID NO: 3315 - DNA, 1182 bp, synthetic construct
  misc_feature 1..1182: note = Variant of terminal deoxynucleotidyl transferase
  source 1..1182: mol_type = other DNA
atgcatcaccaccatcatcatgggggttctggtcatccgccgagcaataccccggagaaggaggtgccgagcgttatcgcccgtccggttagtcagtacgcgtgccagcgcaagaccacgctgaataactacaacaaaaagttcaccgacgcgctggagatcatggccgagaactacaaatttaaagagaacctgcaggcgtgtctggaagccaagcgcgccgcgagtatttttaaaagcctgccgttcgaggttaccagcatgaaagacatccaaggtctgccgtgcattaccgacgacgtacgtgacgtgatcgaggagatcatcgaagagggcgagagcagccgtgttaaagaaatcctcaatgacgagcgctacaaggcctttaagcagttcaccagcgtgttcggtgtgggcgtgaaaacctcggaaaagtggtaccgtatgggcctccgtacggttgaagaagcaaaggccagtaagagtctgaagctgagcaagatgcagaaggcgggcttcctgtattacgaggatctggcgagcatggttagtaaagaagaagccgatgccgttacgctcatcgtgaaggaaacggtgcgtacctttgtgccggatgcgctggtgaccatcgccggcggtttccgccgtggcaaacctatgggccacgacgttgacctgctgatcacgaacccgggccgcaaaatggatgacgagctgctccacaaagtggttgatctgctcaagaagcaaggtctgctgctgtacgaagacatcaaagagagcacgttcgtggaggggcaactgccaagtcataaaatcgacgccatggacaacttccagaagtgcttcgccattctcaagctgtaccagccgaaggtggataacagtgcggttgggacgagtaagaaaagtgacatggctgaggttaaggattggaaagcggttcgtgtggatctggtgattacgccattcgagcagttcgcctatgcgctgctcggttggacgggcagcggccaatttcgtcgcgatctgcgtcgctatgcggaggaagagcgcgacatgctgctcgacaaccatgccctctacgacctgaaagaacgcatctttctgaaagcgggcagcgaagaagagattttcgcgcatctgggtctggattatgtggagccgtgggaacgcaacgcg

SEQ ID NO: 3316 - protein, 394 aa, synthetic construct
  REGION 1..394: note = Variant of terminal deoxynucleotidyl transferase
MHHHHHHGGSGHPPSNTPEKEVPSVIARPVSQYACQRKTTLNNYNKKFTDALEIMAENYKFKENLQACLEAKRAASIFKSLPFEVTSMKDIQGLPCITDDVRDVIEEIIEEGESSRVKEILNDERYKAFKQFTSVFGVGVKTSEKWYRMGLRTVEEAKASKSLKLSKMQKAGFLYYEDLASMVSKEEADAVTLIVKETVRTFVPDALVTIAGGFRRGKPMGHDVDLLITNPGRKMDDELLHKVVDLLKKQGLLLYEDIKESTFVEGQLPSHKIDAMDNFQKCFAILKLYQPKVDNSAVGTSKKSDMAEVKDWKAVRVDLVITPFEQFAYALLGWTGSGQFRRDLRRYAEEERDMLLDNHALYDLKERIFLKAGSEEEIFAHLGLDYVEPWERNA

SEQ ID NO: 3317 - DNA, 1182 bp, synthetic construct
  misc_feature 1..1182: note = Variant of terminal deoxynucleotidyl transferase
  source 1..1182: mol_type = other DNA
atgcatcaccaccatcatcatgggggttctggtcatccgccgagcaataccccggagaaggaggtgccgagcgttatcgcccgtccggttagtcagtacgcgtgccagcgcaagaccacgctgaataactacaacaaaaagttcaccgacgcgctggagatcatggccgagaactacaaatttaaagagaacctgcaggcgtgtctggaagccaagcgcgccgcgagtatttttaaaagcctgccgttcgaggttaccagcatgaaagacatccaaggtctgccgtgcattaccgacgacgtacgtgacgtgatcgaggagatcatcgaagagggcgagagcagccgtgttaaagaaatcctcaatgacgagcgctacaaggcctttaagcagttcaccagcgtgttcggtgtgggcgtgaaaacctcggaaaagtggtaccgtatgggcctccgtacggttgaagaagcaaaggccagtaagagtctgaagctgagcaagatgcagaaggcgggcttcctgtattacgaggatctggcgagcatggttagtaaagaagaagccgatgccgttacgctcatcgtgaaggaaacggtgcgtacctttgtgccggatgcgctggtgaccatcgccggcggtttccgccgtggcaaacctatgggccacgacgttgactttctgatcacgaacccgggccgcaaaatggatgacgagctgctccacaaagtggttgatctgctcaagaagcaaggtctgctgctgtacgaagacatcaaagagagcacgttcgtggaggggcaactgccaagtcataaaatcgacgccatggacaacttccagaagtgcttcgccattctcaagctgtaccagccgaaggtggataacagtgcggttgggacgagtaagaaaagtgacatggctgaggttaaggattggaaagcggttcgtgtggatctggtgatcacgccattcgagcagttcgcctatgcgctgctcggttggacgggcagcggccaatttcgtcgcgatctgcgtcgctatgcggaggaagagcgcgacatgctgctcgacaaccatgccctctacgacctgaaaaagggcatctttctgagtgcgggcagcgaagaagagattttcgctcatctgggtctggattatgtggagccgtgggaacgcaacgcg

SEQ ID NO: 3318 - protein, 394 aa, synthetic construct
  REGION 1..394: note = Variant of terminal deoxynucleotidyl transferase
MHHHHHHGGSGHPPSNTPEKEVPSVIARPVSQYACQRKTTLNNYNKKFTDALEIMAENYKFKENLQACLEAKRAASIFKSLPFEVTSMKDIQGLPCITDDVRDVIEEIIEEGESSRVKEILNDERYKAFKQFTSVFGVGVKTSEKWYRMGLRTVEEAKASKSLKLSKMQKAGFLYYEDLASMVSKEEADAVTLIVKETVRTFVPDALVTIAGGFRRGKPMGHDVDFLITNPGRKMDDELLHKVVDLLKKQGLLLYEDIKESTFVEGQLPSHKIDAMDNFQKCFAILKLYQPKVDNSAVGTSKKSDMAEVKDWKAVRVDLVITPFEQFAYALLGWTGSGQFRRDLRRYAEEERDMLLDNHALYDLKKGIFLSAGSEEEIFAHLGLDYVEPWERNA

SEQ ID NO: 3319 - DNA, 1182 bp, synthetic construct
  misc_feature 1..1182: note = Variant of terminal deoxynucleotidyl transferase
  source 1..1182: mol_type = other DNA
atgcatcaccaccatcatcatgggggttctggtcatccgccgagcaataccccggagaaggaggtgccgagcgttatcgcccgtccggttagtcagtacgcgtgccagcgcaagaccacgctgaataactacaacaaaaagttcaccgacgcgctggagatcatggccgagaactacaaatttaaagagaacctgcaggcgtgtctggaagccaagcgcgccgcgagtatttttaaaagcctgccgttcgaggttaccagcatgaaagacatccaaggtctgccgtgcattaccgacgacgtacgtgacgtgatcgaggagatcatcgaagagggcgagagcagccgtgttaaagaaatcctcaatgacgagcgctacaaggcctttaagcagttcaccagcgtgttcggtgtgggcgtgaaaacctcggaaaagtggtaccgtatgggcctccgtacggttgaagaagcaaaggccagtaagagtctgaagctgagcaagatgcagaaggcgggcttcctgtattacgaggatctggcgagcatggttagtaaagaagaagccgatgccgttacgctcatcgtgaaggaaacggtgcgtacctttgtgccggatgcgctggtgaccatcgccggcggtttccgccgtggcaaacctatgggccacgacgttgacctgctgatcacgaacccgggccgcaaaatggatgacgagctgctccacaaagtggttgatctgctcaagaagcaaggtctgctgctgtacgaagacatcaaagagagcacgttcgtggaggggcaagttccaagtcataagatcgacgccatggacaacttccagaagtgcttcgccattctcaagctgtaccagccgaaggtggataacagtgcggttgggacgagtaagaaaagtgacatggctgaggttaaggattggaaagcggttcgtgtggatctggtgatcacgccattcgagcagttcgcctatgcgctgctcggttggacgggcagcggccaatttcgtcgcgatctgcgtcgctatgcggaggaagagcgcgacatgctgctcgacaaccatgccctctacgacctgaaaaagcgcatctttctgaaagcgggcagcgaagaagagattttcgcgcatctgggtctggattatgtggagccgtgggaacgcaacgcg

SEQ ID NO: 3320 - protein, 394 aa, synthetic construct
  REGION 1..394: note = Variant of terminal deoxynucleotidyl transferase
MHHHHHHGGSGHPPSNTPEKEVPSVIARPVSQYACQRKTTLNNYNKKFTDALEIMAENYKFKENLQACLEAKRAASIFKSLPFEVTSMKDIQGLPCITDDVRDVIEEIIEEGESSRVKEILNDERYKAFKQFTSVFGVGVKTSEKWYRMGLRTVEEAKASKSLKLSKMQKAGFLYYEDLASMVSKEEADAVTLIVKETVRTFVPDALVTIAGGFRRGKPMGHDVDLLITNPGRKMDDELLHKVVDLLKKQGLLLYEDIKESTFVEGQVPSHKIDAMDNFQKCFAILKLYQPKVDNSAVGTSKKSDMAEVKDWKAVRVDLVITPFEQFAYALLGWTGSGQFRRDLRRYAEEERDMLLDNHALYDLKKRIFLKAGSEEEIFAHLGLDYVEPWERNA

SEQ ID NO: 3321 - DNA, 1182 bp, synthetic construct
  misc_feature 1..1182: note = Variant of terminal deoxynucleotidyl transferase
  source 1..1182: mol_type = other DNA
atgcatcaccaccatcatcatgggggttctggtcatccgccgagcaataccccggagaaggaggtgccgagcgttatcgcccgtccggttagtcagtacgcgtgccagcgcaagaccacgctgaataactacaacaaaaagttcaccgacgcgctggagatcatggccgagaactacaaatttaaagagaacctgcaggcgtgtctggaagccaagcgcgccgcgagtatttttaaaagcctgccgttcgaggttaccagcatgaaagacatccaaggtctgccgtgcattaccgacgacgtacgtgacgtgatcgaggagatcatcgaagagggcgagagcagccgtgttaaagaaatcctcaatgacgagcgctacaaggcctttaagcagttcaccagcgtgttcggtgtgggcgtgaaaacctcggaaaagtggtaccgtatgggcctccgtacggttgaagaagcaaaggccagtaagagtctgaagctgagcaagatgcagaaggcgggcttcctgtattacgaggatctggcgagcatggttagtaaagaagaagccgatgccgttacgctcatcgtgaaggaaacggtgcgtaccgttgtgccggatgcgctggtgaccatcgccggcggtttccgccgtggcaaacctatgggccacgacgttgactttctgatcacgaacccgggcagtaaaatggatgacgagctgctccacaaagtggttgatctgctcaagaagcaaggtctgctgctgtacgaagacatcaaagagagcacgttcgtggaggggcaactgccaagtcataaaatcgacgccatggacaacttccagaagtgcttcgccattctcaagctgtaccagccgaaggtggataacagtgcggttgggacgagtaagaaaagtgacatggctgaggttaaggattggaaagcggttcgtgtggatctggtgatcacgccattcgagcagttcgcctatgcgctgctcggttggacgggcagcggccaatttcgtcgcgatctgcgtcgctatgcggaggaagagcgcgacatgctgctcgacaaccatgccctctacgacctgaaaaagcgcatctttctgaaagcgggcagcgaagaagagattttcgctcatctgggtctggattatgtggagccgtgggaacgcaacgcg

SEQ ID NO: 3322 - protein, 394 aa, synthetic construct
  REGION 1..394: note = Variant of terminal deoxynucleotidyl transferase
MHHHHHHGGSGHPPSNTPEKEVPSVIARPVSQYACQRKTTLNNYNKKFTDALEIMAENYKFKENLQACLEAKRAASIFKSLPFEVTSMKDIQGLPCITDDVRDVIEEIIEEGESSRVKEILNDERYKAFKQFTSVFGVGVKTSEKWYRMGLRTVEEAKASKSLKLSKMQKAGFLYYEDLASMVSKEEADAVTLIVKETVRTVVPDALVTIAGGFRRGKPMGHDVDFLITNPGSKMDDELLHKVVDLLKKQGLLLYEDIKESTFVEGQLPSHKIDAMDNFQKCFAILKLYQPKVDNSAVGTSKKSDMAEVKDWKAVRVDLVITPFEQFAYALLGWTGSGQFRRDLRRYAEEERDMLLDNHALYDLKKRIFLKAGSEEEIFAHLGLDYVEPWERNA

SEQ ID NO: 3323 - DNA, 1182 bp, synthetic construct
  misc_feature 1..1182: note = Variant of terminal deoxynucleotidyl transferase
  source 1..1182: mol_type = other DNA
atgcatcaccaccatcatcatgggggttctggtcatccgccgagcaataccccggagaaggaggtgccgagcgttatcgcccgtccggttagtcagtacgcgtgccagcgcaagaccacgctgaataactacaacaaaaagttcaccgacgcgctggagatcatggccgagaactacaaatttaaagagaacctgcaggcgtgtctggaagccaagcgcgccgcgagtatttttaaaagcctgccgttcgaggttaccagcatgaaagacatccaaggtctgccgtgcattaccgacgacgtacgtgacgtgatcgaggagatcatcgaagagggcgagagcagccgtgttaaagaaatcctcaatgacgagcgctacaaggcctttaagcagttcaccagcgtgttcggtgtgggcgtgaaaacctcggaaaagtggtaccgtatgggcctccgtacggttgaagaagcaaaggccagtaagactctgaagctgagcaagatgcagaaggcgggcttcctgtattacgaggatctggcgagcatggttagtaaagaagaagccgatgccgttacgctcatcgtgaaggaaacggtgcgtacctttgtgccggatgcgctggtgaccatcgccggcggtttccgccgtggcaaacctatgggccacgacgttgactttctgatcacgaacccgggccgcaaaatggatgacgagctgctccacaaagtggttgatctgctcaagaagcaaggtctgctgctgtacgaagacatcaaagagagcacgttcgtggaggggcaactgccaagtcataaaatcgacgccatggacaacttccagaagtgcttcgccattctcaagctgtaccagccgaaggtggataacagtgcggttgggacgagtaagaaaagtgacatggctgaggttaaggattggaaagcggttcgtgtggatctggtgatcacgccattcgagcagttcgcctatgcgctgctcggttggacgggcagcggccaatttcgtcgcgatctgcgtcgctatgcggaggaagagcgcgacatgctgctcgacaaccatgccctctacgacctgaaaaagggcatctttctgagtgcgggcagcgaagaagagattttcgctcatctgggtctggattatgtggagccgtgggaacgcaacgcg

SEQ ID NO: 3324 - protein, 394 aa, synthetic construct
  REGION 1..394: note = Variant of terminal deoxynucleotidyl transferase
MHHHHHHGGSGHPPSNTPEKEVPSVIARPVSQYACQRKTTLNNYNKKFTDALEIMAENYKFKENLQACLEAKRAASIFKSLPFEVTSMKDIQGLPCITDDVRDVIEEIIEEGESSRVKEILNDERYKAFKQFTSVFGVGVKTSEKWYRMGLRTVEEAKASKTLKLSKMQKAGFLYYEDLASMVSKEEADAVTLIVKETVRTFVPDALVTIAGGFRRGKPMGHDVDFLITNPGRKMDDELLHKVVDLLKKQGLLLYEDIKESTFVEGQLPSHKIDAMDNFQKCFAILKLYQPKVDNSAVGTSKKSDMAEVKDWKAVRVDLVITPFEQFAYALLGWTGSGQFRRDLRRYAEEERDMLLDNHALYDLKKGIFLSAGSEEEIFAHLGLDYVEPWERNA

SEQ ID NO: 3325 - DNA, 1182 bp, synthetic construct
  misc_feature 1..1182: note = Variant of terminal deoxynucleotidyl transferase
  source 1..1182: mol_type = other DNA
atgcatcaccaccatcatcatgggggttctggtcatccgccgagcaataccccggagaaggaggtgccgagcgttatcgcccgtccggttagtcagtacgcgtgccagcgcaagaccacgctgaataactacaacaaaaagttcaccgacgcgctggagatcatggccgagaactacaaatttaaagagaacctgcaggcgtgtctggaagccaagcgcgccgcgagtatttttaaaagcctgccgttcgaggttaccagcatgaaagacatccaaggtctgccgtgcattaccgacgacgtacgtgacgtgatcgaggagatcatcgaagagggcgagagcagccgtgttaaagaaatcctcaatgacgagcgctacaaggcctttaagcagttcaccagcgtgttcggtgtgggcgtgaaaacctcggaaaagtggtaccgtatgggcctccgtacggttgaagaagcaaaggccagtaagagtctgaagctgagcaagatgcagaaggcgggcttcctgtattacgaggatctggcgagcatggttagtaaagaagaagccgatgccgttacgctcatcgtgaaggaaacggtgcgtacctttgtgccggatgcgctggtgaccatcgccggcggtttccgccgtggcaaacctatgggccacgacgttgacctgctgatcacgaacccgggccgcaaaatggatgacgagctgctccacaaagtggttgatctgctcaagaagcaaggtctgctgctgtacgaagacatcaaagagagcacgttcgtggaggggcaactgccaagtcataaaatcgacgccatggacaacttccagaagtgcttcgccattctcaagctgtaccagccgaaggtggataacagtgcggttgggacgagtaagaaaagtgacatggctgaggttaaggattggaaagcggttcgtgtggatctggtgtgcacgccattcgagcagttcgcctatgcgctgctcggttggacgggcagcggccaatttcgtcgcgatctgcgtcgctatgcggaggaagagcgcgacatgctgctcgacaaccatgccctctacgacctgaaaaaacgcatctatctgaaagcgggcagcgaagaagagattttcgcgcatctgggtctggattatgtggagccgtgggaacgcaacgcg

SEQ ID NO: 3326 - protein, 394 aa, synthetic construct
  REGION 1..394: note = Variant of terminal deoxynucleotidyl transferase
MHHHHHHGGSGHPPSNTPEKEVPSVIARPVSQYACQRKTTLNNYNKKFTDALEIMAENYKFKENLQACLEAKRAASIFKSLPFEVTSMKDIQGLPCITDDVRDVIEEIIEEGESSRVKEILNDERYKAFKQFTSVFGVGVKTSEKWYRMGLRTVEEAKASKSLKLSKMQKAGFLYYEDLASMVSKEEADAVTLIVKETVRTFVPDALVTIAGGFRRGKPMGHDVDLLITNPGRKMDDELLHKVVDLLKKQGLLLYEDIKESTFVEGQLPSHKIDAMDNFQKCFAILKLYQPKVDNSAVGTSKKSDMAEVKDWKAVRVDLVCTPFEQFAYALLGWTGSGQFRRDLRRYAEEERDMLLDNHALYDLKKRIYLKAGSEEEIFAHLGLDYVEPWERNA

SEQ ID NO: 3327 - DNA, 1182 bp, synthetic construct
  misc_feature 1..1182: note = Variant of terminal deoxynucleotidyl transferase
  source 1..1182: mol_type = other DNA
atgcatcaccaccatcatcatgggggttctggtcatccgccgagcaataccccggagaaggaggtgccgagcgttatcgcccgtccggttagtcagtacgcgtgccagcgcaagaccacgctgaataactacaacaaaaagttcaccgacgcgctggagatcatggccgagaactacaaatttaaagagaacctgcaggcgtgtctggaagccaagcgcgccgcgagtatttttaaaagcctgccgttcgaggttaccagcatgaaagacatccaaggtctgccgtgcattaccgacgacgtacgtgacgtgatcgaggagatcatcgaagagggcgagagcagccgtgttaaagaaatcctcaatgacgagcgctacaaggcctttaagcagttcaccagcgtgttcggtgtgggcgtgaaaacctcggaaaagtggtaccgtatgggcctccgtacggttgaagaagcaaaggccagtaagagtctgaagctgagcaagatgcagaaggcgggcttcctgtattacgaggatctggcgagcatggttagtaaagaagaagccgatgccgttacgctcatcgtgaaggaaacggtgcgtacctttgtgccggatgcggccgtgaccatcgccggcggtttccgccgtggcaaacctatgggccacgacgttgactttctgatcacgaacccgggccgtaaagaagatgacgagctgctccacaaagtggttgatctgctcaagaagcaaggtctgctgctgtacgaagacatcaaagagagcacgttcgtggaggggcaactgccaagtcataagatcgacgccatggacaacttccagaagtgcttcgccattctcaagctgtaccagccgaaggtggataacagtgcggttgggacgagtaagaaaagtgacatggctgaggttaaggattggaaagcggttcgtgtggatctggtgatcacgccattcgagcagtacgcctatgctctgctcggttggacgggcagcggccaatttcgtcgcgatctgcgtcgctatgcggaggaagagcgcgacatgctgctcgacaaccatcgtctctacgacctgaaaaagcgcatctttctgagtgcgggcagcgaagaagagattttcgctcatctgggtctggattatgtggagccgtgggaacgcaacgcg

SEQ ID NO: 3328 - protein, 394 aa, synthetic construct
  REGION 1..394: note = Variant of terminal deoxynucleotidyl transferase
MHHHHHHGGSGHPPSNTPEKEVPSVIARPVSQYACQRKTTLNNYNKKFTDALEIMAENYKFKENLQACLEAKRAASIFKSLPFEVTSMKDIQGLPCITDDVRDVIEEIIEEGESSRVKEILNDERYKAFKQFTSVFGVGVKTSEKWYRMGLRTVEEAKASKSLKLSKMQKAGFLYYEDLASMVSKEEADAVTLIVKETVRTFVPDAAVTIAGGFRRGKPMGHDVDFLITNPGRKEDDELLHKVVDLLKKQGLLLYEDIKESTFVEGQLPSHKIDAMDNFQKCFAILKLYQPKVDNSAVGTSKKSDMAEVKDWKAVRVDLVITPFEQYAYALLGWTGSGQFRRDLRRYAEEERDMLLDNHRLYDLKKRIFLSAGSEEEIFAHLGLDYVEPWERNA

SEQ ID NO: 3329 - DNA, 1182 bp, synthetic construct
  misc_feature 1..1182: note = Variant of terminal deoxynucleotidyl transferase
  source 1..1182: mol_type = other DNA
atgcatcaccaccatcatcatgggggttctggtcatccgccgagcaataccccggagaaggaggtgccgagcgttatcgcccgtccggttagtcagtacgcgtgccagcgcaagaccacgctgaataactacaacaaaaagttcaccgacgcgctggagatcatggccgagaactacaaatttaaagagaacctgcaggcgtgtctggaagccaagcgcgccgcgagtatttttaaaagcctgccgttcgaggttaccagcatgaaagacatccaaggtctgccgtgcattaccgacgacgtacgtgacgtgatcgaggagatcatcgaagagggcgagagcagccgtgttaaagaaatcctcaatgacgagcgctacaaggcctttaagcagttcaccagcgtgttcggtgtgggcgtgaaaacctcggaaaagtggtaccgtatgggcctccgtacggttgaagaagcaaaggccagtaagagtctgaagctgagcaagatgcagaaggcgggcttcctgtattacgaggatctggcgagcatggttagtaaagaagaagccgatgccgttacgctcatcgtgaaggaaacggtgcgtggtgttgtgccggatgcgctggtgaccatcgccggcggtttccgccgtggcaaacctatgggccacgacgttgactttctgatcacgaacccgggccgcaaaatggatgacgagctgctccacaaagtggttgatctgctcaagaagcaaggtctgctgctgtacgaagacatcaaagagagcacgttcgtggaggggcaactgccaagtcataaaatcgacgccatggacaacttccagaagtgcttcgccattctcaagctgtaccagccgaaggtggataacagtgcggttgggacgagtaagaaaagtgacatggctgaggttaaggattggaaagcggttcgtgtggatctggtgatcacgccattcgagcagttcgcctatgcgctgctcggttggacgggcagcggccaatttcgtcgcgatctgcgtcgctatgcggaggaagagcgcgacatgctgctcgacaaccatgcactctacgacctgaaaaagcgcatctttctgaaagcgggcagcgaagaagagattttcgcgcatctgggtctggattatgtggagccgtgggaacgcaacgcg

SEQ ID NO: 3330 - protein, 394 aa, synthetic construct
  REGION 1..394: note = Variant of terminal deoxynucleotidyl transferase
MHHHHHHGGSGHPPSNTPEKEVPSVIARPVSQYACQRKTTLNNYNKKFTDALEIMAENYKFKENLQACLEAKRAASIFKSLPFEVTSMKDIQGLPCITDDVRDVIEEIIEEGESSRVKEILNDERYKAFKQFTSVFGVGVKTSEKWYRMGLRTVEEAKASKSLKLSKMQKAGFLYYEDLASMVSKEEADAVTLIVKETVRGVVPDALVTIAGGFRRGKPMGHDVDFLITNPGRKMDDELLHKVVDLLKKQGLLLYEDIKESTFVEGQLPSHKIDAMDNFQKCFAILKLYQPKVDNSAVGTSKKSDMAEVKDWKAVRVDLVITPFEQFAYALLGWTGSGQFRRDLRRYAEEERDMLLDNHALYDLKKRIFLKAGSEEEIFAHLGLDYVEPWERNA

SEQ ID NO: 3331 - DNA, 1182 bp, synthetic construct
  misc_feature 1..1182: note = Variant of terminal deoxynucleotidyl transferase
  source 1..1182: mol_type = other DNA
atgcatcaccaccatcatcatgggggttctggtcatccgccgagcaataccccggagaaggaggtgccgagcgttatcgcccgtccggttagtcagtacgcgtgccagcgcaagaccacgctgaataactacaacaaaaagttcaccgacgcgctggagatcatggccgagaactacaaatttaaagagaacctgcaggcgtgtctggaagccaagcgcgccgcgagtatttttaaaagcctgccgttcgaggttaccagcatgaaagacatccaaggtctgccgtgcattaccgacgacgtacgtgacgtgatcgaggagatcatcgaacgtggcgagagcagccgtgttaaagaaatcctcaatgacgagcgctacaaggcctttaagcagttcaccagcgtgttcggtgtgggcgtgaaaacctcggaaaagtggtaccgtatgggcctccgtacggttgaagaagcaaaggccagtaagagtctgaagctgagcaagatgcagaaggcgggcttcctgtattacgaggatctggcgagcatggttagtaaagaagaagccgatgccgttacgctcatcgtgaaggaaacggtgcgtacctttgtgccggatgcgctggtgaccatcgccggcggtttccgccgtggcaaacctatgggccacgacgttgacctgctgatcacgaacccgggccgcaaaatggatgacgagctgctccacaaagtggttgatctgctcaagaagcaaggtctgctgctgtacgaagacatcaaagagagcacgttcgtggaggggcaactgccaagtcataagatcgacgccatggacaacttccagaagtgcttcgccattctcaagctgtaccagccgaaggtggataacagtgcggttgggacgagtaagaaaagtgacatggctgaggttaaggattggaaagcggttcgtgtggatctggtgattacgccattcgagcagttcgcctatgcgctgctcggttggacgggcagcggccaatttcgtcgcgatctgcgtcgctatgcggaggaagagcgcgacatgctgctcgacaaccatgccctctacgacctgaaaaaacgcatctttctgaaagcgggcagcgaagaagagattttcgcgcatctgggtctggattatgtggagccgtgggaacgcaacgcg

SEQ ID NO: 3332 - protein, 394 aa, synthetic construct
  REGION 1..394: note = Variant of terminal deoxynucleotidyl transferase
MHHHHHHGGSGHPPSNTPEKEVPSVIARPVSQYACQRKTTLNNYNKKFTDALEIMAENYKFKENLQACLEAKRAASIFKSLPFEVTSMKDIQGLPCITDDVRDVIEEIIERGESSRVKEILNDERYKAFKQFTSVFGVGVKTSEKWYRMGLRTVEEAKASKSLKLSKMQKAGFLYYEDLASMVSKEEADAVTLIVKETVRTFVPDALVTIAGGFRRGKPMGHDVDLLITNPGRKMDDELLHKVVDLLKKQGLLLYEDIKESTFVEGQLPSHKIDAMDNFQKCFAILKLYQPKVDNSAVGTSKKSDMAEVKDWKAVRVDLVITPFEQFAYALLGWTGSGQFRRDLRRYAEEERDMLLDNHALYDLKKRIFLKAGSEEEIFAHLGLDYVEPWERNA

SEQ ID NO: 3333 - DNA, 1182 bp, synthetic construct
  misc_feature 1..1182: note = Variant of terminal deoxynucleotidyl transferase
  source 1..1182: mol_type = other DNA
atgcatcaccaccatcatcatgggggttctggtcatccgccgagcaataccccggagaaggaggtgccgagcgttatcgcccgtccggttagtcagtacgcgtgccagcgcaagaccacgctgaataactacaacaaaaagttcaccgacgcgctggagatcatggccgagaactacaaatttaaagagaacctgcaggcgtgtctggaagccaagcgcgccgcgagtatttttaaaagcctgccgttcgaggttaccagcatgaaagacatccaaggtctgccgtgcattaccgacgacgtacgtgacgtgatcgaggagatcatcgaagagggcgagagcagccgtgttaaagaaatcctcaatgacgagcgctacaaggcctttaagcagttcaccagcgtgttcggtgtgggcgtgaaaacctcggaaaagtggtaccgtatgggcctccgtacggttgaagaagcaaaggccagtaagagtctgaagctgagcaagatgcagaaggcgggcttcctgtattacgaggatctggcgagcggggttagtaaagaagaagccgatgccgttacgctcatcgtgaaggaaacggtgcgtactgttgttccggatgcgctggtgaccatcgccggcggtttccgccgtggcaaacctatgggccacgacgttgacctgctgatcacgaacccgggccgtaaaacggatgacgagctgctccacaaagtggttgatctgctcaagaagcaaggtctgctgctgtacgaagacatcaaagagagcacgttcgtggaggggcaagttccaagtcataaaatcgacgccatggacaacttccagaagtgcttcgccattctcaagctgtaccagccgaaggtggataacagtgcggttgggacgagtaagaaaagtgacatggctgaggttaaggattggaaagcggttcgtgtggatctggtgatcacgccattcgagcagttcgcctatgcgctgctcggttggacgggcagcggccaatttcgtcgcgatctgcgtatctatgcggaggaagagcgcgacatgctgctcgacaaccatcgtctctacgacctgaaaaagggcatctttctgagtgcgggcagcgaagaagagattttcgcgcatctgggtctggattatgtggagccgtgggaacgcaacgcg

SEQ ID NO: 3334 - protein, 394 aa, synthetic construct
  REGION 1..394: note = Variant of terminal deoxynucleotidyl transferase
MHHHHHHGGSGHPPSNTPEKEVPSVIARPVSQYACQRKTTLNNYNKKFTDALEIMAENYKFKENLQACLEAKRAASIFKSLPFEVTSMKDIQGLPCITDDVRDVIEEIIEEGESSRVKEILNDERYKAFKQFTSVFGVGVKTSEKWYRMGLRTVEEAKASKSLKLSKMQKAGFLYYEDLASGVSKEEADAVTLIVKETVRTVVPDALVTIAGGFRRGKPMGHDVDLLITNPGRKTDDELLHKVVDLLKKQGLLLYEDIKESTFVEGQVPSHKIDAMDNFQKCFAILKLYQPKVDNSAVGTSKKSDMAEVKDWKAVRVDLVITPFEQFAYALLGWTGSGQFRRDLRIYAEEERDMLLDNHRLYDLKKGIFLSAGSEEEIFAHLGLDYVEPWERNA

SEQ ID NO: 3335 - DNA, 1182 bp, synthetic construct
  misc_feature 1..1182: note = Variant of terminal deoxynucleotidyl transferase
  source 1..1182: mol_type = other DNA
atgcatcaccaccatcatcatgggggttctggtcatccgccgagcaataccccggagaaggaggtgccgagcgttatcgcccgtccggttagtcagtacgcgtgccagcgcaagaccacgctgaataactacaacaaaaagttcaccgacgcgctggagatcatggccgagaactacaaatttaaagagaacctgcaggcgtgtctggaagccaagcgcgccgcgagtatttttaaaagcctgccgttcgaggttaccagcatgaaagacatccaaggtctgccgtgcattaccgacgacgtacgtgacgtgatcgaggagatcatcgaagagggcgagagcagccgtgttaaagaaatcctcaatgacgagcgctacaaggcctttaagcagttcaccagcgtgttcggtgtgggcgtgaaaacctcggaaaagtggtaccgtatgggcctccgtacggttgaagaagcaaaggccagtaagagtctgaagctgagcaagatgcagaaggcgggcttcctgtattacgaggatctggcgagcggggttagtaaagaagaagccgatgccgttacgctcatcgtgaaggaaacggtgcgtcgcgttgctccggatgcgctggtgaccatcgccggcggtttccgccgtggcaaacctatgggccacgacgttgacctgctgatcacgaacccgggccgtaaaacggatgacgagctgctccacaaagtggttgatctgctcaagaagcaaggtctgctgctgtacgaagacatcaaagagagcacgttcgtggaggggcaactgccaagtcataaaatcgacgccatggacaacttccagaagtgcttcgccattctcaagctgtaccagccgaaggtggataacagtgcggttgggacgagtaagaaaagtgacatggctgaggttaaggattggaaagcggttcgtgtggatctggtgatcacgccattcgagcagttcgcctatgcgctgctcggttggacgggcagcggccaatttcgtcgcgatctgcgtatctatgcggaggaagagcgcgacatgctgctcgacaaccatcgtctctacgacctgaaaaagggcatctttctgagtgcgggcagcgaagaagagattttcgcgcatctgggtctggattatgtggagccgtgggaacgcaacgcg

SEQ ID NO: 3336 - protein, 394 aa, synthetic construct
  REGION 1..394: note = Variant of terminal deoxynucleotidyl transferase
MHHHHHHGGSGHPPSNTPEKEVPSVIARPVSQYACQRKTTLNNYNKKFTDALEIMAENYKFKENLQACLEAKRAASIFKSLPFEVTSMKDIQGLPCITDDVRDVIEEIIEEGESSRVKEILNDERYKAFKQFTSVFGVGVKTSEKWYRMGLRTVEEAKASKSLKLSKMQKAGFLYYEDLASGVSKEEADAVTLIVKETVRRVAPDALVTIAGGFRRGKPMGHDVDLLITNPGRKTDDELLHKVVDLLKKQGLLLYEDIKESTFVEGQLPSHKIDAMDNFQKCFAILKLYQPKVDNSAVGTSKKSDMAEVKDWKAVRVDLVITPFEQFAYALLGWTGSGQFRRDLRIYAEEERDMLLDNHRLYDLKKGIFLSAGSEEEIFAHLGLDYVEPWERNA

SEQ ID NO: 3337 - DNA, 1182 bp, synthetic construct
  misc_feature 1..1182: note = Variant of terminal deoxynucleotidyl transferase
  source 1..1182: mol_type = other DNA
atgcatcaccaccatcatcatgggggttctggtcatccgccgagcaataccccggagaaggaggtgccgagcgttatcgcccgtccggttagtcagtacgcgtgccagcgcaagaccacgctgaataactacaacaaaaagttcaccgacgcgctggagatcatggccgagaactacaaatttaaagagaacctgcaggcgtgtctggaagccaagcgcgccgcgagtatttttaaaagcctgccgttcgaggttaccagcatgaaagacatccaaggtctgccgtgcattaccgacgacgtacgtgacgtgatcgaggagatcatcgaagagggcgagagcagccgtgttaaagaaatcctcaatgacgagcgctacaaggcctttaagcagttcaccagcgtgttcggtgtgggcgtgaaaacctcggaaaagtggtaccgtatgggcctccgtacggttgaagaagcaaaggccagtaagagtctgaagctgagcaagatgcagaaggcgggcttcctgtattacgaggatctggcgagcggggttagtaaagaagaagccgatgccgttacgctcatcgtgaaggaaacggtgcgtcgcgttgttccggatgcgctggtgaccatcgccggcggtttccgccgtggcaaacctatgggccacgacgttgacctgctgatcacgaacccgggccgtaaagaggatgacgagctgctccacaaagtggttgatctgctcaagaagcaaggtctgctgctgtacgaagacatcaaagagagcacgttcgtggaggggcaagttccaagtcataaaatcgacgccatggacaacttccagaagtgcttcgccattctcaagctgtaccagccgaaggtggataacagtgcggttgggacgagtaagaaaagtgacatggctgaggttaaggattggaaagcggttcgtgtggatctggtgatcacgccattcgagcagttcgcctatgcgctgctcggttggacgggcagcggccaatttcgtcgcgatctgcgtatctatgcggaggaagagcgcgacatgctgctcgacaaccatcgtctctacgacctgaaaaagggcatctttctgagtgcgggcagcgaagaagagattttcgcgcatctgggtctggattatgtggagccgtgggaacgcaacgcg

SEQ ID NO: 3338 - protein, 394 aa, synthetic construct
  REGION 1..394: note = Variant of terminal deoxynucleotidyl transferase
MHHHHHHGGSGHPPSNTPEKEVPSVIARPVSQYACQRKTTLNNYNKKFTDALEIMAENYKFKENLQACLEAKRAASIFKSLPFEVTSMKDIQGLPCITDDVRDVIEEIIEEGESSRVKEILNDERYKAFKQFTSVFGVGVKTSEKWYRMGLRTVEEAKASKSLKLSKMQKAGFLYYEDLASGVSKEEADAVTLIVKETVRRVVPDALVTIAGGFRRGKPMGHDVDLLITNPGRKEDDELLHKVVDLLKKQGLLLYEDIKESTFVEGQVPSHKIDAMDNFQKCFAILKLYQPKVDNSAVGTSKKSDMAEVKDWKAVRVDLVITPFEQFAYALLGWTGSGQFRRDLRIYAEEERDMLLDNHRLYDLKKGIFLSAGSEEEIFAHLGLDYVEPWERNA

SEQ ID NO: 3339 - DNA, 1182 bp, synthetic construct
  misc_feature 1..1182: note = Variant of terminal deoxynucleotidyl transferase
  source 1..1182: mol_type = other DNA
atgcatcaccaccatcatcatgggggttctggtcatccgccgagcaataccccggagaaggaggtgccgagcgttatcgcccgtccggttagtcagtacgcgtgccagcgcaagaccacgctgaataactacaacaaaaagttcaccgacgcgctggagatcatggccgagaactacaaatttaaagagaacctgcaggcgtgtctggaagccaagcgcgccgcgagtatttttaaaagcctgccgttcgaggttaccagcatgaaagacatccaaggtctgccgtgcattaccgacgacgtacgtgacgtgatcgaggagatcatcgaagagggcgagagcagccgtgttaaagaaatcctcaatgacgagcgctacaaggcctttaagcagttcaccagcgtgttcggtgtgggcgtgaaaacctcggaaaagtggtaccgtatgggcctccgtacggttgaagaagcaaaggccagtaagagtctgaagctgagcaagatgcagaaggcgggcttcctgtattacgaggatctggcgagcggggttagtaaagaagaagccgatgccgttacgctcatcgtgaaggaaacggtgcgtcgcgttgttccggatgcgctggtgaccatcgccggcggtttccgccgtggcaaacctatgggccacgacgttgacctgctgatcacgaacccgggccgtaaaacggatgacgagctgctccacaaagtggttgatctgctcaagaagcaaggtctgctgctgtacgaagacatcaaagagagcacgttcgtggaggggcaactgccaagtcataaaatcgacgccatggacaacttccagaagtgcttcgccattctcaagctgtaccagccgaaggtggataacagtgcggttgggacgagtaagaaaagtgacatggctgaggttaaggattggaaagcggttcgtgtggatctggtgatcacgccattcgagcagttcgcctatgcgctgctcggttggacgggcagcggccaatttcgtcgcgatctgcgtatctatgcggaggaagagcgcgacatgctgctcgacaaccatcgtctctacgacctgaaaaagggcatctttctgagtgcgggcagcgaagaagagattttcgcgcatctgggtctggattatgtggagccgtgggaacgcaacgcg

SEQ ID NO: 3340 - protein, 394 aa, synthetic construct
  REGION 1..394: note = Variant of terminal deoxynucleotidyl transferase
MHHHHHHGGSGHPPSNTPEKEVPSVIARPVSQYACQRKTTLNNYNKKFTDALEIMAENYKFKENLQACLEAKRAASIFKSLPFEVTSMKDIQGLPCITDDVRDVIEEIIEEGESSRVKEILNDERYKAFKQFTSVFGVGVKTSEKWYRMGLRTVEEAKASKSLKLSKMQKAGFLYYEDLASGVSKEEADAVTLIVKETVRRVVPDALVTIAGGFRRGKPMGHDVDLLITNPGRKTDDELLHKVVDLLKKQGLLLYEDIKESTFVEGQLPSHKIDAMDNFQKCFAILKLYQPKVDNSAVGTSKKSDMAEVKDWKAVRVDLVITPFEQFAYALLGWTGSGQFRRDLRIYAEEERDMLLDNHRLYDLKKGIFLSAGSEEEIFAHLGLDYVEPWERNA

SEQ ID NO: 3341 - DNA, 1182 bp, synthetic construct
  misc_feature 1..1182: note = Variant of terminal deoxynucleotidyl transferase
  source 1..1182: mol_type = other DNA
atgcatcaccaccatcatcatgggggttctggtcatccgccgagcaataccccggagaaggaggtgccgagcgttatcgcccgtccggttagtcagtacgcgtgccagcgcaagaccacgctgaataactacaacaaaaagttcaccgacgcgctggagatcatggccgagaactacaaatttaaagagaacctgcaggcgtgtctggaagccaagcgcgccgcgagtatttttaaaagcctgccgttcgaggttaccagcatgaaagacatccaaggtctgccgtgcattaccgacgacgtacgtgacgtgatcgaggagatcatcgaagagggcgagagcagccgtgttaaagaaatcctcaatgacgagcgctacaaggcctttaagcagttcaccagcgtgttcggtgtgggcgtgaaaacctcggaaaagtggtaccgtatgggcctccgtacggttgaagaagcaaaggccagtaagagtctgaagctgagcaagatgcagaaggcgggcttcctgtattacgaggatctggcgagcggggttagtaaagaagaagccgatgccgttacgctcatcgtgaaggaaacggtgcgtcgcgttgctccggatgcgctggtgaccatcgccggcggtttccgccgtggcaaacctatgggccacgacgttgactttctgatcacgaacccgggccgtaaagaagatgacgagctgctccacaaagtggttgatctgctcaagaagcaaggtctgctgctgtacgaagacatcaaagagagcacgttcgtggaggggcaaattccaagtcataaaatcgacgccatggacaacttccagaagtgcttcgccattctcaagctgtaccagccgaaggtggataacagtgcggttgggacgagtaagaaaagtgacatggctgaggttaaggattggaaagcggttcgtgtggatctggtgatcacgccattcgagcagttcgcctatgcgctgctcggttggacgggcagcggccaatttcgtcgcgatctgcgtatctatgcggaggaagagcgcgacatgctgctcgacaaccatcgtctctacgacctgaaaaagggcatctttctgagtgcgggcagcgaagaagagattttcgcgcatctgggtctggattatgtggagccgtgggaacgcaacgcg

SEQ ID NO: 3342 - protein, 394 aa, synthetic construct
  REGION 1..394: note = Variant of terminal deoxynucleotidyl transferase
MHHHHHHGGSGHPPSNTPEKEVPSVIARPVSQYACQRKTTLNNYNKKFTDALEIMAENYKFKENLQACLEAKRAASIFKSLPFEVTSMKDIQGLPCITDDVRDVIEEIIEEGESSRVKEILNDERYKAFKQFTSVFGVGVKTSEKWYRMGLRTVEEAKASKSLKLSKMQKAGFLYYEDLASGVSKEEADAVTLIVKETVRRVAPDALVTIAGGFRRGKPMGHDVDFLITNPGRKEDDELLHKVVDLLKKQGLLLYEDIKESTFVEGQIPSHKIDAMDNFQKCFAILKLYQPKVDNSAVGTSKKSDMAEVKDWKAVRVDLVITPFEQFAYALLGWTGSGQFRRDLRIYAEEERDMLLDNHRLYDLKKGIFLSAGSEEEIFAHLGLDYVEPWERNA

SEQ ID NO: 3343 - DNA, 1182 bp, synthetic construct
  misc_feature 1..1182: note = Variant of terminal deoxynucleotidyl transferase
  source 1..1182: mol_type = other DNA
atgcatcaccaccatcatcatgggggttctggtcatccgccgagcaataccccggagaaggaggtgccgagcgttatcgcccgtccggttagtcagtacgcgtgccagcgcaagaccacgctgaataactacaacaaaaagttcaccgacgcgctggagatcatggccgagaactacaaatttaaagagaacctgcaggcgtgtctggaagccaagcgcgccgcgagtatttttaaaagcctgccgttcgaggttaccagcatgaaagacatccaaggtctgccgtgcattaccgacgacgtacgtgacgtgatcgaggagatcatcgaagagggcgagagcagccgtgttaaagaaatcctcaatgacgagcgctacaaggcctttaagcagttcaccagcgtgttcggtgtgggcgtgaaaacctcggaaaagtggtaccgtatgggcctccgtacggttgaagaagcaaaggccagtaagagtctgaagctgagcaagatgcagaaggcgggcttcctgtattacgaggatctggcgagcggggttagtaaagaagaagccgatgccgttacgctcatcgtgaaggaaacggtgcgtactgttgttccggatgcgctggtgaccatcgccggcggtttccgccgtggcaaacctatgggccacgacgttgacctgctgatcacgaacccgggccgtaaaacggatgacgagctgctccacaaagtggttgatctgctcaagaagcaaggtctgctgctgtacgaagacatcaaagagagcacgttcgtggaggggcaactgccaagtcataaaatcgacgccatggacaacttccagaagtgcttcgccattctcaagctgtaccagccgaaggtggataacagtgcggttgggacgagtaagaaaagtgacatggctgaggttaaggattggaaagcggttcgtgtggatctggtgatcacgccattcgagcagttcgcctatgcgctgctcggttggacgggcagcggccaatttcgtcgcgatctgcgtatctatgcggaggaagagcgcgacatgctgctcgacaaccatcgtctctacgacctgaaaaagggcatctttctgagtgcgggcagcgaagaagagattttcgcgcatctgggtctggattatgtggagccgtgggaacgcaacgcg

SEQ ID NO: 3344 - protein, 394 aa, synthetic construct
  REGION 1..394: note = Variant of terminal deoxynucleotidyl transferase
MHHHHHHGGSGHPPSNTPEKEVPSVIARPVSQYACQRKTTLNNYNKKFTDALEIMAENYKFKENLQACLEAKRAASIFKSLPFEVTSMKDIQGLPCITDDVRDVIEEIIEEGESSRVKEILNDERYKAFKQFTSVFGVGVKTSEKWYRMGLRTVEEAKASKSLKLSKMQKAGFLYYEDLASGVSKEEADAVTLIVKETVRTVVPDALVTIAGGFRRGKPMGHDVDLLITNPGRKTDDELLHKVVDLLKKQGLLLYEDIKESTFVEGQLPSHKIDAMDNFQKCFAILKLYQPKVDNSAVGTSKKSDMAEVKDWKAVRVDLVITPFEQFAYALLGWTGSGQFRRDLRIYAEEERDMLLDNHRLYDLKKGIFLSAGSEEEIFAHLGLDYVEPWERNA

SEQ ID NO: 3345 - DNA, 1182 bp, synthetic construct
  misc_feature 1..1182: note = Variant of terminal deoxynucleotidyl transferase
  source 1..1182: mol_type = other DNA
atgcatcaccaccatcatcatgggggttctggtcatccgccgagcaataccccggagaaggaggtgccgagcgttatcgcccgtccggttagtcagtacgcgtgccagcgcaagaccacgctgaataactacaacaaaaagttcaccgacgcgctggagatcatggccgagaactacaaatttaaagagaacctgcaggcgtgtctggaagccaagcgcgccgcgagtatttttaaaagcctgccgttcgaggttaccagcatgaaagacatccaaggtctgccgtgcattaccgacgacgtacgtgacgtgatcgaggagatcatcgaagagggcgagagcagccgtgttaaagaaatcctcaatgacgagcgctacaaggcctttaagcagttcaccagcgtgttcggtgtgggcgtgaaaacctcggaaaagtggtaccgtatgggcctccgtacggttgaagaagcaaaggccagtaagagtctgaagctgagcaagatgcagaaggcgggcttcctgtattacgaggatctggcgagcggggttagtaaagaagaagccgatgccgttacgctcatcgtgaaggaaacggtgcgtcgcgttgctccggatgcgctggtgaccatcgccggcggtttccgccgtggcaaacctatgggccacgacgttgacctgctgatcacgaacccgggccgtaaaacggatgacgagctgctccacaaagtggttgatctgctcaagaagcaaggtctgctgctgtacgaagacatcaaagagagcacgttcgtggaggggcaactgccaagtcataaaatcgacgccatggacaacttccagaagtgcttcgccattctcaagctgtaccagccgaaggtggataacagtgcggttgggacgagtaagaaaagtgacatggctgaggttaaggattggaaagcggttcgtgtggatctggtgatcacgccattcgagcagttcgcctatgcgctgctcggttggacgggcagcggccaatttcgtcgcgatctgcgtcgctatgcggaggaagagcgcgacatgctgctcgacaaccatcgtctctacgacctgaaaaagggcatctttctgagtgcgggcagcgaagaagagattttcgcgcatctgggtctggattatgtggagccgtgggaacgcaacgcg

SEQ ID NO: 3346 - protein, 394 aa, synthetic construct
  REGION 1..394: note = Variant of terminal deoxynucleotidyl transferase
MHHHHHHGGSGHPPSNTPEKEVPSVIARPVSQYACQRKTTLNNYNKKFTDALEIMAENYKFKENLQACLEAKRAASIFKSLPFEVTSMKDIQGLPCITDDVRDVIEEIIEEGESSRVKEILNDERYKAFKQFTSVFGVGVKTSEKWYRMGLRTVEEAKASKSLKLSKMQKAGFLYYEDLASGVSKEEADAVTLIVKETVRRVAPDALVTIAGGFRRGKPMGHDVDLLITNPGRKTDDELLHKVVDLLKKQGLLLYEDIKESTFVEGQLPSHKIDAMDNFQKCFAILKLYQPKVDNSAVGTSKKSDMAEVKDWKAVRVDLVITPFEQFAYALLGWTGSGQFRRDLRRYAEEERDMLLDNHRLYDLKKGIFLSAGSEEEIFAHLGLDYVEPWERNA

SEQ ID NO: 3347 - DNA, 1182 bp, synthetic construct
  misc_feature 1..1182: note = Variant of terminal deoxynucleotidyl transferase
  source 1..1182: mol_type = other DNA
atgcatcaccaccatcatcatgggggttctggtcatccgccgagcaataccccggagaaggaggtgccgagcgttatcgcccgtccggttagtcagtacgcgtgccagcgcaagaccacgctgaataactacaacaaaaagttcaccgacgcgctggagatcatggccgagaactacaaatttaaagagaacctgcaggcgtgtctggaagccaagcgcgccgcgagtatttttaaaagcctgccgttcgaggttaccagcatgaaagacatccaaggtctgccgtgcattaccgacgacgtacgtgacgtgatcgaggagatcatcgaagagggcgagagcagccgtgttaaagaaatcctcaatgacgagcgctacaaggcctttaagcagttcaccagcgtgttcggtgtgggcgtgaaaacctcggaaaagtggtaccgtatgggcctccgtacggttgaagaagcaaaggccagtaagagtctgaagctgagcaagatgcagaaggcgggcttcctgtattacgaggatctggcgagcggggttagtaaagaagaagccgatgccgttacgctcatcgtgaaggaaacggtgcgtcgcgttgctccggatgcgctggtgaccatcgccggcggtttccgccgtggcaaacctatgggccacgacgttgacctgctgatcacgaacccgggccgtcgcacggatgacgagctgctccacaaagtggttgatctgctcaagaagcaaggtctgctgctgtacgaagacatcaaagagagcacgttcgtggaggggcaactgccaagtcataaaatcgacgccatggacaacttccagaagtgcttcgccattctcaagctgtaccagccgaaggtggataacagtgcggttgggacgagtaagaaaagtgacatggctgaggttaaggattggaaagcggttcgtgtggatctggtgatcacgccattcgagcagttcgcctatgcgctgctcggttggacgggcagcggccaatttcgtcgcgatctgcgtatctatgcggaggaagagcgcgacatgctgctcgacaaccatcgtctctacgacctgaaaaagggcatctttctgagtgcgggcagcgaagaagagattttcgcgcatctgggtctggattatgtggagccgtgggaacgcaacgcg

SEQ ID NO: 3348 - protein, 394 aa, synthetic construct
  REGION 1..394: note = Variant of terminal deoxynucleotidyl transferase
MHHHHHHGGSGHPPSNTPEKEVPSVIARPVSQYACQRKTTLNNYNKKFTDALEIMAENYKFKENLQACLEAKRAASIFKSLPFEVTSMKDIQGLPCITDDVRDVIEEIIEEGESSRVKEILNDERYKAFKQFTSVFGVGVKTSEKWYRMGLRTVEEAKASKSLKLSKMQKAGFLYYEDLASGVSKEEADAVTLIVKETVRRVAPDALVTIAGGFRRGKPMGHDVDLLITNPGRRTDDELLHKVVDLLKKQGLLLYEDIKESTFVEGQLPSHKIDAMDNFQKCFAILKLYQPKVDNSAVGTSKKSDMAEVKDWKAVRVDLVITPFEQFAYALLGWTGSGQFRRDLRIYAEEERDMLLDNHRLYDLKKGIFLSAGSEEEIFAHLGLDYVEPWERNA

SEQ ID NO: 3349 - DNA, 1182 bp, synthetic construct
  misc_feature 1..1182: note = Variant of terminal deoxynucleotidyl transferase
  source 1..1182: mol_type = other DNA
atgcatcaccaccatcatcatgggggttctggtcatccgccgagcaataccccggagaaggaggtgccgagcgttatcgcccgtccggttagtcagtacgcgtgccagcgcaagaccacgctgaataactacaacaaaaagttcaccgacgcgctggagatcatggccgagaactacaaatttaaagagaacctgcaggcgtgtctggaagccaagcgcgccgcgagtatttttaaaagcctgccgttcgaggttaccagcatgaaagacatccaaggtctgccgtgcattaccgacgacgtacgtgacgtgatcgaggagatcatcgaagagggcgagagcagccgtgttaaagaaatcctcaatgacgagcgctacaaggcctttaagcagttcaccagcgtgttcggtgtgggcgtgaaaacctcggaaaagtggtaccgtatgggcctccgtacggttgaagaagcaaaggccagtaagagtctgaagctgagcaagatgcagaaggcgggcttcctgtattacgaggatctggcgagcggggttagtaaagaagaagccgatgccgttacgctcatcgtgaaggaaacggtgcgtaccgttgtgccggatgcgctggtgaccatcgccggcggtttccgccgtggcaaacctatgggccacgacgttgacctgctgatcacgaacccgggccgtaaaacggatgacgagctgctccacaaagtggttgatctgctcaagaagcaaggtctgctgctgtacgaagacatcaaagagagcacgttcgtggaggggcaactgccaagtcataaaatcgacgccatggacaacttccagaagtgcttcgccattctcaagctgtaccagccgaaggtggataacagtgcggttgggacgagtaagaaaagtgacatggctgaggttaaggattggaaagcggttcgtgtggatctggtgatcacgccattcgagcagttcgcctatgcgctgctcggttggacgggcagcggccaatttcgtcgcgatctgcgtcgctatgcggaggaagagcgcgacatgctgctcgacaaccatcgtctctacgacctgaaaaagggcatctttctgagtgcgggcagcgaagaagagattttcgcgcatctgggtctggattatgtggagccgtgggaacgcaacgcg

SEQ ID NO: 3350 - protein, 394 aa, synthetic construct
  REGION 1..394: note = Variant of terminal deoxynucleotidyl transferase
MHHHHHHGGSGHPPSNTPEKEVPSVIARPVSQYACQRKTTLNNYNKKFTDALEIMAENYKFKENLQACLEAKRAASIFKSLPFEVTSMKDIQGLPCITDDVRDVIEEIIEEGESSRVKEILNDERYKAFKQFTSVFGVGVKTSEKWYRMGLRTVEEAKASKSLKLSKMQKAGFLYYEDLASGVSKEEADAVTLIVKETVRTVVPDALVTIAGGFRRGKPMGHDVDLLITNPGRKTDDELLHKVVDLLKKQGLLLYEDIKESTFVEGQLPSHKIDAMDNFQKCFAILKLYQPKVDNSAVGTSKKSDMAEVKDWKAVRVDLVITPFEQFAYALLGWTGSGQFRRDLRRYAEEERDMLLDNHRLYDLKKGIFLSAGSEEEIFAHLGLDYVEPWERNA

SEQ ID NO: 3351 - DNA, 1182 bp, synthetic construct
  misc_feature 1..1182: note = Variant of terminal deoxynucleotidyl transferase
  source 1..1182: mol_type = other DNA
atgcatcaccaccatcatcatgggggttctggtcatccgccgagcaataccccggagaaggaggtgccgagcgttatcgcccgtccggttagtcagtacgcgtgccagcgcaagaccacgctgaataactacaacaaaaagttcaccgacgcgctggagatcatggccgagaactacaaatttaaagagaacctgcaggcgtgtctggaagccaagcgcgccgcgagtatttttaaaagcctgccgttcgaggttaccagcatgaaagacatccaaggtctgccgtgcattaccgacgacgtacgtgacgtgatcgaggagatcatcgaagagggcgagagcagccgtgttaaagaaatcctcaatgacgagcgctacaaggcctttaagcagttcaccagcgtgttcggtgtgggcgtgaaaacctcggaaaagtggtaccgtatgggcctccgtacggttgaagaagcaaaggccagtaagagtctgaagctgagcaagatgcagaaggcgggcttcctgtattacgaggatctggcgagcggggttagtaaagaagaagccgatgccgttacgctcatcgtgaaggaaacggtgcgtactgttgctccggatgcgctggtgaccatcgccggcggtttccgccgtggcaaacctatgggccacgacgttgacctgctgatcacgaacccgggccgtaaagaggatgacgagctgctccacaaagtggttgatctgctcaagaagcaaggtctgctgctgtacgaagacatcaaagagagcacgttcgtggaggggcaactgccaagtcataaaatcgacgccatggacaacttccagaagtgcttcgccattctcaagctgtaccagccgaaggtggataacagtgcggttgggacgagtaagaaaagtgacatggctgaggttaaggattggaaagcggttcgtgtggatctggtgatcacgccattcgagcagttcgcctatgcgctgctcggttggacgggcagcggccaatttcgtcgcgatctgcgtcgctatgcggaggaagagcgcgacatgctgctcgacaaccatcgtctctacgacctgaaaaagggcatctttctgagtgcgggcagcgaagaagagattttcgcgcatctgggtctggattatgtggagccgtgggaacgcaacgcg

SEQ ID NO: 3352 - protein, 394 aa, synthetic construct
  REGION 1..394: note = Variant of terminal deoxynucleotidyl transferase
MHHHHHHGGSGHPPSNTPEKEVPSVIARPVSQYACQRKTTLNNYNKKFTDALEIMAENYKFKENLQACLEAKRAASIFKSLPFEVTSMKDIQGLPCITDDVRDVIEEIIEEGESSRVKEILNDERYKAFKQFTSVFGVGVKTSEKWYRMGLRTVEEAKASKSLKLSKMQKAGFLYYEDLASGVSKEEADAVTLIVKETVRTVAPDALVTIAGGFRRGKPMGHDVDLLITNPGRKEDDELLHKVVDLLKKQGLLLYEDIKESTFVEGQLPSHKIDAMDNFQKCFAILKLYQPKVDNSAVGTSKKSDMAEVKDWKAVRVDLVITPFEQFAYALLGWTGSGQFRRDLRRYAEEERDMLLDNHRLYDLKKGIFLSAGSEEEIFAHLGLDYVEPWERNA

SEQ ID NO: 3353 - DNA, 1182 bp, synthetic construct
  misc_feature 1..1182: note = Variant of terminal deoxynucleotidyl transferase
  source 1..1182: mol_type = other DNA
atgcatcaccaccatcatcatgggggttctggtcatccgccgagcaataccccggagaaggaggtgccgagcgttatcgcccgtccggttagtcagtacgcgtgccagcgcaagaccacgctgaataactacaacaaaaagttcaccgacgcgctggagatcatggccgagaactacaaatttaaagagaacctgcaggcgtgtctggaagccaagcgcgccgcgagtatttttaaaagcctgccgttcgaggttaccagcatgaaagacatccaaggtctgccgtgcattaccgacgacgtacgtgacgtgatcgaggagatcatcgaagagggcgagagcagccgtgttaaagaaatcctcaatgacgagcgctacaaggcctttaagcagttcaccagcgtgttcggtgtgggcgtgaaaacctcggaaaagtggtaccgtatgggcctccgtacggttgaagaagcaaaggccagtaagagtctgaagctgagcaagatgcagaaggcgggcttcctgtattacgaggatctggcgagcggggttagtaaagaagaagccgatgccgttacgctcatcgtgaaggaaacggtgcgtaccgttgtgccggatgcgctggtgaccatcgccggcggtttccgccgtggcaaacctatgggccacgacgttgacctgctgatcacgaacccgggccgtaaagaggatgacgagctgctccacaaagtggttgatctgctcaagaagcaaggtctgctgctgtacgaagacatcaaagagagcacgttcgtggaggggcaactgccaagtcataaaatcgacgccatggacaacttccagaagtgcttcgccattctcaagctgtaccagccgaaggtggataacagtgcggttgggacgagtaagaaaagtgacatggctgaggttaaggattggaaagcggttcgtgtggatctggtgatcacgccattcgagcagttcgcctatgcgctgctcggttggacgggcagcggccaatttcgtcgcgatctgcgtatctatgcggaggaagagcgcgacatgctgctcgacaaccatcgtctctacgacctgaaaaagggcatctttctgagtgcgggcagcgaagaagagattttcgcgcatctgggtctggattatgtggagccgtgggaacgcaacgcg

SEQ ID NO: 3354 - protein, 394 aa, synthetic construct
  REGION 1..394: note = Variant of terminal deoxynucleotidyl transferase
MHHHHHHGGSGHPPSNTPEKEVPSVIARPVSQYACQRKTTLNNYNKKFTDALEIMAENYKFKENLQACLEAKRAASIFKSLPFEVTSMKDIQGLPCITDDVRDVIEEIIEEGESSRVKEILNDERYKAFKQFTSVFGVGVKTSEKWYRMGLRTVEEAKASKSLKLSKMQKAGFLYYEDLASGVSKEEADAVTLIVKETVRTVVPDALVTIAGGFRRGKPMGHDVDLLITNPGRKEDDELLHKVVDLLKKQGLLLYEDIKESTFVEGQLPSHKIDAMDNFQKCFAILKLYQPKVDNSAVGTSKKSDMAEVKDWKAVRVDLVITPFEQFAYALLGWTGSGQFRRDLRIYAEEERDMLLDNHRLYDLKKGIFLSAGSEEEIFAHLGLDYVEPWERNA

SEQ ID NO: 3355 - DNA, 1182 bp, synthetic construct
  misc_feature 1..1182: note = Variant of terminal deoxynucleotidyl transferase
  source 1..1182: mol_type = other DNA
atgcatcaccaccatcatcatgggggttctggtcatccgccgagcaataccccggagaaggaggtgccgagcgttatcgcccgtccggttagtcagtacgcgtgccagcgcaagaccacgctgaataactacaacaaaaagttcaccgacgcgctggagatcatggccgagaactacaaatttaaagagaacctgcaggcgtgtctggaagccaagcgcgccgcgagtatttttaaaagcctgccgttcgaggttaccagcatgaaagacatccaaggtctgccgtgcattaccgacgacgtacgtgacgtgatcgaggagatcatcgaagagggcgagagcagccgtgttaaagaaatcctcaatgacgagcgctacaaggcctttaagcagttcaccagcgtgttcggtgtgggcgtgaaaacctcggaaaagtggtaccgtatgggcctccgtacggttgaagaagcaaaggccagtaagagtctgaagctgagcaagatgcagaaggcgggcttcctgtattacgaggatctggcgagcatggttagtaaagaagaagccgatgccgttacgctcatcgtgaaggaaacggtgcgtactgttgctccggatgcgctggtgaccatcgccggcggtttccgccgtggcaaacctatgggccacgacgttgacctgctgatcacgaacccgggccgtaaaacggatgacgagctgctccacaaagtggttgatctgctcaagaagcaaggtctgctgctgtacgaagacatcaaagagagcacgttcgtggaggggcaagttccaagtcataaaatcgacgccatggacaacttccagaagtgcttcgccattctcaagctgtaccagccgaaggtggataacagtgcggttgggacgagtaagaaaagtgacatggctgaggttaaggattggaaagcggttcgtgtggatctggtgatcacgccattcgagcagttcgcctatgcgctgctcggttggacgggcagcggccaatttcgtcgcgatctgcgtatctatgcggaggaagagcgcgacatgctgctcgacaaccatcgtctctacgacctgaaaaagggcatctttctgagtgcgggcagcgaagaagagattttcgcgcatctgggtctggattatgtggagccgtgggaacgcaacgcg

SEQ ID NO: 3356 - protein, 394 aa, synthetic construct
  REGION 1..394: note = Variant of terminal deoxynucleotidyl transferase
MHHHHHHGGSGHPPSNTPEKEVPSVIARPVSQYACQRKTTLNNYNKKFTDALEIMAENYKFKENLQACLEAKRAASIFKSLPFEVTSMKDIQGLPCITDDVRDVIEEIIEEGESSRVKEILNDERYKAFKQFTSVFGVGVKTSEKWYRMGLRTVEEAKASKSLKLSKMQKAGFLYYEDLASMVSKEEADAVTLIVKETVRTVAPDALVTIAGGFRRGKPMGHDVDLLITNPGRKTDDELLHKVVDLLKKQGLLLYEDIKESTFVEGQVPSHKIDAMDNFQKCFAILKLYQPKVDNSAVGTSKKSDMAEVKDWKAVRVDLVITPFEQFAYALLGWTGSGQFRRDLRIYAEEERDMLLDNHRLYDLKKGIFLSAGSEEEIFAHLGLDYVEPWERNA

SEQ ID NO: 3357 - DNA, 1182 bp, synthetic construct
  misc_feature 1..1182: note = Variant of terminal deoxynucleotidyl transferase
  source 1..1182: mol_type = other DNA
atgcatcaccaccatcatcatgggggttctggtcatccgccgagcaataccccggagaaggaggtgccgagcgttatcgcccgtccggttagtcagtacgcgtgccagcgcaagaccacgctgaataactacaacaaaaagttcaccgacgcgctggagatcatggccgagaactacaaatttaaagagaacctgcaggcgtgtctggaagccaagcgcgccgcgagtatttttaaaagcctgccgttcgaggttaccagcatgaaagacatccaaggtctgccgtgcattaccgacgacgtacgtgacgtgatcgaggagatcatcgaagagggcgagagcagccgtgttaaagaaatcctcaatgacgagcgctacaaggcctttaagcagttcaccagcgtgttcggtgtgggcgtgaaaacctcggaaaagtggtaccgtatgggcctccgtacggttgaagaagcaaaggccagtaagagtctgaagctgagcaagatgcagaaggcgggcttcctgtattacgaggatctggcgagcggggttagtaaagaagaagccgatgccgttacgctcatcgtgaaggaaacggtgcgtcgcgttgctccggatgcgctggtgaccatcgccggcggtttccgccgtggcaaacctatgggccacgacgttgacctgctgatcacgaacccgggccgtcacacggatgacgagctgctccacaaagtggttgatctgctcaagaagcaaggtctgctgctgtacgaagacatcaaagagagcacgttcgtggaggggcaactgccaagtcataaaatcgacgccatggacaacttccagaagtgcttcgccattctcaagctgtaccagccgaaggtggataacagtgcggttgggacgagtaagaaaagtgacatggctgaggttaaggattggaaagcggttcgtgtggatctggtgatcacgccattcgagcagttcgcctatgcgctgctcggttggacgggcagcggccaatttcgtcgcgatctgcgtatctatgcggaggaagagcgcgacatgctgctcgacaaccatcgtctctacgacctgaaaaagggcatctttctgagtgcgggcagcgaagaagagattttcgcgcatctgggtctggattatgtggagccgtgggaacgcaacgcg

SEQ ID NO: 3358 - protein, 394 aa, synthetic construct
  REGION 1..394: note = Variant of terminal deoxynucleotidyl transferase
MHHHHHHGGSGHPPSNTPEKEVPSVIARPVSQYACQRKTTLNNYNKKFTDALEIMAENYKFKENLQACLEAKRAASIFKSLPFEVTSMKDIQGLPCITDDVRDVIEEIIEEGESSRVKEILNDERYKAFKQFTSVFGVGVKTSEKWYRMGLRTVEEAKASKSLKLSKMQKAGFLYYEDLASGVSKEEADAVTLIVKETVRRVAPDALVTIAGGFRRGKPMGHDVDLLITNPGRHTDDELLHKVVDLLKKQGLLLYEDIKESTFVEGQLPSHKIDAMDNFQKCFAILKLYQPKVDNSAVGTSKKSDMAEVKDWKAVRVDLVITPFEQFAYALLGWTGSGQFRRDLRIYAEEERDMLLDNHRLYDLKKGIFLSAGSEEEIFAHLGLDYVEPWERNA

SEQ ID NO: 3359 - DNA, 1182 bp, synthetic construct
  misc_feature 1..1182: note = Variant of terminal deoxynucleotidyl transferase
  source 1..1182: mol_type = other DNA
atgcatcaccaccatcatcatgggggttctggtcatccgccgagcaataccccggagaaggaggtgccgagcgttatcgcccgtccggttagtcagtacgcgtgccagcgcaagaccacgctgaataactacaacaaaaagttcaccgacgcgctggagatcatggccgagaactacaaatttaaagagaacctgcaggcgtgtctggaagccaagcgcgccgcgagtatttttaaaagcctgccgttcgaggttaccagcatgaaagacatccaaggtctgccgtgcattaccgacgacgtacgtgacgtgatcgaggagatcatcgaagagggcgagagcagccgtgttaaagaaatcctcaatgacgagcgctacaaggcctttaagcagttcaccagcgtgttcggtgtgggcgtgaaaacctcggaaaagtggtaccgtatgggcctccgtacggttgaagaagcaaaggccagtaagagtctgaagctgagcaagatgcagaaggcgggcttcctgtattacgaggatctggcgagcatggttagtaaagaagaagccgatgccgttacgctcatcgtgaaggaaacggtgcgtactgttgttccggatgcgctggtgaccatcgccggcggtttccgccgtggcaaacctatgggccacgacgttgacctgctgatcacgaacccgggccgtaaagaggatgacgagctgctccacaaagtggttgatctgctcaagaagcaaggtctgctgctgtacgaagacatcaaagagagcacgttcgtggaggggcaaattccaagtcataaaatcgacgccatggacaacttccagaagtgcttcgccattctcaagctgtaccagccgaaggtggataacagtgcggttgggacgagtaagaaaagtgacatggctgaggttaaggattggaaagcggttcgtgtggatctggtgatcacgccattcgagcagttcgcctatgcgctgctcggttggacgggcagcggccaatttcgtcgcgatctgcgtatctatgcggaggaagagcgcgacatgctgctcgacaaccatcgtctctacgacctgaaaaagggcatctttctgagtgcgggcagcgaagaagagattttcgcgcatctgggtctggattatgtggagccgtgggaacgcaacgcg

SEQ ID NO: 3360 - protein, 394 aa, synthetic construct
  REGION 1..394: note = Variant of terminal deoxynucleotidyl transferase
MHHHHHHGGSGHPPSNTPEKEVPSVIARPVSQYACQRKTTLNNYNKKFTDALEIMAENYKFKENLQACLEAKRAASIFKSLPFEVTSMKDIQGLPCITDDVRDVIEEIIEEGESSRVKEILNDERYKAFKQFTSVFGVGVKTSEKWYRMGLRTVEEAKASKSLKLSKMQKAGFLYYEDLASMVSKEEADAVTLIVKETVRTVVPDALVTIAGGFRRGKPMGHDVDLLITNPGRKEDDELLHKVVDLLKKQGLLLYEDIKESTFVEGQIPSHKIDAMDNFQKCFAILKLYQPKVDNSAVGTSKKSDMAEVKDWKAVRVDLVITPFEQFAYALLGWTGSGQFRRDLRIYAEEERDMLLDNHRLYDLKKGIFLSAGSEEEIFAHLGLDYVEPWERNA

SEQ ID NO: 3361 - DNA, 1182 bp, synthetic construct
  misc_feature 1..1182: note = Variant of terminal deoxynucleotidyl transferase
  source 1..1182: mol_type = other DNA
atgcatcaccaccatcatcatgggggttctggtcatccgccgagcaataccccggagaaggaggtgccgagcgttatcgcccgtccggttagtcagtacgcgtgccagcgcaagaccacgctgaataactacaacaaaaagttcaccgacgcgctggagatcatggccgagaactacaaatttaaagagaacctgcaggcgtgtctggaagccaagcgcgccgcgagtatttttaaaagcctgccgttcgaggttaccagcatgaaagacatccaaggtctgccgtgcattaccgacgacgtacgtgacgtgatcgaggagatcatcgaagagggcgagagcagccgtgttaaagaaatcctcaatgacgagcgctacaaggcctttaagcagttcaccagcgtgttcggtgtgggcgtgaaaacctcggaaaagtggtaccgtatgggcctccgtacggttgaagaagcaaaggccagtaagagtctgaagctgagcaagatgcagaaggcgggcttcctgtattacgaggatctggcgagcggggttagtaaagaagaagccgatgccgttacgctcatcgtgaaggaaacggtgcgtactgttgttccggatgcgctggtgaccatcgccggcggtttccgccgtggcaaacctatgggccacgacgttgacctgctgatcacgaacccgggccgtcgcgaggatgacgagctgctccacaaagtggttgatctgctcaagaagcaaggtctgctgctgtacgaagacatcaaagagagcacgttcgtggaggggcaactgccaagtcataaaatcgacgccatggacaacttccagaagtgcttcgccattctcaagctgtaccagccgaaggtggataacagtgcggttgggacgagtaagaaaagtgacatggctgaggttaaggattggaaagcggttcgtgtggatctggtgatcacgccattcgagcagttcgcctatgcgctgctcggttggacgggcagcggccaatttcgtcgcgatctgcgtatctatgcggaggaagagcgcgacatgctgctcgacaaccatcgtctctacgacctgaaaaagggcatctttctgagtgcgggcagcgaagaagagattttcgcgcatctgggtctggattatgtggagccgtgggaacgcaacgcg

SEQ ID NO: 3362 - protein, 394 aa, synthetic construct
  REGION 1..394: note = Variant of terminal deoxynucleotidyl transferase
MHHHHHHGGSGHPPSNTPEKEVPSVIARPVSQYACQRKTTLNNYNKKFTDALEIMAENYKFKENLQACLEAKRAASIFKSLPFEVTSMKDIQGLPCITDDVRDVIEEIIEEGESSRVKEILNDERYKAFKQFTSVFGVGVKTSEKWYRMGLRTVEEAKASKSLKLSKMQKAGFLYYEDLASGVSKEEADAVTLIVKETVRTVVPDALVTIAGGFRRGKPMGHDVDLLITNPGRREDDELLHKVVDLLKKQGLLLYEDIKESTFVEGQLPSHKIDAMDNFQKCFAILKLYQPKVDNSAVGTSKKSDMAEVKDWKAVRVDLVITPFEQFAYALLGWTGSGQFRRDLRIYAEEERDMLLDNHRLYDLKKGIFLSAGSEEEIFAHLGLDYVEPWERNA

SEQ ID NO: 3363 - DNA, 1182 bp, synthetic construct
  misc_feature 1..1182: note = Variant of terminal deoxynucleotidyl transferase
  source 1..1182: mol_type = other DNA
atgcatcaccaccatcatcatgggggttctggtcatccgccgagcaataccccggagaaggaggtgccgagcgttatcgcccgtccggttagtcagtacgcgtgccagcgcaagaccacgctgaataactacaacaaaaagttcaccgacgcgctggagatcatggccgagaactacaaatttaaagagaacctgcaggcgtgtctggaagccaagcgcgccgcgagtatttttaaaagcctgccgttcgaggttaccagcatgaaagacatccaaggtctgccgtgcattaccgacgacgtacgtgacgtgatcgaggagatcatcgaagagggcgagagcagccgtgttaaagaaatcctcaatgacgagcgctacaaggcctttaagcagttcaccagcgtgttcggtgtgggcgtgaaaacctcggaaaagtggtaccgtatgggcctccgtacggttgaagaagcaaaggccagtaagagtctgaagctgagcaagatgcagaaggcgggcttcctgtattacgaggatctggcgagcatggttagtaaagaagaagccgatgccgttacgctcatcgtgaaggaaacggtgcgtcgcgttgttccggatgcgctggtgaccatcgccggcggtttccgccgtggcaaacctatgggccacgacgttgacctgctgatcacgaacccgggccgtaaagaggatgacgagctgctccacaaagtggttgatctgctcaagaagcaaggtctgctgctgtacgaagacatcaaagagagcacgttcgtggaggggcaaattccaagtcataaaatcgacgccatggacaacttccagaagtgcttcgccattctcaagctgtaccagccgaaggtggataacagtgcggttgggacgagtaagaaaagtgacatggctgaggttaaggattggaaagcggttcgtgtggatctggtgatcacgccattcgagcagttcgcctatgcgctgctcggttggacgggcagcggccaatttcgtcgcgatctgcgtatctatgcggaggaagagcgcgacatgctgctcgacaaccatcgtctctacgacctgaaaaagggcatctttctgagtgcgggcagcgaagaagagattttcgcgcatctgggtctggattatgtggagccgtgggaacgcaacgcg

SEQ ID NO: 3364 - protein, 394 aa, synthetic construct
  REGION 1..394: note = Variant of terminal deoxynucleotidyl transferase
MHHHHHHGGSGHPPSNTPEKEVPSVIARPVSQYACQRKTTLNNYNKKFTDALEIMAENYKFKENLQACLEAKRAASIFKSLPFEVTSMKDIQGLPCITDDVRDVIEEIIEEGESSRVKEILNDERYKAFKQFTSVFGVGVKTSEKWYRMGLRTVEEAKASKSLKLSKMQKAGFLYYEDLASMVSKEEADAVTLIVKETVRRVVPDALVTIAGGFRRGKPMGHDVDLLITNPGRKEDDELLHKVVDLLKKQGLLLYEDIKESTFVEGQIPSHKIDAMDNFQKCFAILKLYQPKVDNSAVGTSKKSDMAEVKDWKAVRVDLVITPFEQFAYALLGWTGSGQFRRDLRIYAEEERDMLLDNHRLYDLKKGIFLSAGSEEEIFAHLGLDYVEPWERNA

SEQ ID NO: 3365 - DNA, 1182 bp, synthetic construct
  misc_feature 1..1182: note = Variant of terminal deoxynucleotidyl transferase
  source 1..1182: mol_type = other DNA
atgcatcaccaccatcatcatgggggttctggtcatccgccgagcaataccccggagaaggaggtgccgagcgttatcgcccgtccggttagtcagtacgcgtgccagcgcaagaccacgctgaataactacaacaaaaagttcaccgacgcgctggagatcatggccgagaactacaaatttaaagagaacctgcaggcgtgtctggaagccaagcgcgccgcgagtatttttaaaagcctgccgttcgaggttaccagcatgaaagacatccaaggtctgccgtgcattaccgacgacgtacgtgacctgatcgaggagatcatcgaagagggcgagagcagccgtgttaaagaaatcctcaatgacgagcgctacaaggcctttaagcagttcaccagcgtgttcggtgtgggcgtgaaaacctcggaaaagtggtaccgtatgggcctccgtacggttgaagaagcaaaggccagtaagagtctgaagctgagcaagatgcagaaggcgggcttcctgtattacgaggatctggcgagcatggttagtaaagaagaagccgatgccgttacgctcatcgtgaaggaaacggtggctaccgttgtgccggatgcggaggtgaccatcgccggcggtttccgccgtggcaaacctatgggccacgacgttgactttctgatcacgaacccgggccgtaaagaagatcgtgagctgctccacaaagtggttgatctgctcaagaagcaaggtctgctgctgtacgaagacatcaaagagagcacgttcgtggaggggcaactgccaagtcataaaatcgacgccatggacaacttccagaagtgcttcgccattctcaagctgtaccagccgaaggtggataacagtgcggttgggacgagtaagaaaagtgacatggctgaggttaaggattggaaagcggttcgtgtggatctggtgatcacgccattcgagcagttcgcctatgcgctgctcggttggacgggcagcggccaatttcgtcgcgatatgcgtcgctatgcggaggaagagcgcgacatgctgctcgacaaccatcgtctctacgacctgaaaaagggcatctttctgagtgcggcgagcgaagaagagattttcgcgcatctgggtctggattatctggagccgtgggaacgcaacgcg

SEQ ID NO: 3366 - protein, 394 aa, synthetic construct
  REGION 1..394: note = Variant of terminal deoxynucleotidyl transferase
MHHHHHHGGSGHPPSNTPEKEVPSVIARPVSQYACQRKTTLNNYNKKFTDALEIMAENYKFKENLQACLEAKRAASIFKSLPFEVTSMKDIQGLPCITDDVRDLIEEIIEEGESSRVKEILNDERYKAFKQFTSVFGVGVKTSEKWYRMGLRTVEEAKASKSLKLSKMQKAGFLYYEDLASMVSKEEADAVTLIVKETVATVVPDAEVTIAGGFRRGKPMGHDVDFLITNPGRKEDRELLHKVVDLLKKQGLLLYEDIKESTFVEGQLPSHKIDAMDNFQKCFAILKLYQPKVDNSAVGTSKKSDMAEVKDWKAVRVDLVITPFEQFAYALLGWTGSGQFRRDMRRYAEEERDMLLDNHRLYDLKKGIFLSAASEEEIFAHLGLDYLEPWERNA

SEQ ID NO: 3367 - DNA, 1182 bp, synthetic construct
  misc_feature 1..1182: note = Variant of terminal deoxynucleotidyl transferase
  source 1..1182: mol_type = other DNA
atgcatcaccaccatcatcatgggggttctggtcatccgccgagcaataccccggagaaggaggtgccgagcgttatcgcccgtccggttagtcagtacgcgtgccagcgcaagaccacgctgaataactacaacaaaaagttcaccgacgcgctggagatcatggccgagaactacaaatttaaagagaacctgcaggcgtgtctggaagccaagcgcgccgcgagtatttttaaaagcctgccgttcgaggttaccagcatgaaagacatccaaggtctgccgtgcattaccgacgacgtacgtgacgtgatcgaggagatcatcgaagagggcgagagcagccgtgttaaagaaatcctcaatgacgagcgctacaaggcctttaagcagttcaccagcgtgttcggtgtgggcgtgaaaacctcggaaaagtggtaccgtatgggcctccgtacggttgaagaagcaaaggccagtaagagtctgaagctgagcaagatgcagaaggcgggcttcctgtattacgaggatctggcgagcatggttagtaaagaagaagccgatgccgttacgctcatcgtgaaggaaacggtgcgtaccgttgtgccggatgcgctggtgaccatcgccggcggtttccgccgtggcaaacctatgggccacgacgttgacctgctgatcacgaacccgggccgtaaaacggatgacgagctgctccacaaagtggttgatctgctcaagaagcaaggtctgctgctgtacgaagacatcaaagagagcacgttcgtggaggggcaagttccaagtcataaaatcgacgccatggacaacttccagaagtgcttcgccattctcaagctgtaccagccgaaggtggataacagtgcggttgggacgagtaagaaaagtgacatggctgaggttaaggattggaaagcggttcgtgtggatctggtgatcacgccattcgagcagttcgcctatgcgctgctcggttggacgggcagcggccaatttcgtcgcgatctgcgtatctatgcggaggaagagcgcgacatgctgctcgacaaccatcgtctctacgacctgaaaaagggcatctttctgagtgcgggcagcgaagaagagattttcgcgcatctgggtctggattatgtggagccgtgggaacgcaacgcg

SEQ ID NO: 3368 - protein, 394 aa, synthetic construct
  REGION 1..394: note = Variant of terminal deoxynucleotidyl transferase
MHHHHHHGGSGHPPSNTPEKEVPSVIARPVSQYACQRKTTLNNYNKKFTDALEIMAENYKFKENLQACLEAKRAASIFKSLPFEVTSMKDIQGLPCITDDVRDVIEEIIEEGESSRVKEILNDERYKAFKQFTSVFGVGVKTSEKWYRMGLRTVEEAKASKSLKLSKMQKAGFLYYEDLASMVSKEEADAVTLIVKETVRTVVPDALVTIAGGFRRGKPMGHDVDLLITNPGRKTDDELLHKVVDLLKKQGLLLYEDIKESTFVEGQVPSHKIDAMDNFQKCFAILKLYQPKVDNSAVGTSKKSDMAEVKDWKAVRVDLVITPFEQFAYALLGWTGSGQFRRDLRIYAEEERDMLLDNHRLYDLKKGIFLSAGSEEEIFAHLGLDYVEPWERNA

SEQ ID NO: 3369 - DNA, 1182 bp, synthetic construct
  misc_feature 1..1182: note = Variant of terminal deoxynucleotidyl transferase
  source 1..1182: mol_type = other DNA
atgcatcaccaccatcatcatgggggttctggtcatccgccgagcaataccccggagaaggaggtgccgagcgttatcgcccgtccggttagtcagtacgcgtgccagcgcaagaccacgctgaataactacaacaaaaagttcaccgacgcgctggagatcatggccgagaactacaaatttaaagagaacctgcaggcgtgtctggaagccaagcgcgccgcgagtatttttaaaagcctgccgttcgaggttaccagcatgaaagacatccaaggtctgccgtgcattaccgacgacgtacgtgacgtgatcgaggagatcatcgaagagggcgagagcagccgtgttaaagaaatcctcaatgacgagcgctacaaggcctttaagcagttcaccagcgtgttcggtgtgggcgtgaaaacctcggaaaagtggtaccgtatgggcctccgtacggttgaagaagcaaaggccagtaagagtctgaagctgagcaagatgcagaaggcgggcttcctgtattacgaggatctggcgagcatggttagtaaagaagaagccgatgccgttacgctcatcgtgaaggaaacggtgcgtaccgttgtgccggatgcggaggtgaccatcgccggcggtttccgccgtggcaaacctatgggccacgacgttgactttctgatcacgaacccgggccgtaaagaagatgacgagctgctccacaaagtggttgatctgctcaagaagcaaggtctgctgctgtacgaagacatcaaagagagcacgttcgtggaggggcaactgccaagtcataaaatcgacgccatggacaacttccagaagtgcttcgccattctcaagctgtaccagccgaaggtggataacagtgcggttgggacgagtaagaaaagtgacatggctgaggttaaggattggaaagcggttcgtgtggatctggtgatcacgccattcgagcagttcgcctatgcgctgctcggttggacgggcagcggccaatttcgtcgcgatctgcgtcgctatgcggaggaagagcgcgacatgctgctcgacaaccatcgtctctacgacctgaaaaaaggcatctttctgagtgcgggcagcgaagaagagattttcgcgcatctgggtctggattatctggagccgtgggaacgcaacgcg

SEQ ID NO: 3370 - protein, 394 aa, synthetic construct
  REGION 1..394: note = Variant of terminal deoxynucleotidyl transferase
MHHHHHHGGSGHPPSNTPEKEVPSVIARPVSQYACQRKTTLNNYNKKFTDALEIMAENYKFKENLQACLEAKRAASIFKSLPFEVTSMKDIQGLPCITDDVRDVIEEIIEEGESSRVKEILNDERYKAFKQFTSVFGVGVKTSEKWYRMGLRTVEEAKASKSLKLSKMQKAGFLYYEDLASMVSKEEADAVTLIVKETVRTVVPDAEVTIAGGFRRGKPMGHDVDFLITNPGRKEDDELLHKVVDLLKKQGLLLYEDIKESTFVEGQLPSHKIDAMDNFQKCFAILKLYQPKVDNSAVGTSKKSDMAEVKDWKAVRVDLVITPFEQFAYALLGWTGSGQFRRDLRRYAEEERDMLLDNHRLYDLKKGIFLSAGSEEEIFAHLGLDYLEPWERNA

SEQ ID NO: 3371 - DNA, 1182 bp, synthetic construct
  misc_feature 1..1182: note = Variant of terminal deoxynucleotidyl transferase
  source 1..1182: mol_type = other DNA
atgcatcaccaccatcatcatgggggttctggtcatccgccgagcaataccccggagaaggaggtgccgagcgttatcgcccgtccggttagtcagtacgcgtgccagcgcaagaccacgctgaataactacaacaaaaagttcaccgacgcgctggagatcatggccgagaactacaaatttaaagagaacctgcaggcgtgtctggaagccaagcgcgccgcgagtatttttaaaagcctgccgttcgaggttaccagcatgaaagacatccaaggtctgccgtgcattaccgacgacgtacgtgacgtgatcgaggagatcatcgaagagggcgagagcagccgtgttaaagaaatcctcaatgacgagcgctacaaggcctttaagcagttcaccagcgtgttcggtgtgggcgtgaaaacctcggaaaagtggtaccgtatgggcctccgtacggttgaagaagcaaaggccagtaagagtctgaagctgagcaagatgcagaaggcgggcttcctgtattacgaggatctggcgagcatggttagtaaagaagaagccgatgccgttacgctcatcgtgaaggaaacggtgcgtactgttgttccggatgcgctggtgaccatcgccggcggtttccgccgtggcaaacctatgggccacgacgttgacctgctgatcacgaacccgggccgtaaagaggatgacgagctgctccacaaagtggttgatctgctcaagaagcaaggtctgctgctgtacgaagacatcaaagagagcacgttcgtggaggggcaactgccaagtcataaaatcgacgccatggacaacttccagaagtgcttcgccattctcaagctgtaccagccgaaggtggataacagtgcggttgggacgagtaagaaaagtgacatggctgaggttaaggattggaaagcggttcgtgtggatctggtgatcacgccattcgagcagttcgcctatgcgctgctcggttggacgggcagcggccaatttcgtcgcgatctgcgtcgctatgcggaggaagagcgcgacatgctgctcgacaaccatcgtctctacgacctgaaaaagggcatctttctgagtgcgggcagcgaagaagagattttcgcgcatctgggtctggattatgtggagccgtgggaacgcaacgcg

SEQ ID NO: 3372 - protein, 394 aa, synthetic construct
  REGION 1..394: note = Variant of terminal deoxynucleotidyl transferase
MHHHHHHGGSGHPPSNTPEKEVPSVIARPVSQYACQRKTTLNNYNKKFTDALEIMAENYKFKENLQACLEAKRAASIFKSLPFEVTSMKDIQGLPCITDDVRDVIEEIIEEGESSRVKEILNDERYKAFKQFTSVFGVGVKTSEKWYRMGLRTVEEAKASKSLKLSKMQKAGFLYYEDLASMVSKEEADAVTLIVKETVRTVVPDALVTIAGGFRRGKPMGHDVDLLITNPGRKEDDELLHKVVDLLKKQGLLLYEDIKESTFVEGQLPSHKIDAMDNFQKCFAILKLYQPKVDNSAVGTSKKSDMAEVKDWKAVRVDLVITPFEQFAYALLGWTGSGQFRRDLRRYAEEERDMLLDNHRLYDLKKGIFLSAGSEEEIFAHLGLDYVEPWERNA

SEQ ID NO: 3373 - DNA, 1182 bp, synthetic construct
  misc_feature 1..1182: note = Variant of terminal deoxynucleotidyl transferase
  source 1..1182: mol_type = other DNA
atgcatcaccaccatcatcatgggggttctggtcatccgccgagcaataccccggagaaggaggtgccgagcgttatcgcccgtccggttagtcagtacgcgtgccagcgcaagaccacgctgaataactacaacaaaaagttcaccgacgcgctggagatcatggccgagaactacaaatttaaagagaacctgcaggcgtgtctggaagccaagcgcgccgcgagtatttttaaaagcctgccgttcgaggttaccagcatgaaagacatccaaggtctgccgtgcattaccgacgacgtacgtgacgtgatcgaggagatcatcgaagagggcgagagcagccgtgttaaagaaatcctcaatgacgagcgctacaaggcctttaagcagttcaccagcgtgttcggtgtgggcgtgaaaacctcggaaaagtggtaccgtatgggcctccgtacggttgaagaagcaaaggccagtaagagtctgaagctgagcaagatgcagaaggcgggcttcctgtattacgaggatctggcgagcggggttagtaaagaagaagccgatgccgttacgctcatcgtgaaggaaacggtgcgtactgttgttccggatgcgctggtgaccatcgccggcggtttccgccgtggcaaacctatgggccacgacgttgacctgctgatcacgaacccgggccgtcgcgaggatgacgagctgctccacaaagtggttgatctgctcaagaagcaaggtctgctgctgtacgaagacatcaaagagagcacgttcgtggaggggcaaattccaagtcataaaatcgacgccatggacaacttccagaagtgcttcgccattctcaagctgtaccagccgaaggtggataacagtgcggttgggacgagtaagaaaagtgacatggctgaggttaaggattggaaagcggttcgtgtggatctggtgatcacgccattcgagcagttcgcctatgcgctgctcggttggacgggcagcggccaatttcgtgtggatctgcgtatctatgcggaggaagagcgcgacatgctgctcgacaaccatcgtctctacgacctgaaaaagggcatctttctgagtgcgggcagcgaagaagagattttcgcgcatctgggtctggattatgtggagccgtgggaacgcaacgcg

SEQ ID NO: 3374 - protein, 394 aa, synthetic construct
  REGION 1..394: note = Variant of terminal deoxynucleotidyl transferase
MHHHHHHGGSGHPPSNTPEKEVPSVIARPVSQYACQRKTTLNNYNKKFTDALEIMAENYKFKENLQACLEAKRAASIFKSLPFEVTSMKDIQGLPCITDDVRDVIEEIIEEGESSRVKEILNDERYKAFKQFTSVFGVGVKTSEKWYRMGLRTVEEAKASKSLKLSKMQKAGFLYYEDLASGVSKEEADAVTLIVKETVRTVVPDALVTIAGGFRRGKPMGHDVDLLITNPGRREDDELLHKVVDLLKKQGLLLYEDIKESTFVEGQIPSHKIDAMDNFQKCFAILKLYQPKVDNSAVGTSKKSDMAEVKDWKAVRVDLVITPFEQFAYALLGWTGSGQFRVDLRIYAEEERDMLLDNHRLYDLKKGIFLSAGSEEEIFAHLGLDYVEPWERNA

SEQ ID NO: 3375 - DNA, 1182 bp, synthetic construct
  misc_feature 1..1182: note = Variant of terminal deoxynucleotidyl transferase
  source 1..1182: mol_type = other DNA
atgcatcaccaccatcatcatgggggttctggtcatccgccgagcaataccccggagaaggaggtgccgagcgttatcgcccgtccggttagtcagtacgcgtgccagcgcaagaccacgctgaataactacaacaaaaagttcaccgacgcgctggagatcatggccgagaactacaaatttaaagagaacctgcaggcgtgtctggaagccaagcgcgccgcgagtatttttaaaagcctgccgttcgaggttaccagcatgaaagacatccaaggtctgccgtgcattaccgacgacgtacgtgacgtgatcgaggagatcatcgaagagggcgagagcagccgtgttaaagaaatcctcaatgacgagcgctacaaggcctttaagcagttcaccagcgtgttcggtgtgggcgtgaaaacctcggaaaagtggtaccgtatgggcctccgtacggttgaagaagcaaaggccagtaagagtctgaagctgagcaagatgcagaaggcgggcttcctgtattacgaggatctggcgagcatggttagtaaagaagaagccgatgccgttacgctcatcgtgaaggaaacggtgcgtaccgttgtgccggatgcggaggtgaccatcgccggcggtttccgccgtggcaaacctatgggccacgacgttgactttctgatcacgaacccgggcagtaaagaagatcgtgagctgctccacaaagtggttgatctgctcaagaagcaaggtctgctgctgtacgaagacatcaaagagagcacgttcgtggaggggcaactgccaagtcataaaatcgacgccatggacaacttccagaagtgcttcgccattctcaagctgtaccagccgaaggtggataacagtgcggttgggacgagtaagaaaagtgacatggctgaggttaaggattggaaagcggttcgtgtggatctggtgatcacgccattcgagcagttcgcctatgcgctgctcggttggacgggcagcggccaatttcgtcgcgatatgcgtcgctatgcggaggaagagcgcgacatgctgctcgacaaccatcgtctctacgacctgaaaaagggcatctttctgagtgcgggcagcgaagaagagattttcgcgcatctgggtctggattatattgagccgtgggaacgcaacgcg

SEQ ID NO: 3376 - protein, 394 aa, synthetic construct
  REGION 1..394: note = Variant of terminal deoxynucleotidyl transferase
MHHHHHHGGSGHPPSNTPEKEVPSVIARPVSQYACQRKTTLNNYNKKFTDALEIMAENYKFKENLQACLEAKRAASIFKSLPFEVTSMKDIQGLPCITDDVRDVIEEIIEEGESSRVKEILNDERYKAFKQFTSVFGVGVKTSEKWYRMGLRTVEEAKASKSLKLSKMQKAGFLYYEDLASMVSKEEADAVTLIVKETVRTVVPDAEVTIAGGFRRGKPMGHDVDFLITNPGSKEDRELLHKVVDLLKKQGLLLYEDIKESTFVEGQLPSHKIDAMDNFQKCFAILKLYQPKVDNSAVGTSKKSDMAEVKDWKAVRVDLVITPFEQFAYALLGWTGSGQFRRDMRRYAEEERDMLLDNHRLYDLKKGIFLSAGSEEEIFAHLGLDYIEPWERNA

SEQ ID NO: 3377 - DNA, 1182 bp, synthetic construct
  misc_feature 1..1182: note = Variant of terminal deoxynucleotidyl transferase
  source 1..1182: mol_type = other DNA
atgcatcaccaccatcatcatgggggttctggtcatccgccgagcaataccccggagaaggaggtgccgagcgttatcgcccgtccggttagtcagtacgcgtgccagcgcaagaccacgctgaataactacaacaaaaagttcaccgacgcgctggagatcatggccgagaactacaaatttaaagagaacctgcaggcgtgtctggaagccaagcgcgccgcgagtatttttaaaagcctgccgttcgaggttaccagcatgaaagacatccaaggtctgccgtgcattaccgacgacgtacgtgacgtgatcgaggagatcatcgaagagggcgagagcagccgtgttaaagaaatcctcaatgacgagcgctacaaggcctttaagcagttcaccagcgtgttcggtgtgggcgtgaaaacctcggaaaagtggtaccgtatgggcctccgtacggttgaagaagcaaaggccagtaagagtctgaagctgagcaagatgcagaaggcgggcttcctgtattacgaggatctggcgagcatggttagtaaagaagaagccgatgccgttacgctcatcgtgaaggaaacggtgcgtaccgttgtgccggatgcgctggtgaccatcgccggcggtttccgccgtggcaaacctatgggccacgacgttgacctgctgatcacgaacccgggccgtaaagaggatgacgagctgctccacaaagtggttgatctgctcaagaagcaaggtctgctgctgtacgaagacatcaaagagagcacgttcgtggaggggcaactgccaagtcataaaatcgacgccatggacaacttccagaagtgcttcgccattctcaagctgtaccagccgaaggtggataacagtgcggttgggacgagtaagaaaagtgacatggctgaggttaaggattggaaagcggttcgtgtggatctggtgatcacgccattcgagcagttcgcctatgcgctgctcggttggacgggcagcggccaatttcgtcgcgatctgcgtatctatgcggaggaagagcgcgacatgctgctcgacaaccatcgtctctacgacctgaaaaagggcatctttctgagtgcgggcagcgaagaagagattttcgcgcatctgggtctggattatgtggagccgtgggaacgcaacgcg

SEQ ID NO: 3378 - protein, 394 aa, synthetic construct
  REGION 1..394: note = Variant of terminal deoxynucleotidyl transferase
MHHHHHHGGSGHPPSNTPEKEVPSVIARPVSQYACQRKTTLNNYNKKFTDALEIMAENYKFKENLQACLEAKRAASIFKSLPFEVTSMKDIQGLPCITDDVRDVIEEIIEEGESSRVKEILNDERYKAFKQFTSVFGVGVKTSEKWYRMGLRTVEEAKASKSLKLSKMQKAGFLYYEDLASMVSKEEADAVTLIVKETVRTVVPDALVTIAGGFRRGKPMGHDVDLLITNPGRKEDDELLHKVVDLLKKQGLLLYEDIKESTFVEGQLPSHKIDAMDNFQKCFAILKLYQPKVDNSAVGTSKKSDMAEVKDWKAVRVDLVITPFEQFAYALLGWTGSGQFRRDLRIYAEEERDMLLDNHRLYDLKKGIFLSAGSEEEIFAHLGLDYVEPWERNA

SEQ ID NO: 3379 - DNA, 1182 bp, synthetic construct
  misc_feature 1..1182: note = Variant of terminal deoxynucleotidyl transferase
  source 1..1182: mol_type = other DNA
atgcatcaccaccatcatcatgggggttctggtcatccgccgagcaataccccggagaaggaggtgccgagcgttatcgcccgtccggttagtcagtacgcgtgccagcgcaagaccacgctgaataactacaacaaaaagttcaccgacgcgctggagatcatggccgagaactacaaatttaaagagaacctgcaggcgtgtctggaagccaagcgcgccgcgagtatttttaaaagcctgccgttcgaggttaccagcatgaaagacatccaaggtctgccgtgcattaccgacgacgtacgtgacgtgatcgaggagatcatcgaagagggcgagagcagccgtgttaaagaaatcctcaatgacgagcgctacaaggcctttaagcagttcaccagcgtgttcggtgtgggcgtgaaaacctcggaaaagtggtaccgtatgggcctccgtacggttgaagaagcaaaggccagtaagagtctgaagctgagcaagatgcagaaggcgggcttcctgtattacgaggatctggcgagcggggttagtaaagaagaagccgatgccgttacgctcatcgtgaaggaaacggtgcgtactgttgttccggatgcgctggtgaccatcgccggcggtttccgccgtggcaaacctatgggccacgacgttgacctgctgatcacgaacccgggccgtaaaacggatgacgagctgctccacaaagtggttgatctgctcaagaagcaaggtctgctgctgtacgaagacatcaaagagagcacgttcgtggaggggcaactgccaagtcataaaatcgacgccatggacaacttccagaagtgcttcgccattctcaagctgtaccagccgaaggtggataacagtgcggttgggacgagtaagaaaagtgacatggctgaggttaaggattggaaagcggttcgtgtggatctggtgatcacgccattcgagcagttcgcctatgcgctgctcggttggacgggcagcggccaatttcgtctggatctgcgtcgctatgcggaggaagagcgcgacatgctgctcgacaaccatcgtctctacgacctgaaaaagggcatctttctgagtgcgggcagcgaagaagagattttcgcgcatctgggtctggattatgtggagccgtgggaacgcaacgcg

SEQ ID NO: 3380 - protein, 394 aa, synthetic construct
  REGION 1..394: note = Variant of terminal deoxynucleotidyl transferase
MHHHHHHGGSGHPPSNTPEKEVPSVIARPVSQYACQRKTTLNNYNKKFTDALEIMAENYKFKENLQACLEAKRAASIFKSLPFEVTSMKDIQGLPCITDDVRDVIEEIIEEGESSRVKEILNDERYKAFKQFTSVFGVGVKTSEKWYRMGLRTVEEAKASKSLKLSKMQKAGFLYYEDLASGVSKEEADAVTLIVKETVRTVVPDALVTIAGGFRRGKPMGHDVDLLITNPGRKTDDELLHKVVDLLKKQGLLLYEDIKESTFVEGQLPSHKIDAMDNFQKCFAILKLYQPKVDNSAVGTSKKSDMAEVKDWKAVRVDLVITPFEQFAYALLGWTGSGQFRLDLRRYAEEERDMLLDNHRLYDLKKGIFLSAGSEEEIFAHLGLDYVEPWERNA

SEQ ID NO: 3381 - DNA, 1182 bp, synthetic construct
  misc_feature 1..1182: note = Variant of terminal deoxynucleotidyl transferase
  source 1..1182: mol_type = other DNA
atgcatcaccaccatcatcatgggggttctggtcatccgccgagcaataccccggagaaggaggtgccgagcgttatcgcccgtccggttagtcagtacgcgtgccagcgcaagaccacgctgaataactacaacaaaaagttcaccgacgcgctggagatcatggccgagaactacaaatttaaagagaacctgcaggcgtgtctggaagccaagcgcgccgcgagtatttttaaaagcctgccgttcgaggttaccagcatgaaagacatccaaggtctgccgtgcattaccgacgacgtacgtgacgtgatcgaggagatcatcgaagagggcgagagcagccgtgttaaagaaatcctcaatgacgagcgctacaaggcctttaagcagttcaccagcgtgttcggtgtgggcgtgaaaacctcggaaaagtggtaccgtatgggcctccgtacggttgaagaagcaaaggccagtaagagtctgaagctgagcaagatgcagaaggcgggcttcctgtattacgaggatctggcgagcatggttagtaaagaagaagccgatgccgttacgctcatcgtgaaggaaacggtgcgtcgcgttgttccggatgcgctggtgaccatcgccggcggtttccgccgtggcaaacctatgggccacgacgttgacctgctgatcacgaacccgggccgtcacgaggatgacgagctgctccacaaagtggttgatctgctcaagaagcaaggtctgctgctgtacgaagacatcaaagagagcacgttcgtggaggggcaactgccaagtcataaaatcgacgccatggacaacttccagaagtgcttcgccattctcaagctgtaccagccgaaggtggataacagtgcggttgggacgagtaagaaaagtgacatggctgaggttaaggattggaaagcggttcgtgtggatctggtgatcacgccattcgagcagttcgcctatgcgctgctcggttggacgggcagcggccaatttcgtcgcgatctgcgtatctatgcggaggaagagcgcgacatgctgctcgacaaccatcgtctctacgacctgaaaaagggcatctttctgagtgcgggcagcgaagaagagattttcgcgcatctgggtctggattatgtggagccgtgggaacgcaacgcg

SEQ ID NO: 3382 - protein, 394 aa, synthetic construct
  REGION 1..394: note = Variant of terminal deoxynucleotidyl transferase
MHHHHHHGGSGHPPSNTPEKEVPSVIARPVSQYACQRKTTLNNYNKKFTDALEIMAENYKFKENLQACLEAKRAASIFKSLPFEVTSMKDIQGLPCITDDVRDVIEEIIEEGESSRVKEILNDERYKAFKQFTSVFGVGVKTSEKWYRMGLRTVEEAKASKSLKLSKMQKAGFLYYEDLASMVSKEEADAVTLIVKETVRRVVPDALVTIAGGFRRGKPMGHDVDLLITNPGRHEDDELLHKVVDLLKKQGLLLYEDIKESTFVEGQLPSHKIDAMDNFQKCFAILKLYQPKVDNSAVGTSKKSDMAEVKDWKAVRVDLVITPFEQFAYALLGWTGSGQFRRDLRIYAEEERDMLLDNHRLYDLKKGIFLSAGSEEEIFAHLGLDYVEPWERNA

SEQ ID NO: 3383 - DNA, 1182 bp, synthetic construct
  misc_feature 1..1182: note = Variant of terminal deoxynucleotidyl transferase
  source 1..1182: mol_type = other DNA
atgcatcaccaccatcatcatgggggttctggtcatccgccgagcaataccccggagaaggaggtgccgagcgttatcgcccgtccggttagtcagtacgcgtgccagcgcaagaccacgctgaataactacaacaaaaagttcaccgacgcgctggagatcatggccgagaactacaaatttaaagagaacctgcaggcgtgtctggaagccaagcgcgccgcgagtatttttaaaagcctgccgttcgaggttaccagcatgaaagacatccaaggtctgccgtgcattaccgacgacgtacgtgacgtgatcgaggagatcatcgaagagggcgagagcagccgtgttaaagaaatcctcaatgacgagcgctacaaggcctttaagcagttcaccagcgtgttcggtgtgggcgtgaaaacctcggaaaagtggtaccgtatgggcctccgtacggttgaagaagcaaaggccagtaagagtctgaagctgagcaagatgcagaaggcgggcttcctgtattacgaggatctggcgagcatggttagtaaagaagaagccgatgccgttacgctcatcgtgaaggaaacggtgcgtaccgttgtgccggatgcggaggtgaccatcgccggcggtttccgccgtggcaaacctatgggccacgacgttgactttctgatcacgaacccgggccgtaaagaagatgacgagctgctccacaaagtggttgatctgctcaagaagcaaggtctgctgctgtacgaagacatcaaagagagcacgttcgtggaggggcaactgccaagtcataaaatcgacgccatggacaacttccagaagtgcttcgccattctcaagctgtaccagccgaaggtggataacagtgcggttgggacgagtaagaaaagtgacatggctgaggttaaggattggaaagcggttcgtgtggatctggtgatcacgccattcgagcagttcgcctatgcgctgctcggttggacgggcagcggccaatttcgtcgcgatctgcgtcgctatgcggaggaagagcgcgacatgctgctcgacaaccatcgtctctacgacctgaaaaagggcatctttctgagtgcgggcagcgaagaagagattttcgcgcatctgggtctggattatgtggagccgtgggaacgcaacgcg

SEQ ID NO: 3384 - protein, 394 aa, synthetic construct
  REGION 1..394: note = Variant of terminal deoxynucleotidyl transferase
MHHHHHHGGSGHPPSNTPEKEVPSVIARPVSQYACQRKTTLNNYNKKFTDALEIMAENYKFKENLQACLEAKRAASIFKSLPFEVTSMKDIQGLPCITDDVRDVIEEIIEEGESSRVKEILNDERYKAFKQFTSVFGVGVKTSEKWYRMGLRTVEEAKASKSLKLSKMQKAGFLYYEDLASMVSKEEADAVTLIVKETVRTVVPDAEVTIAGGFRRGKPMGHDVDFLITNPGRKEDDELLHKVVDLLKKQGLLLYEDIKESTFVEGQLPSHKIDAMDNFQKCFAILKLYQPKVDNSAVGTSKKSDMAEVKDWKAVRVDLVITPFEQFAYALLGWTGSGQFRRDLRRYAEEERDMLLDNHRLYDLKKGIFLSAGSEEEIFAHLGLDYVEPWERNA

SEQ ID NO: 3385 - DNA, 1182 bp, synthetic construct
  misc_feature 1..1182: note = Variant of terminal deoxynucleotidyl transferase
  source 1..1182: mol_type = other DNA
atgcatcaccaccatcatcatgggggttctggtcatccgccgagcaataccccggagaaggaggtgccgagcgttatcgcccgtccggttagtcagtacgcgtgccagcgcaagaccacgctgaataactacaacaaaaagttcaccgacgcgctggagatcatggccgagaactacaaatttaaagagaacctgcaggcgtgtctggaagccaagcgcgccgcgagtatttttaaaagcctgccgttcgaggttaccagcatgaaagacatccaaggtctgccgtgcattaccgacgacgtacgtgacctgatcgaggagatcatcgaagagggcgagagcagccgtgttaaagaaatcctcaatgacgagcgctacaaggcctttaagcagttcaccagcgtgttcggtgtgggcgtgaaaacctcggaaaagtggtaccgtatgggcctccgtacggttgaagaagcaaaggccagtaagagtctgaagctgagcaagatgcagaaggcgggcttcctgtattacgaggatctggcgagcatggttagtaaagaagaagccgatgccgttacgctcatcgtgaaggaaacggtgcgtaccgttgtgccggatgcggaggtgaccatcgccggcggtttccgccgtggcaaacctatgggccacgacgttgactttctgatcacgaacccgggccgtaaagaagatgacgagctgctccacaaagtggttgatctgctcaagaagcaaggtctgctgctgtacgaagacatcaaagagagcacgttcgtggaggggcaactgccaagtcataaaatcgacgccatggacaacttccagaagtgcttcgccattctcaagctgtaccagccgaaggtggataacagtgcggttgggacgagtaagaaaagtgacatggctgaggttaaggattggaaagcggttcgtgtggatctggtgatcacgccattcgagcagttcgcctatgcgctgctcggttggacgggcagcggccaatttcgtcgcgatacccgtcgctatgcggaggaagagcgcgacatgctgctcgacaaccatcgtctctacgacctgaaaaagggcatctttctgagtgcgggcagcgaagaagagattttcgcgcatctgggtctggattatctggagccgtgggaacgcaacgcg

SEQ ID NO: 3386 - protein, 394 aa, synthetic construct
  REGION 1..394: note = Variant of terminal deoxynucleotidyl transferase
MHHHHHHGGSGHPPSNTPEKEVPSVIARPVSQYACQRKTTLNNYNKKFTDALEIMAENYKFKENLQACLEAKRAASIFKSLPFEVTSMKDIQGLPCITDDVRDLIEEIIEEGESSRVKEILNDERYKAFKQFTSVFGVGVKTSEKWYRMGLRTVEEAKASKSLKLSKMQKAGFLYYEDLASMVSKEEADAVTLIVKETVRTVVPDAEVTIAGGFRRGKPMGHDVDFLITNPGRKEDDELLHKVVDLLKKQGLLLYEDIKESTFVEGQLPSHKIDAMDNFQKCFAILKLYQPKVDNSAVGTSKKSDMAEVKDWKAVRVDLVITPFEQFAYALLGWTGSGQFRRDTRRYAEEERDMLLDNHRLYDLKKGIFLSAGSEEEIFAHLGLDYLEPWERNA

SEQ ID NO: 3387 - DNA, 1182 bp, synthetic construct
  misc_feature 1..1182: note = Variant of terminal deoxynucleotidyl transferase
  source 1..1182: mol_type = other DNA
atgcatcaccaccatcatcatgggggttctggtcatccgccgagcaataccccggagaaggaggtgccgagcgttatcgcccgtccggttagtcagtacgcgtgccagcgcaagaccacgctgaataactacaacaaaaagttcaccgacgcgctggagatcatggccgagaactacaaatttaaagagaacctgcaggcgtgtctggaagccaagcgcgccgcgagtatttttaaaagcctgccgttcgaggttaccagcatgaaagacatccaaggtctgccgtgcattaccgacgacgtacgtgacgtgatcgaggagatcatcgaagagggcgagagcagccgtgttaaagaaatcctcaatgacgagcgctacaaggcctttaagcagttcaccagcgtgttcggtgtgggcgtgaaaacctcggaaaagtggtaccgtatgggcctccgtacggttgaagaagcaaaggccagtaagagtctgaagctgagcaagatgcagaaggcgggcttcctgtattacgaggatctggcgagcatggttagtaaagaagaagccgatgccgttacgctcatcgtgaaggaaacggtgcgtactgttgctccggatgcgctggtgaccatcgccggcggtttccgccgtggcaaacctatgggccacgacgttgacctgctgatcacgaacccgggccgtcgcacggatgacgagctgctccacaaagtggttgatctgctcaagaagcaaggtctgctgctgtacgaagacatcaaagagagcacgttcgtggaggggcaactgccaagtcataaaatcgacgccatggacaacttccagaagtgcttcgccattctcaagctgtaccagccgaaggtggataacagtgcggttgggacgagtaagaaaagtgacatggctgaggttaaggattggaaagcggttcgtgtggatctggtgatcacgccattcgagcagttcgcctatgcgctgctcggttggacgggcagcggccaatttcgtcgcgatctgcgtcgctatgcggaggaagagcgcgacatgctgctcgacaaccatcgtctctacgacctgaaaaagggcatctttctgagtgcgggcagcgaagaagagattttcgcgcatctgggtctggattatgtggagccgtgggaacgcaacgcg

SEQ ID NO: 3388 - protein, 394 aa, synthetic construct
  REGION 1..394: note = Variant of terminal deoxynucleotidyl transferase
MHHHHHHGGSGHPPSNTPEKEVPSVIARPVSQYACQRKTTLNNYNKKFTDALEIMAENYKFKENLQACLEAKRAASIFKSLPFEVTSMKDIQGLPCITDDVRDVIEEIIEEGESSRVKEILNDERYKAFKQFTSVFGVGVKTSEKWYRMGLRTVEEAKASKSLKLSKMQKAGFLYYEDLASMVSKEEADAVTLIVKETVRTVAPDALVTIAGGFRRGKPMGHDVDLLITNPGRRTDDELLHKVVDLLKKQGLLLYEDIKESTFVEGQLPSHKIDAMDNFQKCFAILKLYQPKVDNSAVGTSKKSDMAEVKDWKAVRVDLVITPFEQFAYALLGWTGSGQFRRDLRRYAEEERDMLLDNHRLYDLKKGIFLSAGSEEEIFAHLGLDYVEPWERNA

SEQ ID NO: 3389 - DNA, 1182 bp, synthetic construct
  misc_feature 1..1182: note = Variant of terminal deoxynucleotidyl transferase
  source 1..1182: mol_type = other DNA
atgcatcaccaccatcatcatgggggttctggtcatccgccgagcaataccccggagaaggaggtgccgagcgttatcgcccgtccggttagtcagtacgcgtgccagcgcaagaccacgctgaataactacaacaaaaagttcaccgacgcgctggagatcatggccgagaactacaaatttaaagagaacctgcaggcgtgtctggaagccaagcgcgccgcgagtatttttaaaagcctgccgttcgaggttaccagcatgaaagacatccaaggtctgccgtgcattaccgacgacgtacgtgacgtgatcgaggagatcatcgaagagggcgagagcagccgtgttaaagaaatcctcaatgacgagcgctacaaggcctttaagcagttcaccagcgtgttcggtgtgggcgtgaaaacctcggaaaagtggtaccgtatgggcctccgtacggttgaagaagcaaaggccagtaagagtctgaagctgagcaagatgcagaaggcgggcttcctgtattacgaggatctggcgagcatggttagtaaagaagaagccgatgccgttacgctcatcgtgaaggaaacggtgcgtactgttgctccggatgcgctggtgaccatcgccggcggtttccgccgtggcaaacctatgggccacgacgttgacctgctgatcacgaacccgggccgtaaaacggatgacgagctgctccacaaagtggttgatctgctcaagaagcaaggtctgctgctgtacgaagacatcaaagagagcacgttcgtggaggggcaactgccaagtcataaaatcgacgccatggacaacttccagaagtgcttcgccattctcaagctgtaccagccgaaggtggataacagtgcggttgggacgagtaagaaaagtgacatggctgaggttaaggattggaaagcggttcgtgtggatctggtgatcacgccattcgagcagttcgcctatgcgctgctcggttggacgggcagcggccaatttcgtcgcgatctgcgtatctatgcggaggaagagcgcgacatgctgctcgacaaccatcgtctctacgacctgaaaaagggcatctttctgagtgcgggcagcgaagaagagattttcgcgcatctgggtctggattatgtggagccgtgggaacgcaacgcg

SEQ ID NO: 3390 - protein, 394 aa, synthetic construct
  REGION 1..394: note = Variant of terminal deoxynucleotidyl transferase
MHHHHHHGGSGHPPSNTPEKEVPSVIARPVSQYACQRKTTLNNYNKKFTDALEIMAENYKFKENLQACLEAKRAASIFKSLPFEVTSMKDIQGLPCITDDVRDVIEEIIEEGESSRVKEILNDERYKAFKQFTSVFGVGVKTSEKWYRMGLRTVEEAKASKSLKLSKMQKAGFLYYEDLASMVSKEEADAVTLIVKETVRTVAPDALVTIAGGFRRGKPMGHDVDLLITNPGRKTDDELLHKVVDLLKKQGLLLYEDIKESTFVEGQLPSHKIDAMDNFQKCFAILKLYQPKVDNSAVGTSKKSDMAEVKDWKAVRVDLVITPFEQFAYALLGWTGSGQFRRDLRIYAEEERDMLLDNHRLYDLKKGIFLSAGSEEEIFAHLGLDYVEPWERNA

SEQ ID NO: 3391 - DNA, 1182 bp, synthetic construct
  misc_feature 1..1182: note = Variant of terminal deoxynucleotidyl transferase
  source 1..1182: mol_type = other DNA
atgcatcaccaccatcatcatgggggttctggtcatccgccgagcaataccccggagaaggaggtgccgagcgttatcgcccgtccggttagtcagtacgcgtgccagcgcaagaccacgctgaataactacaacaaaaagttcaccgacgcgctggagatcatggccgagaactacaaatttaaagagaacctgcaggcgtgtctggaagccaagcgcgccgcgagtatttttaaaagcctgccgttcgaggttaccagcatgaaagacatccaaggtctgccgtgcattaccgacgacgtacgtgacgtgatcgaggagatcatcgaagagggcgagagcagccgtgttaaagaaatcctcaatgacgagcgctacaaggcctttaagcagttcaccagcgtgttcggtgtgggcgtgaaaacctcggaaaagtggtaccgtatgggcctccgtacggttgaagaagcaaaggccagtaagagtctgaagctgagcaagatgcagaaggcgggcttcctgtattacgaggatctggcgagcggggttagtaaagaagaagccgatgccgttacgctcatcgtgaaggaaacggtgcgtaccgttgtgccggatgcgctggtgaccatcgccggcggtttccgccgtggcaaacctatgggccacgacgttgacctgctgatcacgaacccgggccgtaaagaggatgacgagctgctccacaaagtggttgatctgctcaagaagcaaggtctgctgctgtacgaagacatcaaagagagcacgttcgtggaggggcaaattccaagtcataaaatcgacgccatggacaacttccagaagtgcttcgccattctcaagctgtaccagccgaaggtggataacagtgcggttgggacgagtaagaaaagtgacatggctgaggttaaggattggaaagcggttcgtgtggatctggtgatcacgccattcgagcagttcgcctatgcgctgctcggttggacgggcagcggccaatttcgtgtggatctgcgtatctatgcggaggaagagcgcgacatgctgctcgacaaccatcgtctctacgacctgaaaaagggcatctttctgagtgcgggcagcgaagaagagattttcgcgcatctgggtctggattatgtggagccgtgggaacgcaacgcg

SEQ ID NO: 3392 - protein, 394 aa, synthetic construct
  REGION 1..394: note = Variant of terminal deoxynucleotidyl transferase
MHHHHHHGGSGHPPSNTPEKEVPSVIARPVSQYACQRKTTLNNYNKKFTDALEIMAENYKFKENLQACLEAKRAASIFKSLPFEVTSMKDIQGLPCITDDVRDVIEEIIEEGESSRVKEILNDERYKAFKQFTSVFGVGVKTSEKWYRMGLRTVEEAKASKSLKLSKMQKAGFLYYEDLASGVSKEEADAVTLIVKETVRTVVPDALVTIAGGFRRGKPMGHDVDLLITNPGRKEDDELLHKVVDLLKKQGLLLYEDIKESTFVEGQIPSHKIDAMDNFQKCFAILKLYQPKVDNSAVGTSKKSDMAEVKDWKAVRVDLVITPFEQFAYALLGWTGSGQFRVDLRIYAEEERDMLLDNHRLYDLKKGIFLSAGSEEEIFAHLGLDYVEPWERNA

SEQ ID NO: 3393 - DNA, 1182 bp, synthetic construct
  misc_feature 1..1182: note = Variant of terminal deoxynucleotidyl transferase
  source 1..1182: mol_type = other DNA
atgcatcaccaccatcatcatgggggttctggtcatccgccgagcaataccccggagaaggaggtgccgagcgttatcgcccgtccggttagtcagtacgcgtgccagcgcaagaccacgctgaataactacaacaaaaagttcaccgacgcgctggagatcatggccgagaactacaaatttaaagagaacctgcaggcgtgtctggaagccaagcgcgccgcgagtatttttaaaagcctgccgttcgaggttaccagcatgaaagacatccaaggtctgccgtgcattaccgacgacgtacgtgacgtgatcgaggagatcatcgaagagggcgagagcagccgtgttaaagaaatcctcaatgacgagcgctacaaggcctttaagcagttcaccagcgtgttcggtgtgggcgtgaaaacctcggaaaagtggtaccgtatgggcctccgtacggttgaagaagcaaaggccagtaagagtctgaagctgagcaagatgcagaaggcgggcttcctgtattacgaggatctggcgagcggggttagtaaagaagaagccgatgccgttacgctcatcgtgaaggaaacggtgcgtactgttgttccggatgcgctggtgaccatcgccggcggtttccgccgtggcaaacctatgggccacgacgttgacctgctgatcacgaacccgggccgtaaagaggatgacgagctgctccacaaagtggttgatctgctcaagaagcaaggtctgctgctgtacgaagacatcaaagagagcacgttcgtggaggggcaactgccaagtcataaaatcgacgccatggacaacttccagaagtgcttcgccattctcaagctgtaccagccgaaggtggataacagtgcggttgggacgagtaagaaaagtgacatggctgaggttaaggattggaaagcggttcgtgtggatctggtgatcacgccattcgagcagttcgcctatgcgctgctcggttggacgggcagcggccaatttcgtgtggatctgcgtcgctatgcggaggaagagcgcgacatgctgctcgacaaccatcgtctctacgacctgaaaaagggcatctttctgagtgcgggcagcgaagaagagattttcgcgcatctgggtctggattatgtggagccgtgggaacgcaacgcg

SEQ ID NO: 3394 - protein, 394 aa, synthetic construct
  REGION 1..394: note = Variant of terminal deoxynucleotidyl transferase
MHHHHHHGGSGHPPSNTPEKEVPSVIARPVSQYACQRKTTLNNYNKKFTDALEIMAENYKFKENLQACLEAKRAASIFKSLPFEVTSMKDIQGLPCITDDVRDVIEEIIEEGESSRVKEILNDERYKAFKQFTSVFGVGVKTSEKWYRMGLRTVEEAKASKSLKLSKMQKAGFLYYEDLASGVSKEEADAVTLIVKETVRTVVPDALVTIAGGFRRGKPMGHDVDLLITNPGRKEDDELLHKVVDLLKKQGLLLYEDIKESTFVEGQLPSHKIDAMDNFQKCFAILKLYQPKVDNSAVGTSKKSDMAEVKDWKAVRVDLVITPFEQFAYALLGWTGSGQFRVDLRRYAEEERDMLLDNHRLYDLKKGIFLSAGSEEEIFAHLGLDYVEPWERNA

SEQ ID NO: 3395 - DNA, 1182 bp, synthetic construct
  misc_feature 1..1182: note = Variant of terminal deoxynucleotidyl transferase
  source 1..1182: mol_type = other DNA
atgcatcaccaccatcatcatgggggttctggtcatccgccgagcaataccccggagaaggaggtgccgagcgttatcgcccgtccggttagtcagtacgcgtgccagcgcaagaccacgctgaataactacaacaaaaagttcaccgacgcgctggagatcatggccgagaactacaaatttaaagagaacctgcaggcgtgtctggaagccaagcgcgccgcgagtatttttaaaagcctgccgttcgaggttaccagcatgaaagacatccaaggtctgccgtgcattaccgacgacgtacgtgacgtgatcgaggagatcatcgaagagggcgagagcagccgtgttaaagaaatcctcaatgacgagcgctacaaggcctttaagcagttcaccagcgtgttcggtgtgggcgtgaaaacctcggaaaagtggtaccgtatgggcctccgtacggttgaagaagcaaaggccagtaagagtctgaagctgagcaagatgcagaaggcgggcttcctgtattacgaggatctggcgagcatggttagtaaagaagaagccgatgccgttacgctcatcgtgaaggaaacggtgcgtactgttgctccggatgcgctggtgaccatcgccggcggtttccgccgtggcaaacctatgggccacgacgttgacctgctgatcacgaacccgggccgtaaagaggatgacgagctgctccacaaagtggttgatctgctcaagaagcaaggtctgctgctgtacgaagacatcaaagagagcacgttcgtggaggggcaactgccaagtcataaaatcgacgccatggacaacttccagaagtgcttcgccattctcaagctgtaccagccgaaggtggataacagtgcggttgggacgagtaagaaaagtgacatggctgaggttaaggattggaaagcggttcgtgtggatctggtgatcacgccattcgagcagttcgcctatgcgctgctcggttggacgggcagcggccaatttcgtcgcgatctgcgtatctatgcggaggaagagcgcgacatgctgctcgacaaccatcgtctctacgacctgaaaaagggcatctttctgagtgcgggcagcgaagaagagattttcgcgcatctgggtctggattatgtggagccgtgggaacgcaacgcg

SEQ ID NO: 3396 - protein, 394 aa, synthetic construct
  REGION 1..394: note = Variant of terminal deoxynucleotidyl transferase
MHHHHHHGGSGHPPSNTPEKEVPSVIARPVSQYACQRKTTLNNYNKKFTDALEIMAENYKFKENLQACLEAKRAASIFKSLPFEVTSMKDIQGLPCITDDVRDVIEEIIEEGESSRVKEILNDERYKAFKQFTSVFGVGVKTSEKWYRMGLRTVEEAKASKSLKLSKMQKAGFLYYEDLASMVSKEEADAVTLIVKETVRTVAPDALVTIAGGFRRGKPMGHDVDLLITNPGRKEDDELLHKVVDLLKKQGLLLYEDIKESTFVEGQLPSHKIDAMDNFQKCFAILKLYQPKVDNSAVGTSKKSDMAEVKDWKAVRVDLVITPFEQFAYALLGWTGSGQFRRDLRIYAEEERDMLLDNHRLYDLKKGIFLSAGSEEEIFAHLGLDYVEPWERNA

SEQ ID NO: 3397 - DNA, 1182 bp, synthetic construct
  misc_feature 1..1182: note = Variant of terminal deoxynucleotidyl transferase
  source 1..1182: mol_type = other DNA
atgcatcaccaccatcatcatgggggttctggtcatccgccgagcaataccccggagaaggaggtgccgagcgttatcgcccgtccggttagtcagtacgcgtgccagcgcaagaccacgctgaataactacaacaaaaagttcaccgacgcgctggagatcatggccgagaactacaaatttaaagagaacctgcaggcgtgtctggaagccaagcgcgccgcgagtatttttaaaagcctgccgttcgaggttaccagcatgaaagacatccaaggtctgccgtgcattaccgacgacgtacgtgacgtgatcgaggagatcatcgaagagggcgagagcagccgtgttaaagaaatcctcaatgacgagcgctacaaggcctttaagcagttcaccagcgtgttcggtgtgggcgtgaaaacctcggaaaagtggtaccgtatgggcctccgtacggttgaagaagcaaaggccagtaagagtctgaagctgagcaagatgcagaaggcgggcttcctgtattacgaggatctggcgagcatggttagtaaagaagaagccgatgccgttacgctcatcgtgaaggaaacggtgcgtaccgttgtgccggatgcgctggtgaccatcgccggcggtttccgccgtggcaaacctatgggccacgacgttgactttctgatcacgaacccgggccgtaaagaagatgacgagctgctccacaaagtggttgatctgctcaagaagcaaggtctgctgctgtacgaagacatccgtgagagcacgttcgtggaggggcaactgccaagtcataaaatcgacgccctggacaacttccagaagtgcttcgccattctcaagctgtaccagccgaaggtggataacagtgcggttgggacgagtaagaaaagtgacatggctgaggttaaggattggaaagcggttcgtgtggatctggtgatcacgccattcgagcagttcgcctatgcgctgctcggttggacgggcagcggccaatttcgtcgcgatctgcgtcgctatgcggaggaagagcgcgacatgctgctcgacaaccatcgtctctacgacctgaaaaagggcatctttctgagtgcgggcagcgaagaagagattttcgcgcatctgggtctggattatctggagccgtgggaacgcaacgcg

SEQ ID NO: 3398 - protein, 394 aa, synthetic construct
  REGION 1..394: note = Variant of terminal deoxynucleotidyl transferase
MHHHHHHGGSGHPPSNTPEKEVPSVIARPVSQYACQRKTTLNNYNKKFTDALEIMAENYKFKENLQACLEAKRAASIFKSLPFEVTSMKDIQGLPCITDDVRDVIEEIIEEGESSRVKEILNDERYKAFKQFTSVFGVGVKTSEKWYRMGLRTVEEAKASKSLKLSKMQKAGFLYYEDLASMVSKEEADAVTLIVKETVRTVVPDALVTIAGGFRRGKPMGHDVDFLITNPGRKEDDELLHKVVDLLKKQGLLLYEDIRESTFVEGQLPSHKIDALDNFQKCFAILKLYQPKVDNSAVGTSKKSDMAEVKDWKAVRVDLVITPFEQFAYALLGWTGSGQFRRDLRRYAEEERDMLLDNHRLYDLKKGIFLSAGSEEEIFAHLGLDYLEPWERNA

SEQ ID NO: 3399 - DNA, 1182 bp, synthetic construct
  misc_feature 1..1182: note = Variant of terminal deoxynucleotidyl transferase
  source 1..1182: mol_type = other DNA
atgcatcaccaccatcatcatgggggttctggtcatccgccgagcaataccccggagaaggaggtgccgagcgttatcgcccgtccggttagtcagtacgcgtgccagcgcaagaccacgctgaataactacaacaaaaagttcaccgacgcgctggagatcatggccgagaactacaaatttaaagagaacctgcaggcgtgtctggaagccaagcgcgccgcgagtatttttaaaagcctgccgttcgaggttaccagcatgaaagacatccaaggtctgccgtgcattaccgacgacgtacgtgacgtgatcgaggagatcatcgaagagggcgagagcagccgtgttaaagaaatcctcaatgacgagcgctacaaggcctttaagcagttcaccagcgtgttcggtgtgggcgtgaaaacctcggaaaagtggtaccgtatgggcctccgtacggttgaagaagcaaaggccagtaagagtctgaagctgagcaagatgcagaaggcgggcttcctgtattacgaggatctggcgagcatggttagtaaagaagaagccgatgccgttacgctcatcgtgaaggaaacggtgcgtactgttgttccggatgcgctggtgaccatcgccggcggtttccgccgtggcaaacctatgggccacgacgttgacctgctgatcacgaacccgggccgtaaaacggatgacgagctgctccacaaagtggttgatctgctcaagaagcaaggtctgctgctgtacgaagacatcaaagagagcacgttcgtggaggggcaaattccaagtcataaaatcgacgccatggacaacttccagaagtgcttcgccattctcaagctgtaccagccgaaggtggataacagtgcggttgggacgagtaagaaaagtgacatggctgaggttaaggattggaaagcggttcgtgtggatctggtgatcacgccattcgagcagttcgcctatgcgctgctcggttggacgggcagcggccaatttcgtcgcgatctgcgtcgctatgcggaggaagagcgcgacatgctgctcgacaaccatcgtctctacgacctgaaaaagggcatctttctgagtgcgggcagcgaagaagagattttcgcgcatctgggtctggattatgtggagccgtgggaacgcaacgcg

SEQ ID NO: 3400 - protein, 394 aa, synthetic construct
  REGION 1..394: note = Variant of terminal deoxynucleotidyl transferase
MHHHHHHGGSGHPPSNTPEKEVPSVIARPVSQYACQRKTTLNNYNKKFTDALEIMAENYKFKENLQACLEAKRAASIFKSLPFEVTSMKDIQGLPCITDDVRDVIEEIIEEGESSRVKEILNDERYKAFKQFTSVFGVGVKTSEKWYRMGLRTVEEAKASKSLKLSKMQKAGFLYYEDLASMVSKEEADAVTLIVKETVRTVVPDALVTIAGGFRRGKPMGHDVDLLITNPGRKTDDELLHKVVDLLKKQGLLLYEDIKESTFVEGQIPSHKIDAMDNFQKCFAILKLYQPKVDNSAVGTSKKSDMAEVKDWKAVRVDLVITPFEQFAYALLGWTGSGQFRRDLRRYAEEERDMLLDNHRLYDLKKGIFLSAGSEEEIFAHLGLDYVEPWERNA

SEQ ID NO: 3401 - DNA, 1182 bp, synthetic construct
  misc_feature 1..1182: note = Variant of terminal deoxynucleotidyl transferase
  source 1..1182: mol_type = other DNA
atgcatcaccaccatcatcatgggggttctggtcatccgccgagcaataccccggagaaggaggtgccgagcgttatcgcccgtccggttagtcagtacgcgtgccagcgcaagaccacgctgaataactacaacaaaaagttcaccgacgcgctggagatcatggccgagaactacaaatttaaagagaacctgcaggcgtgtctggaagccaagcgcgccgcgagtatttttaaaagcctgccgttcgaggttaccagcatgaaagacatccaaggtctgccgtgcattaccgacgacgtacgtgacgtgatcgaggagatcatcgaagagggcgagagcagccgtgttaaagaaatcctcaatgacgagcgctacaaggcctttaagcagttcaccagcgtgttcggtgtgggcgtgaaaacctcggaaaagtggtaccgtatgggcctccgtacggttgaagaagcaaaggccagtaagagtctgaagctgagcaagatgcagaaggcgggcttcctgtattacgaggatctggcgagcatggttagtaaagaagaagccgatgccgttacgctcatcgtgaaggaaacggtgcgtcgcgttgctccggatgcgctggtgaccatcgccggcggtttccgccgtggcaaacctatgggccacgacgttgactttctgatcacgaacccgggccgtaaagaagatgacgagctgctccacaaagtggttgatctgctcaagaagcaaggtctgctgctgtacgaagacatcaaagagagcacgttcgtggaggggcaaattccaagtcataaaatcgacgccatggacaacttccagaagtgcttcgccattctcaagctgtaccagccgaaggtggataacagtgcggttgggacgagtaagaaaagtgacatggctgaggttaaggattggaaagcggttcgtgtggatctggtgatcacgccattcgagcagttcgcctatgcgctgctcggttggacgggcagcggccaatttcgtcgcgatctgcgtatctatgcggaggaagagcgcgacatgctgctcgacaaccatcgtctctacgacctgaaaaagggcatctttctgagtgcgggcagcgaagaagagattttcgcgcatctgggtctggattatgtggagccgtgggaacgcaacgcg

SEQ ID NO: 3402 - protein, 394 aa, synthetic construct
  REGION 1..394: note = Variant of terminal deoxynucleotidyl transferase
MHHHHHHGGSGHPPSNTPEKEVPSVIARPVSQYACQRKTTLNNYNKKFTDALEIMAENYKFKENLQACLEAKRAASIFKSLPFEVTSMKDIQGLPCITDDVRDVIEEIIEEGESSRVKEILNDERYKAFKQFTSVFGVGVKTSEKWYRMGLRTVEEAKASKSLKLSKMQKAGFLYYEDLASMVSKEEADAVTLIVKETVRRVAPDALVTIAGGFRRGKPMGHDVDFLITNPGRKEDDELLHKVVDLLKKQGLLLYEDIKESTFVEGQIPSHKIDAMDNFQKCFAILKLYQPKVDNSAVGTSKKSDMAEVKDWKAVRVDLVITPFEQFAYALLGWTGSGQFRRDLRIYAEEERDMLLDNHRLYDLKKGIFLSAGSEEEIFAHLGLDYVEPWERNA

SEQ ID NO: 3403 - DNA, 1182 bp, synthetic construct
  misc_feature 1..1182: note = Variant of terminal deoxynucleotidyl transferase
  source 1..1182: mol_type = other DNA
atgcatcaccaccatcatcatgggggttctggtcatccgccgagcaataccccggagaaggaggtgccgagcgttatcgcccgtccggttagtcagtacgcgtgccagcgcaagaccacgctgaataactacaacaaaaagttcaccgacgcgctggagatcatggccgagaactacaaatttaaagagaacctgcaggcgtgtctggaagccaagcgcgccgcgagtatttttaaaagcctgccgttcgaggttaccagcatgaaagacatccaaggtctgccgtgcattaccgacgacgtacgtgacgtgatcgaggagatcatcgaagagggcgagagcagccgtgttaaagaaatcctcaatgacgagcgctacaaggcctttaagcagttcaccagcgtgttcggtgtgggcgtgaaaacctcggaaaagtggtaccgtatgggcctccgtacggttgaagaagcaaaggccagtaagagtctgaagctgagcaagatgcagaaggcgggcttcctgtattacgaggatctggcgagcatggttagtaaagaagaagccgatgccgttacgctcatcgtgaaggaaacggtgcgtcgcgttgctccggatgcgctggtgaccatcgccggcggtttccgccgtggcaaacctatgggccacgacgttgacctgctgatcacgaacccgggccgtcacgaggatgacgagctgctccacaaagtggttgatctgctcaagaagcaaggtctgctgctgtacgaagacatcaaagagagcacgttcgtggaggggcaactgccaagtcataaaatcgacgccatggacaacttccagaagtgcttcgccattctcaagctgtaccagccgaaggtggataacagtgcggttgggacgagtaagaaaagtgacatggctgaggttaaggattggaaagcggttcgtgtggatctggtgatcacgccattcgagcagttcgcctatgcgctgctcggttggacgggcagcggccaatttcgtgtggatctgcgtatctatgcggaggaagagcgcgacatgctgctcgacaaccatcgtctctacgacctgaaaaagggcatctttctgagtgcgggcagcgaagaagagattttcgcgcatctgggtctggattatgtggagccgtgggaacgcaacgcg

SEQ ID NO: 3404 - protein, 394 aa, synthetic construct
  REGION 1..394: note = Variant of terminal deoxynucleotidyl transferase
MHHHHHHGGSGHPPSNTPEKEVPSVIARPVSQYACQRKTTLNNYNKKFTDALEIMAENYKFKENLQACLEAKRAASIFKSLPFEVTSMKDIQGLPCITDDVRDVIEEIIEEGESSRVKEILNDERYKAFKQFTSVFGVGVKTSEKWYRMGLRTVEEAKASKSLKLSKMQKAGFLYYEDLASMVSKEEADAVTLIVKETVRRVAPDALVTIAGGFRRGKPMGHDVDLLITNPGRHEDDELLHKVVDLLKKQGLLLYEDIKESTFVEGQLPSHKIDAMDNFQKCFAILKLYQPKVDNSAVGTSKKSDMAEVKDWKAVRVDLVITPFEQFAYALLGWTGSGQFRVDLRIYAEEERDMLLDNHRLYDLKKGIFLSAGSEEEIFAHLGLDYVEPWERNA

SEQ ID NO: 3405 - DNA, 1182 bp, synthetic construct
  misc_feature 1..1182: note = Variant of terminal deoxynucleotidyl transferase
  source 1..1182: mol_type = other DNA
atgcatcaccaccatcatcatgggggttctggtcatccgccgagcaataccccggagaaggaggtgccgagcgttatcgcccgtccggttagtcagtacgcgtgccagcgcaagaccacgctgaataactacaacaaaaagttcaccgacgcgctggagatcatggccgagaactacaaatttaaagagaacctgcaggcgtgtctggaagccaagcgcgccgcgagtatttttaaaagcctgccgttcgaggttaccagcatgaaagacatccaaggtctgccgtgcattaccgacgacgtacgtgacgtgatcgaggagatcatcgaagagggcgagagcagccgtgttaaagaaatcctcaatgacgagcgctacaaggcctttaagcagttcaccagcgtgttcggtgtgggcgtgaaaacctcggaaaagtggtaccgtatgggcctccgtacggttgaagaagcaaaggccagtaagagtctgaagctgagcaagatgcagaaggcgggcttcctgtattacgaggatctggcgagcggggttagtaaagaagaagccgatgccgttacgctcatcgtgaaggaaacggtgcgtcgcgttgctccggatgcgctggtgaccatcgccggcggtttccgccgtggcaaacctatgggccacgacgttgacctgctgatcacgaacccgggccgtaaagaggatgacgagctgctccacaaagtggttgatctgctcaagaagcaaggtctgctgctgtacgaagacatcaaagagagcacgttcgtggaggggcaactgccaagtcataaaatcgacgccatggacaacttccagaagtgcttcgccattctcaagctgtaccagccgaaggtggataacagtgcggttgggacgagtaagaaaagtgacatggctgaggttaaggattggaaagcggttcgtgtggatctggtgatcacgccattcgagcagttcgcctatgcgctgctcggttggacgggcagcggccaatttcgtgtggatctgcgtatctatgcggaggaagagcgcgacatgctgctcgacaaccatcgtctctacgacctgaaaaagggcatctttctgagtgcgggcagcgaagaagagattttcgcgcatctgggtctggattatgtggagccgtgggaacgcaacgcg

SEQ ID NO: 3406 - protein, 394 aa, synthetic construct
  REGION 1..394: note = Variant of terminal deoxynucleotidyl transferase
MHHHHHHGGSGHPPSNTPEKEVPSVIARPVSQYACQRKTTLNNYNKKFTDALEIMAENYKFKENLQACLEAKRAASIFKSLPFEVTSMKDIQGLPCITDDVRDVIEEIIEEGESSRVKEILNDERYKAFKQFTSVFGVGVKTSEKWYRMGLRTVEEAKASKSLKLSKMQKAGFLYYEDLASGVSKEEADAVTLIVKETVRRVAPDALVTIAGGFRRGKPMGHDVDLLITNPGRKEDDELLHKVVDLLKKQGLLLYEDIKESTFVEGQLPSHKIDAMDNFQKCFAILKLYQPKVDNSAVGTSKKSDMAEVKDWKAVRVDLVITPFEQFAYALLGWTGSGQFRVDLRIYAEEERDMLLDNHRLYDLKKGIFLSAGSEEEIFAHLGLDYVEPWERNA

SEQ ID NO: 3407 - DNA, 1182 bp, synthetic construct
  misc_feature 1..1182: note = Variant of terminal deoxynucleotidyl transferase
  source 1..1182: mol_type = other DNA
atgcatcaccaccatcatcatgggggttctggtcatccgccgagcaataccccggagaaggaggtgccgagcgttatcgcccgtccggttagtcagtacgcgtgccagcgcaagaccacgctgaataactacaacaaaaagttcaccgacgcgctggagatcatggccgagaactacaaatttaaagagaacctgcaggcgtgtctggaagccaagcgcgccgcgagtatttttaaaagcctgccgttcgaggttaccagcatgaaagacatccaaggtctgccgtgcattaccgacgacgtacgtgacgtgatcgaggagatcatcgaagagggcgagagcagccgtgttaaagaaatcctcaatgacgagcgctacaaggcctttaagcagttcaccagcgtgttcggtgtgggcgtgaaaacctcggaaaagtggtaccgtatgggcctccgtacggttgaagaagcaaaggccagtaagagtctgaagctgagcaagatgcagaaggcgggcttcctgtattacgaggatctggcgagcatggttagtaaagaagaagccgatgccgttacgctcatcgtgaaggaaacggtgcgtcgcgttgtgccggatgcgctggtgaccatcgccggcggtttccgccgtggcaaacctatgggccacgacgttgacctgctgatcacgaacccgggccgtcgcgaggatgacgagctgctccacaaagtggttgatctgctcaagaagcaaggtctgctgctgtacgaagacatcaaagagagcacgttcgtggaggggcaactgccaagtcataaaatcgacgccatggacaacttccagaagtgcttcgccattctcaagctgtaccagccgaaggtggataacagtgcggttgggacgagtaagaaaagtgacatggctgaggttaaggattggaaagcggttcgtgtggatctggtgatcacgccattcgagcagttcgcctatgcgctgctcggttggacgggcagcggccaatttcgtctggatctgcgtatctatgcggaggaagagcgcgacatgctgctcgacaaccatcgtctctacgacctgaaaaagggcatctttctgagtgcgggcagcgaagaagagattttcgcgcatctgggtctggattatgtggagccgtgggaacgcaacgcg

SEQ ID NO: 3408 - protein, 394 aa, synthetic construct
  REGION 1..394: note = Variant of terminal deoxynucleotidyl transferase
MHHHHHHGGSGHPPSNTPEKEVPSVIARPVSQYACQRKTTLNNYNKKFTDALEIMAENYKFKENLQACLEAKRAASIFKSLPFEVTSMKDIQGLPCITDDVRDVIEEIIEEGESSRVKEILNDERYKAFKQFTSVFGVGVKTSEKWYRMGLRTVEEAKASKSLKLSKMQKAGFLYYEDLASMVSKEEADAVTLIVKETVRRVVPDALVTIAGGFRRGKPMGHDVDLLITNPGRREDDELLHKVVDLLKKQGLLLYEDIKESTFVEGQLPSHKIDAMDNFQKCFAILKLYQPKVDNSAVGTSKKSDMAEVKDWKAVRVDLVITPFEQFAYALLGWTGSGQFRLDLRIYAEEERDMLLDNHRLYDLKKGIFLSAGSEEEIFAHLGLDYVEPWERNA

SEQ ID NO: 3409 - DNA, 1182 bp, synthetic construct
  misc_feature 1..1182: note = Variant of terminal deoxynucleotidyl transferase
  source 1..1182: mol_type = other DNA
atgcatcaccaccatcatcatgggggttctggtcatccgccgagcaataccccggagaaggaggtgccgagcgttatcgcccgtccggttagtcagtacgcgtgccagcgcaagaccacgctgaataactacaacaaaaagttcaccgacgcgctggagatcatggccgagaactacaaatttaaagagaacctgcaggcgtgtctggaagccaagcgcgccgcgagtatttttaaaagcctgccgttcgaggttaccagcatgaaagacatccaaggtctgccgtgcattaccgacgacgtacgtgacgtgatcgaggagatcatcgaagagggcgagagcagccgtgttaaagaaatcctcaatgacgagcgctacaaggcctttaagcagttcaccagcgtgttcggtgtgggcgtgaaaacctcggaaaagtggtaccgtatgggcctccgtacggttgaagaagcaaaggccagtaagagtctgaagctgagcaagatgcagaaggcgggcttcctgtattacgaggatctggcgagcatggttagtaaagaagaagccgatgccgttacgctcatcgtgaaggaaacggtgcgtcgcgttgctccggatgcgctggtgaccatcgccggcggtttccgccgtggcaaacctatgggccacgacgttgacctgctgatcacgaacccgggccgtcacgaggatgacgagctgctccacaaagtggttgatctgctcaagaagcaaggtctgctgctgtacgaagacatcaaagagagcacgttcgtggaggggcaactgccaagtcataaaatcgacgccatggacaacttccagaagtgcttcgccattctcaagctgtaccagccgaaggtggataacagtgcggttgggacgagtaagaaaagtgacatggctgaggttaaggattggaaagcggttcgtgtggatctggtgatcacgccattcgagcagttcgcctatgcgctgctcggttggacgggcagcggccaatttcgtcgcgatctgcgtatctatgcggaggaagagcgcgacatgctgctcgacaaccatcgtctctacgacctgaaaaagggcatctttctgagtgcgggcagcgaagaagagattttcgcgcatctgggtctggattatgtggagccgtgggaacgcaacgcg

SEQ ID NO: 3410 - protein, 394 aa, synthetic construct
  REGION 1..394: note = Variant of terminal deoxynucleotidyl transferase
MHHHHHHGGSGHPPSNTPEKEVPSVIARPVSQYACQRKTTLNNYNKKFTDALEIMAENYKFKENLQACLEAKRAASIFKSLPFEVTSMKDIQGLPCITDDVRDVIEEIIEEGESSRVKEILNDERYKAFKQFTSVFGVGVKTSEKWYRMGLRTVEEAKASKSLKLSKMQKAGFLYYEDLASMVSKEEADAVTLIVKETVRRVAPDALVTIAGGFRRGKPMGHDVDLLITNPGRHEDDELLHKVVDLLKKQGLLLYEDIKESTFVEGQLPSHKIDAMDNFQKCFAILKLYQPKVDNSAVGTSKKSDMAEVKDWKAVRVDLVITPFEQFAYALLGWTGSGQFRRDLRIYAEEERDMLLDNHRLYDLKKGIFLSAGSEEEIFAHLGLDYVEPWERNA

SEQ ID NO: 3411 - DNA, 1182 bp, synthetic construct
  misc_feature 1..1182: note = Variant of terminal deoxynucleotidyl transferase
  source 1..1182: mol_type = other DNA
atgcatcaccaccatcatcatgggggttctggtcatccgccgagcaataccccggagaaggaggtgccgagcgttatcgcccgtccggttagtcagtacgcgtgccagcgcaagaccacgctgaataactacaacaaaaagttcaccgacgcgctggagatcatggccgagaactacaaatttaaagagaacctgcaggcgtgtctggaagccaagcgcgccgcgagtatttttaaaagcctgccgttcgaggttaccagcatgaaagacatccaaggtctgccgtgcattaccgacgacgtacgtgacgtgatcgaggagatcatcgaagagggcgagagcagccgtgttaaagaaatcctcaatgacgagcgctacaaggcctttaagcagttcaccagcgtgttcggtgtgggcgtgaaaacctcggaaaagtggtaccgtatgggcctccgtacggttgaagaagcaaaggccagtaagagtctgaagctgagcaagatgcagaaggcgggcttcctgtattacgaggatctggcgagcatggttagtaaagaagaagccgatgccgttacgctcatcgtgaaggaaacggtgcgtactgttgttccggatgcgctggtgaccatcgccggcggtttccgccgtggcaaacctatgggccacgacgttgacctgctgatcacgaacccgggccgtaaagaggatgacgagctgctccacaaagtggttgatctgctcaagaagcaaggtctgctgctgtacgaagacatcaaagagagcacgttcgtggaggggcaaattccaagtcataaaatcgacgccatggacaacttccagaagtgcttcgccattctcaagctgtaccagccgaaggtggataacagtgcggttgggacgagtaagaaaagtgacatggctgaggttaaggattggaaagcggttcgtgtggatctggtgatcacgccattcgagcagttcgcctatgcgctgctcggttggacgggcagcggccaatttcgtctggatctgcgtatctatgcggaggaagagcgcgacatgctgctcgacaaccatcgtctctacgacctgaaaaagggcatctttctgagtgcgggcagcgaagaagagattttcgcgcatctgggtctggattatgtggagccgtgggaacgcaacgcg

SEQ ID NO: 3412 - protein, 394 aa, synthetic construct
  REGION 1..394: note = Variant of terminal deoxynucleotidyl transferase
MHHHHHHGGSGHPPSNTPEKEVPSVIARPVSQYACQRKTTLNNYNKKFTDALEIMAENYKFKENLQACLEAKRAASIFKSLPFEVTSMKDIQGLPCITDDVRDVIEEIIEEGESSRVKEILNDERYKAFKQFTSVFGVGVKTSEKWYRMGLRTVEEAKASKSLKLSKMQKAGFLYYEDLASMVSKEEADAVTLIVKETVRTVVPDALVTIAGGFRRGKPMGHDVDLLITNPGRKEDDELLHKVVDLLKKQGLLLYEDIKESTFVEGQIPSHKIDAMDNFQKCFAILKLYQPKVDNSAVGTSKKSDMAEVKDWKAVRVDLVITPFEQFAYALLGWTGSGQFRLDLRIYAEEERDMLLDNHRLYDLKKGIFLSAGSEEEIFAHLGLDYVEPWERNA

SEQ ID NO: 3413 - DNA, 1182 bp, synthetic construct
  misc_feature 1..1182: note = Variant of terminal deoxynucleotidyl transferase
  source 1..1182: mol_type = other DNA
atgcatcaccaccatcatcatgggggttctggtcatccgccgagcaataccccggagaaggaggtgccgagcgttatcgcccgtccggttagtcagtacgcgtgccagcgcaagaccacgctgaataactacaacaaaaagttcaccgacgcgctggagatcatggccgagaactacaaatttaaagagaacctgcaggcgtgtctggaagccaagcgcgccgcgagtatttttaaaagcctgccgttcgaggttaccagcatgaaagacatccaaggtctgccgtgcattaccgacgacgtacgtgacgtgatcgaggagatcatcgaagagggcgagagcagccgtgttaaagaaatcctcaatgacgagcgctacaaggcctttaagcagttcaccagcgtgttcggtgtgggcgtgaaaacctcggaaaagtggtaccgtatgggcctccgtacggttgaagaagcaaaggccagtaagagtctgaagctgagcaagatgcagaaggcgggcttcctgtattacgaggatctggcgagcatggttagtaaagaagaagccgatgccgttacgctcatcgtgaaggaaacggtgcgtactgttgttccggatgcgctggtgaccatcgccggcggtttccgccgtggcaaacctatgggccacgacgttgacctgctgatcacgaacccgggccgtaaaacggatgacgagctgctccacaaagtggttgatctgctcaagaagcaaggtctgctgctgtacgaagacatcaaagagagcacgttcgtggaggggcaactgccaagtcataaaatcgacgccatggacaacttccagaagtgcttcgccattctcaagctgtaccagccgaaggtggataacagtgcggttgggacgagtaagaaaagtgacatggctgaggttaaggattggaaagcggttcgtgtggatctggtgatcacgccattcgagcagttcgcctatgcgctgctcggttggacgggcagcggccaatttcgtgtggatctgcgtcgctatgcggaggaagagcgcgacatgctgctcgacaaccatcgtctctacgacctgaaaaagggcatctttctgagtgcgggcagcgaagaagagattttcgcgcatctgggtctggattatgtggagccgtgggaacgcaacgcg

SEQ ID NO: 3414 - protein, 394 aa, synthetic construct
  REGION 1..394: note = Variant of terminal deoxynucleotidyl transferase
MHHHHHHGGSGHPPSNTPEKEVPSVIARPVSQYACQRKTTLNNYNKKFTDALEIMAENYKFKENLQACLEAKRAASIFKSLPFEVTSMKDIQGLPCITDDVRDVIEEIIEEGESSRVKEILNDERYKAFKQFTSVFGVGVKTSEKWYRMGLRTVEEAKASKSLKLSKMQKAGFLYYEDLASMVSKEEADAVTLIVKETVRTVVPDALVTIAGGFRRGKPMGHDVDLLITNPGRKTDDELLHKVVDLLKKQGLLLYEDIKESTFVEGQLPSHKIDAMDNFQKCFAILKLYQPKVDNSAVGTSKKSDMAEVKDWKAVRVDLVITPFEQFAYALLGWTGSGQFRVDLRRYAEEERDMLLDNHRLYDLKKGIFLSAGSEEEIFAHLGLDYVEPWERNA

SEQ ID NO: 3415 - DNA, 1182 bp, synthetic construct
  misc_feature 1..1182: note = Variant of terminal deoxynucleotidyl transferase
  source 1..1182: mol_type = other DNA
atgcatcaccaccatcatcatgggggttctggtcatccgccgagcaataccccggagaaggaggtgccgagcgttatcgcccgtccggttagtcagtacgcgtgccagcgcaagaccacgctgaataactacaacaaaaagttcaccgacgcgctggagatcatggccgagaactacaaatttaaagagaacctgcaggcgtgtctggaagccaagcgcgccgcgagtatttttaaaagcctgccgttcgaggttaccagcatgaaagacatccaaggtctgccgtgcattaccgacgacgtacgtgacgtgatcgaggagatcatcgaagagggcgagagcagccgtgttaaagaaatcctcaatgacgagcgctacaaggcctttaagcagttcaccagcgtgttcggtgtgggcgtgaaaacctcggaaaagtggtaccgtatgggcctccgtacggttgaagaagcaaaggccagtaagagtctgaagctgagcaagatgcagaaggcgggcttcctgtattacgaggatctggcgagcatggttagtaaagaagaagccgatgccgttacgctcatcgtgaaggaaacggtgcgtactgttgttccggatgcgctggtgaccatcgccggcggtttccgccgtggcaaacctatgggccacgacgttgacctgctgatcacgaacccgggccgtaaagaggatgacgagctgctccacaaagtggttgatctgctcaagaagcaaggtctgctgctgtacgaagacatcaaagagagcacgttcgtggaggggcaactgccaagtcataaaatcgacgccatggacaacttccagaagtgcttcgccattctcaagctgtaccagccgaaggtggataacagtgcggttgggacgagtaagaaaagtgacatggctgaggttaaggattggaaagcggttcgtgtggatctggtgatcacgccattcgagcagttcgcctatgcgctgctcggttggacgggcagcggccaatttcgtgtggatctgcgtcgctatgcggaggaagagcgcgacatgctgctcgacaaccatcgtctctacgacctgaaaaagggcatctttctgagtgcgggcagcgaagaagagattttcgcgcatctgggtctggattatgtggagccgtgggaacgcaacgcg

SEQ ID NO: 3416 - protein, 394 aa, synthetic construct
  REGION 1..394: note = Variant of terminal deoxynucleotidyl transferase
MHHHHHHGGSGHPPSNTPEKEVPSVIARPVSQYACQRKTTLNNYNKKFTDALEIMAENYKFKENLQACLEAKRAASIFKSLPFEVTSMKDIQGLPCITDDVRDVIEEIIEEGESSRVKEILNDERYKAFKQFTSVFGVGVKTSEKWYRMGLRTVEEAKASKSLKLSKMQKAGFLYYEDLASMVSKEEADAVTLIVKETVRTVVPDALVTIAGGFRRGKPMGHDVDLLITNPGRKEDDELLHKVVDLLKKQGLLLYEDIKESTFVEGQLPSHKIDAMDNFQKCFAILKLYQPKVDNSAVGTSKKSDMAEVKDWKAVRVDLVITPFEQFAYALLGWTGSGQFRVDLRRYAEEERDMLLDNHRLYDLKKGIFLSAGSEEEIFAHLGLDYVEPWERNA

SEQ ID NO: 3417 - DNA, 1182 bp, synthetic construct
  misc_feature 1..1182: note = Variant of terminal deoxynucleotidyl transferase
  source 1..1182: mol_type = other DNA
atgcatcaccaccatcatcatgggggttctggtcatccgccgagcaataccccggagaaggaggtgccgagcgttatcgcccgtccggttagtcagtacgcgtgccagcgcaagaccacgctgaataactacaacaaaaagttcaccgacgcgctggagatcatggccgagaactacaaatttaaagagaacctgcaggcgtgtctggaagccaagcgcgccgcgagtatttttaaaagcctgccgttcgaggttaccagcatgaaagacatccaaggtctgccgtgcattaccgacgacgtacgtgacgtgatcgaggagatcatcgaagagggcgagagcagccgtgttaaagaaatcctcaatgacgagcgctacaaggcctttaagcagttcaccagcgtgttcggtgtgggcgtgaaaacctcggaaaagtggtaccgtatgggcctccgtacggttgaagaagcaaaggccagtaagagtctgaagctgagcaagatgcagaaggcgggcttcctgtattacgaggatctggcgagcatggttagtaaagaagaagccgatgccgttacgctcatcgtgaaggaaacggtgcgtactgttgttccggatgcgctggtgaccatcgccggcggtttccgccgtggcaaacctatgggccacgacgttgacctgctgatcacgaacccgggccgtaaagaggatgacgagctgctccacaaagtggttgatctgctcaagaagcaaggtctgctgctgtacgaagacatcaaagagagcacgttcgtggaggggcaactgccaagtcataaaatcgacgccatggacaacttccagaagtgcttcgccattctcaagctgtaccagccgaaggtggataacagtgcggttgggacgagtaagaaaagtgacatggctgaggttaaggattggaaagcggttcgtgtggatctggtgatcacgccattcgagcagttcgcctatgcgctgctcggttggacgggcagcggccaatttcgtgtggatctgcgtatctatgcggaggaagagcgcgacatgctgctcgacaaccatcgtctctacgacctgaaaaagggcatctttctgagtgcgggcagcgaagaagagattttcgcgcatctgggtctggattatgtggagccgtgggaacgcaacgcg

SEQ ID NO: 3418 - protein, 394 aa, synthetic construct
  REGION 1..394: note = Variant of terminal deoxynucleotidyl transferase
MHHHHHHGGSGHPPSNTPEKEVPSVIARPVSQYACQRKTTLNNYNKKFTDALEIMAENYKFKENLQACLEAKRAASIFKSLPFEVTSMKDIQGLPCITDDVRDVIEEIIEEGESSRVKEILNDERYKAFKQFTSVFGVGVKTSEKWYRMGLRTVEEAKASKSLKLSKMQKAGFLYYEDLASMVSKEEADAVTLIVKETVRTVVPDALVTIAGGFRRGKPMGHDVDLLITNPGRKEDDELLHKVVDLLKKQGLLLYEDIKESTFVEGQLPSHKIDAMDNFQKCFAILKLYQPKVDNSAVGTSKKSDMAEVKDWKAVRVDLVITPFEQFAYALLGWTGSGQFRVDLRIYAEEERDMLLDNHRLYDLKKGIFLSAGSEEEIFAHLGLDYVEPWERNA

SEQ ID NO: 3419 - DNA, 1182 bp, synthetic construct
  misc_feature 1..1182: note = Variant of terminal deoxynucleotidyl transferase
  source 1..1182: mol_type = other DNA
atgcatcaccaccatcatcatgggggttctggtcatccgccgagcaataccccggagaaggaggtgccgagcgttatcgcccgtccggttagtcagtacgcgtgccagcgcaagaccacgctgaataactacaacaaaaagttcaccgacgcgctggagatcatggccgagaactacaaatttaaagagaacctgcaggcgtgtctggaagccaagcgcgccgcgagtatttttaaaagcctgccgttcgaggttaccagcatgaaagacatccaaggtctgccgtgcattaccgacgacgtacgtgacgtgatcgaggagatcatcgaagagggcgagagcagccgtgttaaagaaatcctcaatgacgagcgctacaaggcctttaagcagttcaccagcgtgttcggtgtgggcgtgaaaacctcggaaaagtggtaccgtatgggcctccgtacggttgaagaagcaaaggccagtaagagtctgaagctgagcaagatgcagaaggcgggcttcctgtattacgaggatctggcgagcatggttagtaaagaagaagccgatgccgttacgctcatcgtgaaggaaacggtgcgtaccgttgtgccggatgcgctggtgaccatcgccggcggtttccgccgtggcaaacctatgggccacgacgttgacctgctgatcacgaacccgggccgtaaagaggatgacgagctgctccacaaagtggttgatctgctcaagaagcaaggtctgctgctgtacgaagacatcaaagagagcacgttcgtggaggggcaaattccaagtcataaaatcgacgccatggacaacttccagaagtgcttcgccattctcaagctgtaccagccgaaggtggataacagtgcggttgggacgagtaagaaaagtgacatggctgaggttaaggattggaaagcggttcgtgtggatctggtgatcacgccattcgagcagttcgcctatgcgctgctcggttggacgggcagcggccaatttcgtgtggatctgcgtcgctatgcggaggaagagcgcgacatgctgctcgacaaccatcgtctctacgacctgaaaaagggcatctttctgagtgcgggcagcgaagaagagattttcgcgcatctgggtctggattatgtggagccgtgggaacgcaacgcg

SEQ ID NO: 3420 - protein, 394 aa, synthetic construct
  REGION 1..394: note = Variant of terminal deoxynucleotidyl transferase
MHHHHHHGGSGHPPSNTPEKEVPSVIARPVSQYACQRKTTLNNYNKKFTDALEIMAENYKFKENLQACLEAKRAASIFKSLPFEVTSMKDIQGLPCITDDVRDVIEEIIEEGESSRVKEILNDERYKAFKQFTSVFGVGVKTSEKWYRMGLRTVEEAKASKSLKLSKMQKAGFLYYEDLASMVSKEEADAVTLIVKETVRTVVPDALVTIAGGFRRGKPMGHDVDLLITNPGRKEDDELLHKVVDLLKKQGLLLYEDIKESTFVEGQIPSHKIDAMDNFQKCFAILKLYQPKVDNSAVGTSKKSDMAEVKDWKAVRVDLVITPFEQFAYALLGWTGSGQFRVDLRRYAEEERDMLLDNHRLYDLKKGIFLSAGSEEEIFAHLGLDYVEPWERNA

SEQ ID NO: 3421 - DNA, 1182 bp, synthetic construct
  misc_feature 1..1182: note = Variant of terminal deoxynucleotidyl transferase
  source 1..1182: mol_type = other DNA
atgcatcaccaccatcatcatgggggttctggtcatccgccgagcaataccccggagaaggaggtgccgagcgttatcgcccgtccggttagtcagtacgcgtgccagcgcaagaccacgctgaataactacaacaaaaagttcaccgacgcgctggagatcatggccgagaactacaaatttaaagagaacctgcaggcgtgtctggaagccaagcgcgccgcgagtatttttaaaagcctgccgttcgaggttaccagcatgaaagacatccaaggtctgccgtgcattaccgacgacgtacgtgacgtgatcgaggagatcatcgaagagggcgagagcagccgtgttaaagaaatcctcaatgacgagcgctacaaggcctttaagcagttcaccagcgtgttcggtgtgggcgtgaaaacctcggaaaagtggtaccgtatgggcctccgtacggttgaagaagcaaaggccagtaagagtctgaagctgagcaagatgcagaaggcgggcttcctgtattacgaggatctggcgagcatggttagtaaagaagaagccgatgccgttacgctcatcgtgaaggaaacggtgcgtactgttgttccggatgcgctggtgaccatcgccggcggtttccgccgtggcaaacctatgggccacgacgttgacctgctgatcacgaacccgggccgtaaaacggatgacgagctgctccacaaagtggttgatctgctcaagaagcaaggtctgctgctgtacgaagacatcaaagagagcacgttcgtggaggggcaagttccaagtcataaaatcgacgccatggacaacttccagaagtgcttcgccattctcaagctgtaccagccgaaggtggataacagtgcggttgggacgagtaagaaaagtgacatggctgaggttaaggattggaaagcggttcgtgtggatctggtgatcacgccattcgagcagttcgcctatgcgctgctcggttggacgggcagcggccaatttcgtctggatctgcgtatctatgcggaggaagagcgcgacatgctgctcgacaaccatcgtctctacgacctgaaaaagggcatctttctgagtgcgggcagcgaagaagagattttcgcgcatctgggtctggattatgtggagccgtgggaacgcaacgcg

SEQ ID NO: 3422 - protein, 394 aa, synthetic construct
  REGION 1..394: note = Variant of terminal deoxynucleotidyl transferase
MHHHHHHGGSGHPPSNTPEKEVPSVIARPVSQYACQRKTTLNNYNKKFTDALEIMAENYKFKENLQACLEAKRAASIFKSLPFEVTSMKDIQGLPCITDDVRDVIEEIIEEGESSRVKEILNDERYKAFKQFTSVFGVGVKTSEKWYRMGLRTVEEAKASKSLKLSKMQKAGFLYYEDLASMVSKEEADAVTLIVKETVRTVVPDALVTIAGGFRRGKPMGHDVDLLITNPGRKTDDELLHKVVDLLKKQGLLLYEDIKESTFVEGQVPSHKIDAMDNFQKCFAILKLYQPKVDNSAVGTSKKSDMAEVKDWKAVRVDLVITPFEQFAYALLGWTGSGQFRLDLRIYAEEERDMLLDNHRLYDLKKGIFLSAGSEEEIFAHLGLDYVEPWERNA

SEQ ID NO: 3423 - DNA, 1182 bp, synthetic construct
  misc_feature 1..1182: note = Variant of terminal deoxynucleotidyl transferase
  source 1..1182: mol_type = other DNA
atgcatcaccaccatcatcatgggggttctggtcatccgccgagcaataccccggagaaggaggtgccgagcgttatcgcccgtccggttagtcagtacgcgtgccagcgcaagaccacgctgaataactacaacaaaaagttcaccgacgcgctggagatcatggccgagaactacaaatttaaagagaacctgcaggcgtgtctggaagccaagcgcgccgcgagtatttttaaaagcctgccgttcgaggttaccagcatgaaagacatccaaggtctgccgtgcattaccgacgacgtacgtgacgtgatcgaggagatcatcgaagagggcgagagcagccgtgttaaagaaatcctcaatgacgagcgctacaaggcctttaagcagttcaccagcgtgttcggtgtgggcgtgaaaacctcggaaaagtggtaccgtatgggcctccgtacggttgaagaagcaaaggccagtaagagtctgaagctgagcaagatgcagaaggcgggcttcctgtattacgaggatctggcgagcggggttagtaaagaagaagccgatgccgttacgctcatcgtgaaggaaacggtgcgtcgcgttgctccggatgcgctggtgaccatcgccggcggtttccgccgtggcaaacctatgggccacgacgttgacctgctgatcacgaacccgggccgtcgcgaggatgacgagctgctccacaaagtggttgatctgctcaagaagcaaggtctgctgctgtacgaagacatcaaagagagcacgttcgtggaggggcaactgccaagtcataaaatcgacgccatggacaacttccagaagtgcttcgccattctcaagctgtaccagccgaaggtggataacagtgcggttgggacgagtaagaaaagtgacatggctgaggttaaggattggaaagcggttcgtgtggatctggtgatcacgccattcgagcagttcgcctatgcgctgctcggttggacgggcagcggccaatttcgtgtggatctgcgtatctatgcggaggaagagcgcgacatgctgctcgacaaccatcgtctctacgacctgaaaaagggcatctttctgagtgcgggcagcgaagaagagattttcgcgcatctgggtctggattatgtggagccgtgggaacgcaacgcg

SEQ ID NO: 3424 - protein, 394 aa, synthetic construct
  REGION 1..394: note = Variant of terminal deoxynucleotidyl transferase
MHHHHHHGGSGHPPSNTPEKEVPSVIARPVSQYACQRKTTLNNYNKKFTDALEIMAENYKFKENLQACLEAKRAASIFKSLPFEVTSMKDIQGLPCITDDVRDVIEEIIEEGESSRVKEILNDERYKAFKQFTSVFGVGVKTSEKWYRMGLRTVEEAKASKSLKLSKMQKAGFLYYEDLASGVSKEEADAVTLIVKETVRRVAPDALVTIAGGFRRGKPMGHDVDLLITNPGRREDDELLHKVVDLLKKQGLLLYEDIKESTFVEGQLPSHKIDAMDNFQKCFAILKLYQPKVDNSAVGTSKKSDMAEVKDWKAVRVDLVITPFEQFAYALLGWTGSGQFRVDLRIYAEEERDMLLDNHRLYDLKKGIFLSAGSEEEIFAHLGLDYVEPWERNA

SEQ ID NO: 3425 - DNA, 1182 bp, synthetic construct
  misc_feature 1..1182: note = Variant of terminal deoxynucleotidyl transferase
  source 1..1182: mol_type = other DNA
atgcatcaccaccatcatcatgggggttctggtcatccgccgagcaataccccggagaaggaggtgccgagcgttatcgcccgtccggttagtcagtacgcgtgccagcgcaagaccacgctgaataactacaacaaaaagttcaccgacgcgctggagatcatggccgagaactacaaatttaaagagaacctgcaggcgtgtctggaagccaagcgcgccgtgagtatttttaaaagcctgccgttcgaggttaccagcatgaaagacatccaaggtctgccgtgcattaccgacgacgtacgtgacgtgatcgaggagatcatcgaagagggcgagagcagccgtgttaaagaaatcctcaatgacgagcgctacaaggcctttaagcagttcaccagcgtgttcggtgtgggcgtgaaaacctcggaaaagtggtaccgtatgggcctccgtacggttgaagaagcaaaggccagtaagagtctgaagctgagcaagatgcagaaggcgggcttcctgtattacgaggatctggcgagcatggttagtaaagaagaagccgatgccgttacgctcatcgtgaaggaaacggtgcgtaccgttgtgccggatgcgctggtgaccatcgccggcggtttccgccgtggcaaacctatgggccacgacgttgactttctgatcacgaacccgggccgtaaagaagatgacgagctgctccacaaagtggttgatctgctcaagaagcaaggtctgctgctgtacgaagacatcaaagagagcacgttcgtggaggggcaactgccaagtcataaaatcgacgccatggacaacttccagaagtgcttcgccattctcaagctgtaccagccgaaggtggataacagtgcggttgggacgagtaagaaaagtgacatggctgaggttaaggattggaaagcggttcgtgtggatctggtgatcacgccattcgagcagttcgcctatgcgctgctcggttggacgggcagcggccaatttcgtcgcgatctgcgtcgctatgcggaggaagagcgcgacatgctgctcgacaaccatcgtctctacgacctgaaaaagggcatctttctgagtgcgggcagcgaagaagagattttcgcgcatctgggtctggattatgtggagccgtgggaacgcaacgcg

SEQ ID NO: 3426 - protein, 394 aa, synthetic construct
  REGION 1..394: note = Variant of terminal deoxynucleotidyl transferase
MHHHHHHGGSGHPPSNTPEKEVPSVIARPVSQYACQRKTTLNNYNKKFTDALEIMAENYKFKENLQACLEAKRAVSIFKSLPFEVTSMKDIQGLPCITDDVRDVIEEIIEEGESSRVKEILNDERYKAFKQFTSVFGVGVKTSEKWYRMGLRTVEEAKASKSLKLSKMQKAGFLYYEDLASMVSKEEADAVTLIVKETVRTVVPDALVTIAGGFRRGKPMGHDVDFLITNPGRKEDDELLHKVVDLLKKQGLLLYEDIKESTFVEGQLPSHKIDAMDNFQKCFAILKLYQPKVDNSAVGTSKKSDMAEVKDWKAVRVDLVITPFEQFAYALLGWTGSGQFRRDLRRYAEEERDMLLDNHRLYDLKKGIFLSAGSEEEIFAHLGLDYVEPWERNA

SEQ ID NO: 3427 - DNA, 1182 bp, synthetic construct
  misc_feature 1..1182: note = Variant of terminal deoxynucleotidyl transferase
  source 1..1182: mol_type = other DNA
atgcatcaccaccatcatcatgggggttctggtcatccgccgagcaataccccggagaaggaggtgccgagcgttatcgcccgtccggttagtcagtacgcgtgccagcgcaagaccacgctgaataactacaacaaaaagttcaccgacgcgctggagatcatggccgagaactacaaatttaaagagaacctgcaggcgtgtctggaagccaagcgcgccgcgagtatttttaaaagcctgccgttcgaggttaccagcatgaaagacatccaaggtctgccgtgcattaccgacgacgtacgtgacgtgatcgaggagatcatcgaagagggcgagagcagccgtgttaaagaaatcctcaatgacgagcgctacaaggcctttaagcagttcaccagcgtgttcggtgtgggcgtgaaaacctcggaaaagtggtaccgtatgggcctccgtacggttgaagaagcaaaggccagtaagagtctgaagctgagcaagatgcagaaggcgggcttcctgtattacgaggatctggcgagcatggttagtaaagaagaagccgatgccgttacgctcatcgtgaaggaaacggtgcgtcgcgttgctccggatgcgctggtgaccatcgccggcggtttccgccgtggcaaacctatgggccacgacgttgacctgctgatcacgaacccgggccgtaaagaggatgacgagctgctccacaaagtggttgatctgctcaagaagcaaggtctgctgctgtacgaagacatcaaagagagcacgttcgtggaggggcaaattccaagtcataaaatcgacgccatggacaacttccagaagtgcttcgccattctcaagctgtaccagccgaaggtggataacagtgcggttgggacgagtaagaaaagtgacatggctgaggttaaggattggaaagcggttcgtgtggatctggtgatcacgccattcgagcagttcgcctatgcgctgctcggttggacgggcagcggccaatttcgtgtggatctgcgtcgctatgcggaggaagagcgcgacatgctgctcgacaaccatcgtctctacgacctgaaaaagggcatctttctgagtgcgggcagcgaagaagagattttcgcgcatctgggtctggattatgtggagccgtgggaacgcaacgcg

SEQ ID NO: 3428 - protein, 394 aa, synthetic construct
  REGION 1..394: note = Variant of terminal deoxynucleotidyl transferase
MHHHHHHGGSGHPPSNTPEKEVPSVIARPVSQYACQRKTTLNNYNKKFTDALEIMAENYKFKENLQACLEAKRAASIFKSLPFEVTSMKDIQGLPCITDDVRDVIEEIIEEGESSRVKEILNDERYKAFKQFTSVFGVGVKTSEKWYRMGLRTVEEAKASKSLKLSKMQKAGFLYYEDLASMVSKEEADAVTLIVKETVRRVAPDALVTIAGGFRRGKPMGHDVDLLITNPGRKEDDELLHKVVDLLKKQGLLLYEDIKESTFVEGQIPSHKIDAMDNFQKCFAILKLYQPKVDNSAVGTSKKSDMAEVKDWKAVRVDLVITPFEQFAYALLGWTGSGQFRVDLRRYAEEERDMLLDNHRLYDLKKGIFLSAGSEEEIFAHLGLDYVEPWERNA

SEQ ID NO: 3429 - DNA, 1182 bp, synthetic construct
  misc_feature 1..1182: note = Variant of terminal deoxynucleotidyl transferase
  source 1..1182: mol_type = other DNA
atgcatcaccaccatcatcatgggggttctggtcatccgccgagcaataccccggagaaggaggtgccgagcgttatcgcccgtccggttagtcagtacgcgtgccagcgcaagaccacgctgaataactacaacaaaaagttcaccgacgcgctggagatcatggccgagaactacaaatttaaagagaacctgcaggcgtgtctggaagccaagcgcgccgcgagtatttttaaaagcctgccgttcgaggttaccagcatgaaagacatccaaggtctgccgtgcattaccgacgacgtacgtgacgtgatcgaggagatcatcgaagagggcgagagcagccgtgttaaagaaatcctcaatgacgagcgctacaaggcctttaagcagttcaccagcgtgttcggtgtgggcgtgaaaacctcggaaaagtggtaccgtatgggcctccgtacggttgaagaagcaaaggccagtaagagtctgaagctgagcaagatgcagaaggcgggcttcctgtattacgaggatctggcgagcatggttagtaaagaagaagccgatgccgttacgctcatcgtgaaggaaacggtgcgtcgcgttgttccggatgcgctggtgaccatcgccggcggtttccgccgtggcaaacctatgggccacgacgttgacctgctgatcacgaacccgggccgtaaaacggatgacgagctgctccacaaagtggttgatctgctcaagaagcaaggtctgctgctgtacgaagacatcaaagagagcacgttcgtggaggggcaactgccaagtcataaaatcgacgccatggacaacttccagaagtgcttcgccattctcaagctgtaccagccgaaggtggataacagtgcggttgggacgagtaagaaaagtgacatggctgaggttaaggattggaaagcggttcgtgtggatctggtgatcacgccattcgagcagttcgcctatgcgctgctcggttggacgggcagcggccaatttcgtctggatctgcgtcgctatgcggaggaagagcgcgacatgctgctcgacaaccatcgtctctacgacctgaaaaagggcatctttctgagtgcgggcagcgaagaagagattttcgcgcatctgggtctggattatgtggagccgtgggaacgcaacgcg

SEQ ID NO: 3430 - protein, 394 aa, synthetic construct
  REGION 1..394: note = Variant of terminal deoxynucleotidyl transferase
MHHHHHHGGSGHPPSNTPEKEVPSVIARPVSQYACQRKTTLNNYNKKFTDALEIMAENYKFKENLQACLEAKRAASIFKSLPFEVTSMKDIQGLPCITDDVRDVIEEIIEEGESSRVKEILNDERYKAFKQFTSVFGVGVKTSEKWYRMGLRTVEEAKASKSLKLSKMQKAGFLYYEDLASMVSKEEADAVTLIVKETVRRVVPDALVTIAGGFRRGKPMGHDVDLLITNPGRKTDDELLHKVVDLLKKQGLLLYEDIKESTFVEGQLPSHKIDAMDNFQKCFAILKLYQPKVDNSAVGTSKKSDMAEVKDWKAVRVDLVITPFEQFAYALLGWTGSGQFRLDLRRYAEEERDMLLDNHRLYDLKKGIFLSAGSEEEIFAHLGLDYVEPWERNA

SEQ ID NO: 3431 - DNA, 1182 bp, synthetic construct
  misc_feature 1..1182: note = Variant of terminal deoxynucleotidyl transferase
  source 1..1182: mol_type = other DNA
atgcatcaccaccatcatcatgggggttctggtcatccgccgagcaataccccggagaaggaggtgccgagcgttatcgcccgtccggttagtcagtacgcgtgccagcgcaagaccacgctgaataactacaacaaaaagttcaccgacgcgctggagatcatggccgagaactacaaatttaaagagaacctgcaggcgtgtctggaagccaagcgcgccgtgagtatttttaaaagcctgccgttcgaggttaccagcatgaaagacatccaaggtctgccgtgcattaccgacgacgtacgtgacgtgatcgaggagatcatcgaagagggcgagagcagccgtgttaaagaaatcctcaatgacgagcgctacaaggcctttaagcagttcaccagcgtgttcggtgtgggcgtgaaaacctcggaaaagtggtaccgtatgggcctccgtacggttgaagaagcaaaggccagtaagagtctgaagctgagcaagatgcagaaggcgggcttcctgtattacgaggatctggcgagcatggttagtaaagaagaagccgatgccgttacgctcatcgtgaaggaaacggtgcgtaccgttgtgccggatgcgctggtgaccatcgccggcggtttccgccgtggcaaacctatgggccacgacgttgactttctgatcacgaacccgggcagtaaagaagatgacgagctgctccacaaagtggttgatctgctcaagaagcaaggtctgctgctgtacgaagacatcaaagagagcacgttcgtggaggggcaactgccaagtcataaaatcgacgccatggacaacttccagaagtgcttcgccattctcaagctgtaccagccgaaggtggataacagtgcggttgggacgagtaagaaaagtgacatggctgaggttaaggattggaaagcggttcgtgtggatctggtgatcacgccattcgagcagttcgcctatgcgctgctcggttggacgggcagcggccaatttcgtcgcgatctgcgtcgctatgcggaggaagagcgcgacatgctgctcgacaaccatcgtctctacgacctgaaagaaggcatctttctgagtgcgggcagcgaagaagagattttcgcgcatctgggtctggattatgttgagccgtgggaacgcaacgcg

SEQ ID NO: 3432 - protein, 394 aa, synthetic construct
  REGION 1..394: note = Variant of terminal deoxynucleotidyl transferase
MHHHHHHGGSGHPPSNTPEKEVPSVIARPVSQYACQRKTTLNNYNKKFTDALEIMAENYKFKENLQACLEAKRAVSIFKSLPFEVTSMKDIQGLPCITDDVRDVIEEIIEEGESSRVKEILNDERYKAFKQFTSVFGVGVKTSEKWYRMGLRTVEEAKASKSLKLSKMQKAGFLYYEDLASMVSKEEADAVTLIVKETVRTVVPDALVTIAGGFRRGKPMGHDVDFLITNPGSKEDDELLHKVVDLLKKQGLLLYEDIKESTFVEGQLPSHKIDAMDNFQKCFAILKLYQPKVDNSAVGTSKKSDMAEVKDWKAVRVDLVITPFEQFAYALLGWTGSGQFRRDLRRYAEEERDMLLDNHRLYDLKEGIFLSAGSEEEIFAHLGLDYVEPWERNA

SEQ ID NO: 3433 - DNA, 1182 bp, synthetic construct
  misc_feature 1..1182: note = Variant of terminal deoxynucleotidyl transferase
  source 1..1182: mol_type = other DNA
atgcatcaccaccatcatcatgggggttctggtcatccgccgagcaataccccggagaaggaggtgccgagcgttatcgcccgtccggttagtcagtacgcgtgccagcgcaagaccacgctgaataactacaacaaaaagttcaccgacgcgctggagatcatggccgagaactacaaatttaaagagaacctgcaggcgtgtctggaagccaagcgcgccgcgagtatttttaaaagcctgccgttcgaggttaccagcatgaaagacatccaaggtctgccgtgcattaccgacgacgtacgtgacgtgatcgaggagatcatcgaagagggcgagagcagccgtgttaaagaaatcctcaatgacgagcgctacaaggcctttaagcagttcaccagcgtgttcggtgtgggcgtgaaaacctcggaaaagtggtaccgtatgggcctccgtacggttgaagaagcaaaggccagtaagagtctgaagctgagcaagatgcagaaggcgggcttcctgtattacgaggatctggcgagcatggttagtaaagaagaagccgatgccgttacgctcatcgtgaaggaaacggtgcgtcgcgttgctccggatgcgctggtgaccatcgccggcggtttccgccgtggcaaacctatgggccacgacgttgacctgctgatcacgaacccgggccgtaaagaggatgacgagctgctccacaaagtggttgatctgctcaagaagcaaggtctgctgctgtacgaagacatcaaagagagcacgttcgtggaggggcaactgccaagtcataaaatcgacgccatggacaacttccagaagtgcttcgccattctcaagctgtaccagccgaaggtggataacagtgcggttgggacgagtaagaaaagtgacatggctgaggttaaggattggaaagcggttcgtgtggatctggtgatcacgccattcgagcagttcgcctatgcgctgctcggttggacgggcagcggccaatttcgtcgcgatctgcgtatctatgcggaggaagagcgcgacatgctgctcgacaaccatcgtctctacgacctgaaaaagggcatctttctgagtgcgggcagcgaagaagagattttcgcgcatctgggtctggattatgtggagccgtgggaacgcaacgcg

SEQ ID NO: 3434 - protein, 394 aa, synthetic construct
  REGION 1..394: note = Variant of terminal deoxynucleotidyl transferase
MHHHHHHGGSGHPPSNTPEKEVPSVIARPVSQYACQRKTTLNNYNKKFTDALEIMAENYKFKENLQACLEAKRAASIFKSLPFEVTSMKDIQGLPCITDDVRDVIEEIIEEGESSRVKEILNDERYKAFKQFTSVFGVGVKTSEKWYRMGLRTVEEAKASKSLKLSKMQKAGFLYYEDLASMVSKEEADAVTLIVKETVRRVAPDALVTIAGGFRRGKPMGHDVDLLITNPGRKEDDELLHKVVDLLKKQGLLLYEDIKESTFVEGQLPSHKIDAMDNFQKCFAILKLYQPKVDNSAVGTSKKSDMAEVKDWKAVRVDLVITPFEQFAYALLGWTGSGQFRRDLRIYAEEERDMLLDNHRLYDLKKGIFLSAGSEEEIFAHLGLDYVEPWERNA

SEQ ID NO: 3435 - DNA, 1182 bp, synthetic construct
  misc_feature 1..1182: note = Variant of terminal deoxynucleotidyl transferase
  source 1..1182: mol_type = other DNA
atgcatcaccaccatcatcatgggggttctggtcatccgccgagcaataccccggagaaggaggtgccgagcgttatcgcccgtccggttagtcagtacgcgtgccagcgcaagaccacgctgaataactacaacaaaaagttcaccgacgcgctggagatcatggccgagaactacaaatttaaagagaacctgcaggcgtgtctggaagccaagcgcgccgcgagtatttttaaaagcctgccgttcgaggttaccagcatgaaagacatccaaggtctgccgtgcattaccgacgacgtacgtgacgtgatcgatgagatcatcgaagagggcgagagcagccgtgttaaagaaatcctcaatgacgagcgctacaaggcctttaagcagttcaccagcgtgttcggtgtgggcgtgaaaacctcggaaaagtggtaccgtatgggcctccgtacggttgaagaagcaaaggccagtaagagtctgaagctgagcaagatgcagaaggcgggcttcctgtattacgaggatctggcgagcggggttagtaaagaagaagccgatgccgttacgctcatcgtgaaggaaacggtgcgtactgttgctccggatgcgctggtgaccatcgccggcggtttccgccgtggcaaacctatgggccacgacgttgacctgctgatcacgaacccgggccgtaaaacggatgacgagctcctccacaaagtggttgatctgctcaagaagcaaggtctgctgctgtacgaagacatcaaagagagcacgttcgtggaggggcaactgccaagtcataaaatcgacgccatggacaacttccagaagtgcttcgccattctcaagctgtaccagccgaaggtggataacagtgcggttgggacgagtaagaaaagtgacatggctgaggttaaggattggaaagcggttcgtgtggatctggtgatcacgccattcgagcagttcgcctatgcgctgctcggttggacgggcagcggccaatttcgtctggatctgcgtatctatgcggaggaagagcgcgacatgctgctcgacaaccatcgtctctacgacctgaaaaagggcatctttctgagtgcgggcagcgaagaagagattttcgcgcatctgggtctggattatgtggagccgtgggaacgcaacgcg

SEQ ID NO: 3436 - protein, 394 aa, synthetic construct
  REGION 1..394: note = Variant of terminal deoxynucleotidyl transferase
MHHHHHHGGSGHPPSNTPEKEVPSVIARPVSQYACQRKTTLNNYNKKFTDALEIMAENYKFKENLQACLEAKRAASIFKSLPFEVTSMKDIQGLPCITDDVRDVIDEIIEEGESSRVKEILNDERYKAFKQFTSVFGVGVKTSEKWYRMGLRTVEEAKASKSLKLSKMQKAGFLYYEDLASGVSKEEADAVTLIVKETVRTVAPDALVTIAGGFRRGKPMGHDVDLLITNPGRKTDDELLHKVVDLLKKQGLLLYEDIKESTFVEGQLPSHKIDAMDNFQKCFAILKLYQPKVDNSAVGTSKKSDMAEVKDWKAVRVDLVITPFEQFAYALLGWTGSGQFRLDLRIYAEEERDMLLDNHRLYDLKKGIFLSAGSEEEIFAHLGLDYVEPWERNA

SEQ ID NO: 3437 - DNA, 1182 bp, synthetic construct
  misc_feature 1..1182: note = Variant of terminal deoxynucleotidyl transferase
  source 1..1182: mol_type = other DNA
atgcatcaccaccatcatcatgggggttctggtcatccgccgagcaataccccggagaaggaggtgccgagcgttatcgcccgtccggttagtcagtacgcgtgccagcgcaagaccacgctgaataactacaacaaaaagttcaccgacgcgctggagatcatggccgagaactacaaatttaaagagaacctgcaggcgtgtctggaagccaagcgcgccgcgagtatttttaaaagcctgccgttcgaggttaccagcatgaaagacatccaaggtctgccgtgcattaccgacgacgtacgtgacgtgatcgaggagatcatcgaagagggcgagagcagccgtgttaaagaaatcctcaatgacgagcgctacaaggcctttaagcagttcaccagcgtgttcggtgtgggcgtgaaaacctcggaaaagtggtaccgtatgggcctccgtacggttgaagaagcaaaggccagtaagagtctgaagctgagcaagatgcagaaggcgggcttcctgtattacgaggatctggcgagcggggttagtaaagaagaagccgatgccgttacgctcatcgtgaaggaaacggtgcgtcgcgttgttccggatgcgctggtgaccatcgccggcggtttccgccgtggcaaacctatgggccacgacgttgacctgctgatcacgaacccgggccgtcacgaggatgacgagctgctccacaaagtggttgatctgctcaagaagcaaggtctgctgctgtacgaagacatcaaagagagcacgttcgtggaggggcaactgccaagtcataaaatcgacgccatggacaacttccagaagtgcttcgccattctcaagctgtaccagccgaaggtggataacagtgcggttgggacgagtaagaaaagtgacatggctgaggttaaggattggaaagcggttcgtgtggatctggtgatcacgccattcgagcagttcgcctatgcgctgctcggttggacgggcagcggccaatttcgtgtggatctgcgtatctatgcggaggaagagcgcgacatgctgctcgacaaccatcgtctctacgacctgaaaaagggcatctttctgagtgcgggcagcgaagaagagattttcgcgcatctgggtctggattatgtggagccgtgggaacgcaacgcg

SEQ ID NO: 3438 - protein, 394 aa, synthetic construct
  REGION 1..394: note = Variant of terminal deoxynucleotidyl transferase
MHHHHHHGGSGHPPSNTPEKEVPSVIARPVSQYACQRKTTLNNYNKKFTDALEIMAENYKFKENLQACLEAKRAASIFKSLPFEVTSMKDIQGLPCITDDVRDVIEEIIEEGESSRVKEILNDERYKAFKQFTSVFGVGVKTSEKWYRMGLRTVEEAKASKSLKLSKMQKAGFLYYEDLASGVSKEEADAVTLIVKETVRRVVPDALVTIAGGFRRGKPMGHDVDLLITNPGRHEDDELLHKVVDLLKKQGLLLYEDIKESTFVEGQLPSHKIDAMDNFQKCFAILKLYQPKVDNSAVGTSKKSDMAEVKDWKAVRVDLVITPFEQFAYALLGWTGSGQFRVDLRIYAEEERDMLLDNHRLYDLKKGIFLSAGSEEEIFAHLGLDYVEPWERNA

SEQ ID NO: 3439 - DNA, 1182 bp, synthetic construct
  misc_feature 1..1182: note = Variant of terminal deoxynucleotidyl transferase
  source 1..1182: mol_type = other DNA
atgcatcaccaccatcatcatgggggttctggtcatccgccgagcaataccccggagaaggaggtgccgagcgttatcgcccgtccggttagtcagtacgcgtgccagcgcaagaccacgctgaataactacaacaaaaagttcaccgacgcgctggagatcatggccgagaactacaaatttaaagagaacctgcaggcgtgtctggaagccaagcgcgccgtgagtatttttaaaagcctgccgttcgaggttaccagcatgaaagacatccaaggtctgccgtgcattaccgacgacgtacgtgacgtgatcgaggagatcatcgaagagggcgagagcagccgtgttaaagaaatcctcaatgacgagcgctacaaggcctttaagcagttcaccagcgtgttcggtgtgggcgtgaaaacctcggaaaagtggtaccgtatgggcctccgtacggttgaagaagcaaaggccagtaagagtctgaagctgagcaagatgcagaaggcgggcttcctgtattacgaggatctggcgagcatggttagtaaagaagaagccgatgccgttacgctcatcgtgaaggaaacggtgcgtaccgttgtgccggatgcgctggtgaccatcgccggcggtttccgccgtggcaaacctatgggccacgacgttgactttctgatcacgaacccgggcagtaaagaagatgacgagctgctccacaaagtggttgatctgctcaagaagcaaggtctgctgctgtacgaagacatcaaagagagcacgttcgtggaggggcaactgccaagtcataaaatcgacgccatggacaacttccagaagtgcttcgccattctcaagctgtaccagccgaaggtggataacagtgcggttgggacgagtaagaaaagtgacatggctgaggttaaggattggaaagcggttcgtgtggatctggtgatcacgccattcgagcagttcgcctatgcgctgctcggttggacgggcagcggccaatttcgtcgcgatacccgtcgctatgcggaggaagagcgcgacatgctgctcgacaaccatcgtctctacgacctgaaaaaaggcatctttctgagtgcggggagcgaagaagagattttcgcgcatctgggtctggattatgttgagccgtgggaacgcaacgcg

SEQ ID NO: 3440 - protein, 394 aa, synthetic construct
  REGION 1..394: note = Variant of terminal deoxynucleotidyl transferase
MHHHHHHGGSGHPPSNTPEKEVPSVIARPVSQYACQRKTTLNNYNKKFTDALEIMAENYKFKENLQACLEAKRAVSIFKSLPFEVTSMKDIQGLPCITDDVRDVIEEIIEEGESSRVKEILNDERYKAFKQFTSVFGVGVKTSEKWYRMGLRTVEEAKASKSLKLSKMQKAGFLYYEDLASMVSKEEADAVTLIVKETVRTVVPDALVTIAGGFRRGKPMGHDVDFLITNPGSKEDDELLHKVVDLLKKQGLLLYEDIKESTFVEGQLPSHKIDAMDNFQKCFAILKLYQPKVDNSAVGTSKKSDMAEVKDWKAVRVDLVITPFEQFAYALLGWTGSGQFRRDTRRYAEEERDMLLDNHRLYDLKKGIFLSAGSEEEIFAHLGLDYVEPWERNA

SEQ ID NO: 3441 - DNA, 1182 bp, synthetic construct
  misc_feature 1..1182: note = Variant of terminal deoxynucleotidyl transferase
  source 1..1182: mol_type = other DNA
atgcatcaccaccatcatcatgggggttctggtcatccgccgagcaataccccggagaaggaggtgccgagcgttatcgcccgtccggttagtcagtacgcgtgccagcgcaagaccacgctgaataactacaacaaaaagttcaccgacgcgctggagatcatggccgagaactacaaatttaaagagaacctgcaggcgtgtctggaagccaagcgcgccgcgagtatttttaaaagcctgccgttcgaggttaccagcatgaaagacatccaaggtctgccgtgcattaccgacgacgtacgtgacgtgatcgaggagatcatcgaagagggcgagagcagccgtgttaaagaaatcctcaatgacgagcgctacaaggcctttaagcagttcaccagcgtgttcggtgtgggcgtgaaaacctcggaaaagtggtaccgtatgggcctccgtacggttgaagaagcaaaggccagtaagagtctgaagctgagcaagatgcagaaggcgggcttcctgtattacgaggatctggcgagcggggttagtaaagaagaagccgatgccgttacgctcatcgtgaaggaaacggtgcgtcgcgttgttccggatgcgctggtgaccatcgccggcggtttccgccgtggcaaacctatgggccacgacgttgactttctgatcacgaacccgggccgtaaagaggatgacgagctgctccacaaagtggttgatctgctcaagaagcaaggtctgctgctgtacgaagacatcaaagagagcacgttcgtggaggggcaactgccaagtcataaaatcgacgccatggacaacttccagaagtgcttcgccattctcaagctgtaccagccgaaggtggataacagtgcggttgggacgagtaagaaaagtgacatggctgaggttaaggattggaaagcggttcgtgtggatctggtgatcacgccattcgagcagttcgcctatgcgctgctcggttggacgggcagcggccaatttcgtgtggatctgcgtcgctatgcggaggaagagcgcgacatgctgctcgacaaccatcgtctctacgacctgaaaaagggcatctttctgagtgcgggcagcgaagaagagattttcgcgcatctgggtctggattatgtggagccgtgggaacgcaacgcg

SEQ ID NO: 3442 - protein, 394 aa, synthetic construct
  REGION 1..394: note = Variant of terminal deoxynucleotidyl transferase
MHHHHHHGGSGHPPSNTPEKEVPSVIARPVSQYACQRKTTLNNYNKKFTDALEIMAENYKFKENLQACLEAKRAASIFKSLPFEVTSMKDIQGLPCITDDVRDVIEEIIEEGESSRVKEILNDERYKAFKQFTSVFGVGVKTSEKWYRMGLRTVEEAKASKSLKLSKMQKAGFLYYEDLASGVSKEEADAVTLIVKETVRRVVPDALVTIAGGFRRGKPMGHDVDFLITNPGRKEDDELLHKVVDLLKKQGLLLYEDIKESTFVEGQLPSHKIDAMDNFQKCFAILKLYQPKVDNSAVGTSKKSDMAEVKDWKAVRVDLVITPFEQFAYALLGWTGSGQFRVDLRRYAEEERDMLLDNHRLYDLKKGIFLSAGSEEEIFAHLGLDYVEPWERNA

SEQ ID NO: 3443 - DNA, 1182 bp, synthetic construct
  misc_feature 1..1182: note = Variant of terminal deoxynucleotidyl transferase
  source 1..1182: mol_type = other DNA
atgcatcaccaccatcatcatgggggttctggtcatccgccgagcaataccccggagaaggaggtgccgagcgttatcgcccgtccggttagtcagtacgcgtgccagcgcaagaccacgctgaataactacaacaaaaagttcaccgacgcgctggagatcatggccgagaactacaaatttaaagagaacctgcaggcgtgtctggaagccaagcgcgccgcgagtatttttaaaagcctgccgttcgaggttaccagcatgaaagacatccaaggtctgccgtgcattaccgacgacgtacgtgacgtgatcgaggagatcatcgaagagggcgagagcagccgtgttaaagaaatcctcaatgacgagcgctacaaggcctttaagcagttcaccagcgtgttcggtgtgggcgtgaaaacctcggaaaagtggtaccgtatgggcctccgtacggttgaagaagcaaaggccagtaagagtctgaagctgagcaagatgcagaaggcgggcttcctgtattacgaggatctggcgagcatggttagtaaagaagaagccgatgccgttacgctcatcgtgaaggaaacggtgcgtactgttgctccggatgcgctggtgaccatcgccggcggtttccgccgtggcaaacctatgggccacgacgttgacctgctgatcacgaacccgggccgtaaagaggatgacgagctgctccacaaagtggttgatctgctcaagaagcaaggtctgctgctgtacgaagacatcaaagagagcacgttcgtggaggggcaactgccaagtcataaaatcgacgccatggacaacttccagaagtgcttcgccattctcaagctgtaccagccgaaggtggataacagtgcggttgggacgagtaagaaaagtgacatggctgaggttaaggattggaaagcggttcgtgtggatctggtgatcacgccattcgagcagttcgcctatgcgctgctcggttggacgggcagcggccaatttcgtcgcgatctgcgtcgctatgcggaggaagagcgcgacatgctgctcgacaaccatcgtctctacgacctgaaaaagggcatctttctgagtgcgggcagcgaagaagagattttcgcgcatctgggtctggattatgtggagccgtgggaacgcaacgcg

SEQ ID NO: 3444 - protein, 394 aa, synthetic construct
  REGION 1..394: note = Variant of terminal deoxynucleotidyl transferase
MHHHHHHGGSGHPPSNTPEKEVPSVIARPVSQYACQRKTTLNNYNKKFTDALEIMAENYKFKENLQACLEAKRAASIFKSLPFEVTSMKDIQGLPCITDDVRDVIEEIIEEGESSRVKEILNDERYKAFKQFTSVFGVGVKTSEKWYRMGLRTVEEAKASKSLKLSKMQKAGFLYYEDLASMVSKEEADAVTLIVKETVRTVAPDALVTIAGGFRRGKPMGHDVDLLITNPGRKEDDELLHKVVDLLKKQGLLLYEDIKESTFVEGQLPSHKIDAMDNFQKCFAILKLYQPKVDNSAVGTSKKSDMAEVKDWKAVRVDLVITPFEQFAYALLGWTGSGQFRRDLRRYAEEERDMLLDNHRLYDLKKGIFLSAGSEEEIFAHLGLDYVEPWERNA

SEQ ID NO: 3445 - DNA, 1182 bp, synthetic construct
  misc_feature 1..1182: note = Variant of terminal deoxynucleotidyl transferase
  source 1..1182: mol_type = other DNA
atgcatcaccaccatcatcatgggggttctggtcatccgccgagcaataccccggagaaggaggtgccgagcgttatcgcccgtccggttagtcagtacgcgtgccagcgcaagaccacgctgaataactacaacaaaaagttcaccgacgcgctggagatcatggccgagaactacaaatttaaagagaacctgcaggcgtgtctggaagccaagcgcgccgcgagtatttttaaaagcctgccgttcgaggttaccagcatgaaagacatccaaggtctgccgtgcattaccgacgacgtacgtgacgtgatcgaggagatcatcgaagagggcgagagcagccgtgttaaagaaatcctcaatgacgagcgctacaaggcctttaagcagttcaccagcgtgttcggtgtgggcgtgaaaacctcggaaaagtggtaccgtatgggcctccgtacggttgaagaagcaaaggccagtaagagtctgaagctgagcaagatgcagaaggcgggcttcctgtattacgaggatctggcgagcggggttagtaaagaagaagccgatgccgttacgctcatcgtgaaggaaacggtgcgtaccgttgtgccggatgcgctggtgaccatcgccggcggtttccgccgtggcaaacctatgggccacgacgttgactttctgatcacgaacccgggccgtaaagaagatgacgagctgctccacaaagtggttgatctgctcaagaagcaaggtctgctgctgtacgaagacatcaaagagagcacgttcgtggaggggcaactgccaagtcataaaatcgacgccatggacaacttccagaagtgcttcgccattctcaagctgtaccagccgaaggtggataacagtgcggttgggacgagtaagaaaagtgacatggctgaggttaaggattggaaagcggttcgtgtggatctggtgatcacgccattcgagcagttcgcctatgcgctgctcggttggacgggcagcggccaatttcgtctggatctgcgtatctatgcggaggaagagcgcgacatgctgctcgacaaccatcgtctctacgacctgaaaaagggcatctttctgagtgcgggcagcgaagaagagattttcgcgcatctgggtctggattatgtggagccgtgggaacgcaacgcg

SEQ ID NO: 3446 - protein, 394 aa, synthetic construct
  REGION 1..394: note = Variant of terminal deoxynucleotidyl transferase
MHHHHHHGGSGHPPSNTPEKEVPSVIARPVSQYACQRKTTLNNYNKKFTDALEIMAENYKFKENLQACLEAKRAASIFKSLPFEVTSMKDIQGLPCITDDVRDVIEEIIEEGESSRVKEILNDERYKAFKQFTSVFGVGVKTSEKWYRMGLRTVEEAKASKSLKLSKMQKAGFLYYEDLASGVSKEEADAVTLIVKETVRTVVPDALVTIAGGFRRGKPMGHDVDFLITNPGRKEDDELLHKVVDLLKKQGLLLYEDIKESTFVEGQLPSHKIDAMDNFQKCFAILKLYQPKVDNSAVGTSKKSDMAEVKDWKAVRVDLVITPFEQFAYALLGWTGSGQFRLDLRIYAEEERDMLLDNHRLYDLKKGIFLSAGSEEEIFAHLGLDYVEPWERNA

SEQ ID NO: 3447 - DNA, 1182 bp, synthetic construct
  misc_feature 1..1182: note = Variant of terminal deoxynucleotidyl transferase
  source 1..1182: mol_type = other DNA
atgcatcaccaccatcatcatgggggttctggtcatccgccgagcaataccccggagaaggaggtgccgagcgttatcgcccgtccggttagtcagtacgcgtgccagcgcaagaccacgctgaataactacaacaaaaagttcaccgacgcgctggagatcatggccgagaactacaaatttaaagagaacctgcaggcgtgtctggaagccaagcgcgccgcgagtatttttaaaagcctgccgttcgaggttaccagcatgaaagacatccaaggtctgccgtgcattaccgacgacgtacgtgacgtgatcgaggagatcatcgaagagggcgagagcagccgtgttaaagaaatcctcaatgacgagcgctacaaggcctttaagcagttcaccagcgtgttcggtgtgggcgtgaaaacctcggaaaagtggtaccgtatgggcctccgtacggttgaagaagcaaaggccagtaagagtctgaagctgagcaagatgcagaaggcgggcttcctgtattacgaggatctggcgagcatggttagtaaagaagaagccgatgccgttacgctcatcgtgaaggaaacggtgcgtactgttgctccggatgcgctggtgaccatcgccggcggtttccgccgtggcaaacctatgggccacgacgttgacctgctgatcacgaacccgggccgtcacacggatgacgagctgctccacaaagtggttgatctgctcaagaagcaaggtctgctgctgtacgaagacatcaaagagagcacgttcgtggaggggcaactgccaagtcataaaatcgacgccatggacaacttccagaagtgcttcgccattctcaagctgtaccagccgaaggtggataacagtgcggttgggacgagtaagaaaagtgacatggctgaggttaaggattggaaagcggttcgtgtggatctggtgatcacgccattcgagcagttcgcctatgcgctgctcggttggacgggcagcggccaatttcgtcgcgatctgcgtatctatgcggaggaagagcgcgacatgctgctcgacaaccatcgtctctacgacctgaaaaagggcatctttctgagtgcgggcagcgaagaagagattttcgcgcatctgggtctggattatgtggagccgtgggaacgcaacgcg

SEQ ID NO: 3448 - protein, 394 aa, synthetic construct
  REGION 1..394: note = Variant of terminal deoxynucleotidyl transferase
MHHHHHHGGSGHPPSNTPEKEVPSVIARPVSQYACQRKTTLNNYNKKFTDALEIMAENYKFKENLQACLEAKRAASIFKSLPFEVTSMKDIQGLPCITDDVRDVIEEIIEEGESSRVKEILNDERYKAFKQFTSVFGVGVKTSEKWYRMGLRTVEEAKASKSLKLSKMQKAGFLYYEDLASMVSKEEADAVTLIVKETVRTVAPDALVTIAGGFRRGKPMGHDVDLLITNPGRHTDDELLHKVVDLLKKQGLLLYEDIKESTFVEGQLPSHKIDAMDNFQKCFAILKLYQPKVDNSAVGTSKKSDMAEVKDWKAVRVDLVITPFEQFAYALLGWTGSGQFRRDLRIYAEEERDMLLDNHRLYDLKKGIFLSAGSEEEIFAHLGLDYVEPWERNA

SEQ ID NO: 3449 - DNA, 1182 bp, synthetic construct
  misc_feature 1..1182: note = Variant of terminal deoxynucleotidyl transferase
  source 1..1182: mol_type = other DNA
atgcatcaccaccatcatcatgggggttctggtcatccgccgagcaataccccggagaaggaggtgccgagcgttatcgcccgtccggttagtcagtacgcgtgccagcgcaagaccacgctgaataactacaacaaaaagttcaccgacgcgctggagatcatggccgagaactacaaatttaaagagaacctgcaggcgtgtctggaagccaagcgcgccgcgagtatttttaaaagcctgccgttcgaggttaccagcatgaaagacatccaaggtctgccgtgcattaccgacgacgtacgtgacgtgatcgaggagatcatcgaagagggcgagagcagccgtgttaaagaaatcctcaatgacgagcgctacaaggcctttaagcagttcaccagcgtgttcggtgtgggcgtgaaaacctcggaaaagtggtaccgtatgggcctccgtacggttgaagaagcaaaggccagtaagagtctgaagctgagcaagatgcagaaggcgggcttcctgtattacgaggatctggcgagcatggttagtaaagaagaagccgatgccgttacgctcatcgtgaaggaaacggtgcgtaccgttgtgccggatgcgctggtgaccatcgccggcggtttccgccgtggcaaacctatgggccacgacgttgactttctgatcacgaacccgggccgtaaagaagatgacgagctgctccacaaagtggttgatctgctcaagaagcaaggtctgctgctgtacgaagacatcaaagagagcacgttcgtggaggggcaactgccaagtcataaaatcgacgccatggacaacttccagaagtgcttcgccattctcaagctgtaccagccgaaggtggataacagtgcggttgggacgagtaagaaaagtgacatggctgaggttaaggattggaaagcggttcgtgtggatctggtgatcacgccattcgagcagttcgcctatgcgctgctcggttggacgggcagcggccaatttcgtcgcgatctgcgtatctatgcggaggaagagcgcgacatgctgctcgacaaccatcgtctctacgacctgaaaaagggcatctttctgagtgcgggcagcgaagaagagattttcgcgcatctgggtctggattatgtggagccgtgggaacgcaacgcg

SEQ ID NO: 3450 - protein, 394 aa, synthetic construct
  REGION 1..394: note = Variant of terminal deoxynucleotidyl transferase
MHHHHHHGGSGHPPSNTPEKEVPSVIARPVSQYACQRKTTLNNYNKKFTDALEIMAENYKFKENLQACLEAKRAASIFKSLPFEVTSMKDIQGLPCITDDVRDVIEEIIEEGESSRVKEILNDERYKAFKQFTSVFGVGVKTSEKWYRMGLRTVEEAKASKSLKLSKMQKAGFLYYEDLASMVSKEEADAVTLIVKETVRTVVPDALVTIAGGFRRGKPMGHDVDFLITNPGRKEDDELLHKVVDLLKKQGLLLYEDIKESTFVEGQLPSHKIDAMDNFQKCFAILKLYQPKVDNSAVGTSKKSDMAEVKDWKAVRVDLVITPFEQFAYALLGWTGSGQFRRDLRIYAEEERDMLLDNHRLYDLKKGIFLSAGSEEEIFAHLGLDYVEPWERNA

SEQ ID NO: 3451 - DNA, 1182 bp, synthetic construct
  misc_feature 1..1182: note = Variant of terminal deoxynucleotidyl transferase
  source 1..1182: mol_type = other DNA
atgcatcaccaccatcatcatgggggttctggtcatccgccgagcaataccccggagaaggaggtgccgagcgttatcgcccgtccggttagtcagtacgcgtgccagcgcaagaccacgctgaataactacaacaaaaagttcaccgacgcgctggagatcatggccgagaactacaaatttaaagagaacctgcaggcgtgtctggaagccaagcgcgccgcgagtatttttaaaagcctgccgttcgaggttaccagcatgaaagacatccaaggtctgccgtgcattaccgacgacgtacgtgacgtgatcgaggagatcatcgaagagggcgagagcagccgtgttaaagaaatcctcaatgacgagcgctacaaggcctttaagcagttcaccagcgtgttcggtgtgggcgtgaaaacctcggaaaagtggtaccgtatgggcctccgtacggttgaagaagcaaaggccagtaagagtctgaagctgagcaagatgcagaaggcgggcttcctgtattacgaggatctggcgagcatggttagtaaagaagaagccgatgccgttacgctcatcgtgaaggaaacggtgcgtactgttgctccggatgcgctggtgaccatcgccggcggtttccgccgtggcaaacctatgggccacgacgttgacctgctgatcacgaacccgggccgtaaagaggatgacgagctgctccacaaagtggttgatctgctcaagaagcaaggtctgctgctgtacgaagacatcaaagagagcacgttcgtggaggggcaactgccaagtcataaaatcgacgccatggacaacttccagaagtgcttcgccattctcaagctgtaccagccgaaggtggataacagtgcggttgggacgagtaagaaaagtgacatggctgaggttaaggattggaaagcggttcgtgtggatctggtgatcacgccattcgagcagttcgcctatgcgctgctcggttggacgggcagcggccaatttcgtgtggatctgcgtatctatgcggaggaagagcgcgacatgctgctcgacaaccatcgtctctacgacctgaaaaagggcatctttctgagtgcgggcagcgaagaagagattttcgcgcatctgggtctggattatgtggagccgtgggaacgcaacgcg

SEQ ID NO: 3452 - protein, 394 aa, synthetic construct
  REGION 1..394: note = Variant of terminal deoxynucleotidyl transferase
MHHHHHHGGSGHPPSNTPEKEVPSVIARPVSQYACQRKTTLNNYNKKFTDALEIMAENYKFKENLQACLEAKRAASIFKSLPFEVTSMKDIQGLPCITDDVRDVIEEIIEEGESSRVKEILNDERYKAFKQFTSVFGVGVKTSEKWYRMGLRTVEEAKASKSLKLSKMQKAGFLYYEDLASMVSKEEADAVTLIVKETVRTVAPDALVTIAGGFRRGKPMGHDVDLLITNPGRKEDDELLHKVVDLLKKQGLLLYEDIKESTFVEGQLPSHKIDAMDNFQKCFAILKLYQPKVDNSAVGTSKKSDMAEVKDWKAVRVDLVITPFEQFAYALLGWTGSGQFRVDLRIYAEEERDMLLDNHRLYDLKKGIFLSAGSEEEIFAHLGLDYVEPWERNA

SEQ ID NO: 3453 - DNA, 1182 bp, synthetic construct
  misc_feature 1..1182: note = Variant of terminal deoxynucleotidyl transferase
  source 1..1182: mol_type = other DNA
atgcatcaccaccatcatcatgggggttctggtcatccgccgagcaataccccggagaaggaggtgccgagcgttatcgcccgtccggttagtcagtacgcgtgccagcgcaagaccacgctgaataactacaacaaaaagttcaccgacgcgctggagatcatggccgagaactacaaatttaaagagaacctgcaggcgtgtctggaagccaagcgcgccgcgagtatttttaaaagcctgccgttcgaggttaccagcatgaaagacatccaaggtctgccgtgcattaccgacgacgtacgtgacgtgatcgaggagatcatcgaagagggcgagagcagccgtgttaaagaaatcctcaatgacgagcgctacaaggcctttaagcagttcaccagcgtgttcggtgtgggcgtgaaaacctcggaaaagtggtaccgtatgggcctccgtacggttgaagaagcaaaggccagtaagagtctgaagctgagcaagatgcagaaggcgggcttcctgtattacgaggatctggcgagcatggttagtaaagaagaagccgatgccgttacgctcatcgtgaaggaaacggtgcgtactgttgctccggatgcgctggtgaccatcgccggcggtttccgccgtggcaaacctatgggccacgacgttgacctgctgatcacgaacccgggccgtaaaacggatgacgagctgctccacaaagtggttgatctgctcaagaagcaaggtctgctgctgtacgaagacatcaaagagagcacgttcgtggaggggcaactgccaagtcataaaatcgacgccatggacaacttccagaagtgcttcgccattctcaagctgtaccagccgaaggtggataacagtgcggttgggacgagtaagaaaagtgacatggctgaggttaaggattggaaagcggttcgtgtggatctggtgatcacgccattcgagcagttcgcctatgcgctgctcggttggacgggcagcggccaatttcgtctggatctgcgtcgctatgcggaggaagagcgcgacatgctgctcgacaaccatcgtctctacgacctgaaaaagggcatctttctgagtgcgggcagcgaagaagagattttcgcgcatctgggtctggattatgtggagccgtgggaacgcaacgcg

SEQ ID NO: 3454 - protein, 394 aa, synthetic construct
  REGION 1..394: note = Variant of terminal deoxynucleotidyl transferase
MHHHHHHGGSGHPPSNTPEKEVPSVIARPVSQYACQRKTTLNNYNKKFTDALEIMAENYKFKENLQACLEAKRAASIFKSLPFEVTSMKDIQGLPCITDDVRDVIEEIIEEGESSRVKEILNDERYKAFKQFTSVFGVGVKTSEKWYRMGLRTVEEAKASKSLKLSKMQKAGFLYYEDLASMVSKEEADAVTLIVKETVRTVAPDALVTIAGGFRRGKPMGHDVDLLITNPGRKTDDELLHKVVDLLKKQGLLLYEDIKESTFVEGQLPSHKIDAMDNFQKCFAILKLYQPKVDNSAVGTSKKSDMAEVKDWKAVRVDLVITPFEQFAYALLGWTGSGQFRLDLRRYAEEERDMLLDNHRLYDLKKGIFLSAGSEEEIFAHLGLDYVEPWERNA

SEQ ID NO: 3455 - DNA, 1182 bp, synthetic construct
  misc_feature 1..1182: note = Variant of terminal deoxynucleotidyl transferase
  source 1..1182: mol_type = other DNA
atgcatcaccaccatcatcatgggggttctggtcatccgccgagcaataccccggagaaggaggtgccgagcgttatcgcccgtccggttagtcagtacgcgtgccagcgcaagaccacgctgaataactacaacaaaaagttcaccgacgcgctggagatcatggccgagaactacaaatttaaagagaacctgcaggcgtgtctggaagccaagcgcgccgcgagtatttttaaaagcctgccgttcgaggttaccagcatgaaagacatccaaggtctgccgtgcattaccgacgacgtacgtgacgtgatcgaggagatcatcgaagagggcgagagcagccgtgttaaagaaatcctcaatgacgagcgctacaaggcctttaagcagttcaccagcgtgttcggtgtgggcgtgaaaacctcggaaaagtggtaccgtatgggcctccgtacggttgaagaagcaaaggccagtaagagtctgaagctgagcaagatgcagaaggcgggcttcctgtattacgaggatctggcgagcatggttagtaaagaagaagccgatgccgttacgctcatcgtgaaggaaacggtgcgtactgttgttccggatgcgctggtgaccatcgccggcggtttccgccgtggcaaacctatgggccacgacgttgacctgctgatcacgaacccgggccgtaaagaggatgacgagctgctccacaaagtggttgatctgctcaagaagcaaggtctgctgctgtacgaagacatcaaagagagcacgttcgtggaggggcaagttccaagtcataaaatcgacgccatggacaacttccagaagtgcttcgccattctcaagctgtaccagccgaaggtggataacagtgcggttgggacgagtaagaaaagtgacatggctgaggttaaggattggaaagcggttcgtgtggatctggtgatcacgccattcgagcagttcgcctatgcgctgctcggttggacgggcagcggccaatttcgtcgcgatctgcgtatctatgcggaggaagagcgcgacatgctgctcgacaaccatcgtctctacgacctgaaaaagggcatctttctgagtgcgggcagcgaagaagagattttcgcgcatctgggtctggattatgtggagccgtgggaacgcaacgcg

SEQ ID NO: 3456 - protein, 394 aa, synthetic construct
  REGION 1..394: note = Variant of terminal deoxynucleotidyl transferase
MHHHHHHGGSGHPPSNTPEKEVPSVIARPVSQYACQRKTTLNNYNKKFTDALEIMAENYKFKENLQACLEAKRAASIFKSLPFEVTSMKDIQGLPCITDDVRDVIEEIIEEGESSRVKEILNDERYKAFKQFTSVFGVGVKTSEKWYRMGLRTVEEAKASKSLKLSKMQKAGFLYYEDLASMVSKEEADAVTLIVKETVRTVVPDALVTIAGGFRRGKPMGHDVDLLITNPGRKEDDELLHKVVDLLKKQGLLLYEDIKESTFVEGQVPSHKIDAMDNFQKCFAILKLYQPKVDNSAVGTSKKSDMAEVKDWKAVRVDLVITPFEQFAYALLGWTGSGQFRRDLRIYAEEERDMLLDNHRLYDLKKGIFLSAGSEEEIFAHLGLDYVEPWERNA

SEQ ID NO: 3457 - DNA, 1182 bp, synthetic construct
  misc_feature 1..1182: note = Variant of terminal deoxynucleotidyl transferase
  source 1..1182: mol_type = other DNA
atgcatcaccaccatcatcatgggggttctggtcatccgccgagcaataccccggagaaggaggtgccgagcgttatcgcccgtccggttagtcagtacgcgtgccagcgcaagaccacgctgaataactacaacaaaaagttcaccgacgcgctggagatcatggccgagaactacaaatttaaagagaacctgcaggcgtgtctggaagccaagcgcgccgcgagtatttttaaaagcctgccgttcgaggttaccagcatgaaagacatccaaggtctgccgtgcattaccgacgacgtacgtgacgtgatcgaggagatcatcgaagagggcgagagcagccgtgttaaagaaatcctcaatgacgagcgctacaaggcctttaagcagttcaccagcgtgttcggtgtgggcgtgaaaacctcggaaaagtggtaccgtatgggcctccgtacggttgaagaagcaaaggccagtaagagtctgaagctgagcaagatgcagaaggcgggcttcctgtattacgaggatctggcgagcggggttagtaaagaagaagccgatgccgttacgctcatcgtgaaggaaacggtgcgtactgttgttccggatgcgctggtgaccatcgccggcggtttccgccgtggcaaacctatgggccacgacgttgacctgctgatcacgaacccgggccgtaaagaggatgacgagctgctccacaaagtggttgatctgctcaagaagcaaggtctgctgctgtacgaagacatcaaagagagcacgttcgtggaggggcaaattccaagtcataaaatcgacgccatggacaacttccagaagtgcttcgccattctcaagctgtaccagccgaaggtggataacagtgcggttgggacgagtaagaaaagtgacatggctgaggttaaggattggaaagcggttcgtgtggatctggtgatcacgccattcgagcagttcgcctatgcgctgctcggttggacgggcagcggccaatttcgtgtggatctgcgtatctatgcggaggaagagcgcgacatgctgctcgacaaccatcgtctctacgacctgaaaaagggcatctttctgagtgcgggcagcgaagaagagattttcgcgcatctgggtctggattatgtggagccgtgggaacgcaacgcg

SEQ ID NO: 3458 - protein, 394 aa, synthetic construct; identical to SEQ ID NO: 3392
  REGION 1..394: note = Variant of terminal deoxynucleotidyl transferase

SEQ ID NO: 3459 - DNA, 1182 bp, synthetic construct; identical to SEQ ID NO: 3389
  misc_feature 1..1182: note = Variant of terminal deoxynucleotidyl transferase
  source 1..1182: mol_type = other DNA

SEQ ID NO: 3460 - protein, 394 aa, synthetic construct; identical to SEQ ID NO: 3390
  REGION 1..394: note = Variant of terminal deoxynucleotidyl transferase

SEQ ID NO: 3461 - DNA, 1182 bp, synthetic construct
  misc_feature 1..1182: note = Variant of terminal deoxynucleotidyl transferase
  source 1..1182: mol_type = other DNA
atgcatcaccaccatcatcatgggggttctggtcatccgccgagcaataccccggagaaggaggtgccgagcgttatcgcccgtccggttagtcagtacgcgtgccagcgcaagaccacgctgaataactacaacaaaaagttcaccgacgcgctggagatcatggccgagaactacaaatttaaagagaacctgcaggcgtgtctggaagccaagcgcgccgcgagtatttttaaaagcctgccgttcgaggttaccagcatgaaagacatccaaggtctgccgtgcattaccgacgacgtacgtgacgtgatcgaggagatcatcgaagagggcgagagcagccgtgttaaagaaatcctcaatgacgagcgctacaaggcctttaagcagttcaccagcgtgttcggtgtgggcgtgaaaacctcggaaaagtggtaccgtatgggcctccgtacggttgaagaagcaaaggccagtaagagtctgaagctgagcaagatgcagaaggcgggcttcctgtattacgaggatctggcgagcatggttagtaaagaagaagccgatgccgttacgctcatcgtgaaggaaacggtgcgtaccgttgtgccggatgcgctggtgaccatcgccggcggtttccgccgtggcaaacctatgggccacgacgttgacctgctgatcacgaacccgggccgtaaaacggatgacgagctgctccacaaagtggttgatctgctcaagaagcaaggtctgctgctgtacgaagacatcaaagagagcacgttcgtggaggggcaactgccaagtcataaaatcgacgccatggacaacttccagaagtgcttcgccattctcaagctgtaccagccgaaggtggataacagtgcggttgggacgagtaagaaaagtgacatggctgaggttaaggattggaaagcggttcgtgtggatctggtgatcacgccattcgagcagttcgcctatgcgctgctcggttggacgggcagcggccaatttcgtcgcgatctgcgtatctatgcggaggaagagcgcgacatgctgctcgacaaccatcgtctctacgacctgaaaaagggcatctttctgagtgcgggcagcgaagaagagattttcgcgcatctgggtctggattatgtggagccgtgggaacgcaacgcg

SEQ ID NO: 3462 - protein, 394 aa, synthetic construct
  REGION 1..394: note = Variant of terminal deoxynucleotidyl transferase
MHHHHHHGGSGHPPSNTPEKEVPSVIARPVSQYACQRKTTLNNYNKKFTDALEIMAENYKFKENLQACLEAKRAASIFKSLPFEVTSMKDIQGLPCITDDVRDVIEEIIEEGESSRVKEILNDERYKAFKQFTSVFGVGVKTSEKWYRMGLRTVEEAKASKSLKLSKMQKAGFLYYEDLASMVSKEEADAVTLIVKETVRTVVPDALVTIAGGFRRGKPMGHDVDLLITNPGRKTDDELLHKVVDLLKKQGLLLYEDIKESTFVEGQLPSHKIDAMDNFQKCFAILKLYQPKVDNSAVGTSKKSDMAEVKDWKAVRVDLVITPFEQFAYALLGWTGSGQFRRDLRIYAEEERDMLLDNHRLYDLKKGIFLSAGSEEEIFAHLGLDYVEPWERNA

SEQ ID NO: 3463 - DNA, 1182 bp, synthetic construct
  misc_feature 1..1182: note = Variant of terminal deoxynucleotidyl transferase
  source 1..1182: mol_type = other DNA
atgcatcaccaccatcatcatgggggttctggtcatccgccgagcaataccccggagaaggaggtgccgagcgttatcgcccgtccggttagtcagtacgcgtgccagcgcaagaccacgctgaataactacaacaaaaagttcaccgacgcgctggagatcatggccgagaactacaaatttaaagagaacctgcaggcgtgtctggaagccaagcgcgccgcgagtatttttaaaagcctgccgttcgaggttaccagcatgaaagacatccaaggtctgccgtgcattaccgacgacgtacgtgacgtgatcgaggagatcatcgaagagggcgagagcagccgtgttaaagaaatcctcaatgacgagcgctacaaggcctttaagcagttcaccagcgtgttcggtgtgggcgtgaaaacctcggaaaagtggtaccgtatgggcctccgtacggttgaagaagcaaaggccagtaagagtctgaagctgagcaagatgcagaaggcgggcttcctgtattacgaggatctggcgagcatggttagtaaagaagaagccgatgccgttacgctcatcgtgaaggaaacggtgcgtactgttgttccggatgcgctggtgaccatcgccggcggtttccgccgtggcaaacctatgggccacgacgttgacctgctgatcacgaacccgggccgtcgcgaggatgacgagctgctccacaaagtggttgatctgctcaagaagcaaggtctgctgctgtacgaagacatcaaagagagcacgttcgtggaggggcaactgccaagtcataaaatcgacgccatggacaacttccagaagtgcttcgccattctcaagctgtaccagccgaaggtggataacagtgcggttgggacgagtaagaaaagtgacatggctgaggttaaggattggaaagcggttcgtgtggatctggtgatcacgccattcgagcagttcgcctatgcgctgctcggttggacgggcagcggccaatttcgtgtggatctgcgtcgctatgcggaggaagagcgcgacatgctgctcgacaaccatcgtctctacgacctgaaaaagggcatctttctgagtgcgggcagcgaagaagagattttcgcgcatctgggtctggattatgtggagccgtgggaacgcaacgcg

SEQ ID NO: 3464 - protein, 394 aa, synthetic construct
  REGION 1..394: note = Variant of terminal deoxynucleotidyl transferase
MHHHHHHGGSGHPPSNTPEKEVPSVIARPVSQYACQRKTTLNNYNKKFTDALEIMAENYKFKENLQACLEAKRAASIFKSLPFEVTSMKDIQGLPCITDDVRDVIEEIIEEGESSRVKEILNDERYKAFKQFTSVFGVGVKTSEKWYRMGLRTVEEAKASKSLKLSKMQKAGFLYYEDLASMVSKEEADAVTLIVKETVRTVVPDALVTIAGGFRRGKPMGHDVDLLITNPGRREDDELLHKVVDLLKKQGLLLYEDIKESTFVEGQLPSHKIDAMDNFQKCFAILKLYQPKVDNSAVGTSKKSDMAEVKDWKAVRVDLVITPFEQFAYALLGWTGSGQFRVDLRRYAEEERDMLLDNHRLYDLKKGIFLSAGSEEEIFAHLGLDYVEPWERNA

SEQ ID NO: 3465 - DNA, 1182 bp, synthetic construct
  misc_feature 1..1182: note = Variant of terminal deoxynucleotidyl transferase
  source 1..1182: mol_type = other DNA
atgcatcaccaccatcatcatgggggttctggtcatccgccgagcaataccccggagaaggaggtgccgagcgttatcgcccgtccggttagtcagtacgcgtgccagcgcaagaccacgctgaataactacaacaaaaagttcaccgacgcgctggagatcatggccgagaactacaaatttaaagagaacctgcaggcgtgtctggaagccaagcgcgccgcgagtatttttaaaagcctgccgttcgaggttaccagcatgaaagacatccaaggtctgccgtgcattaccgacgacgtacgtgacgtgatcgaggagatcatcgaagagggcgagagcagccgtgttaaagaaatcctcaatgacgagcgctacaaggcctttaagcagttcaccagcgtgttcggtgtgggcgtgaaaacctcggaaaagtggtaccgtatgggcctccgtacggttgaagaagcaaaggccagtaagagtctgaagctgagcaagatgcagaaggcgggcttcctgtattacgaggatctggcgagcggggttagtaaagaagaagccgatgccgttacgctcatcgtgaaggaaacggtgcgtactgttgttccggatgcgctggtgaccatcgccggcggtttccgccgtggcaaacctatgggccacgacgttgacctgctgatcacgaacccgggccgtcacgaggatgacgagctgctccacaaagtggttgatctgctcaagaagcaaggtctgctgctgtacgaagacatcaaagagagcacgttcgtggaggggcaactgccaagtcataaaatcgacgccatggacaacttccagaagtgcttcgccattctcaagctgtaccagccgaaggtggataacagtgcggttgggacgagtaagaaaagtgacatggctgaggttaaggattggaaagcggttcgtgtggatctggtgatcacgccattcgagcagttcgcctatgcgctgctcggttggacgggcagcggccaatttcgtcgcgatctgcgtatctatgcggaggaagagcgcgacatgctgctcgacaaccatcgtctctacgacctgaaaaagggcatctttctgagtgcgggcagcgaagaagagattttcgcgcatctgggtctggattatgtggagccgtgggaacgcaacgcg

SEQ ID NO: 3466 - protein, 394 aa, synthetic construct
  REGION 1..394: note = Variant of terminal deoxynucleotidyl transferase
MHHHHHHGGSGHPPSNTPEKEVPSVIARPVSQYACQRKTTLNNYNKKFTDALEIMAENYKFKENLQACLEAKRAASIFKSLPFEVTSMKDIQGLPCITDDVRDVIEEIIEEGESSRVKEILNDERYKAFKQFTSVFGVGVKTSEKWYRMGLRTVEEAKASKSLKLSKMQKAGFLYYEDLASGVSKEEADAVTLIVKETVRTVVPDALVTIAGGFRRGKPMGHDVDLLITNPGRHEDDELLHKVVDLLKKQGLLLYEDIKESTFVEGQLPSHKIDAMDNFQKCFAILKLYQPKVDNSAVGTSKKSDMAEVKDWKAVRVDLVITPFEQFAYALLGWTGSGQFRRDLRIYAEEERDMLLDNHRLYDLKKGIFLSAGSEEEIFAHLGLDYVEPWERNA

SEQ ID NO: 3467 - DNA, 1182 bp, synthetic construct
  misc_feature 1..1182: note = Variant of terminal deoxynucleotidyl transferase
  source 1..1182: mol_type = other DNA
atgcatcaccaccatcatcatgggggttctggtcatccgccgagcaataccccggagaaggaggtgccgagcgttatcgcccgtccggttagtcagtacgcgtgccagcgcaagaccacgctgaataactacaacaaaaagttcaccgacgcgctggagatcatggccgagaactacaaatttaaagagaacctgcaggcgtgtctggaagccaagcgcgccgcgagtatttttaaaagcctgccgttcgaggttaccagcatgaaagacatccaaggtctgccgtgcattaccgacgacgtacgtgacgtgatcgaggagatcatcgaagagggcgagagcagccgtgttaaagaaatcctcaatgacgagcgctacaaggcctttaagcagttcaccagcgtgttcggtgtgggcgtgaaaacctcggaaaagtggtaccgtatgggcctccgtacggttgaagaagcaaaggccagtaagagtctgaagctgagcaagatgcagaaggcgggcttcctgtattacgaggatctggcgagcatggttagtaaagaagaagccgatgccgttacgctcatcgtgaaggaaacggtgcgtcgcgttgctccggatgcgctggtgaccatcgccggcggtttccgccgtggcaaacctatgggccacgacgttgactttctgatcacgaacccgggccgtaaagaggatgacgagctgctccacaaagtggttgatctgctcaagaagcaaggtctgctgctgtacgaagacatcaaagagagcacgttcgtggaggggcaagttccaagtcataaaatcgacgccatggacaacttccagaagtgcttcgccattctcaagctgtaccagccgaaggtggataacagtgcggttgggacgagtaagaaaagtgacatggctgaggttaaggattggaaagcggttcgtgtggatctggtgatcacgccattcgagcagttcgcctatgcgctgctcggttggacgggcagcggccaatttcgtgtggatctgcgtcgctatgcggaggaagagcgcgacatgctgctcgacaaccatcgtctctacgacctgaaaaagggcatctttctgagtgcgggcagcgaagaagagattttcgcgcatctgggtctggattatgtggagccgtgggaacgcaacgcg

SEQ ID NO: 3468 - protein, 394 aa, synthetic construct
  REGION 1..394: note = Variant of terminal deoxynucleotidyl transferase
MHHHHHHGGSGHPPSNTPEKEVPSVIARPVSQYACQRKTTLNNYNKKFTDALEIMAENYKFKENLQACLEAKRAASIFKSLPFEVTSMKDIQGLPCITDDVRDVIEEIIEEGESSRVKEILNDERYKAFKQFTSVFGVGVKTSEKWYRMGLRTVEEAKASKSLKLSKMQKAGFLYYEDLASMVSKEEADAVTLIVKETVRRVAPDALVTIAGGFRRGKPMGHDVDFLITNPGRKEDDELLHKVVDLLKKQGLLLYEDIKESTFVEGQVPSHKIDAMDNFQKCFAILKLYQPKVDNSAVGTSKKSDMAEVKDWKAVRVDLVITPFEQFAYALLGWTGSGQFRVDLRRYAEEERDMLLDNHRLYDLKKGIFLSAGSEEEIFAHLGLDYVEPWERNA

SEQ ID NO: 3469 - DNA, 1182 bp, synthetic construct
  misc_feature 1..1182: note = Variant of terminal deoxynucleotidyl transferase
  source 1..1182: mol_type = other DNA
atgcatcaccaccatcatcatgggggttctggtcatccgccgagcaataccccggagaaggaggtgccgagcgttatcgcccgtccggttagtcagtacgcgtgccagcgcaagaccacgctgaataactacaacaaaaagttcaccgacgcgctggagatcatggccgagaactacaaatttaaagagaacctgcaggcgtgtctggaagccaagcgcgccgcgagtatttttaaaagcctgccgttcgaggttaccagcatgaaagacatccaaggtctgccgtgcattaccgacgacgtacgtgacgtgatcgaggagatcatcgaagagggcgagagcagccgtgttaaagaaatcctcaatgacgagcgctacaaggcctttaagcagttcaccagcgtgttcggtgtgggcgtgaaaacctcggaaaagtggtaccgtatgggcctccgtacggttgaagaagcaaaggccagtaagagtctgaagctgagcaagatgcagaaggcgggcttcctgtattacgaggatctggcgagcatggttagtaaagaagaagccgatgccgttacgctcatcgtgaaggaaacggtgcgtaccgttgtgccggatgcgctggtgaccatcgccggcggtttccgccgtggcaaacctatgggccacgacgttgacctgctgatcacgaacccgggccgtcgcacggatgacgagctgctccacaaagtggttgatctgctcaagaagcaaggtctgctgctgtacgaagacatcaaagagagcacgttcgtggaggggcaactgccaagtcataaaatcgacgccatggacaacttccagaagtgcttcgccattctcaagctgtaccagccgaaggtggataacagtgcggttgggacgagtaagaaaagtgacatggctgaggttaaggattggaaagcggttcgtgtggatctggtgatcacgccattcgagcagttcgcctatgcgctgctcggttggacgggcagcggccaatttcgtcgcgatctgcgtatctatgcggaggaagagcgcgacatgctgctcgacaaccatcgtctctacgacctgaaaaagggcatctttctgagtgcgggcagcgaagaagagattttcgcgcatctgggtctggattatgtggagccgtgggaacgcaacgcg

SEQ ID NO: 3470 - protein, 394 aa, synthetic construct
  REGION 1..394: note = Variant of terminal deoxynucleotidyl transferase
MHHHHHHGGSGHPPSNTPEKEVPSVIARPVSQYACQRKTTLNNYNKKFTDALEIMAENYKFKENLQACLEAKRAASIFKSLPFEVTSMKDIQGLPCITDDVRDVIEEIIEEGESSRVKEILNDERYKAFKQFTSVFGVGVKTSEKWYRMGLRTVEEAKASKSLKLSKMQKAGFLYYEDLASMVSKEEADAVTLIVKETVRTVVPDALVTIAGGFRRGKPMGHDVDLLITNPGRRTDDELLHKVVDLLKKQGLLLYEDIKESTFVEGQLPSHKIDAMDNFQKCFAILKLYQPKVDNSAVGTSKKSDMAEVKDWKAVRVDLVITPFEQFAYALLGWTGSGQFRRDLRIYAEEERDMLLDNHRLYDLKKGIFLSAGSEEEIFAHLGLDYVEPWERNA

SEQ ID NO: 3471 - DNA, 1182 bp, synthetic construct
  misc_feature 1..1182: note = Variant of terminal deoxynucleotidyl transferase
  source 1..1182: mol_type = other DNA
atgcatcaccaccatcatcatgggggttctggtcatccgccgagcaataccccggagaaggaggtgccgagcgttatcgcccgtccggttagtcagtacgcgtgccagcgcaagaccacgctgaataactacaacaaaaagttcaccgacgcgctggagatcatggccgagaactacaaatttaaagagaacctgcaggcgtgtctggaagccaagcgcgccgcgagtatttttaaaagcctgccgttcgaggttaccagcatgaaagacatccaaggtctgccgtgcattaccgacgacgtacgtgacgtgatcgaggagatcatcgaagagggcgagagcagccgtgttaaagaaatcctcaatgacgagcgctacaaggcctttaagcagttcaccagcgtgttcggtgtgggcgtgaaaacctcggaaaagtggtaccgtatgggcctccgtacggttgaagaagcaaaggccagtaagagtctgaagctgagcaagatgcagaaggcgggcttcctgtattacgaggatctggcgagcatggttagtaaagaagaagccgatgccgttacgctcatcgtgaaggaaacggtgcgtcgcgttgttccggatgcgctggtgaccatcgccggcggtttccgccgtggcaaacctatgggccacgacgttgacctgctgatcacgaacccgggccgtaaagaggatgacgagctgctccacaaagtggttgatctgctcaagaagcaaggtctgctgctgtacgaagacatcaaagagagcacgttcgtggaggggcaactgccaagtcataaaatcgacgccatggacaacttccagaagtgcttcgccattctcaagctgtaccagccgaaggtggataacagtgcggttgggacgagtaagaaaagtgacatggctgaggttaaggattggaaagcggttcgtgtggatctggtgatcacgccattcgagcagttcgcctatgcgctgctcggttggacgggcagcggccaatttcgtcgcgatctgcgtatctatgcggaggaagagcgcgacatgctgctcgacaaccatcgtctctacgacctgaaaaagggcatctttctgagtgcgggcagcgaagaagagattttcgcgcatctgggtctggattatgtggagccgtgggaacgcaacgcg

SEQ ID NO: 3472 - protein, 394 aa, synthetic construct
  REGION 1..394: note = Variant of terminal deoxynucleotidyl transferase
MHHHHHHGGSGHPPSNTPEKEVPSVIARPVSQYACQRKTTLNNYNKKFTDALEIMAENYKFKENLQACLEAKRAASIFKSLPFEVTSMKDIQGLPCITDDVRDVIEEIIEEGESSRVKEILNDERYKAFKQFTSVFGVGVKTSEKWYRMGLRTVEEAKASKSLKLSKMQKAGFLYYEDLASMVSKEEADAVTLIVKETVRRVVPDALVTIAGGFRRGKPMGHDVDLLITNPGRKEDDELLHKVVDLLKKQGLLLYEDIKESTFVEGQLPSHKIDAMDNFQKCFAILKLYQPKVDNSAVGTSKKSDMAEVKDWKAVRVDLVITPFEQFAYALLGWTGSGQFRRDLRIYAEEERDMLLDNHRLYDLKKGIFLSAGSEEEIFAHLGLDYVEPWERNA

SEQ ID NO: 3473 - DNA, 1182 bp, synthetic construct
  misc_feature 1..1182: note = Variant of terminal deoxynucleotidyl transferase
  source 1..1182: mol_type = other DNA
atgcatcaccaccatcatcatgggggttctggtcatccgccgagcaataccccggagaaggaggtgccgagcgttatcgcccgtccggttagtcagtacgcgtgccagcgcaagaccacgctgaataactacaacaaaaagttcaccgacgcgctggagatcatggccgagaactacaaatttaaagagaacctgcaggcgtgtctggaagccaagcgcgccgcgagtatttttaaaagcctgccgttcgaggttaccagcatgaaagacatccaaggtctgccgtgcattaccgacgacgtacgtgacgtgatcgaggagatcatcgaagagggcgagagcagccgtgttaaagaaatcctcaatgacgagcgctacaaggcctttaagcagttcaccagcgtgttcggtgtgggcgtgaaaacctcggaaaagtggtaccgtatgggcctccgtacggttgaagaagcaaaggccagtaagagtctgaagctgagcaagatgcagaaggcgggcttcctgtattacgaggatctggcgagcatggttagtaaagaagaagccgatgccgttacgctcatcgtgaaggaaacggtgcgtcgcgttgctccggatgcgctggtgaccatcgccggcggtttccgccgtggcaaacctatgggccacgacgttgacctgctgatcacgaacccgggccgtcacgaggatgacgagctgctccacaaagtggttgatctgctcaagaagcaaggtctgctgctgtacgaagacatcaaagagagcacgttcgtggaggggcaactgccaagtcataaaatcgacgccatggacaacttccagaagtgcttcgccattctcaagctgtaccagccgaaggtggataacagtgcggttgggacgagtaagaaaagtgacatggctgaggttaaggattggaaagcggttcgtgtggatctggtgatcacgccattcgagcagttcgcctatgcgctgctcggttggacgggcagcggccaatttcgtcgcgatctgcgtcgctatgcggaggaagagcgcgacatgctgctcgacaaccatcgtctctacgacctgaaaaagggcatctttctgagtgcgggcagcgaagaagagattttcgcgcatctgggtctggattatgtggagccgtgggaacgcaacgcg

SEQ ID NO: 3474 - protein, 394 aa, synthetic construct
  REGION 1..394: note = Variant of terminal deoxynucleotidyl transferase
MHHHHHHGGSGHPPSNTPEKEVPSVIARPVSQYACQRKTTLNNYNKKFTDALEIMAENYKFKENLQACLEAKRAASIFKSLPFEVTSMKDIQGLPCITDDVRDVIEEIIEEGESSRVKEILNDERYKAFKQFTSVFGVGVKTSEKWYRMGLRTVEEAKASKSLKLSKMQKAGFLYYEDLASMVSKEEADAVTLIVKETVRRVAPDALVTIAGGFRRGKPMGHDVDLLITNPGRHEDDELLHKVVDLLKKQGLLLYEDIKESTFVEGQLPSHKIDAMDNFQKCFAILKLYQPKVDNSAVGTSKKSDMAEVKDWKAVRVDLVITPFEQFAYALLGWTGSGQFRRDLRRYAEEERDMLLDNHRLYDLKKGIFLSAGSEEEIFAHLGLDYVEPWERNA

SEQ ID NO: 3475 - DNA, 1182 bp, synthetic construct
  misc_feature 1..1182: note = Variant of terminal deoxynucleotidyl transferase
  source 1..1182: mol_type = other DNA
atgcatcaccaccatcatcatgggggttctggtcatccgccgagcaataccccggagaaggaggtgccgagcgttatcgcccgtccggttagtcagtacgcgtgccagcgcaagaccacgctgaataactacaacaaaaagttcaccgacgcgctggagatcatggccgagaactacaaatttaaagagaacctgcaggcgtgtctggaagccaagcgcgccgtgagtatttttaaaagcctgccgttcgaggttaccagcatgaaagacatccaaggtctgccgtgcattaccgacgacgtacgtgacgtgatcgaggagatcatcgaagagggcgagagcagccgtgttaaagaaatcctcaatgacgagcgctacaaggcctttaagcagttcaccagcgtgttcggtgtgggcgtgaaaacctcggaaaagtggtaccgtatgggcctccgtacggttgaagaagcaaaggccagtaagagtctgaagctgagcaagatgcagaaggcgggcttcctgtattacgaggatctggcgagcatggttagtaaagaagaagccgatgccgttacgctcatcgtgaaggaaacggtgcgtaccgttgtgccggatgcggaggtgaccatcgccggcggtttccgccgtggcaaacctatgggccacgacgttgactttctgatcacgaacccgggccgtaaagaagatgacgagctgctccacaaagtggttgatctgctcaagaagcaaggtctgctgctgtacgaagacatcaaagagagcacgttcgtggaggggcaactgccaagtcataaaatcgacgccatggacaacttccagaagtgcttcgccattctcaagctgtaccagccgaaggtggataacagtgcggttgggacgagtaagaaaagtgacatggctgaggttaaggattggaaagcggttcgtgtggatctggtgatcacgccattcgagcagttcgcctatgcgctgctcggttggacgggcagcggccaatttcgtcgcgatctgcgtcgctatgcggaggaagagcgcgacatgctgctcgacaaccatcgtctctacgacctgaaaaagggcatctttctgagtgcggcgagcgaagaagaggttttcgcgcatctgggtctggattatgtggagccgtgggaacgcaacgcg

SEQ ID NO: 3476 - protein, 394 aa, synthetic construct
  REGION 1..394: note = Variant of terminal deoxynucleotidyl transferase
MHHHHHHGGSGHPPSNTPEKEVPSVIARPVSQYACQRKTTLNNYNKKFTDALEIMAENYKFKENLQACLEAKRAVSIFKSLPFEVTSMKDIQGLPCITDDVRDVIEEIIEEGESSRVKEILNDERYKAFKQFTSVFGVGVKTSEKWYRMGLRTVEEAKASKSLKLSKMQKAGFLYYEDLASMVSKEEADAVTLIVKETVRTVVPDAEVTIAGGFRRGKPMGHDVDFLITNPGRKEDDELLHKVVDLLKKQGLLLYEDIKESTFVEGQLPSHKIDAMDNFQKCFAILKLYQPKVDNSAVGTSKKSDMAEVKDWKAVRVDLVITPFEQFAYALLGWTGSGQFRRDLRRYAEEERDMLLDNHRLYDLKKGIFLSAASEEEVFAHLGLDYVEPWERNA

SEQ ID NO: 3477 - DNA, 1182 bp, synthetic construct; identical to SEQ ID NO: 3363
  misc_feature 1..1182: note = Variant of terminal deoxynucleotidyl transferase
  source 1..1182: mol_type = other DNA

SEQ ID NO: 3478 - protein, 394 aa, synthetic construct; identical to SEQ ID NO: 3364
  REGION 1..394: note = Variant of terminal deoxynucleotidyl transferase

SEQ ID NO: 3479 - DNA, 1182 bp, synthetic construct
  misc_feature 1..1182: note = Variant of terminal deoxynucleotidyl transferase
  source 1..1182: mol_type = other DNA
atgcatcaccaccatcatcatgggggttctggtcatccgccgagcaataccccggagaaggaggtgccgagcgttatcgcccgtccggttagtcagtacgcgtgccagcgcaagaccacgctgaataactacaacaaaaagttcaccgacgcgctggagatcatggccgagaactacaaatttaaagagaacctgcaggcgtgtctggaagccaagcgcgccgcgagtatttttaaaagcctgccgttcgaggttaccagcatgaaagacatccaaggtctgccgtgcattaccgacgacgtacgtgacgtgatcgaggagatcatcgaagagggcgagagcagccgtgttaaagaaatcctcaatgacgagcgctacaaggcctttaagcagttcaccagcgtgttcggtgtgggcgtgaaaacctcggaaaagtggtaccgtatgggcctccgtacggttgaagaagcaaaggccagtaagagtctgaagctgagcaagatgcagaaggcgggcttcctgtattacgaggatctggcgagcatggttagtaaagaagaagccgatgccgttacgctcatcgtgaaggaaacggtgcgtcgcgttgttccggatgcgctggtgaccatcgccggcggtttccgccgtggcaaacctatgggccacgacgttgactttctgatcacgaacccgggccgtaaaacggatgacgagctgctccacaaagtggttgatctgctcaagaagcaaggtctgctgctgtacgaagacatcaaagagagcacgttcgtggaggggcaagttccaagtcataaaatcgacgccatggacaacttccagaagtgcttcgccattctcaagctgtaccagccgaaggtggataacagtgcggttgggacgagtaagaaaagtgacatggctgaggttaaggattggaaagcggttcgtgtggatctggtgatcacgccattcgagcagttcgcctatgcgctgctcggttggacgggcagcggccaatttcgtgtggatctgcgtatctatgcggaggaagagcgcgacatgctgctcgacaaccatcgtctctacgacctgaaaaagggcatctttctgagtgcgggcagcgaagaagagattttcgcgcatctgggtctggattatgtggagccgtgggaacgcaacgcg

SEQ ID NO: 3480 - protein, 394 aa, synthetic construct
  REGION 1..394: note = Variant of terminal deoxynucleotidyl transferase
MHHHHHHGGSGHPPSNTPEKEVPSVIARPVSQYACQRKTTLNNYNKKFTDALEIMAENYKFKENLQACLEAKRAASIFKSLPFEVTSMKDIQGLPCITDDVRDVIEEIIEEGESSRVKEILNDERYKAFKQFTSVFGVGVKTSEKWYRMGLRTVEEAKASKSLKLSKMQKAGFLYYEDLASMVSKEEADAVTLIVKETVRRVVPDALVTIAGGFRRGKPMGHDVDFLITNPGRKTDDELLHKVVDLLKKQGLLLYEDIKESTFVEGQVPSHKIDAMDNFQKCFAILKLYQPKVDNSAVGTSKKSDMAEVKDWKAVRVDLVITPFEQFAYALLGWTGSGQFRVDLRIYAEEERDMLLDNHRLYDLKKGIFLSAGSEEEIFAHLGLDYVEPWERNA

SEQ ID NO: 3481 - DNA, 1182 bp, synthetic construct
  misc_feature 1..1182: note = Variant of terminal deoxynucleotidyl transferase
  source 1..1182: mol_type = other DNA
atgcatcaccaccatcatcatgggggttctggtcatccgccgagcaataccccggagaaggaggtgccgagcgttatcgcccgtccggttagtcagtacgcgtgccagcgcaagaccacgctgaataactacaacaaaaagttcaccgacgcgctggagatcatggccgagaactacaaatttaaagagaacctgcaggcgtgtctggaagccaagcgcgccgcgagtatttttaaaagcctgccgttcgaggttaccagcatgaaagacatccaaggtctgccgtgcattaccgacgacgtacgtgacgtgatcgaggagatcatcgaagagggcgagagcagccgtgttaaagaaatcctcaatgacgagcgctacaaggcctttaagcagttcaccagcgtgttcggtgtgggcgtgaaaacctcggaaaagtggtaccgtatgggcctccgtacggttgaagaagcaaaggccagtaagagtctgaagctgagcaagatgcagaaggcgggcttcctgtattacgaggatctggcgagcatggttagtaaagaagaagccgatgccgttacgctcatcgtgaaggaaacggtgcgtactgttgttccggatgcgctggtgaccatcgccggcggtttccgccgtggcaaacctatgggccacgacgttgacctgctgatcacgaacccgggccgtcacgaggatgacgagctgctccacaaagtggttgatctgctcaagaagcaaggtctgctgctgtacgaagacatcaaagagagcacgttcgtggaggggcaactgccaagtcataaaatcgacgccatggacaacttccagaagtgcttcgccattctcaagctgtaccagccgaaggtggataacagtgcggttgggacgagtaagaaaagtgacatggctgaggttaaggattggaaagcggttcgtgtggatctggtgatcacgccattcgagcagttcgcctatgcgctgctcggttggacgggcagcggccaatttcgtctggatctgcgtcgctatgcggaggaagagcgcgacatgctgctcgacaaccatcgtctctacgacctgaaaaagggcatctttctgagtgcgggcagcgaagaagagattttcgcgcatctgggtctggattatgtggagccgtgggaacgcaacgcg

SEQ ID NO: 3482 - protein, 394 aa, synthetic construct
  REGION 1..394: note = Variant of terminal deoxynucleotidyl transferase
MHHHHHHGGSGHPPSNTPEKEVPSVIARPVSQYACQRKTTLNNYNKKFTDALEIMAENYKFKENLQACLEAKRAASIFKSLPFEVTSMKDIQGLPCITDDVRDVIEEIIEEGESSRVKEILNDERYKAFKQFTSVFGVGVKTSEKWYRMGLRTVEEAKASKSLKLSKMQKAGFLYYEDLASMVSKEEADAVTLIVKETVRTVVPDALVTIAGGFRRGKPMGHDVDLLITNPGRHEDDELLHKVVDLLKKQGLLLYEDIKESTFVEGQLPSHKIDAMDNFQKCFAILKLYQPKVDNSAVGTSKKSDMAEVKDWKAVRVDLVITPFEQFAYALLGWTGSGQFRLDLRRYAEEERDMLLDNHRLYDLKKGIFLSAGSEEEIFAHLGLDYVEPWERNA

SEQ ID NO: 3483 - DNA, 1182 bp, synthetic construct
  misc_feature 1..1182: note = Variant of terminal deoxynucleotidyl transferase
  source 1..1182: mol_type = other DNA
atgcatcaccaccatcatcatgggggttctggtcatccgccgagcaataccccggagaaggaggtgccgagcgttatcgcccgtccggttagtcagtacgcgtgccagcgcaagaccacgctgaataactacaacaaaaagttcaccgacgcgctggagatcatggccgagaactacaaatttaaagagaacctgcaggcgtgtctggaagccaagcgcgccgcgagtatttttaaaagcctgccgttcgaggttaccagcatgaaagacatccaaggtctgccgtgcattaccgacgacgtacgtgacgtgatcgaggagatcatcgaagagggcgagagcagccgtgttaaagaaatcctcaatgacgagcgctacaaggcctttaagcagttcaccagcgtgttcggtgtgggcgtgaaaacctcggaaaagtggtaccgtatgggcctccgtacggttgaagaagcaaaggccagtaagagtctgaagctgagcaagatgcagaaggcgggcttcctgtattacgaggatctggcgagcatggttagtaaagaagaagccgatgccgttacgctcatcgtgaaggaaacggtgcgtaccgttgtgccggatgcgctggtgaccatcgccggcggtttccgccgtggcaaacctatgggccacgacgttgacctgctgatcacgaacccgggccgtaaagaggatgacgagctgctccacaaagtggttgatctgctcaagaagcaaggtctgctgctgtacgaagacatcaaagagagcacgttcgtggaggggcaagttccaagtcataaaatcgacgccatggacaacttccagaagtgcttcgccattctcaagctgtaccagccgaaggtggataacagtgcggttgggacgagtaagaaaagtgacatggctgaggttaaggattggaaagcggttcgtgtggatctggtgatcacgccattcgagcagttcgcctatgcgctgctcggttggacgggcagcggccaatttcgtctggatctgcgtcgctatgcggaggaagagcgcgacatgctgctcgacaaccatcgtctctacgacctgaaaaagggcatctttctgagtgcgggcagcgaagaagagattttcgcgcatctgggtctggattatgtggagccgtgggaacgcaacgcg

SEQ ID NO: 3484 - protein, 394 aa, synthetic construct
  REGION 1..394: note = Variant of terminal deoxynucleotidyl transferase
MHHHHHHGGSGHPPSNTPEKEVPSVIARPVSQYACQRKTTLNNYNKKFTDALEIMAENYKFKENLQACLEAKRAASIFKSLPFEVTSMKDIQGLPCITDDVRDVIEEIIEEGESSRVKEILNDERYKAFKQFTSVFGVGVKTSEKWYRMGLRTVEEAKASKSLKLSKMQKAGFLYYEDLASMVSKEEADAVTLIVKETVRTVVPDALVTIAGGFRRGKPMGHDVDLLITNPGRKEDDELLHKVVDLLKKQGLLLYEDIKESTFVEGQVPSHKIDAMDNFQKCFAILKLYQPKVDNSAVGTSKKSDMAEVKDWKAVRVDLVITPFEQFAYALLGWTGSGQFRLDLRRYAEEERDMLLDNHRLYDLKKGIFLSAGSEEEIFAHLGLDYVEPWERNA

SEQ ID NO: 3485 - DNA, 1182 bp, synthetic construct
  misc_feature 1..1182: note = Variant of terminal deoxynucleotidyl transferase
  source 1..1182: mol_type = other DNA
atgcatcaccaccatcatcatgggggttctggtcatccgccgagcaataccccggagaaggaggtgccgagcgttatcgcccgtcatgttagtcagtacgcgtgccagcgcaagaccacgctgaataactacaacaaaaagttcaccgacgcgctggagatcatggccgagaactacaaatttaaagagaacctgcaggcgtgtctggaagccaagcgcgccgcgagtgtctttaaaagcctgccgttcgaggttaccagcatgaaagacatccaaggtctgccgtgcattaccgacgacgtacgtgacgtgatcgaggagatcatcgaagagggcgagagcagccgtgttaaagaaatcctcaatgacgagcgctacaaggcctttaagcagttcaccagcgtgttcggtgtgggcgtgaaaacctcggaaaagtggtaccgtatgggcctccgtacggttgaagaagcaaaggccagtaagagtctgaagctgagcaagatgcagaaggcgggcttcctgtattacgaggatctggcgagcatggttagtaaagaagaagccgatgccgttacgctcatcgtgaaggaaacggtgcgtaccgttgtgccggatgcgctggtgaccatcgccggcggtttccgccgtggcaaacctatgggccacgacgttgactttctgatcacgaacccgggccgtcatgaagatgacgagctgctccacaaagtggttgatctgctcaagaagcaaggtctgctgctgtacgaagacatccgtgagagcacgttcgtggaggggcaactgccaagtcctaaaatcgacgccctggacaaccatcagaagtgcttcgccattctcaagctgtaccagccgaaggtggataacagtgcggttgggacgagtaagaaaagtgacatggctgaggttaaggattggaaagcggttcgtgtggatctggtgatcacgccattcgagcagttcgcctatgcgctgctcggttggacgggcagcggccaatttcgtcgcgatctgcgtcgctatgcggaggaagagcgcgacatgctgctcgacaaccatcgtctctacgacctgaaaaagggccagtttctgagtgcgggcagcgaagaagagattttcgcgcatctgggtctggattatctggagccgtgggaacgcaacgcg

SEQ ID NO: 3486 - protein, 394 aa, synthetic construct
  REGION 1..394: note = Variant of terminal deoxynucleotidyl transferase
MHHHHHHGGSGHPPSNTPEKEVPSVIARHVSQYACQRKTTLNNYNKKFTDALEIMAENYKFKENLQACLEAKRAASVFKSLPFEVTSMKDIQGLPCITDDVRDVIEEIIEEGESSRVKEILNDERYKAFKQFTSVFGVGVKTSEKWYRMGLRTVEEAKASKSLKLSKMQKAGFLYYEDLASMVSKEEADAVTLIVKETVRTVVPDALVTIAGGFRRGKPMGHDVDFLITNPGRHEDDELLHKVVDLLKKQGLLLYEDIRESTFVEGQLPSPKIDALDNHQKCFAILKLYQPKVDNSAVGTSKKSDMAEVKDWKAVRVDLVITPFEQFAYALLGWTGSGQFRRDLRRYAEEERDMLLDNHRLYDLKKGQFLSAGSEEEIFAHLGLDYLEPWERNA

SEQ ID NO: 3487 - DNA, 1182 bp, synthetic construct
  misc_feature 1..1182: note = Variant of terminal deoxynucleotidyl transferase
  source 1..1182: mol_type = other DNA
atgcatcaccaccatcatcatgggggttctggtcatccgccgagcaataccccggagaaggaggtgccgagcgttatcgcccgtcatgttagtcagtacgcgtgccagcgcaagaccacgctgaataactacaacaaaaagttcaccgacgcgctggagatcatggccgagaactacaaatttaaagagaacctgcaggcgtgtctggaagccaagcgcgccgcgagtatttttaaaagcctgccgttcgaggttaccagcatgaaagacatccaaggtctgccgtgcattaccgacgacgtacgtgacgtgatcgaggagatcatcgaagagggcgagagcagccgtgttaaagaaatcctcaatgacgagcgctacaaggcctttaagcagttcaccagcgtgttcggtgtgggcgtgaaaacctcggaaaagtggtaccgtatgggcctccgtacggttgaagaagcaaaggccagtaagagtctgaagctgagcaagatgcagaaggcgggcttcctgtattacgaggatctggcgagcggtgttagtaaagaagaagccgatgccgttacgctcatcgtgaaggaaacggtgcgtaccgttgtgccggatgcgctggtgaccatcgccggcggtttccgccgtggcaaacctatgggccacgacgttgactttctgatcacgaacccgggccgtcctgaagatgacgagctgctccacaaagtggttgatctgctcaagaagcaaggtctgctgctgtacgaagacatccgtgagagcacgttcgtggaggggcaactgccaagtcctaaaatcgacgccctggacaactttcagaagtgcttcgccattctcaagctgtaccagccgaaggtggataacagtgcggttgggacgagtaagaaaagtgacatggctgaggttaaggattggaaagcggttcgtgtggatctggtgatcacgccattcgagcagttcgcctatgcgctgctcggttggacgggcagcggccaatttcgtcgcgatctgcgtcgctatgcggaggaagagcgcgacatgctgctcgacaaccatcgtctctacgacctgaaaaagggcatctttctgagtgcgggcagcgaagaagagattttcggtcatctgggtctggattatctggagccgtgggaacgcaacgcg

SEQ ID NO: 3488 - protein, 394 aa, synthetic construct
  REGION 1..394: note = Variant of terminal deoxynucleotidyl transferase
MHHHHHHGGSGHPPSNTPEKEVPSVIARHVSQYACQRKTTLNNYNKKFTDALEIMAENYKFKENLQACLEAKRAASIFKSLPFEVTSMKDIQGLPCITDDVRDVIEEIIEEGESSRVKEILNDERYKAFKQFTSVFGVGVKTSEKWYRMGLRTVEEAKASKSLKLSKMQKAGFLYYEDLASGVSKEEADAVTLIVKETVRTVVPDALVTIAGGFRRGKPMGHDVDFLITNPGRPEDDELLHKVVDLLKKQGLLLYEDIRESTFVEGQLPSPKIDALDNFQKCFAILKLYQPKVDNSAVGTSKKSDMAEVKDWKAVRVDLVITPFEQFAYALLGWTGSGQFRRDLRRYAEEERDMLLDNHRLYDLKKGIFLSAGSEEEIFGHLGLDYLEPWERNA

SEQ ID NO: 3489 - DNA, 1182 bp, synthetic construct
  misc_feature 1..1182: note = Variant of terminal deoxynucleotidyl transferase
  source 1..1182: mol_type = other DNA
atgcatcaccaccatcatcatgggggttctggtcatccgccgagcaataccccggagaaggaggtgccgagcgttatcgcccgtccggttagtcagtacgcgtgccagcgcaagaccacgctgaataactacaacaaaaagttcaccgacgcgctggagatcatggccgagaactacaaatttaaagagaacctgcaggcgtgtctggaagccaagcgcgccgcgagtatctttaaaagcctgccgttcgaggttaccagcatgaaagacatccaaggtctgccgtgcattaccgacgacgtacgtgacgtgatcgaggagatcatcgaagagggcgagagcagccgtgttaaagaaatcctcaatgacgagcgctacaaggcctttaagcagttcaccagcgtgttcggtgtgggcgtgaaaacctcggaaaagtggtaccgtatgggcctccgtacggttgaagaagcaaaggccagtaagagtctgaagctgagcaagatgcagaaggcgggcttcctgtattacgaggatctggcgagcggtgttagtaaagaagaagccgatgccgttacgctcatcgtgaaggaaacggtgcgtaccgttgtgccggatgcggaagtgaccatcgccggcggtttccgccgtggcaaacctatgggccacgacgttgactttctgatcacgaacccgggccgtaaggaagatgacgagctgctccacaaagtggttgatctgctcaagaagcaaggtctgctgctgtacgaagacatccgtgagagcacgttcgtggaggggcaactgccaagtcataaaatcgacgccctggacaaccatcagaagtgcttcgccattctcaagctgtaccagccgaaggtggataacagtgcggttgggacgagtaagaaaagtgacatggctgaggttaaggattggaaagcggttcgtgtggatctggtgatcacgccattcgagcagttcgcctatgcgctgctcggttggacgggcagcggccaatttcgtcgcgatctgcgtcgctatgcggaggaagagcgcgacatgctgctcgacaaccatcgtctctacgacctgaaaaagggccagtttctgagtgcgggcagcgaagaagagattttcgctcatctgggtctggattatctggagccgtgggaacgcaacgcg

SEQ ID NO: 3490 - protein, 394 aa, synthetic construct
  REGION 1..394: note = Variant of terminal deoxynucleotidyl transferase
MHHHHHHGGSGHPPSNTPEKEVPSVIARPVSQYACQRKTTLNNYNKKFTDALEIMAENYKFKENLQACLEAKRAASIFKSLPFEVTSMKDIQGLPCITDDVRDVIEEIIEEGESSRVKEILNDERYKAFKQFTSVFGVGVKTSEKWYRMGLRTVEEAKASKSLKLSKMQKAGFLYYEDLASGVSKEEADAVTLIVKETVRTVVPDAEVTIAGGFRRGKPMGHDVDFLITNPGRKEDDELLHKVVDLLKKQGLLLYEDIRESTFVEGQLPSHKIDALDNHQKCFAILKLYQPKVDNSAVGTSKKSDMAEVKDWKAVRVDLVITPFEQFAYALLGWTGSGQFRRDLRRYAEEERDMLLDNHRLYDLKKGQFLSAGSEEEIFAHLGLDYLEPWERNA

SEQ ID NO: 3491 - DNA, 1182 bp, synthetic construct
  misc_feature 1..1182: note = Variant of terminal deoxynucleotidyl transferase
  source 1..1182: mol_type = other DNA
atgcatcaccaccatcatcatgggggttctggtcatccgccgagcaataccccggagaaggaggtgccgagcgttatcgcccgtcctgttagtcagtacgcgtgccagcgcaagaccacgctgaataactacaacaaaaagttcaccgacgcgctggagatcatggccgagaactacaaatttaaagagaacctgcaggcgtgtctggaagccaagcgcgccgcgagtatctttaaaagcctgccgttcgaggttaccagcatgaaagacatccaaggtctgccgtgcattaccgacgacgtacgtgacgtgatcgaggagatcatcgaagagggcgagagcagccgtgttaaagaaatcctcaatgacgagcgctacaaggcctttaagcagttcaccagcgtgttcggtgtgggcgtgaaaacctcggaaaagtggtaccgtatgggcctccgtacggttgaagaagcaaaggccagtaagagtctgaagctgagcaagatgcagaaggcgggcttcctgtattacgaggatctggcgagcggtgttagtaaagaagaagccgatgccgttacgctcatcgtgaaggaaacggtgcgtaccgttgtgccggatgcgctggtgaccatcgccggcggtttccgccgtggcaaacctatgggccacgacgttgactttctgatcacgaacccgggccgtaaggaagatgacgagctgctccacaaagtggttgatctgctcaagaagcaaggtctgctgctgtacgaagacatccgtgagagcacgttcgtggaggggcaactgccaagtcataaaatcgacgccctggacaaccatcagaagtgcttcgccattctcaagctgtaccagccgaaggtggataacagtgcggttgggacgagtaagaaaagtgacatggctgaggttaaggattggaaagcggttcgtgtggatctggtgatcacgccattcgagcagttcgcctatgcgctgctcggttggacgggcagcggccaatttcgtcgcgatctgcgtcgctatgcggaggaagagcgcgacatgctgctcgacaaccatcgtctctacgacctgaaaaagggccagtttctgagtgcgggcagcgaagaagagattttcggtcatctgggtctggattatctggagccgtgggaacgcaacgcg

SEQ ID NO: 3492 - protein, 394 aa, synthetic construct
  REGION 1..394: note = Variant of terminal deoxynucleotidyl transferase
MHHHHHHGGSGHPPSNTPEKEVPSVIARPVSQYACQRKTTLNNYNKKFTDALEIMAENYKFKENLQACLEAKRAASIFKSLPFEVTSMKDIQGLPCITDDVRDVIEEIIEEGESSRVKEILNDERYKAFKQFTSVFGVGVKTSEKWYRMGLRTVEEAKASKSLKLSKMQKAGFLYYEDLASGVSKEEADAVTLIVKETVRTVVPDALVTIAGGFRRGKPMGHDVDFLITNPGRKEDDELLHKVVDLLKKQGLLLYEDIRESTFVEGQLPSHKIDALDNHQKCFAILKLYQPKVDNSAVGTSKKSDMAEVKDWKAVRVDLVITPFEQFAYALLGWTGSGQFRRDLRRYAEEERDMLLDNHRLYDLKKGQFLSAGSEEEIFGHLGLDYLEPWERNA

SEQ ID NO: 3493 - DNA, 1182 bp, synthetic construct
  misc_feature 1..1182: note = Variant of terminal deoxynucleotidyl transferase
  source 1..1182: mol_type = other DNA
atgcatcaccaccatcatcatgggggttctggtcatccgccgagcaataccccggagaaggaggtgccgagcgttatcgcccgtcatgttagtcagtacgcgtgccagcgcaagaccacgctgaataactacaacaaaaagttcaccgacgcgctggagatcatggccgagaactacaaatttaaagagaacctgcaggcgtgtctggaagccaagcgcgccgcgagtgtctttaaaagcctgccgttcgaggttaccagcatgaaagacatccaaggtctgccgtgcattaccgacgacgtacgtgacctgatcgaggagatcatcgaagagggcgagagcagccgtgttaaagaaatcctcaatgacgagcgctacaaggcctttaagcagttcaccagcgtgttcggtgtgggcgtgaaaacctcggaaaagtggtaccgtatgggcctccgtacggttgaagaagcaaaggccagtaagagtctgaagctgagcaagatgcagaaggcgggcttcctgtattacgaggatctggcgagcatggttagtaaagaagaagccgatgccgttacgctcatcgtgaaggaaacggtgcgtaccgttgtgccggatgcgctggtgaccatcgccggcggtttccgccgtggcaaacctatgggccacgacgttgactttctgatcacgaacccgggccgtcgtgaagatgacgagctgctccacaaagtggttgatctgctcaagaagcaaggtctgctgctgtacgaagacatccgtgagagcacgttcgtggaggggcaactgccaagtcctaaaatcgacgccctggacaaccatcagaagtgcttcgccattctcaagctgtaccagccgaaggtggataacagtgcggttgggacgagtaagaaaagtgacatggctgaggttaaggattggaaagcggttcgtgtggatctggtgatcacgccattcgagcagttcgcctatgcgctgctcggttggacgggcagcggccaatttcgtcgcgatctgcgtcgctatgcggaggaagagcgcgacatgctgctcgacaaccatcgtctctacgacctgaaaaagggcatctttctgagtgcgggcagcgaagaagagattttcggtcatctgggtctggattatctggagccgtgggaacgcaacgcg

SEQ ID NO: 3494 - protein, 394 aa, synthetic construct
  REGION 1..394: note = Variant of terminal deoxynucleotidyl transferase
MHHHHHHGGSGHPPSNTPEKEVPSVIARHVSQYACQRKTTLNNYNKKFTDALEIMAENYKFKENLQACLEAKRAASVFKSLPFEVTSMKDIQGLPCITDDVRDLIEEIIEEGESSRVKEILNDERYKAFKQFTSVFGVGVKTSEKWYRMGLRTVEEAKASKSLKLSKMQKAGFLYYEDLASMVSKEEADAVTLIVKETVRTVVPDALVTIAGGFRRGKPMGHDVDFLITNPGRREDDELLHKVVDLLKKQGLLLYEDIRESTFVEGQLPSPKIDALDNHQKCFAILKLYQPKVDNSAVGTSKKSDMAEVKDWKAVRVDLVITPFEQFAYALLGWTGSGQFRRDLRRYAEEERDMLLDNHRLYDLKKGIFLSAGSEEEIFGHLGLDYLEPWERNA

SEQ ID NO: 3495 - DNA, 1182 bp, synthetic construct
  misc_feature 1..1182: note = Variant of terminal deoxynucleotidyl transferase
  source 1..1182: mol_type = other DNA
atgcatcaccaccatcatcatgggggttctggtcatccgccgagcaataccccggagaaggaggtgccgagcgttatcgcccgtccggttagtcagtacgcgtgccagcgcaagaccacgctgaataactacaacaaaaagttcaccgacgcgctggagatcatggccgagaactacaaatttaaagagaacctgcaggcgtgtctggaagccaagcgcgccgcgagtgtctttaaaagcctgccgttcgaggttaccagcatgaaagacatccaaggtctgccgtgcattaccgacgacgtacgtgacgtgatcgaggagatcatcgaagagggcgagagcagccgtgttaaagaaatcctcaatgacgagcgctacaaggcctttaagcagttcaccagcgtgttcggtgtgggcgtgaaaacctcggaaaagtggtaccgtatgggcctccgtacggttgaagaagcaaaggccagtaagagtctgaagctgagcaagatgcagaaggcgggcttcctgtattacgaggatctggcgagcggtgttagtaaagaagaagccgatgccgttacgctcatcgtgaaggaaacggtgcgtaccgttgtgccggatgcgctggtgaccatcgccggcggtttccgccgtggcaaacctatgggccacgacgttgactttctgatcacgaacccgggccgtaaggaagatgacgagctgctccacaaagtggttgatctgctcaagaagcaaggtctgctgctgtacgaagacatccgtgagagcacgttcgtggaggggcaactgccaagtcataaaatcgacgccctggacaacttccagaagtgcttcgccattctcaagctgtaccagccgaaggtggataacagtgcggttgggacgagtaagaaaagtgacatggctgaggttaaggattggaaagcggttcgtgtggatctggtgatcacgccattcgagcagttcgcctatgcgctgctcggttggacgggcagcggccaatttcgtcgcgatctgcgtcgctatgcggaggaagagcgcgacatgctgctcgacaaccatcgtctctacgacctgaaaaagggccagtttctgagtgcgggcagcgaagaagagattttcgcgcatctgggtctggattatctggagccgtgggaacgcaacgcg

SEQ ID NO: 3496 - protein, 394 aa, synthetic construct
  REGION 1..394: note = Variant of terminal deoxynucleotidyl transferase
MHHHHHHGGSGHPPSNTPEKEVPSVIARPVSQYACQRKTTLNNYNKKFTDALEIMAENYKFKENLQACLEAKRAASVFKSLPFEVTSMKDIQGLPCITDDVRDVIEEIIEEGESSRVKEILNDERYKAFKQFTSVFGVGVKTSEKWYRMGLRTVEEAKASKSLKLSKMQKAGFLYYEDLASGVSKEEADAVTLIVKETVRTVVPDALVTIAGGFRRGKPMGHDVDFLITNPGRKEDDELLHKVVDLLKKQGLLLYEDIRESTFVEGQLPSHKIDALDNFQKCFAILKLYQPKVDNSAVGTSKKSDMAEVKDWKAVRVDLVITPFEQFAYALLGWTGSGQFRRDLRRYAEEERDMLLDNHRLYDLKKGQFLSAGSEEEIFAHLGLDYLEPWERNA

SEQ ID NO: 3497 - DNA, 1182 bp, synthetic construct
  misc_feature 1..1182: note = Variant of terminal deoxynucleotidyl transferase
  source 1..1182: mol_type = other DNA
atgcatcaccaccatcatcatgggggttctggtcatccgccgagcaataccccggagaaggaggtgccgagcgttatcgcccgtcctgttagtcagtacgcgtgccagcgcaagaccacgctgaataactacaacaaaaagttcaccgacgcgctggagatcatggccgagaactacaaatttaaagagaacctgcaggcgtgtctggaagccaagcgcgccgcgagtgtctttaaaagcctgccgttcgaggttaccagcatgaaagacatccaaggtctgccgtgcattaccgacgacgtacgtgacgtgatcgaggagatcatcgaagagggcgagagcagccgtgttaaagaaatcctcaatgacgagcgctacaaggcctttaagcagttcaccagcgtgttcggtgtgggcgtgaaaacctcggaaaagtggtaccgtatgggcctccgtacggttgaagaagcaaaggccagtaagagtctgaagctgagcaagatgcagaaggcgggcttcctgtattacgaggatctggcgagcggtgttagtaaagaagaagccgatgccgttacgctcatcgtgaaggaaacggtgcgtaccgttgtgccggatgcgctggtgaccatcgccggcggtttccgccgtggcaaacctatgggccacgacgttgactttctgatcacgaacccgggccgtaaggaagatgacgagctgctccacaaagtggttgatctgctcaagaagcaaggtctgctgctgtacgaagacatccgtgagagcacgttcgtggaggggcaactgccaagtcataaaatcgacgccctggacaaccatcagaagtgcttcgccattctcaagctgtaccagccgaaggtggataacagtgcggttgggacgagtaagaaaagtgacatggctgaggttaaggattggaaagcggttcgtgtggatctggtgatcacgccattcgagcagttcgcctatgcgctgctcggttggacgggcagcggccaatttcgtcgcgatctgcgtcgctatgcggaggaagagcgcgacatgctgctcgacaaccatcgtctctacgacctgaaaaagggcatctttctgagtgcgggcagcgaagaagagattttcggtcatctgggtctggattatctggagccgtgggaacgcaacgcg

SEQ ID NO: 3498 - protein, 394 aa, synthetic construct
  REGION 1..394: note = Variant of terminal deoxynucleotidyl transferase
MHHHHHHGGSGHPPSNTPEKEVPSVIARPVSQYACQRKTTLNNYNKKFTDALEIMAENYKFKENLQACLEAKRAASVFKSLPFEVTSMKDIQGLPCITDDVRDVIEEIIEEGESSRVKEILNDERYKAFKQFTSVFGVGVKTSEKWYRMGLRTVEEAKASKSLKLSKMQKAGFLYYEDLASGVSKEEADAVTLIVKETVRTVVPDALVTIAGGFRRGKPMGHDVDFLITNPGRKEDDELLHKVVDLLKKQGLLLYEDIRESTFVEGQLPSHKIDALDNHQKCFAILKLYQPKVDNSAVGTSKKSDMAEVKDWKAVRVDLVITPFEQFAYALLGWTGSGQFRRDLRRYAEEERDMLLDNHRLYDLKKGIFLSAGSEEEIFGHLGLDYLEPWERNA

SEQ ID NO: 3499 - DNA, 1182 bp, synthetic construct
  misc_feature 1..1182: note = Variant of terminal deoxynucleotidyl transferase
  source 1..1182: mol_type = other DNA
atgcatcaccaccatcatcatgggggttctggtcatccgccgagcaataccccggagaaggaggtgccgagcgttatcgcccgtcatgttagtcagtacgcgtgccagcgcaagaccacgctgaataactacaacaaaaagttcaccgacgcgctggagatcatggccgagaactacaaatttaaagagaacctgcaggcgtgtctggaagccaagcgcgccgcgagtatttttaaaagcctgccgttcgaggttaccagcatgaaagacatccaaggtctgccgtgcattaccgacgacgtacgtgacgtgatcgaggagatcatcgaagagggcgagagcagccgtgttaaagaaatcctcaatgacgagcgctacaaggcctttaagcagttcaccagcgtgttcggtgtgggcgtgaaaacctcggaaaagtggtaccgtatgggcctccgtacggttgaagaagcaaaggccagtaagagtctgaagctgagcaagatgcagaaggcgggcttcctgtattacgaggatctggcgagcggtgttagtaaagaagaagccgatgccgttacgctcatcgtgaaggaaacggtgcgtaccgttgtgccggatgcgctggtgaccatcgccggcggtttccgccgtggcaaacctatgggccacgacgttgactttctgatcacgaacccgggccgtaaagaagatgacgagctgctccacaaagtggttgatctgctcaagaagcaaggtctgctgctgtacgaagacatccgtgagagcacgttcgtggaggggcaactgccaagtcagaaaatcgacgccctggacaaccatcagaagtgcttcgccattctcaagctgtaccagccgaaggtggataacagtgcggttgggacgagtaagaaaagtgacatggctgaggttaaggattggaaagcggttcgtgtggatctggtgatcacgccattcgagcagttcgcctatgcgctgctcggttggacgggcagcggccaatttcgtcgcgatctgcgtcgctatgcggaggaagagcgcgacatgctgctcgacaaccatcgtctctacgacctgaaaaagggcatctttctgagtgcgggcagcgaagaagagattttcggtcatctgggtctggattatctggagccgtgggaacgcaacgcg

SEQ ID NO: 3500 - protein, 394 aa, synthetic construct
  REGION 1..394: note = Variant of terminal deoxynucleotidyl transferase
MHHHHHHGGSGHPPSNTPEKEVPSVIARHVSQYACQRKTTLNNYNKKFTDALEIMAENYKFKENLQACLEAKRAASIFKSLPFEVTSMKDIQGLPCITDDVRDVIEEIIEEGESSRVKEILNDERYKAFKQFTSVFGVGVKTSEKWYRMGLRTVEEAKASKSLKLSKMQKAGFLYYEDLASGVSKEEADAVTLIVKETVRTVVPDALVTIAGGFRRGKPMGHDVDFLITNPGRKEDDELLHKVVDLLKKQGLLLYEDIRESTFVEGQLPSQKIDALDNHQKCFAILKLYQPKVDNSAVGTSKKSDMAEVKDWKAVRVDLVITPFEQFAYALLGWTGSGQFRRDLRRYAEEERDMLLDNHRLYDLKKGIFLSAGSEEEIFGHLGLDYLEPWERNA

SEQ ID NO: 3501 - DNA, 1182 bp, synthetic construct
  misc_feature 1..1182: note = Variant of terminal deoxynucleotidyl transferase
  source 1..1182: mol_type = other DNA
atgcatcaccaccatcatcatgggggttctggtcatccgccgagcaataccccggagaaggaggtgccgagcgttatcgcccgtcatgttagtcagtacgcgtgccagcgcaagaccacgctgaataactacaacaaaaagttcaccgacgcgctggagatcatggccgagaactacaaatttaaagagaacctgcaggcgtgtctggaagccaagcgcgccgcgagtgtctttaaaagcctgccgttcgaggttaccagcatgaaagacatccaaggtctgccgtgcattaccgacgacgtacgtgacgtgatcgaggagatcatcgaagagggcgagagcagccgtgttaaagaaatcctcaatgacgagcgctacaaggcctttaagcagttcaccagcgtgttcggtgtgggcgtgaaaacctcggaaaagtggtaccgtatgggcctccgtacggttgaagaagcaaaggccagtaagagtctgaagctgagcaagatgcagaaggcgggcttcctgtattacgaggatctggcgagcatggttagtaaagaagaagccgatgccgttacgctcatcgtgaaggaaacggtgcgtaccgttgtgccggatgcgctggtgaccatcgccggcggtttccgccgtggcaaacctatgggccacgacgttgactttctgatcacgaacccgggccgtaaggaagatgacgagctgctccacaaagtggttgatctgctcaagaagcaaggtctgctgctgtacgaagacatccgtgagagcacgttcgtggaggggcaactgccaagtcctaaaatcgacgccctggacaactttcagaagtgcttcgccattctcaagctgtaccagccgaaggtggataacagtgcggttgggacgagtaagaaaagtgacatggctgaggttaaggattggaaagcggttcgtgtggatctggtgatcacgccattcgagcagttcgcctatgcgctgctcggttggacgggcagcggccaatttcgtcgcgatctgcgtcgctatgcggaggaagagcgcgacatgctgctcgacaaccatcgtctctacgacctgaaaaagggcatctttctgagtgcgggcagcgaagaagagattttcgctcatctgggtctggattatctggagccgtgggaacgcaacgcg

SEQ ID NO: 3502 - protein, 394 aa, synthetic construct
  REGION 1..394: note = Variant of terminal deoxynucleotidyl transferase
MHHHHHHGGSGHPPSNTPEKEVPSVIARHVSQYACQRKTTLNNYNKKFTDALEIMAENYKFKENLQACLEAKRAASVFKSLPFEVTSMKDIQGLPCITDDVRDVIEEIIEEGESSRVKEILNDERYKAFKQFTSVFGVGVKTSEKWYRMGLRTVEEAKASKSLKLSKMQKAGFLYYEDLASMVSKEEADAVTLIVKETVRTVVPDALVTIAGGFRRGKPMGHDVDFLITNPGRKEDDELLHKVVDLLKKQGLLLYEDIRESTFVEGQLPSPKIDALDNFQKCFAILKLYQPKVDNSAVGTSKKSDMAEVKDWKAVRVDLVITPFEQFAYALLGWTGSGQFRRDLRRYAEEERDMLLDNHRLYDLKKGIFLSAGSEEEIFAHLGLDYLEPWERNA

SEQ ID NO: 3503 - DNA, 1182 bp, synthetic construct
  misc_feature 1..1182: note = Variant of terminal deoxynucleotidyl transferase
  source 1..1182: mol_type = other DNA
atgcatcaccaccatcatcatgggggttctggtcatccgccgagcaataccccggagaaggaggtgccgagcgttatcgcccgtcatgttagtcagtacgcgtgccagcgcaagaccacgctgaataactacaacaaaaagttcaccgacgcgctggagatcatggccgagaactacaaatttaaagagaacctgcaggcgtgtctggaagccaagcgcgccgcgagtgtctttaaaagcctgccgttcgaggttaccagcatgaaagacatccaaggtctgccgtgcattaccgacgacgtacgtgacgtgatcgaggagatcatcgaagagggcgagagcagccgtgttaaagaaatcctcaatgacgagcgctacaaggcctttaagcagttcaccagcgtgttcggtgtgggcgtgaaaacctcggaaaagtggtaccgtatgggcctccgtacggttgaagaagcaaaggccagtaagagtctgaagctgagcaagatgcagaaggcgggcttcctgtattacgaggatctggcgagcggtgttagtaaagaagaagccgatgccgttacgctcatcgtgaaggaaacggtgcgtaccgttgtgccggatgcggaagtgaccatcgccggcggtttccgccgtggcaaacctatgggccacgacgttgactttctgatcacgaacccgggccgtaaagaagatgacgagctgctccacaaagtggttgatctgctcaagaagcaaggtctgctgctgtacgaagacatccgtgagagcacgttcgtggaggggcaactgccaagtcagaaaatcgacgccctggacaactttcagaagtgcttcgccattctcaagctgtaccagccgaaggtggataacagtgcggttgggacgagtaagaaaagtgacatggctgaggttaaggattggaaagcggttcgtgtggatctggtgatcacgccattcgagcagttcgcctatgcgctgctcggttggacgggcagcggccaatttcgtcgcgatctgcgtcgctatgcggaggaagagcgcgacatgctgctcgacaaccatcgtctctacgacctgaaaaagggcatctttctgagtgcgggcagcgaagaagagattttcgctcatctgggtctggattatctggagccgtgggaacgcaacgcg

SEQ ID NO: 3504 - protein, 394 aa, synthetic construct
  REGION 1..394: note = Variant of terminal deoxynucleotidyl transferase
MHHHHHHGGSGHPPSNTPEKEVPSVIARHVSQYACQRKTTLNNYNKKFTDALEIMAENYKFKENLQACLEAKRAASVFKSLPFEVTSMKDIQGLPCITDDVRDVIEEIIEEGESSRVKEILNDERYKAFKQFTSVFGVGVKTSEKWYRMGLRTVEEAKASKSLKLSKMQKAGFLYYEDLASGVSKEEADAVTLIVKETVRTVVPDAEVTIAGGFRRGKPMGHDVDFLITNPGRKEDDELLHKVVDLLKKQGLLLYEDIRESTFVEGQLPSQKIDALDNFQKCFAILKLYQPKVDNSAVGTSKKSDMAEVKDWKAVRVDLVITPFEQFAYALLGWTGSGQFRRDLRRYAEEERDMLLDNHRLYDLKKGIFLSAGSEEEIFAHLGLDYLEPWERNA

SEQ ID NO: 3505 - DNA, 1182 bp, synthetic construct
  misc_feature 1..1182: note = Variant of terminal deoxynucleotidyl transferase
  source 1..1182: mol_type = other DNA
atgcatcaccaccatcatcatgggggttctggtcatccgccgagcaataccccggagaaggaggtgccgagcgttatcgcccgtcctgttagtcagtacgcgtgccagcgcaagaccacgctgaataactacaacaaaaagttcaccgacgcgctggagatcatggccgagaactacaaatttaaagagaacctgcaggcgtgtctggaagccaagcgcgccgcgagtgtctttaaaagcctgccgttcgaggttaccagcatgaaagacatccaaggtctgccgtgcattaccgacgacgtacgtgacgtgatcgaggagatcatcgaagagggcgagagcagccgtgttaaagaaatcctcaatgacgagcgctacaaggcctttaagcagttcaccagcgtgttcggtgtgggcgtgaaaacctcggaaaagtggtaccgtatgggcctccgtacggttgaagaagcaaaggccagtaagagtctgaagctgagcaagatgcagaaggcgggcttcctgtattacgaggatctggcgagcatggttagtaaagaagaagccgatgccgttacgctcatcgtgaaggaaacggtgcgtaccgttgtgccggatgcgctggtgaccatcgccggcggtttccgccgtggcaaacctatgggccacgacgttgactttctgatcacgaacccgggccgtcatgaagatgacgagctgctccacaaagtggttgatctgctcaagaagcaaggtctgctgctgtacgaagacatccgtgagagcacgttcgtggaggggcaactgccaagtcagaaaatcgacgccctggacaaccatcagaagtgcttcgccattctcaagctgtaccagccgaaggtggataacagtgcggttgggacgagtaagaaaagtgacatggctgaggttaaggattggaaagcggttcgtgtggatctggtgatcacgccattcgagcagttcgcctatgcgctgctcggttggacgggcagcggccaatttcgtcgcgatctgcgtcgctatgcggaggaagagcgcgacatgctgctcgacaaccatcgtctctacgacctgaaaaagggcatctttctgagtgcgggcagcgaagaagagattttcggtcatctgggtctggattatctggagccgtgggaacgcaacgcg

SEQ ID NO: 3506 - protein, 394 aa, synthetic construct
  REGION 1..394: note = Variant of terminal deoxynucleotidyl transferase
MHHHHHHGGSGHPPSNTPEKEVPSVIARPVSQYACQRKTTLNNYNKKFTDALEIMAENYKFKENLQACLEAKRAASVFKSLPFEVTSMKDIQGLPCITDDVRDVIEEIIEEGESSRVKEILNDERYKAFKQFTSVFGVGVKTSEKWYRMGLRTVEEAKASKSLKLSKMQKAGFLYYEDLASMVSKEEADAVTLIVKETVRTVVPDALVTIAGGFRRGKPMGHDVDFLITNPGRHEDDELLHKVVDLLKKQGLLLYEDIRESTFVEGQLPSQKIDALDNHQKCFAILKLYQPKVDNSAVGTSKKSDMAEVKDWKAVRVDLVITPFEQFAYALLGWTGSGQFRRDLRRYAEEERDMLLDNHRLYDLKKGIFLSAGSEEEIFGHLGLDYLEPWERNA

SEQ ID NO: 3507 - DNA, 1182 bp, synthetic construct
  misc_feature 1..1182: note = Variant of terminal deoxynucleotidyl transferase
  source 1..1182: mol_type = other DNA
atgcatcaccaccatcatcatgggggttctggtcatccgccgagcaataccccggagaaggaggtgccgagcgttatcgcccgtccggttagtccgtacgcgtgccagcgcaagaccacgctgaataactacaacaaaaagttcaccgacgcgctggagatcatggccgagaactacaaatttaaagagaacctgcaggcgtgtctggaagccaagcgcgccgcgagtattctgaaaagcctgccgttcgaggttaccagcatgaaagacatccaaggtctgccgtgcattaccgacgacgtacgtgacgtgatcgaagagatcatcgaagagggcgagagcagccgtgttaaagaaatcctcaatgacgagcgctacaaggcctttaagcagttcaccagcgtgttcggtgtgggcgtgaaaacctcggaaaagtggtaccgtatgggcctccgtacggttgaagaagcaaaggccagtaagagtctgaagctgagcaagatgcagaaggcgggcttcctgtattacgaggatctggcgagcatggttagtaaagaagaagccgatgccgttacgctcatcgtgaaggaaacggtggcaaccgttgtgccggatgcgctggtgaccatcgccggcggtttccgccgtggcaaacctatgggccacgacgttgacctgctgatcacgaacccgggccgtaaaactgatgacgagctgctccacaaagtggttgatctgctcaagaagcaaggtctgctgctgtacgaagacatccgtgagagcacgttcgtggaggggcaactgccaagtcataagatcgacgccctggacaacttccagaagtgcttcgccattctcaagctgtaccagccgaaggtggataacagtgcggttgggacgagtaagaaaagtgacatggctgaggttaaggattggaaagcggttcgtgtggatctggtgatgacgccattcgagcagttcgcctatgcgctgctcggttggacgggcagcggccaatttcgtcgcgatctgcgtcgctatgcggaggaagagcgcgacatgctgctcgacaaccatcgtctctacgacctgaaaaagggcatctttctgagtgcgaatagcgaagaagagattttcgcgcatctgggtctggattatctggagccgtgggaacgcaacgcg

SEQ ID NO: 3508 - protein, 394 aa, synthetic construct
  REGION 1..394: note = Variant of terminal deoxynucleotidyl transferase
MHHHHHHGGSGHPPSNTPEKEVPSVIARPVSPYACQRKTTLNNYNKKFTDALEIMAENYKFKENLQACLEAKRAASILKSLPFEVTSMKDIQGLPCITDDVRDVIEEIIEEGESSRVKEILNDERYKAFKQFTSVFGVGVKTSEKWYRMGLRTVEEAKASKSLKLSKMQKAGFLYYEDLASMVSKEEADAVTLIVKETVATVVPDALVTIAGGFRRGKPMGHDVDLLITNPGRKTDDELLHKVVDLLKKQGLLLYEDIRESTFVEGQLPSHKIDALDNFQKCFAILKLYQPKVDNSAVGTSKKSDMAEVKDWKAVRVDLVMTPFEQFAYALLGWTGSGQFRRDLRRYAEEERDMLLDNHRLYDLKKGIFLSANSEEEIFAHLGLDYLEPWERNA

SEQ ID NO: 3509 - DNA, 1182 bp, synthetic construct
  misc_feature 1..1182: note = Variant of terminal deoxynucleotidyl transferase
  source 1..1182: mol_type = other DNA
atgcatcaccaccatcatcatgggggttctggtcatccgccgagcaataccccggagaaggaggtgccgagcgttatcgcccgtccggttagtcagtacgcgtgccagcgcaagaccacgctgaataactacaacaaaaagttcaccgacgcgctggagatcatggccgagaactacaaatttaaagagaacctgcaggcgtgtctggaagccaagcgcgccgcgagtatttttaaaagcctgccgttcgaggttaccagcatgaaagacatccaaggtctgccgtgcattaccgacgacgtacgtgacgtgatcgaagagatcatcgaagagggcgagagcagccgtgttaaagaaatcctcaatgacgagcgctacaaggcctttaagcagttcaccagcgtgttcggtgtgggcgtgaaaacctcggaaaagtggtaccgtatgggcctccgtacggttgaagaagcaaaggccagtaagagtctgaagctgagcaagatgcagaaggcgggcttcctgtattacgaggatctggcgagcatggttagtaaagaagaagccgatgccgttacgctcatcgtgaaggaaacggtggcaaccgttgtgccggatgcgctggtgaccatcgccggcggtttccgccgtggcaaacctatgggccacgacgttgacctgctgatcacgaacccgggccgtaaagaggatgacgagctgctccacaaagtggttgatctgctcaagaagcaaggtctgctgctgtacgaagacatccgtgagagcacgttcgtggaggggcaactgccaagtcataagatcgacgccctggacaacttccagaagtgcttcgccattctcaagctgtaccagccgaaggtggataacagtgcggttgggacgagtaagaaaagtgacatggctgaggttaaggattggaaagcggttcgtgtggatctggtgatcacgccattcgagcagttcgcctatgcgctgctcggttggacgggcagcggccaatttcgtcgcgatctgcgtcgctatgcggaggaagagcgcgacatgctgctcgacaaccatcgtctctacgacctgaaaaagggcatctttctgagtgcgggtagcgaagaagagattttcgcgcatctgggtctggattatctggagccgtgggaacgcaacgcg

SEQ ID NO: 3510 - protein, 394 aa, synthetic construct
  REGION 1..394: note = Variant of terminal deoxynucleotidyl transferase
MHHHHHHGGSGHPPSNTPEKEVPSVIARPVSQYACQRKTTLNNYNKKFTDALEIMAENYKFKENLQACLEAKRAASIFKSLPFEVTSMKDIQGLPCITDDVRDVIEEIIEEGESSRVKEILNDERYKAFKQFTSVFGVGVKTSEKWYRMGLRTVEEAKASKSLKLSKMQKAGFLYYEDLASMVSKEEADAVTLIVKETVATVVPDALVTIAGGFRRGKPMGHDVDLLITNPGRKEDDELLHKVVDLLKKQGLLLYEDIRESTFVEGQLPSHKIDALDNFQKCFAILKLYQPKVDNSAVGTSKKSDMAEVKDWKAVRVDLVITPFEQFAYALLGWTGSGQFRRDLRRYAEEERDMLLDNHRLYDLKKGIFLSAGSEEEIFAHLGLDYLEPWERNA

SEQ ID NO: 3511 - DNA, 1182 bp, synthetic construct
  misc_feature 1..1182: note = Variant of terminal deoxynucleotidyl transferase
  source 1..1182: mol_type = other DNA
atgcatcaccaccatcatcatgggggttctggtcatccgccgagcaataccccggagaaggaggtgccgagcgttatcgcccgtccggttagttgctacgcgtgccagcgcaagaccacgctgaataactacaacaaaaagttcaccgacgcgctggagatcatggccgagaactacaaatttaaagagaacctgcaggcgtgtctggaagccaagcgcgccgcgagtatttttaaaagcctgccgttcgaggttaccagcatgaaagacatccaaggtctgccgtgcattaccgacgacgtacgtgacgtgatccaagagatcatcgaagagggcgagagcagccgtgttaaagaaatcctcaatgacgagcgctacaaggcctttaagcagttcaccagcgtgttcggtgtgggcgtgaaaacctcggaaaagtggtaccgtatgggcctccgtacggttgaagaagcaaaggccagtaagagtctgaagctgagcaagatgcagaaggcgggcttcctgtattacgaggatctggcgagcatggttagtaaagaagaagccgatgccgttacgctcatcgtgaaggaaacggtggcaaccgttgtgccggatgcgctggtgaccatcgccggcggtttccgccgtggcaaacctatgggccacgacgttgacctgctgatcacgaacccgggccgtaaaactgatgacgagctgctccacaaagtggttgatctgctcaagaagcaaggtctgctgctgtacgaagacatccgtgagagcacgttcgtggaggggcaactgccaagtcataagatcgacgccctggacaacttccagaagtgcttcgccattctcaagctgtaccagccgaaggtggataacagtgcggttgggacgagtaagaaaagtgacatggctgaggttaaggattggaaagcggttcgtgtggatctggtgatcacgccattcgagcagttcgcctatgcgctgctcggttggacgggcagcggccaatttcgtcgcgatctgcgtcgctatgcggaggaagagcgcgacatgctgctcgacaaccatcgtctctacgacctgaaaaagggcatctttctgagtgcgaatagcgaagaagagattttcgcgcatctgggtctggattatctggagccgtgggaacgcaacgcg

SEQ ID NO: 3512 - protein, 394 aa, synthetic construct
  REGION 1..394: note = Variant of terminal deoxynucleotidyl transferase
MHHHHHHGGSGHPPSNTPEKEVPSVIARPVSCYACQRKTTLNNYNKKFTDALEIMAENYKFKENLQACLEAKRAASIFKSLPFEVTSMKDIQGLPCITDDVRDVIQEIIEEGESSRVKEILNDERYKAFKQFTSVFGVGVKTSEKWYRMGLRTVEEAKASKSLKLSKMQKAGFLYYEDLASMVSKEEADAVTLIVKETVATVVPDALVTIAGGFRRGKPMGHDVDLLITNPGRKTDDELLHKVVDLLKKQGLLLYEDIRESTFVEGQLPSHKIDALDNFQKCFAILKLYQPKVDNSAVGTSKKSDMAEVKDWKAVRVDLVITPFEQFAYALLGWTGSGQFRRDLRRYAEEERDMLLDNHRLYDLKKGIFLSANSEEEIFAHLGLDYLEPWERNA

SEQ ID NO: 3513 - DNA, 1182 bp, synthetic construct
  misc_feature 1..1182: note = Variant of terminal deoxynucleotidyl transferase
  source 1..1182: mol_type = other DNA
atgcatcaccaccatcatcatgggggttctggtcatccgccgagcaataccccggagaaggaggtgccgagcgttatcgcccgtccggttagtcagtacgcgtgccagcgcaagaccacgctgaataactacaacaaaaagttcaccgacgcgctggagatcatggccgagaactacaaatttaaagagaacctgcaggcgtgtctggaagccaagcgcgccgcgagtatttttaaaagcctgccgttcgaggttaccagcatgaaagacatccaaggtctgccgtgcattaccgacgacgtacgtgacgtgatccgcgagatcatcgaagagggcgagagcagccgtgttaaagaaatcctcaatgacgagcgctacaaggcctttaagcagttcaccagcgtgttcggtgtgggcgtgaaaacctcggaaaagtggtaccgtatgggcctccgtacggttgaagaagcaaaggccagtaagagtctgaagctgagcaagatgcagaaggcgggcttcctgtattacgaggatctggcgagcatggttagtaaagaagaagccgatgccgttacgctcatcgtgaaggaaacggtgcgtaccgttgtgccggatgcgctggtgaccatcgccggcggtttccgccgtggcaaacctatgggccacgacgttgacctgctgatcacgaacccgggccgtaaaactgatgacgagctgctccacaaagtggttgatctgctcaagaagcaaggtctgctgctgtacgaagacatccgtgagagcacgttcgtggaggggcaactgccaagtcataagatcgacgccctggacaacttccagaagtgcttcgccattctcaagctgtaccagccgaaggtggataacagtgcggttgggacgagtaagaaaagtgacatggctgaggttaaggattggaaagcggttcgtgtggatctggtgatcacgccattcgagcagttcgcctatgcgctgctcggttggacgggcagcggccaatttcgtcgcgatctgcgtcgctatgcggaggaagagcgcgacatgctgctcgacaaccatcgtctctacgacctgaaaaagggcatctttctgagtgcggctagcgaagaagagattttcgcgcatctgggtctggattatctggagccgtgggaacgcaacgcg

SEQ ID NO: 3514 - protein, 394 aa, synthetic construct
  REGION 1..394: note = Variant of terminal deoxynucleotidyl transferase
MHHHHHHGGSGHPPSNTPEKEVPSVIARPVSQYACQRKTTLNNYNKKFTDALEIMAENYKFKENLQACLEAKRAASIFKSLPFEVTSMKDIQGLPCITDDVRDVIREIIEEGESSRVKEILNDERYKAFKQFTSVFGVGVKTSEKWYRMGLRTVEEAKASKSLKLSKMQKAGFLYYEDLASMVSKEEADAVTLIVKETVRTVVPDALVTIAGGFRRGKPMGHDVDLLITNPGRKTDDELLHKVVDLLKKQGLLLYEDIRESTFVEGQLPSHKIDALDNFQKCFAILKLYQPKVDNSAVGTSKKSDMAEVKDWKAVRVDLVITPFEQFAYALLGWTGSGQFRRDLRRYAEEERDMLLDNHRLYDLKKGIFLSAASEEEIFAHLGLDYLEPWERNA

SEQ ID NO: 3515 - DNA, 1182 bp, synthetic construct
  misc_feature 1..1182: note = Variant of terminal deoxynucleotidyl transferase
  source 1..1182: mol_type = other DNA
atgcatcaccaccatcatcatgggggttctggtcatccgccgagcaataccccggagaaggaggtgccgagcgttatcgcccgtcatgttagtcagtacgcgtgccagcgcaagaccacgctgaataactacaacaaaaagttcaccgacgcgctggagatcatggccgagaactacaaatttaaagagaacctgcaggcgtgtctggaagccaagcgcgccgcgagtatctttaaaagcctgccgttcgaggttaccagcatgaaagacatccaaggtctgccgtgcattaccgacgacgtacgtgacgtgatcgaggagatcatcgaagagggcgagagcagccgtgttaaagaaatcctcaatgacgagcgctacaaggcctttaagcagttcaccagcgtgttcggtgtgggcgtgaaaacctcggaaaagtggtaccgtatgggcctccgtacggttgaagaagcaaaggccagtaagagtctgaagctgagcaagatgcagaaggcgggcttcctgtattacgaggatctggcgagcatggttagtaaagaagaagccgatgccgttacgctcatcgtgaaggaaacggtgcgtaccgttgtgccggatgcgctggtgaccatcgccggcggtttccgccgtggcaaacctatgggccacgacgttgactttctgatcacgaacccgggccgtaaggaagatgacgagctgctccacaaagtggttgatctgctcaagaagcaaggtctgctgctgtacgaagacatccgtgagagcacgttcgtggaggggcaactgccaagtcagaaaatcgacgccctggacaaccatcagaagtgcttcgccattctcaagctgtaccagccgaaggtggataacagtgcggttgggacgagtaagaaaagtgacatggctgaggttaaggattggaaagcggttcgtgtggatctggtgatcacgccattcgagcagttcgcctatgcgctgctcggttggacgggcagcggccaatttcgtcgcgatctgcgtcgctatgcggaggaagagcgcgacatgctgctcgacaaccatcgtctctacgacctgaaaaagggccagtttctgagtgcgggcagcgaagaagagattttcggtcatctgggtctggattatctggagccgtgggaacgcaacgcg

SEQ ID NO: 3516 - protein, 394 aa, synthetic construct
  REGION 1..394: note = Variant of terminal deoxynucleotidyl transferase
MHHHHHHGGSGHPPSNTPEKEVPSVIARHVSQYACQRKTTLNNYNKKFTDALEIMAENYKFKENLQACLEAKRAASIFKSLPFEVTSMKDIQGLPCITDDVRDVIEEIIEEGESSRVKEILNDERYKAFKQFTSVFGVGVKTSEKWYRMGLRTVEEAKASKSLKLSKMQKAGFLYYEDLASMVSKEEADAVTLIVKETVRTVVPDALVTIAGGFRRGKPMGHDVDFLITNPGRKEDDELLHKVVDLLKKQGLLLYEDIRESTFVEGQLPSQKIDALDNHQKCFAILKLYQPKVDNSAVGTSKKSDMAEVKDWKAVRVDLVITPFEQFAYALLGWTGSGQFRRDLRRYAEEERDMLLDNHRLYDLKKGQFLSAGSEEEIFGHLGLDYLEPWERNA

SEQ ID NO: 3517 - DNA, 1182 bp, synthetic construct
  misc_feature 1..1182: note = Variant of terminal deoxynucleotidyl transferase
  source 1..1182: mol_type = other DNA
atgcatcaccaccatcatcatgggggttctggtcatccgccgagcaataccccggagaaggaggtgccgagcgttatcgcccgtccggttagtcagtacgcgtgccagcgcaagaccacgctgaataactacaacaaaaagttcaccgacgcgctggagatcatggccgagaactacaaatttaaagagaacctgcaggcgtgtctggaagccaagcgcgccgcgagtatttttaaaagcctgccgttcgaggttaccagcatgaaagacatccaaggtctgccgtgcattaccgacgacgtacgtgacgtgatcgaggagatcatcgaagagggcgagagcagccgtgttaaagaaatcctcaatgacgagcgctacaaggcctttaagcagttcaccagcgtgttcggtgtgggcgtgaaaacctcggaaaagtggtaccgtatgggcctccgtacggttgaagaagcaaaggccagtaagagtctgaagctgagcaagatgcagaaggcgggcttcctgtattacgaggatctggcgagcatggttagtaaagaagaagccgatgccgttacgctcatcgtgaaggaaacggtggcaaccgttgtgccggatgcgctggtgaccatcgccggcggtttccgccgtggcaaacctatgggccacgacgttgacctgctgatcacgaacccgggccgtaaagaagatgacgagctgctccacaaagtggttgatctgctcaagaagcaaggtctgctgctgtacgaagacatccgtgagagcacgttcgtggaggggcaactgccaagtcataagatcgacgccctggacaacttccagaagtgcttcgccattctcaagctgtaccagccgaaggtggataacagtgcggttgggacgagtaagaaaagtgacatggctgaggttaaggattggaaagcggttcgtgtggatctggtgatgacgccattcgagcagttcgcctatgcgctgctcggttggacgggcagcggccaatttcgtcgcgatctgcgtcgctatgcggaggaagagcgcgacatgctgctcgacaaccatcgtctctacgacctgaaaaagggcatctttctgagtgcgaatagcgaagaagagattttcgcgcatctgggtctggattatctggagccgtgggaacgcaacgcg

SEQ ID NO: 3518 - protein, 394 aa, synthetic construct
  REGION 1..394: note = Variant of terminal deoxynucleotidyl transferase
MHHHHHHGGSGHPPSNTPEKEVPSVIARPVSQYACQRKTTLNNYNKKFTDALEIMAENYKFKENLQACLEAKRAASIFKSLPFEVTSMKDIQGLPCITDDVRDVIEEIIEEGESSRVKEILNDERYKAFKQFTSVFGVGVKTSEKWYRMGLRTVEEAKASKSLKLSKMQKAGFLYYEDLASMVSKEEADAVTLIVKETVATVVPDALVTIAGGFRRGKPMGHDVDLLITNPGRKEDDELLHKVVDLLKKQGLLLYEDIRESTFVEGQLPSHKIDALDNFQKCFAILKLYQPKVDNSAVGTSKKSDMAEVKDWKAVRVDLVMTPFEQFAYALLGWTGSGQFRRDLRRYAEEERDMLLDNHRLYDLKKGIFLSANSEEEIFAHLGLDYLEPWERNA

SEQ ID NO: 3519 - DNA, 1182 bp, synthetic construct
  misc_feature 1..1182: note = Variant of terminal deoxynucleotidyl transferase
  source 1..1182: mol_type = other DNA
atgcatcaccaccatcatcatgggggttctggtcatccgccgagcaataccccggagaaggaggtgccgagcgttatcgcccgtcctgttagtcagtacgcgtgccagcgcaagaccacgctgaataactacaacaaaaagttcaccgacgcgctggagatcatggccgagaactacaaatttaaagagaacctgcaggcgtgtctggaagccaagcgcgccgcgagtatctttaaaagcctgccgttcgaggttaccagcatgaaagacatccaaggtctgccgtgcattaccgacgacgtacgtgacgtgatcgaggagatcatcgaagagggcgagagcagccgtgttaaagaaatcctcaatgacgagcgctacaaggcctttaagcagttcaccagcgtgttcggtgtgggcgtgaaaacctcggaaaagtggtaccgtatgggcctccgtacggttgaagaagcaaaggccagtaagagtctgaagctgagcaagatgcagaaggcgggcttcctgtattacgaggatctggcgagcatggttagtaaagaagaagccgatgccgttacgctcatcgtgaaggaaacggtgcgtaccgttgtgccggatgcgctggtgaccatcgccggcggtttccgccgtggcaaacctatgggccacgacgttgactttctgatcacgaacccgggccgtaaggaagatgacgagctgctccacaaagtggttgatctgctcaagaagcaaggtctgctgctgtacgaagacatccgtgagagcacgttcgtggaggggcaactgccaagtcctaaaatcgacgccctggacaactttcagaagtgcttcgccattctcaagctgtaccagccgaaggtggataacagtgcggttgggacgagtaagaaaagtgacatggctgaggttaaggattggaaagcggttcgtgtggatctggtgatcacgccattcgagcagttcgcctatgcgctgctcggttggacgggcagcggccaatttcgtcgcgatctgcgtcgctatgcggaggaagagcgcgacatgctgctcgacaaccatcgtctctacgacctgaaaaagggcatctttctgagtgcgggcagcgaagaagagattttcggtcatctgggtctggattatctggagccgtgggaacgcaacgcg

SEQ ID NO: 3520 - protein, 394 aa, synthetic construct
  REGION 1..394: note = Variant of terminal deoxynucleotidyl transferase
MHHHHHHGGSGHPPSNTPEKEVPSVIARPVSQYACQRKTTLNNYNKKFTDALEIMAENYKFKENLQACLEAKRAASIFKSLPFEVTSMKDIQGLPCITDDVRDVIEEIIEEGESSRVKEILNDERYKAFKQFTSVFGVGVKTSEKWYRMGLRTVEEAKASKSLKLSKMQKAGFLYYEDLASMVSKEEADAVTLIVKETVRTVVPDALVTIAGGFRRGKPMGHDVDFLITNPGRKEDDELLHKVVDLLKKQGLLLYEDIRESTFVEGQLPSPKIDALDNFQKCFAILKLYQPKVDNSAVGTSKKSDMAEVKDWKAVRVDLVITPFEQFAYALLGWTGSGQFRRDLRRYAEEERDMLLDNHRLYDLKKGIFLSAGSEEEIFGHLGLDYLEPWERNA

SEQ ID NO: 3521 - DNA, 1182 bp, synthetic construct
  misc_feature 1..1182: note = Variant of terminal deoxynucleotidyl transferase
  source 1..1182: mol_type = other DNA
atgcatcaccaccatcatcatgggggttctggtcatccgccgagcaataccccggagaaggaggtgccgagcgttatcgcccgtcatgttagtcagtacgcgtgccagcgcaagaccacgctgaataactacaacaaaaagttcaccgacgcgctggagatcatggccgagaactacaaatttaaagagaacctgcaggcgtgtctggaagccaagcgcgccgcgagtgtctttaaaagcctgccgttcgaggttaccagcatgaaagacatccaaggtctgccgtgcattaccgacgacgtacgtgacgtgatcgaggagatcatcgaagagggcgagagcagccgtgttaaagaaatcctcaatgacgagcgctacaaggcctttaagcagttcaccagcgtgttcggtgtgggcgtgaaaacctcggaaaagtggtaccgtatgggcctccgtacggttgaagaagcaaaggccagtaagagtctgaagctgagcaagatgcagaaggcgggcttcctgtattacgaggatctggcgagcatggttagtaaagaagaagccgatgccgttacgctcatcgtgaaggaaacggtgcgtaccgttgtgccggatgcggaagtgaccatcgccggcggtttccgccgtggcaaacctatgggccacgacgttgactttctgatcacgaacccgggccgtcatgaagatgacgagctgctccacaaagtggttgatctgctcaagaagcaaggtctgctgctgtacgaagacatccgtgagagcacgttcgtggaggggcaactgccaagtcataaaatcgacgccctggacaaccatcagaagtgcttcgccattctcaagctgtaccagccgaaggtggataacagtgcggttgggacgagtaagaaaagtgacatggctgaggttaaggattggaaagcggttcgtgtggatctggtgatcacgccattcgagcagttcgcctatgcgctgctcggttggacgggcagcggccaatttcgtcgcgatctgcgtcgctatgcggaggaagagcgcgacatgctgctcgacaaccatcgtctctacgacctgaaaaagggcatctttctgagtgcgggcagcgaagaagagattttcggtcatctgggtctggattatctggagccgtgggaacgcaacgcg

SEQ ID NO: 3522 - protein, 394 aa, synthetic construct
  REGION 1..394: note = Variant of terminal deoxynucleotidyl transferase
MHHHHHHGGSGHPPSNTPEKEVPSVIARHVSQYACQRKTTLNNYNKKFTDALEIMAENYKFKENLQACLEAKRAASVFKSLPFEVTSMKDIQGLPCITDDVRDVIEEIIEEGESSRVKEILNDERYKAFKQFTSVFGVGVKTSEKWYRMGLRTVEEAKASKSLKLSKMQKAGFLYYEDLASMVSKEEADAVTLIVKETVRTVVPDAEVTIAGGFRRGKPMGHDVDFLITNPGRHEDDELLHKVVDLLKKQGLLLYEDIRESTFVEGQLPSHKIDALDNHQKCFAILKLYQPKVDNSAVGTSKKSDMAEVKDWKAVRVDLVITPFEQFAYALLGWTGSGQFRRDLRRYAEEERDMLLDNHRLYDLKKGIFLSAGSEEEIFGHLGLDYLEPWERNA

SEQ ID NO: 3523 - DNA, 1182 bp, synthetic construct
  misc_feature 1..1182: note = Variant of terminal deoxynucleotidyl transferase
  source 1..1182: mol_type = other DNA
atgcatcaccaccatcatcatgggggttctggtcatccgccgagcaataccccggagaaggaggtgccgagcgttatcgcccgtcctgttagtcagtacgcgtgccagcgcaagaccacgctgaataactacaacaaaaagttcaccgacgcgctggagatcatggccgagaactacaaatttaaagagaacctgcaggcgtgtctggaagccaagcgcgccgcgagtatctttaaaagcctgccgttcgaggttaccagcatgaaagacatccaaggtctgccgtgcattaccgacgacgtacgtgacctgatcgaggagatcatcgaagagggcgagagcagccgtgttaaagaaatcctcaatgacgagcgctacaaggcctttaagcagttcaccagcgtgttcggtgtgggcgtgaaaacctcggaaaagtggtaccgtatgggcctccgtacggttgaagaagcaaaggccagtaagagtctgaagctgagcaagatgcagaaggcgggcttcctgtattacgaggatctggcgagcggtgttagtaaagaagaagccgatgccgttacgctcatcgtgaaggaaacggtgcgtaccgttgtgccggatgcgctggtgaccatcgccggcggtttccgccgtggcaaacctatgggccacgacgttgactttctgatcacgaacccgggccgtaaggaagatgacgagctgctccacaaagtggttgatctgctcaagaagcaaggtctgctgctgtacgaagacatccgtgagagcacgttcgtggaggggcaactgccaagtcataaaatcgacgccctggacaactttcagaagtgcttcgccattctcaagctgtaccagccgaaggtggataacagtgcggttgggacgagtaagaaaagtgacatggctgaggttaaggattggaaagcggttcgtgtggatctggtgatcacgccattcgagcagttcgcctatgcgctgctcggttggacgggcagcggccaatttcgtcgcgatctgcgtcgctatgcggaggaagagcgcgacatgctgctcgacaaccatcgtctctacgacctgaaaaagggcatctttctgagtgcgggcagcgaagaagagattttcgcgcatctgggtctggattatctggagccgtgggaacgcaacgcg

SEQ ID NO: 3524 - protein, 394 aa, synthetic construct
  REGION 1..394: note = Variant of terminal deoxynucleotidyl transferase
MHHHHHHGGSGHPPSNTPEKEVPSVIARPVSQYACQRKTTLNNYNKKFTDALEIMAENYKFKENLQACLEAKRAASIFKSLPFEVTSMKDIQGLPCITDDVRDLIEEIIEEGESSRVKEILNDERYKAFKQFTSVFGVGVKTSEKWYRMGLRTVEEAKASKSLKLSKMQKAGFLYYEDLASGVSKEEADAVTLIVKETVRTVVPDALVTIAGGFRRGKPMGHDVDFLITNPGRKEDDELLHKVVDLLKKQGLLLYEDIRESTFVEGQLPSHKIDALDNFQKCFAILKLYQPKVDNSAVGTSKKSDMAEVKDWKAVRVDLVITPFEQFAYALLGWTGSGQFRRDLRRYAEEERDMLLDNHRLYDLKKGIFLSAGSEEEIFAHLGLDYLEPWERNA

SEQ ID NO: 3525 - DNA, 1182 bp, synthetic construct
  misc_feature 1..1182: note = Variant of terminal deoxynucleotidyl transferase
  source 1..1182: mol_type = other DNA
atgcatcaccaccatcatcatgggggttctggtcatccgccgagcaataccccggagaaggaggtgccgagcgttatcgcccgtccggttagtcagtacgcgtgccagcgcaagaccacgctgaataactacaacaaaaagttcaccgacgcgctggagatcatggccgagaactacaaatttaaagagaacctgcaggcgtgtctggaagccaagcgcgccgcgagtattctgaaaagcctgccgttcgaggttaccagcatgaaagacatccaaggtctgccgtgcattaccgacgacgtacgtgacgtgatccgcgagatcatcgaagagggcgagagcagccgtgttaaagaaatcctcaatgacgagcgctacaaggcctttaagcagttcaccagcgtgttcggtgtgggcgtgaaaacctcggaaaagtggtaccgtatgggcctccgtacggttgaagaagcaaaggccagtaagagtctgaagctgagcaagatgcagaaggcgggcttcctgtattacgaggatctggcgagcatggttagtaaagaagaagccgatgccgttacgctcatcgtgaaggaaacggtgcgcaccgttgtgccggatgcgctggtgaccatcgccggcggtttccgccgtggcaaacctatgggccacgacgttgacctgctgatcacgaacccgggccgtaaagaagatgacgagctgctccacaaagtggttgatctgctcaagaagcaaggtctgctgctgtacgaagacatccgtgagagcacgttcgtggaggggcaactgccaagtcataagatcgacgccctggacaacttccagaagtgcttcgccattctcaagctgtaccagccgaaggtggataacagtgcggttgggacgagtaagaaaagtgacatggctgaggttaaggattggaaagcggttcgtgtggatctggtgatgacgccattcgagcagttcgcctatgcgctgctcggttggacgggcagcggccaatttcgtcgcgatctgcgtcgctatgcggaggaagagcgcgacatgctgctcgacaaccatcgtctctacgacctgaaaaagggcatctttctgagtgcgaatagcgaagaagagattttcgcgcatctgggtctggattatctggagccgtgggaacgcaacgcg

SEQ ID NO: 3526 - protein, 394 aa, synthetic construct
  REGION 1..394: note = Variant of terminal deoxynucleotidyl transferase
MHHHHHHGGSGHPPSNTPEKEVPSVIARPVSQYACQRKTTLNNYNKKFTDALEIMAENYKFKENLQACLEAKRAASILKSLPFEVTSMKDIQGLPCITDDVRDVIREIIEEGESSRVKEILNDERYKAFKQFTSVFGVGVKTSEKWYRMGLRTVEEAKASKSLKLSKMQKAGFLYYEDLASMVSKEEADAVTLIVKETVRTVVPDALVTIAGGFRRGKPMGHDVDLLITNPGRKEDDELLHKVVDLLKKQGLLLYEDIRESTFVEGQLPSHKIDALDNFQKCFAILKLYQPKVDNSAVGTSKKSDMAEVKDWKAVRVDLVMTPFEQFAYALLGWTGSGQFRRDLRRYAEEERDMLLDNHRLYDLKKGIFLSANSEEEIFAHLGLDYLEPWERNA

SEQ ID NO: 3527 - DNA, 1182 bp, synthetic construct
  misc_feature 1..1182: note = Variant of terminal deoxynucleotidyl transferase
  source 1..1182: mol_type = other DNA
atgcatcaccaccatcatcatgggggttctggtcatccgccgagcaataccccggagaaggaggtgccgagcgttatcgcccgtcatgttagtcagtacgcgtgccagcgcaagaccacgctgaataactacaacaaaaagttcaccgacgcgctggagatcatggccgagaactacaaatttaaagagaacctgcaggcgtgtctggaagccaagcgcgccgcgagtatctttaaaagcctgccgttcgaggttaccagcatgaaagacatccaaggtctgccgtgcattaccgacgacgtacgtgacgtgatcgaggagatcatcgaagagggcgagagcagccgtgttaaagaaatcctcaatgacgagcgctacaaggcctttaagcagttcaccagcgtgttcggtgtgggcgtgaaaacctcggaaaagtggtaccgtatgggcctccgtacggttgaagaagcaaaggccagtaagagtctgaagctgagcaagatgcagaaggcgggcttcctgtattacgaggatctggcgagcatggttagtaaagaagaagccgatgccgttacgctcatcgtgaaggaaacggtgcgtaccgttgtgccggatgcgctggtgaccatcgccggcggtttccgccgtggcaaacctatgggccacgacgttgactttctgatcacgaacccgggccgtcatgaagatgacgagctgctccacaaagtggttgatctgctcaagaagcaaggtctgctgctgtacgaagacatccgtgagagcacgttcgtggaggggcaactgccaagtcataaaatcgacgccctggacaaccatcagaagtgcttcgccattctcaagctgtaccagccgaaggtggataacagtgcggttgggacgagtaagaaaagtgacatggctgaggttaaggattggaaagcggttcgtgtggatctggtgatcacgccattcgagcagttcgcctatgcgctgctcggttggacgggcagcggccaatttcgtcgcgatctgcgtcgctatgcggaggaagagcgcgacatgctgctcgacaaccatcgtctctacgacctgaaaaagggcatctttctgagtgcgggcagcgaagaagagattttcggtcatctgggtctggattatctggagccgtgggaacgcaacgcg

SEQ ID NO: 3528 - protein, 394 aa, synthetic construct
  REGION 1..394: note = Variant of terminal deoxynucleotidyl transferase
MHHHHHHGGSGHPPSNTPEKEVPSVIARHVSQYACQRKTTLNNYNKKFTDALEIMAENYKFKENLQACLEAKRAASIFKSLPFEVTSMKDIQGLPCITDDVRDVIEEIIEEGESSRVKEILNDERYKAFKQFTSVFGVGVKTSEKWYRMGLRTVEEAKASKSLKLSKMQKAGFLYYEDLASMVSKEEADAVTLIVKETVRTVVPDALVTIAGGFRRGKPMGHDVDFLITNPGRHEDDELLHKVVDLLKKQGLLLYEDIRESTFVEGQLPSHKIDALDNHQKCFAILKLYQPKVDNSAVGTSKKSDMAEVKDWKAVRVDLVITPFEQFAYALLGWTGSGQFRRDLRRYAEEERDMLLDNHRLYDLKKGIFLSAGSEEEIFGHLGLDYLEPWERNA

SEQ ID NO: 3529 - DNA, 1182 bp, synthetic construct
  misc_feature 1..1182: note = Variant of terminal deoxynucleotidyl transferase
  source 1..1182: mol_type = other DNA
atgcatcaccaccatcatcatgggggttctggtcatccgccgagcaataccccggagaaggaggtgccgagcgttatcgcccgtcctgttagtcagtacgcgtgccagcgcaagaccacgctgaataactacaacaaaaagttcaccgacgcgctggagatcatggccgagaactacaaatttaaagagaacctgcaggcgtgtctggaagccaagcgcgccgcgagtatctttaaaagcctgccgttcgaggttaccagcatgaaagacatccaaggtctgccgtgcattaccgacgacgtacgtgacgtgatcgaggagatcatcgaagagggcgagagcagccgtgttaaagaaatcctcaatgacgagcgctacaaggcctttaagcagttcaccagcgtgttcggtgtgggcgtgaaaacctcggaaaagtggtaccgtatgggcctccgtacggttgaagaagcaaaggccagtaagagtctgaagctgagcaagatgcagaaggcgggcttcctgtattacgaggatctggcgagcggtgttagtaaagaagaagccgatgccgttacgctcatcgtgaaggaaacggtgcgtaccgttgtgccggatgcgctggtgaccatcgccggcggtttccgccgtggcaaacctatgggccacgacgttgactttctgatcacgaacccgggccgtcgtgaagatgacgagctgctccacaaagtggttgatctgctcaagaagcaaggtctgctgctgtacgaagacatccgtgagagcacgttcgtggaggggcaactgccaagtcataaaatcgacgccctggacaacttccagaagtgcttcgccattctcaagctgtaccagccgaaggtggataacagtgcggttgggacgagtaagaaaagtgacatggctgaggttaaggattggaaagcggttcgtgtggatctggtgatcacgccattcgagcagttcgcctatgcgctgctcggttggacgggcagcggccaatttcgtcgcgatctgcgtcgctatgcggaggaagagcgcgacatgctgctcgacaaccatcgtctctacgacctgaaaaagggcatctttctgagtgcgggcagcgaagaagagattttcggtcatctgggtctggattatctggagccgtgggaacgcaacgcg

SEQ ID NO: 3530 - protein, 394 aa, synthetic construct
  REGION 1..394: note = Variant of terminal deoxynucleotidyl transferase
MHHHHHHGGSGHPPSNTPEKEVPSVIARPVSQYACQRKTTLNNYNKKFTDALEIMAENYKFKENLQACLEAKRAASIFKSLPFEVTSMKDIQGLPCITDDVRDVIEEIIEEGESSRVKEILNDERYKAFKQFTSVFGVGVKTSEKWYRMGLRTVEEAKASKSLKLSKMQKAGFLYYEDLASGVSKEEADAVTLIVKETVRTVVPDALVTIAGGFRRGKPMGHDVDFLITNPGRREDDELLHKVVDLLKKQGLLLYEDIRESTFVEGQLPSHKIDALDNFQKCFAILKLYQPKVDNSAVGTSKKSDMAEVKDWKAVRVDLVITPFEQFAYALLGWTGSGQFRRDLRRYAEEERDMLLDNHRLYDLKKGIFLSAGSEEEIFGHLGLDYLEPWERNA

SEQ ID NO: 3531 - DNA, 1182 bp, synthetic construct
  misc_feature 1..1182: note = Variant of terminal deoxynucleotidyl transferase
  source 1..1182: mol_type = other DNA
atgcatcaccaccatcatcatgggggttctggtcatccgccgagcaataccccggagaaggaggtgccgagcgttatcgcccgtccggttagtccgtacgcgtgccagcgcaagaccacgctgaataactacaacaaaaagttcaccgacgcgctggagatcatggccgagaactacaaatttaaagagaacctgcaggcgtgtctggaagccaagcgcgccgcgagtatttttaaaagcctgccgttcgaggttaccagcatgaaagacatccaaggtctgccgtgcattaccgacgacgtacgtgacgtgatcgaggagatcatcgaagagggcgagagcagccgtgttaaagaaatcctcaatgacgagcgctacaaggcctttaagcagttcaccagcgtgttcggtgtgggcgtgaaaacctcggaaaagtggtaccgtatgggcctccgtacggttgaagaagcaaaggccagtaagagtctgaagctgagcaagatgcagaaggcgggcttcctgtattacgaggatctggcgagcatggttagtaaagaagaagccgatgccgttacgctcatcgtgaaggaaacggtggcaaccgttgtgccggatgcgctggtgaccatcgccggcggtttccgccgtggcaaacctatgggccacgacgttgacctgctgatcacgaacccgggccgtaaagaagatgacgagctgctccacaaagtggttgatctgctcaagaagcaaggtctgctgctgtacgaagacatccgtgagagcacgttcgtggaggggcaactgccaagtcataagatcgacgccctggacaacttccagaagtgcttcgccattctcaagctgtaccagccgaaggtggataacagtgcggttgggacgagtaagaaaagtgacatggctgaggttaaggattggaaagcggttcgtgtggatctggtgatgacgccattcgagcagttcgcctatgcgctgctcggttggacgggcagcggccaatttcgtcgcgatctgcgtcgctatgcggaggaagagcgcgacatgctgctcgacaaccatcgtctctacgacctgaaaaagggcatctttctgagtgcgaatagcgaagaagagattttcgcgcatctgggtctggattatctggagccgtgggaacgcaacgcg

SEQ ID NO: 3532 - protein, 394 aa, synthetic construct
  REGION 1..394: note = Variant of terminal deoxynucleotidyl transferase
MHHHHHHGGSGHPPSNTPEKEVPSVIARPVSPYACQRKTTLNNYNKKFTDALEIMAENYKFKENLQACLEAKRAASIFKSLPFEVTSMKDIQGLPCITDDVRDVIEEIIEEGESSRVKEILNDERYKAFKQFTSVFGVGVKTSEKWYRMGLRTVEEAKASKSLKLSKMQKAGFLYYEDLASMVSKEEADAVTLIVKETVATVVPDALVTIAGGFRRGKPMGHDVDLLITNPGRKEDDELLHKVVDLLKKQGLLLYEDIRESTFVEGQLPSHKIDALDNFQKCFAILKLYQPKVDNSAVGTSKKSDMAEVKDWKAVRVDLVMTPFEQFAYALLGWTGSGQFRRDLRRYAEEERDMLLDNHRLYDLKKGIFLSANSEEEIFAHLGLDYLEPWERNA

SEQ ID NO: 3533 - DNA, 1182 bp, synthetic construct
  misc_feature 1..1182: note = Variant of terminal deoxynucleotidyl transferase
  source 1..1182: mol_type = other DNA
atgcatcaccaccatcatcatgggggttctggtcatccgccgagcaataccccggagaaggaggtgccgagcgttatcgcccgtccggttagtccgtacgcgtgccagcgcaagaccacgctgaataactacaacaaaaagttcaccgacgcgctggagatcatggccgagaactacaaatttaaagagaacctgcaggcgtgtctggaagccaagcgcgccgcgagtatttttaaaagcctgccgttcgaggttaccagcatgaaagacatccaaggtctgccgtgcattaccgacgacgtacgtgacgtgatcgaggagatcatcgaagagggcgagagcagccgtgttaaagaaatcctcaatgacgagcgctacaaggcctttaagcagttcaccagcgtgttcggtgtgggcgtgaaaacctcggaaaagtggtaccgtatgggcctccgtacggttgaagaagcaaaggccagtaagagtctgaagctgagcaagatgcagaaggcgggcttcctgtattacgaggatctggcgagcatggttagtaaagaagaagccgatgccgttacgctcatcgtgaaggaaacggtgcgcaccgttgtgccggatgcgctggtgaccatcgccggcggtttccgccgtggcaaacctatgggccacgacgttgacctgctgatcacgaacccgggccgtaaagaagatgacgagctgctccacaaagtggttgatctgctcaagaagcaaggtctgctgctgtacgaagacatccgtgagagcacgttcgtggaggggcaactgccaagtcataagatcgacgccctggacaacttccagaagtgcttcgccattctcaagctgtaccagccgaaggtggataacagtgcggttgggacgagtaagaaaagtgacatggctgaggttaaggattggaaagcggttcgtgtggatctggtgatcacgccattcgagcagttcgcctatgcgctgctcggttggacgggcagcggccaatttcgtcgcgatctgcgtcgctatgcggaggaagagcgcgacatgctgctcgacaaccatcgtctctacgacctgaaaaagggcatctttctgagtgcgggtagcgaagaagagattttcgcgcatctgggtctggattatctggagccgtgggaacgcaacgcg

SEQ ID NO: 3534 - protein, 394 aa, synthetic construct
  REGION 1..394: note = Variant of terminal deoxynucleotidyl transferase
MHHHHHHGGSGHPPSNTPEKEVPSVIARPVSPYACQRKTTLNNYNKKFTDALEIMAENYKFKENLQACLEAKRAASIFKSLPFEVTSMKDIQGLPCITDDVRDVIEEIIEEGESSRVKEILNDERYKAFKQFTSVFGVGVKTSEKWYRMGLRTVEEAKASKSLKLSKMQKAGFLYYEDLASMVSKEEADAVTLIVKETVRTVVPDALVTIAGGFRRGKPMGHDVDLLITNPGRKEDDELLHKVVDLLKKQGLLLYEDIRESTFVEGQLPSHKIDALDNFQKCFAILKLYQPKVDNSAVGTSKKSDMAEVKDWKAVRVDLVITPFEQFAYALLGWTGSGQFRRDLRRYAEEERDMLLDNHRLYDLKKGIFLSAGSEEEIFAHLGLDYLEPWERNA

SEQ ID NO: 3535 - DNA, 1182 bp, synthetic construct
  misc_feature 1..1182: note = Variant of terminal deoxynucleotidyl transferase
  source 1..1182: mol_type = other DNA
atgcatcaccaccatcatcatgggggttctggtcatccgccgagcaataccccggagaaggaggtgccgagcgttatcgcccgtcatgttagtcagtacgcgtgccagcgcaagaccacgctgaataactacaacaaaaagttcaccgacgcgctggagatcatggccgagaactacaaatttaaagagaacctgcaggcgtgtctggaagccaagcgcgccgcgagtatctttaaaagcctgccgttcgaggttaccagcatgaaagacatccaaggtctgccgtgcattaccgacgacgtacgtgacctgatcgaggagatcatcgaagagggcgagagcagccgtgttaaagaaatcctcaatgacgagcgctacaaggcctttaagcagttcaccagcgtgttcggtgtgggcgtgaaaacctcggaaaagtggtaccgtatgggcctccgtacggttgaagaagcaaaggccagtaagagtctgaagctgagcaagatgcagaaggcgggcttcctgtattacgaggatctggcgagcatggttagtaaagaagaagccgatgccgttacgctcatcgtgaaggaaacggtgcgtaccgttgtgccggatgcgctggtgaccatcgccggcggtttccgccgtggcaaacctatgggccacgacgttgactttctgatcacgaacccgggccgtcgtgaagatgacgagctgctccacaaagtggttgatctgctcaagaagcaaggtctgctgctgtacgaagacatccgtgagagcacgttcgtggaggggcaactgccaagtcagaaaatcgacgccctggacaaccatcagaagtgcttcgccattctcaagctgtaccagccgaaggtggataacagtgcggttgggacgagtaagaaaagtgacatggctgaggttaaggattggaaagcggttcgtgtggatctggtgatcacgccattcgagcagttcgcctatgcgctgctcggttggacgggcagcggccaatttcgtcgcgatctgcgtcgctatgcggaggaagagcgcgacatgctgctcgacaaccatcgtctctacgacctgaaaaagggcatctttctgagtgcgggcagcgaagaagagattttcggtcatctgggtctggattatctggagccgtgggaacgcaacgcg

SEQ ID NO: 3536 - protein, 394 aa, synthetic construct
  REGION 1..394: note = Variant of terminal deoxynucleotidyl transferase
MHHHHHHGGSGHPPSNTPEKEVPSVIARHVSQYACQRKTTLNNYNKKFTDALEIMAENYKFKENLQACLEAKRAASIFKSLPFEVTSMKDIQGLPCITDDVRDLIEEIIEEGESSRVKEILNDERYKAFKQFTSVFGVGVKTSEKWYRMGLRTVEEAKASKSLKLSKMQKAGFLYYEDLASMVSKEEADAVTLIVKETVRTVVPDALVTIAGGFRRGKPMGHDVDFLITNPGRREDDELLHKVVDLLKKQGLLLYEDIRESTFVEGQLPSQKIDALDNHQKCFAILKLYQPKVDNSAVGTSKKSDMAEVKDWKAVRVDLVITPFEQFAYALLGWTGSGQFRRDLRRYAEEERDMLLDNHRLYDLKKGIFLSAGSEEEIFGHLGLDYLEPWERNA

SEQ ID NO: 3537 - DNA, 1182 bp, synthetic construct
  misc_feature 1..1182: note = Variant of terminal deoxynucleotidyl transferase
  source 1..1182: mol_type = other DNA
atgcatcaccaccatcatcatgggggttctggtcatccgccgagcaataccccggagaaggaggtgccgagcgttatcgcccgtccggttagtcagtacgcgtgccagcgcaagaccacgctgaataactacaacaaaaagttcaccgacgcgctggagatcatggccgagaactacaaatttaaagagaacctgcaggcgtgtctggaagccaagcgcgccgcgagtattctgaaaagcctgccgttcgaggttaccagcatgaaagacatccaaggtctgccgtgcattaccgacgacgtacgtgacgtgatcgaggagatcatcgaagagggcgagagcagccgtgttaaagaaatcctcaatgacgagcgctacaaggcctttaagcagttcaccagcgtgttcggtgtgggcgtgaaaacctcggaaaagtggtaccgtatgggcctccgtacggttgaagaagcaaaggccagtaagagtctgaagctgagcaagatgcagaaggcgggcttcctgtattacgaggatctggcgagcatggttagtaaagaagaagccgatgccgttacgctcatcgtgaaggaaacggtggcaaccgttgtgccggatgcgctggtgaccatcgccggcggtttccgccgtggcaaacctatgggccacgacgttgacctgctgatcacgaacccgggccgtaaagaggatgacgagctgctccacaaagtggttgatctgctcaagaagcaaggtctgctgctgtacgaagacatccgtgagagcacgttcgtggaggggcaactgccaagtcataaaatcgacgccctggacaacttccagaagtgcttcgccattctcaagctgtaccagccgaaggtggataacagtgcggttgggacgagtaagaaaagtgacatggctgaggttaaggattggaaagcggttcgtgtggatctggtgatgacgccattcgagcagttcgcctatgcgctgctcggttggacgggcagcggccaatttcgtcgcgatctgcgtcgctatgcggaggaagagcgcgacatgctgctcgacaaccatcgtctctacgacctgaaaaagggcatctttctgagtgcgaatagcgaagaagagattttcgcgcatctgggtctggattatctggagccgtgggaacgcaacgcg

SEQ ID NO: 3538 - protein, 394 aa, synthetic construct
  REGION 1..394: note = Variant of terminal deoxynucleotidyl transferase
MHHHHHHGGSGHPPSNTPEKEVPSVIARPVSQYACQRKTTLNNYNKKFTDALEIMAENYKFKENLQACLEAKRAASILKSLPFEVTSMKDIQGLPCITDDVRDVIEEIIEEGESSRVKEILNDERYKAFKQFTSVFGVGVKTSEKWYRMGLRTVEEAKASKSLKLSKMQKAGFLYYEDLASMVSKEEADAVTLIVKETVATVVPDALVTIAGGFRRGKPMGHDVDLLITNPGRKEDDELLHKVVDLLKKQGLLLYEDIRESTFVEGQLPSHKIDALDNFQKCFAILKLYQPKVDNSAVGTSKKSDMAEVKDWKAVRVDLVMTPFEQFAYALLGWTGSGQFRRDLRRYAEEERDMLLDNHRLYDLKKGIFLSANSEEEIFAHLGLDYLEPWERNA

SEQ ID NO: 3539 - DNA, 1182 bp, synthetic construct
  misc_feature 1..1182: note = Variant of terminal deoxynucleotidyl transferase
  source 1..1182: mol_type = other DNA
atgcatcaccaccatcatcatgggggttctggtcatccgccgagcaataccccggagaaggaggtgccgagcgttatcgcccgtccggttagtcagtacgcgtgccagcgcaagaccacgctgaataactacaacaaaaagttcaccgacgcgctggagatcatggccgagaactacaaatttaaagagaacctgcaggcgtgtctggaagccaagcgcgccgcgagtattctgaaaagcctgccgttcgaggttaccagcatgaaagacatccaaggtctgccgtgcattaccgacgacgtacgtgacgtgatccgcgagatcatcgaagagggcgagagcagccgtgttaaagaaatcctcaatgacgagcgctacaaggcctttaagcagttcaccagcgtgttcggtgtgggcgtgaaaacctcggaaaagtggtaccgtatgggcctccgtacggttgaagaagcaaaggccagtaagagtctgaagctgagcaagatgcagaaggcgggcttcctgtattacgaggatctggcgagcatggttagtaaagaagaagccgatgccgttacgctcatcgtgaaggaaacggtgcgtaccgttgtgccggatgcgctggtgaccatcgccggcggtttccgccgtggcaaacctatgggccacgacgttgacctgctgatcacgaacccgggccgtaaagaagatgacgagctgctccacaaagtggttgatctgctcaagaagcaaggtctgctgctgtacgaagacatccgtgagagcacgttcgtggaggggcaactgccaagtcataagatcgacgccctggacaacttccagaagtgcttcgccattctcaagctgtaccagccgaaggtggataacagtgcggttgggacgagtaagaaaagtgacatggctgaggttaaggattggaaagcggttcgtgtggatctggtgatgacgccattcgagcagttcgcctatgcgctgctcggttggacgggcagcggccaatttcgtcgcgatctgcgtcgctatgcggaggaagagcgcgacatgctgctcgacaaccatcgtctctacgacctgaaaaagggcatctttctgagtgcggctagcgaagaagagattttcgcgcatctgggtctggattatctggagccgtgggaacgcaacgcg

SEQ ID NO: 3540 - protein, 394 aa, synthetic construct
  REGION 1..394: note = Variant of terminal deoxynucleotidyl transferase
MHHHHHHGGSGHPPSNTPEKEVPSVIARPVSQYACQRKTTLNNYNKKFTDALEIMAENYKFKENLQACLEAKRAASILKSLPFEVTSMKDIQGLPCITDDVRDVIREIIEEGESSRVKEILNDERYKAFKQFTSVFGVGVKTSEKWYRMGLRTVEEAKASKSLKLSKMQKAGFLYYEDLASMVSKEEADAVTLIVKETVRTVVPDALVTIAGGFRRGKPMGHDVDLLITNPGRKEDDELLHKVVDLLKKQGLLLYEDIRESTFVEGQLPSHKIDALDNFQKCFAILKLYQPKVDNSAVGTSKKSDMAEVKDWKAVRVDLVMTPFEQFAYALLGWTGSGQFRRDLRRYAEEERDMLLDNHRLYDLKKGIFLSAASEEEIFAHLGLDYLEPWERNA

SEQ ID NO: 3541 - DNA, 1182 bp, synthetic construct
  misc_feature 1..1182: note = Variant of terminal deoxynucleotidyl transferase
  source 1..1182: mol_type = other DNA
atgcatcaccaccatcatcatgggggttctggtcatccgccgagcaataccccggagaaggaggtgccgagcgttatcgcccgtcatgttagtcagtacgcgtgccagcgcaagaccacgctgaataactacaacaaaaagttcaccgacgcgctggagatcatggccgagaactacaaatttaaagagaacctgcaggcgtgtctggaagccaagcgcgccgcgagtatctttaaaagcctgccgttcgaggttaccagcatgaaagacatccaaggtctgccgtgcattaccgacgacgtacgtgacgtgatcgaggagatcatcgaagagggcgagagcagccgtgttaaagaaatcctcaatgacgagcgctacaaggcctttaagcagttcaccagcgtgttcggtgtgggcgtgaaaacctcggaaaagtggtaccgtatgggcctccgtacggttgaagaagcaaaggccagtaagagtctgaagctgagcaagatgcagaaggcgggcttcctgtattacgaggatctggcgagcatggttagtaaagaagaagccgatgccgttacgctcatcgtgaaggaaacggtgcgtaccgttgtgccggatgcgctggtgaccatcgccggcggtttccgccgtggcaaacctatgggccacgacgttgactttctgatcacgaacccgggccgtaaagaagatgacgagctgctccacaaagtggttgatctgctcaagaagcaaggtctgctgctgtacgaagacatccgtgagagcacgttcgtggaggggcaactgccaagtcagaaaatcgacgccctggacaaccatcagaagtgcttcgccattctcaagctgtaccagccgaaggtggataacagtgcggttgggacgagtaagaaaagtgacatggctgaggttaaggattggaaagcggttcgtgtggatctggtgatcacgccattcgagcagttcgcctatgcgctgctcggttggacgggcagcggccaatttcgtcgcgatctgcgtcgctatgcggaggaagagcgcgacatgctgctcgacaaccatcgtctctacgacctgaaaaagggcatctttctgagtgcgggcagcgaagaagagattttcgctcatctgggtctggattatctggagccgtgggaacgcaacgcg

SEQ ID NO: 3542 - protein, 394 aa, synthetic construct
  REGION 1..394: note = Variant of terminal deoxynucleotidyl transferase
MHHHHHHGGSGHPPSNTPEKEVPSVIARHVSQYACQRKTTLNNYNKKFTDALEIMAENYKFKENLQACLEAKRAASIFKSLPFEVTSMKDIQGLPCITDDVRDVIEEIIEEGESSRVKEILNDERYKAFKQFTSVFGVGVKTSEKWYRMGLRTVEEAKASKSLKLSKMQKAGFLYYEDLASMVSKEEADAVTLIVKETVRTVVPDALVTIAGGFRRGKPMGHDVDFLITNPGRKEDDELLHKVVDLLKKQGLLLYEDIRESTFVEGQLPSQKIDALDNHQKCFAILKLYQPKVDNSAVGTSKKSDMAEVKDWKAVRVDLVITPFEQFAYALLGWTGSGQFRRDLRRYAEEERDMLLDNHRLYDLKKGIFLSAGSEEEIFAHLGLDYLEPWERNA

SEQ ID NO: 3543 - DNA, 1182 bp, synthetic construct
  misc_feature 1..1182: note = Variant of terminal deoxynucleotidyl transferase
  source 1..1182: mol_type = other DNA
atgcatcaccaccatcatcatgggggttctggtcatccgccgagcaataccccggagaaggaggtgccgagcgttatcgcccgtccggttagtccgtacgcgtgccagcgcaagaccacgctgaataactacaacaaaaagttcaccgacgcgctggagatcatggccgagaactacaaatttaaagagaacctgcaggcgtgtctggaagccaagcgcgccgcgagtattctgaaaagcctgccgttcgaggttaccagcatgaaagacatccaaggtctgccgtgcattaccgacgacgtacgtgacgtgatcgaggagatcatcgaagagggcgagagcagccgtgttaaagaaatcctcaatgacgagcgctacaaggcctttaagcagttcaccagcgtgttcggtgtgggcgtgaaaacctcggaaaagtggtaccgtatgggcctccgtacggttgaagaagcaaaggccagtaagagtctgaagctgagcaagatgcagaaggcgggcttcctgtattacgaggatctggcgagcatggttagtaaagaagaagccgatgccgttacgctcatcgtgaaggaaacggtgcgcaccgttgtgccggatgcgctggtgaccatcgccggcggtttccgccgtggcaaacctatgggccacgacgttgacctgctgatcacgaacccgggccgtaaagaagatgacgagctgctccacaaagtggttgatctgctcaagaagcaaggtctgctgctgtacgaagacatccgtgagagcacgttcgtggaggggcaactgccaagtcataagatcgacgccctggacaacttccagaagtgcttcgccattctcaagctgtaccagccgaaggtggataacagtgcggttgggacgagtaagaaaagtgacatggctgaggttaaggattggaaagcggttcgtgtggatctggtgatcacgccattcgagcagttcgcctatgcgctgctcggttggacgggcagcggccaatttcgtcgcgatctgcgtcgctatgcggaggaagagcgcgacatgctgctcgacaaccatcgtctctacgacctgaaaaagggcatctttctgagtgcgaatagcgaagaagagattttcgcgcatctgggtctggattatctggagccgtgggaacgcaacgcg

SEQ ID NO: 3544 - protein, 394 aa, synthetic construct
  REGION 1..394: note = Variant of terminal deoxynucleotidyl transferase
MHHHHHHGGSGHPPSNTPEKEVPSVIARPVSPYACQRKTTLNNYNKKFTDALEIMAENYKFKENLQACLEAKRAASILKSLPFEVTSMKDIQGLPCITDDVRDVIEEIIEEGESSRVKEILNDERYKAFKQFTSVFGVGVKTSEKWYRMGLRTVEEAKASKSLKLSKMQKAGFLYYEDLASMVSKEEADAVTLIVKETVRTVVPDALVTIAGGFRRGKPMGHDVDLLITNPGRKEDDELLHKVVDLLKKQGLLLYEDIRESTFVEGQLPSHKIDALDNFQKCFAILKLYQPKVDNSAVGTSKKSDMAEVKDWKAVRVDLVITPFEQFAYALLGWTGSGQFRRDLRRYAEEERDMLLDNHRLYDLKKGIFLSANSEEEIFAHLGLDYLEPWERNA

SEQ ID NO: 3545 - DNA, 1182 bp, synthetic construct
  misc_feature 1..1182: note = Variant of terminal deoxynucleotidyl transferase
  source 1..1182: mol_type = other DNA
atgcatcaccaccatcatcatgggggttctggtcatccgccgagcaataccccggagaaggaggtgccgagcgttatcgcccgtccggttagtccgtacgcgtgccagcgcaagaccacgctgaataactacaacaaaaagttcaccgacgcgctggagatcatggccgagaactacaaatttaaagagaacctgcaggcgtgtctggaagccaagcgcgccgcgagtattctgaaaagcctgccgttcgaggttaccagcatgaaagacatccaaggtctgccgtgcattaccgacgacgtacgtgacgtgatcgaagagatcatcgaagagggcgagagcagccgtgttaaagaaatcctcaatgacgagcgctacaaggcctttaagcagttcaccagcgtgttcggtgtgggcgtgaaaacctcggaaaagtggtaccgtatgggcctccgtacggttgaagaagcaaaggccagtaagagtctgaagctgagcaagatgcagaaggcgggcttcctgtattacgaggatctggcgagcatggttagtaaagaagaagccgatgccgttacgctcatcgtgaaggaaacggtgcgcaccgttgtgccggatgcgctggtgaccatcgccggcggtttccgccgtggcaaacctatgggccacgacgttgacctgctgatcacgaacccgggccgtaaagaggatgacgagctgctccacaaagtggttgatctgctcaagaagcaaggtctgctgctgtacgaagacatccgtgagagcacgttcgtggaggggcaactgccaagtcataaaatcgacgccctggacaacttccagaagtgcttcgccattctcaagctgtaccagccgaaggtggataacagtgcggttgggacgagtaagaaaagtgacatggctgaggttaaggattggaaagcggttcgtgtggatctggtgatcacgccattcgagcagttcgcctatgcgctgctcggttggacgggcagcggccaatttcgtcgcgatctgcgtcgctatgcggaggaagagcgcgacatgctgctcgacaaccatcgtctctacgacctgaaaaagggcatctttctgagtgcgggtagcgaagaagagattttcgcgcatctgggtctggattatctggagccgtgggaacgcaacgcg

SEQ ID NO: 3546 - protein, 394 aa, synthetic construct
  REGION 1..394: note = Variant of terminal deoxynucleotidyl transferase
MHHHHHHGGSGHPPSNTPEKEVPSVIARPVSPYACQRKTTLNNYNKKFTDALEIMAENYKFKENLQACLEAKRAASILKSLPFEVTSMKDIQGLPCITDDVRDVIEEIIEEGESSRVKEILNDERYKAFKQFTSVFGVGVKTSEKWYRMGLRTVEEAKASKSLKLSKMQKAGFLYYEDLASMVSKEEADAVTLIVKETVRTVVPDALVTIAGGFRRGKPMGHDVDLLITNPGRKEDDELLHKVVDLLKKQGLLLYEDIRESTFVEGQLPSHKIDALDNFQKCFAILKLYQPKVDNSAVGTSKKSDMAEVKDWKAVRVDLVITPFEQFAYALLGWTGSGQFRRDLRRYAEEERDMLLDNHRLYDLKKGIFLSAGSEEEIFAHLGLDYLEPWERNA

SEQ ID NO: 3547 - DNA, 1182 bp, synthetic construct
  misc_feature 1..1182: note = Variant of terminal deoxynucleotidyl transferase
  source 1..1182: mol_type = other DNA
atgcatcaccaccatcatcatgggggttctggtcatccgccgagcaataccccggagaaggaggtgccgagcgttatcgcccgtccggttagtcagtacgcgtgccagcgcaagaccacgctgaataactacaacaaaaagttcaccgacgcgctggagatcatggccgagaactacaaatttaaagagaacctgcaggcgtgtctggaagccaagcgcgccgcgagtatttttaaaagcctgccgttcgaggttaccagcatgaaagacatccaaggtctgccgtgcattaccgacgacgtacgtgacgtgatccgcgagatcatcgaagagggcgagagcagccgtgttaaagaaatcctcaatgacgagcgctacaaggcctttaagcagttcaccagcgtgttcggtgtgggcgtgaaaacctcggaaaagtggtaccgtatgggcctccgtacggttgaagaagcaaaggccagtaagagtctgaagctgagcaagatgcagaaggcgggcttcctgtattacgaggatctggcgagcatggttagtaaagaagaagccgatgccgttacgctcatcgtgaaggaaacggtggcaaccgttgtgccggatgcgctggtgaccatcgccggcggtttccgccgtggcaaacctatgggccacgacgttgacctgctgatcacgaacccgggccgtaaagaggatgacgagctgctccacaaagtggttgatctgctcaagaagcaaggtctgctgctgtacgaagacatccgtgagagcacgttcgtggaggggcaactgccaagtcataagatcgacgccctggacaacttccagaagtgcttcgccattctcaagctgtaccagccgaaggtggataacagtgcggttgggacgagtaagaaaagtgacatggctgaggttaaggattggaaagcggttcgtgtggatctggtgatcacgccattcgagcagttcgcctatgcgctgctcggttggacgggcagcggccaatttcgtcgcgatctgcgtcgctatgcggaggaagagcgcgacatgctgctcgacaaccatcgtctctacgacctgaaaaagggcatctttctgagtgcggctagcgaagaagagattttcgcgcatctgggtctggattatctggagccgtgggaacgcaacgcg

SEQ ID NO: 3548 - protein, 394 aa, synthetic construct
  REGION 1..394: note = Variant of terminal deoxynucleotidyl transferase
MHHHHHHGGSGHPPSNTPEKEVPSVIARPVSQYACQRKTTLNNYNKKFTDALEIMAENYKFKENLQACLEAKRAASIFKSLPFEVTSMKDIQGLPCITDDVRDVIREIIEEGESSRVKEILNDERYKAFKQFTSVFGVGVKTSEKWYRMGLRTVEEAKASKSLKLSKMQKAGFLYYEDLASMVSKEEADAVTLIVKETVATVVPDALVTIAGGFRRGKPMGHDVDLLITNPGRKEDDELLHKVVDLLKKQGLLLYEDIRESTFVEGQLPSHKIDALDNFQKCFAILKLYQPKVDNSAVGTSKKSDMAEVKDWKAVRVDLVITPFEQFAYALLGWTGSGQFRRDLRRYAEEERDMLLDNHRLYDLKKGIFLSAASEEEIFAHLGLDYLEPWERNA

SEQ ID NO: 3549 - DNA, 1182 bp, synthetic construct
  misc_feature 1..1182: note = Variant of terminal deoxynucleotidyl transferase
  source 1..1182: mol_type = other DNA
atgcatcaccaccatcatcatgggggttctggtcatccgccgagcaataccccggagaaggaggtgccgagcgttatcgcccgtccggttagtcagtacgcgtgccagcgcaagaccacgctgaataactacaacaaaaagttcaccgacgcgctggagatcatggccgagaactacaaatttaaagagaacctgcaggcgtgtctggaagccaagcgcgccgcgagtatttttaaaagcctgccgttcgaggttaccagcatgaaagacatccaaggtctgccgtgcattaccgacgacgtacgtgacgtgatcgaggagatcatcgaagagggcgagagcagccgtgttaaagaaatcctcaatgacgagcgctacaaggcctttaagcagttcaccagcgtgttcggtgtgggcgtgaaaacctcggaaaagtggtaccgtatgggcctccgtacggttgaagaagcaaaggccagtaagagtctgaagctgagcaagatgcagaaggcgggcttcctgtattacgaggatctggcgagcatggttagtaaagaagaagccgatgccgttacgctcatcgtgaaggaaacggtgcgtaccgttgtgccggatgcgctggtgaccatcgccggcggtttccgccgtggcaaacctatgggccacgacgttgacctgctgatcacgaacccgggccgtaaagaagatgacgagctgctccacaaagtggttgatctgctcaagaagcaaggtctgctgctgtacgaagacatccgtgagagcacgttcgtggaggggcaactgccaagtcataagatcgacgccctggacaacttccagaagtgcttcgccattctcaagctgtaccagccgaaggtggataacagtgcggttgggacgagtaagaaaagtgacatggctgaggttaaggattggaaagcggttcgtgtggatctggtgatcacgccattcgagcagttcgcctatgcgctgctcggttggacgggcagcggccaatttcgtcgcgatctgcgtcgctatgcggaggaagagcgcgacatgctgctcgacaaccatcgtctctacgacctgaaaaagggcatctttctgagtgcgggtagcgaagaagagattttcgcgcatctgggtctggattatctggagccgtgggaacgcaacgcg

SEQ ID NO: 3550 - protein, 394 aa, synthetic construct
  REGION 1..394: note = Variant of terminal deoxynucleotidyl transferase
MHHHHHHGGSGHPPSNTPEKEVPSVIARPVSQYACQRKTTLNNYNKKFTDALEIMAENYKFKENLQACLEAKRAASIFKSLPFEVTSMKDIQGLPCITDDVRDVIEEIIEEGESSRVKEILNDERYKAFKQFTSVFGVGVKTSEKWYRMGLRTVEEAKASKSLKLSKMQKAGFLYYEDLASMVSKEEADAVTLIVKETVRTVVPDALVTIAGGFRRGKPMGHDVDLLITNPGRKEDDELLHKVVDLLKKQGLLLYEDIRESTFVEGQLPSHKIDALDNFQKCFAILKLYQPKVDNSAVGTSKKSDMAEVKDWKAVRVDLVITPFEQFAYALLGWTGSGQFRRDLRRYAEEERDMLLDNHRLYDLKKGIFLSAGSEEEIFAHLGLDYLEPWERNA

SEQ ID NO: 3551 - DNA, 1182 bp, synthetic construct
  misc_feature 1..1182: note = Variant of terminal deoxynucleotidyl transferase
  source 1..1182: mol_type = other DNA
atgcatcaccaccatcatcatgggggttctggtcatccgccgagcaataccccggagaaggaggtgccgagcgttatcgcccgtccggttagtccgtacgcgtgccagcgcaagaccacgctgaataactacaacaaaaagttcaccgacgcgctggagatcatggccgagaactacaaatttaaagagaacctgcaggcgtgtctggaagccaagcgcgccgcgagtatttttaaaagcctgccgttcgaggttaccagcatgaaagacatccaaggtctgccgtgcattaccgacgacgtacgtgacgtgatcgaggagatcatcgaagagggcgagagcagccgtgttaaagaaatcctcaatgacgagcgctacaaggcctttaagcagttcaccagcgtgttcggtgtgggcgtgaaaacctcggaaaagtggtaccgtatgggcctccgtacggttgaagaagcaaaggccagtaagagtctgaagctgagcaagatgcagaaggcgggcttcctgtattacgaggatctggcgagcatggttagtaaagaagaagccgatgccgttacgctcatcgtgaaggaaacggtggcaaccgttgtgccggatgcgctggtgaccatcgccggcggtttccgccgtggcaaacctatgggccacgacgttgacctgctgatcacgaacccgggccgtaaagaggatgacgagctgctccacaaagtggttgatctgctcaagaagcaaggtctgctgctgtacgaagacatccgtgagagcacgttcgtggaggggcaactgccaagtcataagatcgacgccctggacaacttccagaagtgcttcgccattctcaagctgtaccagccgaaggtggataacagtgcggttgggacgagtaagaaaagtgacatggctgaggttaaggattggaaagcggttcgtgtggatctggtgatcacgccattcgagcagttcgcctatgcgctgctcggttggacgggcagcggccaatttcgtcgcgatctgcgtcgctatgcggaggaagagcgcgacatgctgctcgacaaccatcgtctctacgacctgaaaaagggcatctttctgagtgcgggtagcgaagaagagattttcgcgcatctgggtctggattatctggagccgtgggaacgcaacgcg

SEQ ID NO: 3552 - protein, 394 aa, synthetic construct
  REGION 1..394: note = Variant of terminal deoxynucleotidyl transferase
MHHHHHHGGSGHPPSNTPEKEVPSVIARPVSPYACQRKTTLNNYNKKFTDALEIMAENYKFKENLQACLEAKRAASIFKSLPFEVTSMKDIQGLPCITDDVRDVIEEIIEEGESSRVKEILNDERYKAFKQFTSVFGVGVKTSEKWYRMGLRTVEEAKASKSLKLSKMQKAGFLYYEDLASMVSKEEADAVTLIVKETVATVVPDALVTIAGGFRRGKPMGHDVDLLITNPGRKEDDELLHKVVDLLKKQGLLLYEDIRESTFVEGQLPSHKIDALDNFQKCFAILKLYQPKVDNSAVGTSKKSDMAEVKDWKAVRVDLVITPFEQFAYALLGWTGSGQFRRDLRRYAEEERDMLLDNHRLYDLKKGIFLSAGSEEEIFAHLGLDYLEPWERNA

SEQ ID NO: 3553 - DNA, 1182 bp, synthetic construct
  misc_feature 1..1182: note = Variant of terminal deoxynucleotidyl transferase
  source 1..1182: mol_type = other DNA
atgcatcaccaccatcatcatgggggttctggtcatccgccgagcaataccccggagaaggaggtgccgagcgttatcgcccgtccggttagtccgtacgcgtgccagcgcaagaccacgctgaataactacaacaaaaagttcaccgacgcgctggagatcatggccgagaactacaaatttaaagagaacctgcaggcgtgtctggaagccaagcgcgccgcgagtattctgaaaagcctgccgttcgaggttaccagcatgaaagacatccaaggtctgccgtgcattaccgacgacgtacgtgacgtgatccaagagatcatcgaagagggcgagagcagccgtgttaaagaaatcctcaatgacgagcgctacaaggcctttaagcagttcaccagcgtgttcggtgtgggcgtgaaaacctcggaaaagtggtaccgtatgggcctccgtacggttgaagaagcaaaggccagtaagagtctgaagctgagcaagatgcagaaggcgggcttcctgtattacgaggatctggcgagcatggttagtaaagaagaagccgatgccgttacgctcatcgtgaaggaaacggtgcgtaccgttgtgccggatgcgctggtgaccatcgccggcggtttccgccgtggcaaacctatgggccacgacgttgacctgctgatcacgaacccgggccgtaaagaggatgacgagctgctccacaaagtggttgatctgctcaagaagcaaggtctgctgctgtacgaagacatccgtgagagcacgttcgtggaggggcaactgccaagtcataagatcgacgccctggacaacttccagaagtgcttcgccattctcaagctgtaccagccgaaggtggataacagtgcggttgggacgagtaagaaaagtgacatggctgaggttaaggattggaaagcggttcgtgtggatctggtgatcacgccattcgagcagttcgcctatgcgctgctcggttggacgggcagcggccaatttcgtcgcgatctgcgtcgctatgcggaggaagagcgcgacatgctgctcgacaaccatcgtctctacgacctgaaaaagggcatctttctgagtgcgggtagcgaagaagagattttcgcgcatctgggtctggattatctggagccgtgggaacgcaacgcg

SEQ ID NO: 3554 - protein, 394 aa, synthetic construct
  REGION 1..394: note = Variant of terminal deoxynucleotidyl transferase
MHHHHHHGGSGHPPSNTPEKEVPSVIARPVSPYACQRKTTLNNYNKKFTDALEIMAENYKFKENLQACLEAKRAASILKSLPFEVTSMKDIQGLPCITDDVRDVIQEIIEEGESSRVKEILNDERYKAFKQFTSVFGVGVKTSEKWYRMGLRTVEEAKASKSLKLSKMQKAGFLYYEDLASMVSKEEADAVTLIVKETVRTVVPDALVTIAGGFRRGKPMGHDVDLLITNPGRKEDDELLHKVVDLLKKQGLLLYEDIRESTFVEGQLPSHKIDALDNFQKCFAILKLYQPKVDNSAVGTSKKSDMAEVKDWKAVRVDLVITPFEQFAYALLGWTGSGQFRRDLRRYAEEERDMLLDNHRLYDLKKGIFLSAGSEEEIFAHLGLDYLEPWERNA

SEQ ID NO: 3555 - DNA, 1182 bp, synthetic construct
  misc_feature 1..1182: note = Variant of terminal deoxynucleotidyl transferase
  source 1..1182: mol_type = other DNA
atgcatcaccaccatcatcatgggggttctggtcatccgccgagcaataccccggagaaggaggtgccgagcgttatcgcccgtcatgttagtcagtacgcgtgccagcgcaagaccacgctgaataactacaacaaaaagttcaccgacgcgctggagatcatggccgagaactacaaatttaaagagaacctgcaggcgtgtctggaagccaagcgcgccgcgagtgtctttaaaagcctgccgttcgaggttaccagcatgaaagacatccaaggtctgccgtgcattaccgacgacgtacgtgacctgatcgaggagatcatcgaagagggcgagagcagccgtgttaaagaaatcctcaatgacgagcgctacaaggcctttaagcagttcaccagcgtgttcggtgtgggcgtgaaaacctcggaaaagtggtaccgtatgggcctccgtacggttgaagaagcaaaggccagtaagagtctgaagctgagcaagatgcagaaggcgggcttcctgtattacgaggatctggcgagcatggttagtaaagaagaagccgatgccgttacgctcatcgtgaaggaaacggtgcgtaccgttgtgccggatgcgctggtgaccatcgccggcggtttccgccgtggcaaacctatgggccacgacgttgactttctgatcacgaacccgggccgtcctgaagatgacgagctgctccacaaagtggttgatctgctcaagaagcaaggtctgctgctgtacgaagacatccgtgagagcacgttcgtggaggggcaactgccaagtcctaaaatcgacgccctggacaactttcagaagtgcttcgccattctcaagctgtaccagccgaaggtggataacagtgcggttgggacgagtaagaaaagtgacatggctgaggttaaggattggaaagcggttcgtgtggatctggtgatcacgccattcgagcagttcgcctatgcgctgctcggttggacgggcagcggccaatttcgtcgcgatctgcgtcgctatgcggaggaagagcgcgacatgctgctcgacaaccatcgtctctacgacctgaaaaagggcatctttctgagtgcgggcagcgaagaagagattttcgctcatctgggtctggattatctggagccgtgggaacgcaacgcg

SEQ ID NO: 3556 - protein, 394 aa, synthetic construct
  REGION 1..394: note = Variant of terminal deoxynucleotidyl transferase
MHHHHHHGGSGHPPSNTPEKEVPSVIARHVSQYACQRKTTLNNYNKKFTDALEIMAENYKFKENLQACLEAKRAASVFKSLPFEVTSMKDIQGLPCITDDVRDLIEEIIEEGESSRVKEILNDERYKAFKQFTSVFGVGVKTSEKWYRMGLRTVEEAKASKSLKLSKMQKAGFLYYEDLASMVSKEEADAVTLIVKETVRTVVPDALVTIAGGFRRGKPMGHDVDFLITNPGRPEDDELLHKVVDLLKKQGLLLYEDIRESTFVEGQLPSPKIDALDNFQKCFAILKLYQPKVDNSAVGTSKKSDMAEVKDWKAVRVDLVITPFEQFAYALLGWTGSGQFRRDLRRYAEEERDMLLDNHRLYDLKKGIFLSAGSEEEIFAHLGLDYLEPWERNA

SEQ ID NO: 3557 - DNA, 1182 bp, synthetic construct
  misc_feature 1..1182: note = Variant of terminal deoxynucleotidyl transferase
  source 1..1182: mol_type = other DNA
atgcatcaccaccatcatcatgggggttctggtcatccgccgagcaataccccggagaaggaggtgccgagcgttatcgcccgtccggttagtccgtacgcgtgccagcgcaagaccacgctgaataactacaacaaaaagttcaccgacgcgctggagatcatggccgagaactacaaatttaaagagaacctgcaggcgtgtctggaagccaagcgcgccgcgagtattctgaaaagcctgccgttcgaggttaccagcatgaaagacatccaaggtctgccgtgcattaccgacgacgtacgtgacgtgatccgcgagatcatcgaagagggcgagagcagccgtgttaaagaaatcctcaatgacgagcgctacaaggcctttaagcagttcaccagcgtgttcggtgtgggcgtgaaaacctcggaaaagtggtaccgtatgggcctccgtacggttgaagaagcaaaggccagtaagagtctgaagctgagcaagatgcagaaggcgggcttcctgtattacgaggatctggcgagcatggttagtaaagaagaagccgatgccgttacgctcatcgtgaaggaaacggtggcaaccgttgtgccggatgcgctggtgaccatcgccggcggtttccgccgtggcaaacctatgggccacgacgttgacctgctgatcacgaacccgggccgtaaagaagatgacgagctgctccacaaagtggttgatctgctcaagaagcaaggtctgctgctgtacgaagacatccgtgagagcacgttcgtggaggggcaactgccaagtcatgatatcgacgccctggacaacttccagaagtgcttcgccattctcaagctgtaccagccgaaggtggataacagtgcggttgggacgagtaagaaaagtgacatggctgaggttaaggattggaaagcggttcgtgtggatctggtgatcacgccattcgagcagttcgcctatgcgctgctcggttggacgggcagcggccaatttcgtcgcgatctgcgtcgctatgcggaggaagagcgcgacatgctgctcgacaaccatcgtctctacgacctgaaaaagggcatctttctgagtgcgaatagcgaagaagagattttcgcgcatctgggtctggattatctggagccgtgggaacgcaacgcg

SEQ ID NO: 3558 - protein, 394 aa, synthetic construct
  REGION 1..394: note = Variant of terminal deoxynucleotidyl transferase
MHHHHHHGGSGHPPSNTPEKEVPSVIARPVSPYACQRKTTLNNYNKKFTDALEIMAENYKFKENLQACLEAKRAASILKSLPFEVTSMKDIQGLPCITDDVRDVIREIIEEGESSRVKEILNDERYKAFKQFTSVFGVGVKTSEKWYRMGLRTVEEAKASKSLKLSKMQKAGFLYYEDLASMVSKEEADAVTLIVKETVATVVPDALVTIAGGFRRGKPMGHDVDLLITNPGRKEDDELLHKVVDLLKKQGLLLYEDIRESTFVEGQLPSHDIDALDNFQKCFAILKLYQPKVDNSAVGTSKKSDMAEVKDWKAVRVDLVITPFEQFAYALLGWTGSGQFRRDLRRYAEEERDMLLDNHRLYDLKKGIFLSANSEEEIFAHLGLDYLEPWERNA

SEQ ID NO: 3559 - DNA, 1182 bp, synthetic construct
  misc_feature 1..1182: note = Variant of terminal deoxynucleotidyl transferase
  source 1..1182: mol_type = other DNA
atgcatcaccaccatcatcatgggggttctggtcatccgccgagcaataccccggagaaggaggtgccgagcgttatcgcccgtcatgttagtcagtacgcgtgccagcgcaagaccacgctgaataactacaacaaaaagttcaccgacgcgctggagatcatggccgagaactacaaatttaaagagaacctgcaggcgtgtctggaagccaagcgcgccgcgagtatctttaaaagcctgccgttcgaggttaccagcatgaaagacatccaaggtctgccgtgcattaccgacgacgtacgtgacgtgatcgaggagatcatcgaagagggcgagagcagccgtgttaaagaaatcctcaatgacgagcgctacaaggcctttaagcagttcaccagcgtgttcggtgtgggcgtgaaaacctcggaaaagtggtaccgtatgggcctccgtacggttgaagaagcaaaggccagtaagagtctgaagctgagcaagatgcagaaggcgggcttcctgtattacgaggatctggcgagcggtgttagtaaagaagaagccgatgccgttacgctcatcgtgaaggaaacggtgcgtaccgttgtgccggatgcggaagtgaccatcgccggcggtttccgccgtggcaaacctatgggccacgacgttgactttctgatcacgaacccgggccgtaaggaagatgacgagctgctccacaaagtggttgatctgctcaagaagcaaggtctgctgctgtacgaagacatccgtgagagcacgttcgtggaggggcaactgccaagtcataaaatcgacgccctggacaactttcagaagtgcttcgccattctcaagctgtaccagccgaaggtggataacagtgcggttgggacgagtaagaaaagtgacatggctgaggttaaggattggaaagcggttcgtgtggatctggtgatcacgccattcgagcagttcgcctatgcgctgctcggttggacgggcagcggccaatttcgtcgcgatctgcgtcgctatgcggaggaagagcgcgacatgctgctcgacaaccatcgtctctacgacctgaaaaagggcatctttctgagtgcgggcagcgaagaagagattttcggtcatctgggtctggattatctggagccgtgggaacgcaacgcg

SEQ ID NO: 3560 - protein, 394 aa, synthetic construct
  REGION 1..394: note = Variant of terminal deoxynucleotidyl transferase
MHHHHHHGGSGHPPSNTPEKEVPSVIARHVSQYACQRKTTLNNYNKKFTDALEIMAENYKFKENLQACLEAKRAASIFKSLPFEVTSMKDIQGLPCITDDVRDVIEEIIEEGESSRVKEILNDERYKAFKQFTSVFGVGVKTSEKWYRMGLRTVEEAKASKSLKLSKMQKAGFLYYEDLASGVSKEEADAVTLIVKETVRTVVPDAEVTIAGGFRRGKPMGHDVDFLITNPGRKEDDELLHKVVDLLKKQGLLLYEDIRESTFVEGQLPSHKIDALDNFQKCFAILKLYQPKVDNSAVGTSKKSDMAEVKDWKAVRVDLVITPFEQFAYALLGWTGSGQFRRDLRRYAEEERDMLLDNHRLYDLKKGIFLSAGSEEEIFGHLGLDYLEPWERNA

SEQ ID NO: 3561 - DNA, 1182 bp, synthetic construct
  misc_feature 1..1182: note = Variant of terminal deoxynucleotidyl transferase
  source 1..1182: mol_type = other DNA
atgcatcaccaccatcatcatgggggttctggtcatccgccgagcaataccccggagaaggaggtgccgagcgttatcgcccgtccggttagttgctacgcgtgccagcgcaagaccacgctgaataactacaacaaaaagttcaccgacgcgctggagatcatggccgagaactacaaatttaaagagaacctgcaggcgtgtctggaagccaagcgcgccgcgagtattctgaaaagcctgccgttcgaggttaccagcatgaaagacatccaaggtctgccgtgcattaccgacgacgtacgtgacgtgatcgaggagatcatcgaagagggcgagagcagccgtgttaaagaaatcctcaatgacgagcgctacaaggcctttaagcagttcaccagcgtgttcggtgtgggcgtgaaaacctcggaaaagtggtaccgtatgggcctccgtacggttgaagaagcaaaggccagtaagagtctgaagctgagcaagatgcagaaggcgggcttcctgtattacgaggatctggcgagcatggttagtaaagaagaagccgatgccgttacgctcatcgtgaaggaaacggtggcaaccgttgtgccggatgcgctggtgaccatcgccggcggtttccgccgtggcaaacctatgggccacgacgttgacctgctgatcacgaacccgggccgtaaagaagatgacgagctgctccacaaagtggttgatctgctcaagaagcaaggtctgctgctgtacgaagacatccgtgagagcacgttcgtggaggggcaactgccaagtcataagatcgacgccctggacaacttccagaagtgcttcgccattctcaagctgtaccagccgaaggtggataacagtgcggttgggacgagtaagaaaagtgacatggctgaggttaaggattggaaagcggttcgtgtggatctggtgatcacgccattcgagcagttcgcctatgcgctgctcggttggacgggcagcggccaatttcgtcgcgatctgcgtcgctatgcggaggaagagcgcgacatgctgctcgacaaccatcgtctctacgacctgaaaaagggcatctttctgagtgcgggcagcgaagaagagattttcgcgcatctgggtctggattatctggagccgtgggaacgcaacgcg

SEQ ID NO: 3562 - protein, 394 aa, synthetic construct
  REGION 1..394: note = Variant of terminal deoxynucleotidyl transferase
MHHHHHHGGSGHPPSNTPEKEVPSVIARPVSCYACQRKTTLNNYNKKFTDALEIMAENYKFKENLQACLEAKRAASILKSLPFEVTSMKDIQGLPCITDDVRDVIEEIIEEGESSRVKEILNDERYKAFKQFTSVFGVGVKTSEKWYRMGLRTVEEAKASKSLKLSKMQKAGFLYYEDLASMVSKEEADAVTLIVKETVATVVPDALVTIAGGFRRGKPMGHDVDLLITNPGRKEDDELLHKVVDLLKKQGLLLYEDIRESTFVEGQLPSHKIDALDNFQKCFAILKLYQPKVDNSAVGTSKKSDMAEVKDWKAVRVDLVITPFEQFAYALLGWTGSGQFRRDLRRYAEEERDMLLDNHRLYDLKKGIFLSAGSEEEIFAHLGLDYLEPWERNA

SEQ ID NO: 3563 - DNA, 1182 bp, synthetic construct
  misc_feature 1..1182: note = Variant of terminal deoxynucleotidyl transferase
  source 1..1182: mol_type = other DNA
atgcatcaccaccatcatcatgggggttctggtcatccgccgagcaataccccggagaaggaggtgccgagcgttatcgcccgtccggttagtcagtacgcgtgccagcgcaagaccacgctgaataactacaacaaaaagttcaccgacgcgctggagatcatggccgagaactacaaatttaaagagaacctgcaggcgtgtctggaagccaagcgcgccgcgagtattctgaaaagcctgccgttcgaggttaccagcatgaaagacatccaaggtctgccgtgcattaccgacgacgtacgtgacgtgatccaagagatcatcgaagagggcgagagcagccgtgttaaagaaatcctcaatgacgagcgctacaaggcctttaagcagttcaccagcgtgttcggtgtgggcgtgaaaacctcggaaaagtggtaccgtatgggcctccgtacggttgaagaagcaaaggccagtaagagtctgaagctgagcaagatgcagaaggcgggcttcctgtattacgaggatctggcgagcatggttagtaaagaagaagccgatgccgttacgctcatcgtgaaggaaacggtgcgtaccgttgtgccggatgcgctggtgaccatcgccggcggtttccgccgtggcaaacctatgggccacgacgttgactttctgatcacgaacccgggccgtaaagaagatgacgagctgctccacaaagtggttgatctgctcaagaagcaaggtctgctgctgtacgaagacatccgtgagagcacgttcgtggaggggcaactgccaagtcataaaatcgacgccctggacaacttccagaagtgcttcgccattctcaagctgtaccagccgaaggtggataacagtgcggttgggacgagtaagaaaagtgacatggctgaggttaaggattggaaagcggttcgtgtggatctggtgatcacgccattcgagcagttcgcctatgcgctgctcggttggacgggcagcggccaatttcgtcgcgatctgcgtcgctatgcggaggaagagcgcgacatgctgctcgacaaccatcgtctctacgacctgaaaaagggcatctttctgagtgcgggcagcgaagaagagattttcgcgcatctgggtctggattatctggagccgtgggaacgcaacgcg

SEQ ID NO: 3564 - protein, 394 aa, synthetic construct
  REGION 1..394: note = Variant of terminal deoxynucleotidyl transferase
MHHHHHHGGSGHPPSNTPEKEVPSVIARPVSQYACQRKTTLNNYNKKFTDALEIMAENYKFKENLQACLEAKRAASILKSLPFEVTSMKDIQGLPCITDDVRDVIQEIIEEGESSRVKEILNDERYKAFKQFTSVFGVGVKTSEKWYRMGLRTVEEAKASKSLKLSKMQKAGFLYYEDLASMVSKEEADAVTLIVKETVRTVVPDALVTIAGGFRRGKPMGHDVDFLITNPGRKEDDELLHKVVDLLKKQGLLLYEDIRESTFVEGQLPSHKIDALDNFQKCFAILKLYQPKVDNSAVGTSKKSDMAEVKDWKAVRVDLVITPFEQFAYALLGWTGSGQFRRDLRRYAEEERDMLLDNHRLYDLKKGIFLSAGSEEEIFAHLGLDYLEPWERNA

SEQ ID NO: 3565 - DNA, 1182 bp, synthetic construct
  misc_feature 1..1182: note = Variant of terminal deoxynucleotidyl transferase
  source 1..1182: mol_type = other DNA
atgcatcaccaccatcatcatgggggttctggtcatccgccgagcaataccccggagaaggaggtgccgagcgttatcgcccgtccggttagttgctacgcgtgccagcgcaagaccacgctgaataactacaacaaaaagttcaccgacgcgctggagatcatggccgagaactacaaatttaaagagaacctgcaggcgtgtctggaagccaagcgcgccgcgagtattctgaaaagcctgccgttcgaggttaccagcatgaaagacatccaaggtctgccgtgcattaccgacgacgtacgtgacgtgatcgaagagatcatcgaagagggcgagagcagccgtgttaaagaaatcctcaatgacgagcgctacaaggcctttaagcagttcaccagcgtgttcggtgtgggcgtgaaaacctcggaaaagtggtaccgtatgggcctccgtacggttgaagaagcaaaggccagtaagagtctgaagctgagcaagatgcagaaggcgggcttcctgtattacgaggatctggcgagcatggttagtaaagaagaagccgatgccgttacgctcatcgtgaaggaaacggtgcgcaccgttgtgccggatgcgctggtgaccatcgccggcggtttccgccgtggcaaacctatgggccacgacgttgacctgctgatcacgaacccgggccgtaaagaagatgacgagctgctccacaaagtggttgatctgctcaagaagcaaggtctgctgctgtacgaagacatccgtgagagcacgttcgtggaggggcaactgccaagtcataagatcgacgccctggacaacttccagaagtgcttcgccattctcaagctgtaccagccgaaggtggataacagtgcggttgggacgagtaagaaaagtgacatggctgaggttaaggattggaaagcggttcgtgtggatctggtgatcacgccattcgagcagttcgcctatgcgctgctcggttggacgggcagcggccaatttcgtcgcgatctgcgtcgctatgcggaggaagagcgcgacatgctgctcgacaaccatcgtctctacgacctgaaaaagggcatctttctgagtgcgaatagcgaagaagagattttcgcgcatctgggtctggattatctggagccgtgggaacgcaacgcg

SEQ ID NO: 3566 - protein, 394 aa, synthetic construct
  REGION 1..394: note = Variant of terminal deoxynucleotidyl transferase
MHHHHHHGGSGHPPSNTPEKEVPSVIARPVSCYACQRKTTLNNYNKKFTDALEIMAENYKFKENLQACLEAKRAASILKSLPFEVTSMKDIQGLPCITDDVRDVIEEIIEEGESSRVKEILNDERYKAFKQFTSVFGVGVKTSEKWYRMGLRTVEEAKASKSLKLSKMQKAGFLYYEDLASMVSKEEADAVTLIVKETVRTVVPDALVTIAGGFRRGKPMGHDVDLLITNPGRKEDDELLHKVVDLLKKQGLLLYEDIRESTFVEGQLPSHKIDALDNFQKCFAILKLYQPKVDNSAVGTSKKSDMAEVKDWKAVRVDLVITPFEQFAYALLGWTGSGQFRRDLRRYAEEERDMLLDNHRLYDLKKGIFLSANSEEEIFAHLGLDYLEPWERNA

SEQ ID NO: 3567 - DNA, 1182 bp, synthetic construct
  misc_feature 1..1182: note = Variant of terminal deoxynucleotidyl transferase
  source 1..1182: mol_type = other DNA
atgcatcaccaccatcatcatgggggttctggtcatccgccgagcaataccccggagaaggaggtgccgagcgttatcgcccgtcctgttagtcagtacgcgtgccagcgcaagaccacgctgaataactacaacaaaaagttcaccgacgcgctggagatcatggccgagaactacaaatttaaagagaacctgcaggcgtgtctggaagccaagcgcgccgcgagtatctttaaaagcctgccgttcgaggttaccagcatgaaagacatccaaggtctgccgtgcattaccgacgacgtacgtgacgtgatcgaggagatcatcgaagagggcgagagcagccgtgttaaagaaatcctcaatgacgagcgctacaaggcctttaagcagttcaccagcgtgttcggtgtgggcgtgaaaacctcggaaaagtggtaccgtatgggcctccgtacggttgaagaagcaaaggccagtaagagtctgaagctgagcaagatgcagaaggcgggcttcctgtattacgaggatctggcgagcatggttagtaaagaagaagccgatgccgttacgctcatcgtgaaggaaacggtgcgtaccgttgtgccggatgcggaagtgaccatcgccggcggtttccgccgtggcaaacctatgggccacgacgttgactttctgatcacgaacccgggccgtaaggaagatgacgagctgctccacaaagtggttgatctgctcaagaagcaaggtctgctgctgtacgaagacatccgtgagagcacgttcgtggaggggcaactgccaagtcataaaatcgacgccctggacaactttcagaagtgcttcgccattctcaagctgtaccagccgaaggtggataacagtgcggttgggacgagtaagaaaagtgacatggctgaggttaaggattggaaagcggttcgtgtggatctggtgatcacgccattcgagcagttcgcctatgcgctgctcggttggacgggcagcggccaatttcgtcgcgatctgcgtcgctatgcggaggaagagcgcgacatgctgctcgacaaccatcgtctctacgacctgaaaaagggcatctttctgagtgcgggcagcgaagaagagattttcggtcatctgggtctggattatctggagccgtgggaacgcaacgcg

SEQ ID NO: 3568 - protein, 394 aa, synthetic construct
  REGION 1..394: note = Variant of terminal deoxynucleotidyl transferase
MHHHHHHGGSGHPPSNTPEKEVPSVIARPVSQYACQRKTTLNNYNKKFTDALEIMAENYKFKENLQACLEAKRAASIFKSLPFEVTSMKDIQGLPCITDDVRDVIEEIIEEGESSRVKEILNDERYKAFKQFTSVFGVGVKTSEKWYRMGLRTVEEAKASKSLKLSKMQKAGFLYYEDLASMVSKEEADAVTLIVKETVRTVVPDAEVTIAGGFRRGKPMGHDVDFLITNPGRKEDDELLHKVVDLLKKQGLLLYEDIRESTFVEGQLPSHKIDALDNFQKCFAILKLYQPKVDNSAVGTSKKSDMAEVKDWKAVRVDLVITPFEQFAYALLGWTGSGQFRRDLRRYAEEERDMLLDNHRLYDLKKGIFLSAGSEEEIFGHLGLDYLEPWERNA

SEQ ID NO: 3569 - DNA, 1182 bp, synthetic construct
  misc_feature 1..1182: note = Variant of terminal deoxynucleotidyl transferase
  source 1..1182: mol_type = other DNA
atgcatcaccaccatcatcatgggggttctggtcatccgccgagcaataccccggagaaggaggtgccgagcgttatcgcccgtccggttagttgctacgcgtgccagcgcaagaccacgctgaataactacaacaaaaagttcaccgacgcgctggagatcatggccgagaactacaaatttaaagagaacctgcaggcgtgtctggaagccaagcgcgccgcgagtatttttaaaagcctgccgttcgaggttaccagcatgaaagacatccaaggtctgccgtgcattaccgacgacgtacgtgacgtgatccgcgagatcatcgaagagggcgagagcagccgtgttaaagaaatcctcaatgacgagcgctacaaggcctttaagcagttcaccagcgtgttcggtgtgggcgtgaaaacctcggaaaagtggtaccgtatgggcctccgtacggttgaagaagcaaaggccagtaagagtctgaagctgagcaagatgcagaaggcgggcttcctgtattacgaggatctggcgagcatggttagtaaagaagaagccgatgccgttacgctcatcgtgaaggaaacggtggcaaccgttgtgccggatgcgctggtgaccatcgccggcggtttccgccgtggcaaacctatgggccacgacgttgacctgctgatcacgaacccgggccgtaaagaagatgacgagctgctccacaaagtggttgatctgctcaagaagcaaggtctgctgctgtacgaagacatccgtgagagcacgttcgtggaggggcaactgccaagtcataagatcgacgccctggacaacttccagaagtgcttcgccattctcaagctgtaccagccgaaggtggataacagtgcggttgggacgagtaagaaaagtgacatggctgaggttaaggattggaaagcggttcgtgtggatctggtgatcacgccattcgagcagttcgcctatgcgctgctcggttggacgggcagcggccaatttcgtcgcgatctgcgtcgctatgcggaggaagagcgcgacatgctgctcgacaaccatcgtctctacgacctgaaaaagggcatctttctgagtgcgggtagcgaagaagagattttcgcgcatctgggtctggattatctggagccgtgggaacgcaacgcg

SEQ ID NO: 3570 - protein, 394 aa, synthetic construct
  REGION 1..394: note = Variant of terminal deoxynucleotidyl transferase
MHHHHHHGGSGHPPSNTPEKEVPSVIARPVSCYACQRKTTLNNYNKKFTDALEIMAENYKFKENLQACLEAKRAASIFKSLPFEVTSMKDIQGLPCITDDVRDVIREIIEEGESSRVKEILNDERYKAFKQFTSVFGVGVKTSEKWYRMGLRTVEEAKASKSLKLSKMQKAGFLYYEDLASMVSKEEADAVTLIVKETVATVVPDALVTIAGGFRRGKPMGHDVDLLITNPGRKEDDELLHKVVDLLKKQGLLLYEDIRESTFVEGQLPSHKIDALDNFQKCFAILKLYQPKVDNSAVGTSKKSDMAEVKDWKAVRVDLVITPFEQFAYALLGWTGSGQFRRDLRRYAEEERDMLLDNHRLYDLKKGIFLSAGSEEEIFAHLGLDYLEPWERNA

SEQ ID NO: 3571 - DNA, 1182 bp, synthetic construct
  misc_feature 1..1182: note = Variant of terminal deoxynucleotidyl transferase
  source 1..1182: mol_type = other DNA
atgcatcaccaccatcatcatgggggttctggtcatccgccgagcaataccccggagaaggaggtgccgagcgttatcgcccgtccggttagtcagtacgcgtgccagcgcaagaccacgctgaataactacaacaaaaagttcaccgacgcgctggagatcatggccgagaactacaaatttaaagagaacctgcaggcgtgtctggaagccaagcgcgccgcgagtattctgaaaagcctgccgttcgaggttaccagcatgaaagacatccaaggtctgccgtgcattaccgacgacgtacgtgacgtgatccgcgagatcatcgaagagggcgagagcagccgtgttaaagaaatcctcaatgacgagcgctacaaggcctttaagcagttcaccagcgtgttcggtgtgggcgtgaaaacctcggaaaagtggtaccgtatgggcctccgtacggttgaagaagcaaaggccagtaagagtctgaagctgagcaagatgcagaaggcgggcttcctgtattacgaggatctggcgagcatggttagtaaagaagaagccgatgccgttacgctcatcgtgaaggaaacggtgcgcaccgttgtgccggatgcgctggtgaccatcgccggcggtttccgccgtggcaaacctatgggccacgacgttgactttctgatcacgaacccgggccgtaaaactgatgacgagctgctccacaaagtggttgatctgctcaagaagcaaggtctgctgctgtacgaagacatccgtgagagcacgttcgtggaggggcaactgccaagtcataagatcgacgccctggacaacttccagaagtgcttcgccattctcaagctgtaccagccgaaggtggataacagtgcggttgggacgagtaagaaaagtgacatggctgaggttaaggattggaaagcggttcgtgtggatctggtgatgacgccattcgagcagttcgcctatgcgctgctcggttggacgggcagcggccaatttcgtcgcgatctgcgtcgctatgcggaggaagagcgcgacatgctgctcgacaaccatcgtctctacgacctgaaaaagggcatctttctgagtgcgaatagcgaagaagagattttcgcgcatctgggtctggattatctggagccgtgggaacgcaacgcg

SEQ ID NO: 3572 - protein, 394 aa, synthetic construct
  REGION 1..394: note = Variant of terminal deoxynucleotidyl transferase
MHHHHHHGGSGHPPSNTPEKEVPSVIARPVSQYACQRKTTLNNYNKKFTDALEIMAENYKFKENLQACLEAKRAASILKSLPFEVTSMKDIQGLPCITDDVRDVIREIIEEGESSRVKEILNDERYKAFKQFTSVFGVGVKTSEKWYRMGLRTVEEAKASKSLKLSKMQKAGFLYYEDLASMVSKEEADAVTLIVKETVRTVVPDALVTIAGGFRRGKPMGHDVDFLITNPGRKTDDELLHKVVDLLKKQGLLLYEDIRESTFVEGQLPSHKIDALDNFQKCFAILKLYQPKVDNSAVGTSKKSDMAEVKDWKAVRVDLVMTPFEQFAYALLGWTGSGQFRRDLRRYAEEERDMLLDNHRLYDLKKGIFLSANSEEEIFAHLGLDYLEPWERNA

SEQ ID NO: 3573 - DNA, 1182 bp, synthetic construct
  misc_feature 1..1182: note = Variant of terminal deoxynucleotidyl transferase
  source 1..1182: mol_type = other DNA
atgcatcaccaccatcatcatgggggttctggtcatccgccgagcaataccccggagaaggaggtgccgagcgttatcgcccgtccggttagtcagtacgcgtgccagcgcaagaccacgctgaataactacaacaaaaagttcaccgacgcgctggagatcatggccgagaactacaaatttaaagagaacctgcaggcgtgtctggaagccaagcgcgccgcgagtatttttaaaagcctgccgttcgaggttaccagcatgaaagacatccaaggtctgccgtgcattaccgacgacgtacgtgacgtgatcgaggagatcatcgaagagggcgagagcagccgtgttaaagaaatcctcaatgacgagcgctacaaggcctttaagcagttcaccagcgtgttcggtgtgggcgtgaaaacctcggaaaagtggtaccgtatgggcctccgtacggttgaagaagcaaaggccagtaagagtctgaagctgagcaagatgcagaaggcgggcttcctgtattacgaggatctggcgagcatggttagtaaagaagaagccgatgccgttacgctcatcgtgaaggaaacggtgcgcaccgttgtgccggatgcgctggtgaccatcgccggcggtttccgccgtggcaaacctatgggccacgacgttgacctgctgatcacgaacccgggccgtaaagaagatgacgagctgctccacaaagtggttgatctgctcaagaagcaaggtctgctgctgtacgaagacatccgtgagagcacgttcgtggaggggcaactgccaagtcatgatatcgacgccctggacaacttccagaagtgcttcgccattctcaagctgtaccagccgaaggtggataacagtgcggttgggacgagtaagaaaagtgacatggctgaggttaaggattggaaagcggttcgtgtggatctggtgatcacgccattcgagcagttcgcctatgcgctgctcggttggacgggcagcggccaatttcgtcgcgatctgcgtcgctatgcggaggaagagcgcgacatgctgctcgacaaccatcgtctctacgacctgaaaaagggcatctttctgagtgcgaatagcgaagaagagattttcgcgcatctgggtctggattatctggagccgtgggaacgcaacgcg

SEQ ID NO: 3574 - protein, 394 aa, synthetic construct
  REGION 1..394: note = Variant of terminal deoxynucleotidyl transferase
MHHHHHHGGSGHPPSNTPEKEVPSVIARPVSQYACQRKTTLNNYNKKFTDALEIMAENYKFKENLQACLEAKRAASIFKSLPFEVTSMKDIQGLPCITDDVRDVIEEIIEEGESSRVKEILNDERYKAFKQFTSVFGVGVKTSEKWYRMGLRTVEEAKASKSLKLSKMQKAGFLYYEDLASMVSKEEADAVTLIVKETVRTVVPDALVTIAGGFRRGKPMGHDVDLLITNPGRKEDDELLHKVVDLLKKQGLLLYEDIRESTFVEGQLPSHDIDALDNFQKCFAILKLYQPKVDNSAVGTSKKSDMAEVKDWKAVRVDLVITPFEQFAYALLGWTGSGQFRRDLRRYAEEERDMLLDNHRLYDLKKGIFLSANSEEEIFAHLGLDYLEPWERNA

SEQ ID NO: 3575 - DNA, 1182 bp, synthetic construct
  misc_feature 1..1182: note = Variant of terminal deoxynucleotidyl transferase
  source 1..1182: mol_type = other DNA
atgcatcaccaccatcatcatgggggttctggtcatccgccgagcaataccccggagaaggaggtgccgagcgttatcgcccgtccggttagtccgtacgcgtgccagcgcaagaccacgctgaataactacaacaaaaagttcaccgacgcgctggagatcatggccgagaactacaaatttaaagagaacctgcaggcgtgtctggaagccaagcgcgccgcgagtattctgaaaagcctgccgttcgaggttaccagcatgaaagacatccaaggtctgccgtgcattaccgacgacgtacgtgacgtgatccgcgagatcatcgaagagggcgagagcagccgtgttaaagaaatcctcaatgacgagcgctacaaggcctttaagcagttcaccagcgtgttcggtgtgggcgtgaaaacctcggaaaagtggtaccgtatgggcctccgtacggttgaagaagcaaaggccagtaagagtctgaagctgagcaagatgcagaaggcgggcttcctgtattacgaggatctggcgagcatggttagtaaagaagaagccgatgccgttacgctcatcgtgaaggaaacggtggcaaccgttgtgccggatgcgctggtgaccatcgccggcggtttccgccgtggcaaacctatgggccacgacgttgacctgctgatcacgaacccgggccgtaaagaggatgacgagctgctccacaaagtggttgatctgctcaagaagcaaggtctgctgctgtacgaagacatccgtgagagcacgttcgtggaggggcaactgccaagtcataagatcgacgccctggacaacttccagaagtgcttcgccattctcaagctgtaccagccgaaggtggataacagtgcggttgggacgagtaagaaaagtgacatggctgaggttaaggattggaaagcggttcgtgtggatctggtgatcacgccattcgagcagttcgcctatgcgctgctcggttggacgggcagcggccaatttcgtcgcgatctgcgtcgctatgcggaggaagagcgcgacatgctgctcgacaaccatcgtctctacgacctgaaaaagggcatctttctgagtgcggctagcgaagaagagattttcgcgcatctgggtctggattatctggagccgtgggaacgcaacgcg

SEQ ID NO: 3576 - protein, 394 aa, synthetic construct
  REGION 1..394: note = Variant of terminal deoxynucleotidyl transferase
MHHHHHHGGSGHPPSNTPEKEVPSVIARPVSPYACQRKTTLNNYNKKFTDALEIMAENYKFKENLQACLEAKRAASILKSLPFEVTSMKDIQGLPCITDDVRDVIREIIEEGESSRVKEILNDERYKAFKQFTSVFGVGVKTSEKWYRMGLRTVEEAKASKSLKLSKMQKAGFLYYEDLASMVSKEEADAVTLIVKETVATVVPDALVTIAGGFRRGKPMGHDVDLLITNPGRKEDDELLHKVVDLLKKQGLLLYEDIRESTFVEGQLPSHKIDALDNFQKCFAILKLYQPKVDNSAVGTSKKSDMAEVKDWKAVRVDLVITPFEQFAYALLGWTGSGQFRRDLRRYAEEERDMLLDNHRLYDLKKGIFLSAASEEEIFAHLGLDYLEPWERNA

SEQ ID NO: 3577 - DNA, 1182 bp, synthetic construct
  misc_feature 1..1182: note = Variant of terminal deoxynucleotidyl transferase
  source 1..1182: mol_type = other DNA
atgcatcaccaccatcatcatgggggttctggtcatccgccgagcaataccccggagaaggaggtgccgagcgttatcgcccgtccggttagtcagtacgcgtgccagcgcaagaccacgctgaataactacaacaaaaagttcaccgacgcgctggagatcatggccgagaactacaaatttaaagagaacctgcaggcgtgtctggaagccaagcgcgccgcgagtatttttaaaagcctgccgttcgaggttaccagcatgaaagacatccaaggtctgccgtgcattaccgacgacgtacgtgacgtgatcgaagagatcatcgaagagggcgagagcagccgtgttaaagaaatcctcaatgacgagcgctacaaggcctttaagcagttcaccagcgtgttcggtgtgggcgtgaaaacctcggaaaagtggtaccgtatgggcctccgtacggttgaagaagcaaaggccagtaagagtctgaagctgagcaagatgcagaaggcgggcttcctgtattacgaggatctggcgagcatggttagtaaagaagaagccgatgccgttacgctcatcgtgaaggaaacggtgcgcaccgttgtgccggatgcgctggtgaccatcgccggcggtttccgccgtggcaaacctatgggccacgacgttgacctgctgatcacgaacccgggccgtaaaactgatgacgaactgctccacaaagtggttgatctgctcaagaagcaaggtctgctgctgtacgaagacatccgtgagagcacgttcgtggaggggcaactgccaagtcatgatatcgacgccctggacaacttccagaagtgcttcgccattctcaagctgtaccagccgaaggtggataacagtgcggttgggacgagtaagaaaagtgacatggctgaggttaaggattggaaagcggttcgtgtggatctggtgatcacgccattcgagcagttcgcctatgcgctgctcggttggacgggcagcggccaatttcgtcgcgatctgcgtcgctatgcggaggaagagcgcgacatgctgctcgacaaccatcgtctctacgacctgaaaaagggcatctttctgagtgcggctagcgaagaagagattttcgcgcatctgggtctggattatctggagccgtgggaacgcaacgcg

SEQ ID NO: 3578 - protein, 394 aa, synthetic construct
  REGION 1..394: note = Variant of terminal deoxynucleotidyl transferase
MHHHHHHGGSGHPPSNTPEKEVPSVIARPVSQYACQRKTTLNNYNKKFTDALEIMAENYKFKENLQACLEAKRAASIFKSLPFEVTSMKDIQGLPCITDDVRDVIEEIIEEGESSRVKEILNDERYKAFKQFTSVFGVGVKTSEKWYRMGLRTVEEAKASKSLKLSKMQKAGFLYYEDLASMVSKEEADAVTLIVKETVRTVVPDALVTIAGGFRRGKPMGHDVDLLITNPGRKTDDELLHKVVDLLKKQGLLLYEDIRESTFVEGQLPSHDIDALDNFQKCFAILKLYQPKVDNSAVGTSKKSDMAEVKDWKAVRVDLVITPFEQFAYALLGWTGSGQFRRDLRRYAEEERDMLLDNHRLYDLKKGIFLSAASEEEIFAHLGLDYLEPWERNA

SEQ ID NO: 3579 - DNA, 1182 bp, synthetic construct
  misc_feature 1..1182: note = Variant of terminal deoxynucleotidyl transferase
  source 1..1182: mol_type = other DNA
atgcatcaccaccatcatcatgggggttctggtcatccgccgagcaataccccggagaaggaggtgccgagcgttatcgcccgtccggttagtcagtacgcgtgccagcgcaagaccacgctgaataactacaacaaaaagttcaccgacgcgctggagatcatggccgagaactacaaatttaaagagaacctgcaggcgtgtctggaagccaagcgcgccgcgagtattctgaaaagcctgccgttcgaggttaccagcatgaaagacatccaaggtctgccgtgcattaccgacgacgtacgtgacgtgatcgaggagatcatcgaagagggcgagagcagccgtgttaaagaaatcctcaatgacgagcgctacaaggcctttaagcagttcaccagcgtgttcggtgtgggcgtgaaaacctcggaaaagtggtaccgtatgggcctccgtacggttgaagaagcaaaggccagtaagagtctgaagctgagcaagatgcagaaggcgggcttcctgtattacgaggatctggcgagcatggttagtaaagaagaagccgatgccgttacgctcatcgtgaaggaaacggtgcgtaccgttgtgccggatgcgctggtgaccatcgccggcggtttccgccgtggcaaacctatgggccacgacgttgacctgctgatcacgaacccgggccgtaaagaagatgacgagctgctccacaaagtggttgatctgctcaagaagcaaggtctgctgctgtacgaagacatccgtgagagcacgttcgtggaggggcaactgccaagtcataaaatcgacgccctggacaacttccagaagtgcttcgccattctcaagctgtaccagccgaaggtggataacagtgcggttgggacgagtaagaaaagtgacatggctgaggttaaggattggaaagcggttcgtgtggatctggtgatgacgccattcgagcagttcgcctatgcgctgctcggttggacgggcagcggccaatttcgtcgcgatctgcgtcgctatgcggaggaagagcgcgacatgctgctcgacaaccatcgtctctacgacctgaaaaagggcatctttctgagtgcgggcagcgaagaagagattttcgcgcatctgggtctggattatctggagccgtgggaacgcaacgcg

SEQ ID NO: 3580 - protein, 394 aa, synthetic construct
  REGION 1..394: note = Variant of terminal deoxynucleotidyl transferase
MHHHHHHGGSGHPPSNTPEKEVPSVIARPVSQYACQRKTTLNNYNKKFTDALEIMAENYKFKENLQACLEAKRAASILKSLPFEVTSMKDIQGLPCITDDVRDVIEEIIEEGESSRVKEILNDERYKAFKQFTSVFGVGVKTSEKWYRMGLRTVEEAKASKSLKLSKMQKAGFLYYEDLASMVSKEEADAVTLIVKETVRTVVPDALVTIAGGFRRGKPMGHDVDLLITNPGRKEDDELLHKVVDLLKKQGLLLYEDIRESTFVEGQLPSHKIDALDNFQKCFAILKLYQPKVDNSAVGTSKKSDMAEVKDWKAVRVDLVMTPFEQFAYALLGWTGSGQFRRDLRRYAEEERDMLLDNHRLYDLKKGIFLSAGSEEEIFAHLGLDYLEPWERNA

SEQ ID NO: 3581 - DNA, 1182 bp, synthetic construct
  misc_feature 1..1182: note = Variant of terminal deoxynucleotidyl transferase
  source 1..1182: mol_type = other DNA
atgcatcaccaccatcatcatgggggttctggtcatccgccgagcaataccccggagaaggaggtgccgagcgttatcgcccgtccggttagttgctacgcgtgccagcgcaagaccacgctgaataactacaacaaaaagttcaccgacgcgctggagatcatggccgagaactacaaatttaaagagaacctgcaggcgtgtctggaagccaagcgcgccgcgagtattctgaaaagcctgccgttcgaggttaccagcatgaaagacatccaaggtctgccgtgcattaccgacgacgtacgtgacgtgatcgaggagatcatcgaagagggcgagagcagccgtgttaaagaaatcctcaatgacgagcgctacaaggcctttaagcagttcaccagcgtgttcggtgtgggcgtgaaaacctcggaaaagtggtaccgtatgggcctccgtacggttgaagaagcaaaggccagtaagagtctgaagctgagcaagatgcagaaggcgggcttcctgtattacgaggatctggcgagcatggttagtaaagaagaagccgatgccgttacgctcatcgtgaaggaaacggtggcaaccgttgtgccggatgcgctggtgaccatcgccggcggtttccgccgtggcaaacctatgggccacgacgttgacctgctgatcacgaacccgggccgtaaaactgatgacgagctgctccacaaagtggttgatctgctcaagaagcaaggtctgctgctgtacgaagacatccgtgagagcacgttcgtggaggggcaactgccaagtcatgatatcgacgccctggacaacttccagaagtgcttcgccattctcaagctgtaccagccgaaggtggataacagtgcggttgggacgagtaagaaaagtgacatggctgaggttaaggattggaaagcggttcgtgtggatctggtgatcacgccattcgagcagttcgcctatgcgctgctcggttggacgggcagcggccaatttcgtcgcgatctgcgtcgctatgcggaggaagagcgcgacatgctgctcgacaaccatcgtctctacgacctgaaaaagggcatctttctgagtgcgggcagcgaagaagagattttcgcgcatctgggtctggattatctggagccgtgggaacgcaacgcg

SEQ ID NO: 3582 - protein, 394 aa, synthetic construct
  REGION 1..394: note = Variant of terminal deoxynucleotidyl transferase
MHHHHHHGGSGHPPSNTPEKEVPSVIARPVSCYACQRKTTLNNYNKKFTDALEIMAENYKFKENLQACLEAKRAASILKSLPFEVTSMKDIQGLPCITDDVRDVIEEIIEEGESSRVKEILNDERYKAFKQFTSVFGVGVKTSEKWYRMGLRTVEEAKASKSLKLSKMQKAGFLYYEDLASMVSKEEADAVTLIVKETVATVVPDALVTIAGGFRRGKPMGHDVDLLITNPGRKTDDELLHKVVDLLKKQGLLLYEDIRESTFVEGQLPSHDIDALDNFQKCFAILKLYQPKVDNSAVGTSKKSDMAEVKDWKAVRVDLVITPFEQFAYALLGWTGSGQFRRDLRRYAEEERDMLLDNHRLYDLKKGIFLSAGSEEEIFAHLGLDYLEPWERNA

SEQ ID NO: 3583 - DNA, 1182 bp, synthetic construct
  misc_feature 1..1182: note = Variant of terminal deoxynucleotidyl transferase
  source 1..1182: mol_type = other DNA
atgcatcaccaccatcatcatgggggttctggtcatccgccgagcaataccccggagaaggaggtgccgagcgttatcgcccgtccggttagtcagtacgcgtgccagcgcaagaccacgctgaataactacaacaaaaagttcaccgacgcgctggagatcatggccgagaactacaaatttaaagagaacctgcaggcgtgtctggaagccaagcgcgccgcgagtatttttaaaagcctgccgttcgaggttaccagcatgaaagacatccaaggtctgccgtgcattaccgacgacgtacgtgacgtgatcgaggagatcatcgaagagggcgagagcagccgtgttaaagaaatcctcaatgacgagcgctacaaggcctttaagcagttcaccagcgtgttcggtgtgggcgtgaaaacctcggaaaagtggtaccgtatgggcctccgtacggttgaagaagcaaaggccagtaagagtctgaagctgagcaagatgcagaaggcgggcttcctgtattacgaggatctggcgagcatggttagtaaagaagaagccgatgccgttacgctcatcgtgaaggaaacggtggcaaccgttgtgccggatgcgctggtgaccatcgccggcggtttccgccgtggcaaacctatgggccacgacgttgacctgctgatcacgaacccgggccgtaaagaggatgacgagctgctccacaaagtggttgatctgctcaagaagcaaggtctgctgctgtacgaagacatccgtgagagcacgttcgtggaggggcaactgccaagtcataaaatcgacgccctggacaacttccagaagtgcttcgccattctcaagctgtaccagccgaaggtggataacagtgcggttgggacgagtaagaaaagtgacatggctgaggttaaggattggaaagcggttcgtgtggatctggtgatcacgccattcgagcagttcgcctatgcgctgctcggttggacgggcagcggccaatttcgtcgcgatctgcgtcgctatgcggaggaagagcgcgacatgctgctcgacaaccatcgtctctacgacctgaaaaagggcatctttctgagtgcggctagcgaagaagagattttcgcgcatctgggtctggattatctggagccgtgggaacgcaacgcg

SEQ ID NO: 3584 - protein, 394 aa, synthetic construct
  REGION 1..394: note = Variant of terminal deoxynucleotidyl transferase
MHHHHHHGGSGHPPSNTPEKEVPSVIARPVSQYACQRKTTLNNYNKKFTDALEIMAENYKFKENLQACLEAKRAASIFKSLPFEVTSMKDIQGLPCITDDVRDVIEEIIEEGESSRVKEILNDERYKAFKQFTSVFGVGVKTSEKWYRMGLRTVEEAKASKSLKLSKMQKAGFLYYEDLASMVSKEEADAVTLIVKETVATVVPDALVTIAGGFRRGKPMGHDVDLLITNPGRKEDDELLHKVVDLLKKQGLLLYEDIRESTFVEGQLPSHKIDALDNFQKCFAILKLYQPKVDNSAVGTSKKSDMAEVKDWKAVRVDLVITPFEQFAYALLGWTGSGQFRRDLRRYAEEERDMLLDNHRLYDLKKGIFLSAASEEEIFAHLGLDYLEPWERNA

SEQ ID NO: 3585 - DNA, 1182 bp, synthetic construct
  misc_feature 1..1182: note = Variant of terminal deoxynucleotidyl transferase
  source 1..1182: mol_type = other DNA
atgcatcaccaccatcatcatgggggttctggtcatccgccgagcaataccccggagaaggaggtgccgagcgttatcgcccgtccggttagttgctacgcgtgccagcgcaagaccacgctgaataactacaacaaaaagttcaccgacgcgctggagatcatggccgagaactacaaatttaaagagaacctgcaggcgtgtctggaagccaagcgcgccgcgagtattctgaaaagcctgccgttcgaggttaccagcatgaaagacatccaaggtctgccgtgcattaccgacgacgtacgtgacgtgatcgaagagatcatcgaagagggcgagagcagccgtgttaaagaaatcctcaatgacgagcgctacaaggcctttaagcagttcaccagcgtgttcggtgtgggcgtgaaaacctcggaaaagtggtaccgtatgggcctccgtacggttgaagaagcaaaggccagtaagagtctgaagctgagcaagatgcagaaggcgggcttcctgtattacgaggatctggcgagcatggttagtaaagaagaagccgatgccgttacgctcatcgtgaaggaaacggtgcgtaccgttgtgccggatgcgctggtgaccatcgccggcggtttccgccgtggcaaacctatgggccacgacgttgacctgctgatcacgaacccgggccgtaaagaggatgacgagctgctccacaaagtggttgatctgctcaagaagcaaggtctgctgctgtacgaagacatccgtgagagcacgttcgtggaggggcaactgccaagtcataagatcgacgccctggacaacttccagaagtgcttcgccattctcaagctgtaccagccgaaggtggataacagtgcggttgggacgagtaagaaaagtgacatggctgaggttaaggattggaaagcggttcgtgtggatctggtgatgacgccattcgagcagttcgcctatgcgctgctcggttggacgggcagcggccaatttcgtcgcgatctgcgtcgctatgcggaggaagagcgcgacatgctgctcgacaaccatcgtctctacgacctgaaaaagggcatctttctgagtgcgggtagcgaagaagagattttcgcgcatctgggtctggattatctggagccgtgggaacgcaacgcg

SEQ ID NO: 3586 - protein, 394 aa, synthetic construct
  REGION 1..394: note = Variant of terminal deoxynucleotidyl transferase
MHHHHHHGGSGHPPSNTPEKEVPSVIARPVSCYACQRKTTLNNYNKKFTDALEIMAENYKFKENLQACLEAKRAASILKSLPFEVTSMKDIQGLPCITDDVRDVIEEIIEEGESSRVKEILNDERYKAFKQFTSVFGVGVKTSEKWYRMGLRTVEEAKASKSLKLSKMQKAGFLYYEDLASMVSKEEADAVTLIVKETVRTVVPDALVTIAGGFRRGKPMGHDVDLLITNPGRKEDDELLHKVVDLLKKQGLLLYEDIRESTFVEGQLPSHKIDALDNFQKCFAILKLYQPKVDNSAVGTSKKSDMAEVKDWKAVRVDLVMTPFEQFAYALLGWTGSGQFRRDLRRYAEEERDMLLDNHRLYDLKKGIFLSAGSEEEIFAHLGLDYLEPWERNA

SEQ ID NO: 3587 - DNA, 1182 bp, synthetic construct
  misc_feature 1..1182: note = Variant of terminal deoxynucleotidyl transferase
  source 1..1182: mol_type = other DNA
atgcatcaccaccatcatcatgggggttctggtcatccgccgagcaataccccggagaaggaggtgccgagcgttatcgcccgtccggttagttgctacgcgtgccagcgcaagaccacgctgaataactacaacaaaaagttcaccgacgcgctggagatcatggccgagaactacaaatttaaagagaacctgcaggcgtgtctggaagccaagcgcgccgcgagtattctgaaaagcctgccgttcgaggttaccagcatgaaagacatccaaggtctgccgtgcattaccgacgacgtacgtgacgtgatccgcgagatcatcgaagagggcgagagcagccgtgttaaagaaatcctcaatgacgagcgctacaaggcctttaagcagttcaccagcgtgttcggtgtgggcgtgaaaacctcggaaaagtggtaccgtatgggcctccgtacggttgaagaagcaaaggccagtaagagtctgaagctgagcaagatgcagaaggcgggcttcctgtattacgaggatctggcgagcatggttagtaaagaagaagccgatgccgttacgctcatcgtgaaggaaacggtggcaaccgttgtgccggatgcgctggtgaccatcgccggcggtttccgccgtggcaaacctatgggccacgacgttgacctgctgatcacgaacccgggccgtaaagaagatgacgagctgctccacaaagtggttgatctgctcaagaagcaaggtctgctgctgtacgaagacatccgtgagagcacgttcgtggaggggcaactgccaagtcataagatcgacgccctggacaacttccagaagtgcttcgccattctcaagctgtaccagccgaaggtggataacagtgcggttgggacgagtaagaaaagtgacatggctgaggttaaggattggaaagcggttcgtgtggatctggtgatcacgccattcgagcagttcgcctatgcgctgctcggttggacgggcagcggccaatttcgtcgcgatctgcgtcgctatgcggaggaagagcgcgacatgctgctcgacaaccatcgtctctacgacctgaaaaagggcatctttctgagtgcgaatagcgaagaagagattttcgcgcatctgggtctggattatctggagccgtgggaacgcaacgcg

SEQ ID NO: 3588 - protein, 394 aa, synthetic construct
  REGION 1..394: note = Variant of terminal deoxynucleotidyl transferase
MHHHHHHGGSGHPPSNTPEKEVPSVIARPVSCYACQRKTTLNNYNKKFTDALEIMAENYKFKENLQACLEAKRAASILKSLPFEVTSMKDIQGLPCITDDVRDVIREIIEEGESSRVKEILNDERYKAFKQFTSVFGVGVKTSEKWYRMGLRTVEEAKASKSLKLSKMQKAGFLYYEDLASMVSKEEADAVTLIVKETVATVVPDALVTIAGGFRRGKPMGHDVDLLITNPGRKEDDELLHKVVDLLKKQGLLLYEDIRESTFVEGQLPSHKIDALDNFQKCFAILKLYQPKVDNSAVGTSKKSDMAEVKDWKAVRVDLVITPFEQFAYALLGWTGSGQFRRDLRRYAEEERDMLLDNHRLYDLKKGIFLSANSEEEIFAHLGLDYLEPWERNA

SEQ ID NO: 3589 - DNA, 1182 bp, synthetic construct
  misc_feature 1..1182: note = Variant of terminal deoxynucleotidyl transferase
  source 1..1182: mol_type = other DNA
atgcatcaccaccatcatcatgggggttctggtcatccgccgagcaataccccggagaaggaggtgccgagcgttatcgcccgtccggttagtcagtacgcgtgccagcgcaagaccacgctgaataactacaacaaaaagttcaccgacgcgctggagatcatggccgagaactacaaatttaaagagaacctgcaggcgtgtctggaagccaagcgcgccgcgagtatttttaaaagcctgccgttcgaggttaccagcatgaaagacatccaaggtctgccgtgcattaccgacgacgtacgtgacgtgatcgaggagatcatcgaagagggcgagagcagccgtgttaaagaaatcctcaatgacgagcgctacaaggcctttaagcagttcaccagcgtgttcggtgtgggcgtgaaaacctcggaaaagtggtaccgtatgggcctccgtacggttgaagaagcaaaggccagtaagagtctgaagctgagcaagatgcagaaggcgggcttcctgtattacgaggatctggcgagcatggttagtaaagaagaagccgatgccgttacgctcatcgtgaaggaaacggtgcgtaccgttgtgccggatgcggaagtgaccatcgccggcggtttccgccgtggcaaacctatgggccacgacgttgactttctgatcacgaacccgggccgtaaagaagatgacgagctgctccacaaagtggttgatctgctcaagaagcaaggtctgctgctgtacgaagacatccgtgagagcacgttcgtggaggggcaactgccaagtcagaaaatcgacgccctggacaactttcagaagtgcttcgccattctcaagctgtaccagccgaaggtggataacagtgcggttgggacgagtaagaaaagtgacatggctgaggttaaggattggaaagcggttcgtgtggatctggtgatcacgccattcgagcagttcgcctatgcgctgctcggttggacgggcagcggccaatttcgtcgcgatctgcgtcgctatgcggaggaagagcgcgacatgctgctcgacaaccatcgtctctacgacctgaaaaagggccagtttctgagtgcgggcagcgaagaagagattttcggtcatctgggtctggattatctggagccgtgggaacgcaacgcg

SEQ ID NO: 3590 - protein, 394 aa, synthetic construct
  REGION 1..394: note = Variant of terminal deoxynucleotidyl transferase
MHHHHHHGGSGHPPSNTPEKEVPSVIARPVSQYACQRKTTLNNYNKKFTDALEIMAENYKFKENLQACLEAKRAASIFKSLPFEVTSMKDIQGLPCITDDVRDVIEEIIEEGESSRVKEILNDERYKAFKQFTSVFGVGVKTSEKWYRMGLRTVEEAKASKSLKLSKMQKAGFLYYEDLASMVSKEEADAVTLIVKETVRTVVPDAEVTIAGGFRRGKPMGHDVDFLITNPGRKEDDELLHKVVDLLKKQGLLLYEDIRESTFVEGQLPSQKIDALDNFQKCFAILKLYQPKVDNSAVGTSKKSDMAEVKDWKAVRVDLVITPFEQFAYALLGWTGSGQFRRDLRRYAEEERDMLLDNHRLYDLKKGQFLSAGSEEEIFGHLGLDYLEPWERNA

SEQ ID NO: 3591 - DNA, 1182 bp, synthetic construct
  misc_feature 1..1182: note = Variant of terminal deoxynucleotidyl transferase
  source 1..1182: mol_type = other DNA
atgcaccatcatcatcatcatggcggtagcggccatccgccgagcaataccccggagggggaggtgccgagcgttatcgcccgcaaggttagtcagtacagctgccagcgcaagaccacgctgaataactacaacaaaaagtttaccgacgcgctggagatcatggccgagaactacaaatttaaagagaacctgatcgcgtgtctggaagccaagcgcgccgcgagtattctgaaatatctgccgttcccggttaccagcatgaaagacatccaaggtctgccgtgcattggcgaccaagttcgtgacgtgatcgaggagatcatcgaagagggcgagagcagccgtgttaaagaagttctcaatgacgagcgctacaaggcctttaagcagttcaccagcgtgttcggtgtgggcgtgaaaaccagcgaaaagtggtttcgtatgggcctccgtacggttgaagaggcaaaggccagtaagagtctgaagctgagcaagatgcagaaggcgggcttcctgtattacgaggatctggcgagccgcgttagtaaagaagaagccgatgccgttacgctcatcgtgaagaacacggtgcgtacctttctgccggatgcgctggtgaccatcaccggcggtttccgccgtggcaaacctatgggccacgacatcgactttctgatcacgaatccgggcccgaaagaggatgacgagctgctccacaaagtggttgatctgctcaagaagcaaggtctgctgctgtacgaagacatcaaagagagcacgttcgtggaggaacaactgccaagtcgcaaaatcgacgccatggacaacttccagaagtgcttcgccattctcaagctgtaccagccgggcgtggataacagcagctataacacgagtaagaagagtgacatggccgaggttaaggattggaaagcgattcgtgtggatctggtgatcacgccattcgagcagtacgcctatgcgctgctcggttggacgggcagcaaagaatttagtcgcgatctgcgccgctatgcggaggaagagcgcggcatgatcctcgacaaccatgccctctacgaccgcaaaaagcgcatctttctgaaagcgggcagcgaagaagagattttcgcgcatctgggtctggattatgtggagccgtgggaacgcaacgcg

SEQ ID NO: 3592 - protein, 394 aa, synthetic construct
  REGION 1..394: note = Variant of terminal deoxynucleotidyl transferase
MHHHHHHGGSGHPPSNTPEGEVPSVIARKVSQYSCQRKTTLNNYNKKFTDALEIMAENYKFKENLIACLEAKRAASILKYLPFPVTSMKDIQGLPCIGDQVRDVIEEIIEEGESSRVKEVLNDERYKAFKQFTSVFGVGVKTSEKWFRMGLRTVEEAKASKSLKLSKMQKAGFLYYEDLASRVSKEEADAVTLIVKNTVRTFLPDALVTITGGFRRGKPMGHDIDFLITNPGPKEDDELLHKVVDLLKKQGLLLYEDIKESTFVEEQLPSRKIDAMDNFQKCFAILKLYQPGVDNSSYNTSKKSDMAEVKDWKAIRVDLVITPFEQYAYALLGWTGSKEFSRDLRRYAEEERGMILDNHALYDRKKRIFLKAGSEEEIFAHLGLDYVEPWERNA

SEQ ID NO: 3593 - DNA, 1563 bp, synthetic construct
  misc_feature 1..1563: note = Orthologs of terminal deoxynucleotidyl transferase
  source 1..1563: mol_type = other DNA
atgcaccatcatcatcatcatggcggtagcggcatggatcccttacaagctgtacacctaggacctcgcaagaaacgtccgcgtcaaaccggtgcgtctggcgcctccactccgcatgatatccgtttccgcgacctggttctgttcatcctggaaaaaaagatgggcaccacccgtcgggcgttcctgatggagctggcgcgtcgaaagggttttcgcgtggagaacgagttgtcggatagcgtgactcacatcgtggccgagaacaacagtggctcagacgtgttggagtggctgcagcttcagaatatcaaagcgtcctccgagttcgagctgttggacatcagctggctgatcgagtgtatgggtgctggcaagccggttgaaatggcaggccgtcatcagctggtcgtgcgtcgcaacccgagcctgagcccggtgccgggtagccaaaccgttccaccgccgctgatgcagaagattagccagtatgcctgtcagcgtcgtaccactctgaataaccataaccagttgttcaccgatgcatttgatatcctggcggagaactatgaattccgcgaaaatgaagtctcttgtctgccgttcatgcgtgctgctagcgttctgaaaagccttagctttccgattgtttctatgaaggatatcgagggtattccgtgcctgggcgataaagtaaaatgcgtaattgaaggcatcatcgaggacggtgagtcgtcggaggttaaagctgtcctgaatgatgaacgttacaagtccttcaaattatttacctcagtttttggggtgggtttgaagaccgcagaaaaatggtttaggatgggtttccgtacgctgtccaaaatcaaaagcgacaagagcctgcgcttcacgcacatgcagaaggctggctttctgtactacgaggacttggtgtcttgcgttaacagagcagaagcggaggcggtgtctatgttagtgaaggaggccgttgtagcgtttttgccagacgcgctggtcaccatgacgggcggtttccgccgcggtaagatgacgggccatgacgttgacttcctgatcacctccccggaagcgacggaagaggaagaacagcaattgctccacaaagttaccaatttttggcgtcaacaaggcctgctgctctactgcgatatcattgagtcgaccttcgaaaagtttaagctgccgagccgtaaggtggatgctctggatcattttcaaaagtgctttctgattttaaagttgcaccgcggtctcgtgcgtagcgaagaaagcggtcagcaagaaggtaaggactggaaagcgattcgtgttgacttggtcatgtgcccgtatgagcgtcgtgcgttcgccctgttgggttggaccggctctagacaatttgagcgtgatctgcgtcgctacgcaacccacgagcgcaaaatgatgctggacaaccacgcgctatacgataaaaccaaacgcgttttcctggaagccgagagcgaagaggaaatttttgcgcacctgggtctcgactatattgagccgtgggagcgtaacgca

SEQ ID NO: 3594 - protein, 521 aa, synthetic construct
  REGION 1..521: note = Orthologs of terminal deoxynucleotidyl transferase
MHHHHHHGGSGMDPLQAVHLGPRKKRPRQTGASGASTPHDIRFRDLVLFILEKKMGTTRRAFLMELARRKGFRVENELSDSVTHIVAENNSGSDVLEWLQLQNIKASSEFELLDISWLIECMGAGKPVEMAGRHQLVVRRNPSLSPVPGSQTVPPPLMQKISQYACQRRTTLNNHNQLFTDAFDILAENYEFRENEVSCLPFMRAASVLKSLSFPIVSMKDIEGIPCLGDKVKCVIEGIIEDGESSEVKAVLNDERYKSFKLFTSVFGVGLKTAEKWFRMGFRTLSKIKSDKSLRFTHMQKAGFLYYEDLVSCVNRAEAEAVSMLVKEAVVAFLPDALVTMTGGFRRGKMTGHDVDFLITSPEATEEEEQQLLHKVTNFWRQQGLLLYCDIIESTFEKFKLPSRKVDALDHFQKCFLILKLHRGLVRSEESGQQEGKDWKAIRVDLVMCPYERRAFALLGWTGSRQFERDLRRYATHERKMMLDNHALYDKTKRVFLEAESEEEIFAHLGLDYIEPWERNA

SEQ ID NO: 3595 - DNA, 1551 bp, synthetic construct
  misc_feature 1..1551: note = Orthologs of terminal deoxynucleotidyl transferase
  source 1..1551: mol_type = other DNA
atgcaccatcatcatcatcatggcggtagcggcatggaaagaataaggcccccaacagttgtatcccagcgcaagcgtcagaaaggcatgtattcgccgaaactgagctgtggttatgagatcaaattcaacaaattagtgatcttcattatgcaacgcaagatgggcatgacccgtcgcacctttttgatggaacttgccagaagcaagggcttccgcgtggagtctgaactctctgatagcgtgacccacatcgtggcagaaaacaacagctacccggaagtgctggactggctgaagggccaagcggtgggcgatagctctcgttttgagattctggacatcagctggttgaccgcctgcatggaaatgggtcgcccagtagacctggaaaaaaaatatcatctggtggagcaggcaggtcagtacccgaccctgaagaccccggaatccgaggtctcctcgttcactgcgtccaaagtttcgcaatacagctgtcagcgtaaaacgaccttaaataactgcaacaaaaagttcacggatgcgtttgagatcatggcggagaactatgagttcaaagagaacgaaatcttctgcctggaattcctgcgtgcggcaagtgtgctgaagagcctgccgtttccggtgacgcgtatgaaagacatccagggtttaccgtgtatgggcgatcgtgttcgtgatgttattgaggaaatcatcgaagaaggtgaaagcagcagagcgaaagacgtgctgaatgatgaacgttataaaagctttaaagagttcacttcagttttcggcgttggcgtgaagacgagcgagaaatggtttcgtatgggtctgcgcaccgtagaagaggttaaggctgataaaaccttgaagcttagcaagatgcagcgtgcgggctttttgtactacgaggacctcgttagctgcgtttccaaggcggaggcagacgcggtttcttctatcgtgaagaacaccgtttgtacctttctgccggatgctctggtcacaattaccggtggtttccgccgtggtaaaaaaattggtcatgatattgattttctgattaccagcccgggtcaacgcgaagacgacgagttgctgcacaaaggcctgttgctgtactgcgatatcatcgaatccaccttcgtgaaagaacaaattccgagccgtcacgttgacgctatggatcactttcaaaaatgctttgcgattctgaagctgtaccagccgcgtgtcgacaactcctcgtacaatatgagcaagaagtgcgacatggccgaggttaaggactggaaagccatccgcgtggatctggttatcacgccgttcgagcaatacgcgtatgccttgctgggttggaccggtagccgccagtttggtcgtgatttgagacgttatgctacccacgagcgtaagatgatgctggacaatcatgcgctgtacgataagcgcaagcgtgtgtttttgaaggcaggcagcgaagaagagattttcgcgcatctgggtttggactatgttgagccttgggaacgtaatgct

SEQ ID NO: 3596 - protein, 517 aa, synthetic construct
  REGION 1..517: note = Orthologs of terminal deoxynucleotidyl transferase
MHHHHHHGGSGMERIRPPTVVSQRKRQKGMYSPKLSCGYEIKFNKLVIFIMQRKMGMTRRTFLMELARSKGFRVESELSDSVTHIVAENNSYPEVLDWLKGQAVGDSSRFEILDISWLTACMEMGRPVDLEKKYHLVEQAGQYPTLKTPESEVSSFTASKVSQYSCQRKTTLNNCNKKFTDAFEIMAENYEFKENEIFCLEFLRAASVLKSLPFPVTRMKDIQGLPCMGDRVRDVIEEIIEEGESSRAKDVLNDERYKSFKEFTSVFGVGVKTSEKWFRMGLRTVEEVKADKTLKLSKMQRAGFLYYEDLVSCVSKAEADAVSSIVKNTVCTFLPDALVTITGGFRRGKKIGHDIDFLITSPGQREDDELLHKGLLLYCDIIESTFVKEQIPSRHVDAMDHFQKCFAILKLYQPRVDNSSYNMSKKCDMAEVKDWKAIRVDLVITPFEQYAYALLGWTGSRQFGRDLRRYATHERKMMLDNHALYDKRKRVFLKAGSEEEIFAHLGLDYVEPWERNA

SEQ ID NO: 3597 - DNA, 1560 bp, synthetic construct
  misc_feature 1..1560: note = Orthologs of terminal deoxynucleotidyl transferase
  source 1..1560: mol_type = other DNA
atgcaccatcatcatcatcatggcggtagcggcatggacccaccgcgtgcgtctcacctgagtccacgcaagaaacgccctcgtcagaccggagcacttatggcatcatcaccgcaagacatcaaatttcaggatctggtggtgttcattctcgaaaagaagatgggcacgacgcgtcgtgcgtttttgatggagctggcacgccgcaaagggttccgcgttgaaaacgaactttcggattccgtaacccacattgtcgccgagaataatagcggtagcgacgttctggaatggctgcaggcgcagaaagtgcaagtctcttctcagcccgaattgttggatgtgtcgtggctgatcgaatgcattcgtgcaggcaaaccggttgaaatgacaggcaaacaccaactggtagtacgccgcgactatagtgatagtactaacccaggtccgccgaaaaccccacctatcgctgtgcagaagatttcacaatacgcatgtcagcgtcgtaccaccctcaacaactgcaatcagatctttacggatgccttcgacattcttgcggagaactgtgaatttcgcgagaatgaagatagctgcgtcacttttatgcgtgctgctagcgtgctgaaatccttacccttcacaatcatctccatgaaagataccgaagggattccgtgtttaggcagcaaagttaaaggcattattgaggagatcatcgaagacggagaatcgtcggaagtcaaagcggtgctgaacgatgaacgctatcagagctttaaactgttcacgtccgtgtttggtgttggcctgaagaccagtgagaaatggttccgtatgggttttcgcacgctgtctaaagtccgtagcgacaaatcgctcaaattcactcgcatgcaaaaagcagggtttctgtactacgaagatcttgtttcatgcgtgacacgtgcggaagcggaagcagtatccgtcctggttaaggaagcggtgtgggcgtttttgccggatgcattcgtgaccatgaccggcggttttcgccgcggcaagaagatgggtcacgacgttgatttcctgattacatcgcctggatctacggaggatgaagagcagctgctccagaaagtcatgaatctgtgggaaaagaaaggccttctgctgtattatgacttggtagaaagcacctttgagaaactgcgtttaccgagccgtaaagtggatgctctcgaccacttccagaaatgttttctgatttttaaattaccacgccaacgtgttgattcggatcaaagtagttggcaggaaggtaagacctggaaagcgatccgcgtggaccttgtattatgcccgtatgaacgtcgtgcgttcgcattattggggtggactggctcacgccagtttgagcgcgatttgcgtcgttacgctacgcatgaacgcaagatgattctcgataaccacgcgctttatgacaagaccaaacgcatcttcttgaaagcagaaagcgaagaggagatttttgctcatttaggcctcgattacattgaaccgtgggaacgcaatgca

SEQ ID NO: 3598 - protein, 520 aa, synthetic construct
  REGION 1..520: note = Orthologs of terminal deoxynucleotidyl transferase
MHHHHHHGGSGMDPPRASHLSPRKKRPRQTGALMASSPQDIKFQDLVVFILEKKMGTTRRAFLMELARRKGFRVENELSDSVTHIVAENNSGSDVLEWLQAQKVQVSSQPELLDVSWLIECIRAGKPVEMTGKHQLVVRRDYSDSTNPGPPKTPPIAVQKISQYACQRRTTLNNCNQIFTDAFDILAENCEFRENEDSCVTFMRAASVLKSLPFTIISMKDTEGIPCLGSKVKGIIEEIIEDGESSEVKAVLNDERYQSFKLFTSVFGVGLKTSEKWFRMGFRTLSKVRSDKSLKFTRMQKAGFLYYEDLVSCVTRAEAEAVSVLVKEAVWAFLPDAFVTMTGGFRRGKKMGHDVDFLITSPGSTEDEEQLLQKVMNLWEKKGLLLYYDLVESTFEKLRLPSRKVDALDHFQKCFLIFKLPRQRVDSDQSSWQEGKTWKAIRVDLVLCPYERRAFALLGWTGSRQFERDLRRYATHERKMILDNHALYDKTKRIFLKAESEEEIFAHLGLDYIEPWERNA

SEQ ID NO: 3599 - DNA, 1551 bp, synthetic construct
  misc_feature 1..1551: note = Orthologs of terminal deoxynucleotidyl transferase
  source 1..1551: mol_type = other DNA
atgcaccatcatcatcatcatggcggtagcggcatggaacgcattcgtccgccgaccgtggtgtctcagcgcaaacgtcaaaaaggcatgtatagtccaaagctgtcatgcggctacgagatcaaatttaacaagctcgtcatcttcattatgcagcgcaagatgggtatgacgcgtcgtacctttctgatggaattagcgcgctcgaaaggcttccgcgttgaaagcgagctgtctgatagcgtcactcacattgtggccgagaataattcctatcctgaagtattggactggcttaaaggccaggcagttggtgattcgtcgcgctttgaaatcctggacattagttggctgacagcttgtatggaaatggggcgtccggtggatctggagaagaaataccacctcgtagaacaagcggggcagtatcccaccttgaaaacgccggaatccgaagttagctcatttaccgccagcaaagtcagtcagtactcttgccaacgtaagactacgctgaacaactgtaacaagaaattcaccgatgcgtttgaaatcatggctgagaattatgagttcaaagaaaacgaaattttctgcctggaatttttacgtgccgcatccgtgctgaaaagcttgccatttccggttacacgcatgaaagacattcagggccttccttgtatgggtgatcgcgtgcgtgatgtcatcgaggaaatcattgaagaaggcgaatcatcacgtgcgaaagacgtgctgaatgatgagcgctacaaaagcttcaaagaatttacgagtgtttttggagtaggcgtgaagacctcggagaaatggttccgcatgggtttacgtaccgtcgaagaagttaaagcagataagactctgaaactgtccaagatgcaacgtgcggggttcctctattatgaagaccttgtctcttgcgtgagcaaagccgaagcggatgctgtatcgtccatcgtgaagaacacggtttgtacctttttaccggacgcactggtgaccattactggcggttttcgccgcggcaagaagattggtcacgatatcgatttcctgattacaagtccaggacagcgtgaagacgacgagttgctgcacaaagggctgctgctctactgcgatatcatcgagagcacgttcgtcaaagaacagattccgtctcgtcacgttgatgccatggaccattttcagaaatgctttgcgattctgaaattgtatcaaccgcgcgtggataatagcagctacaacatgtcgaagaaatgtgatatggccgaggtcaaagattggaaagcaattcgcgttgacttagtaatcacgccctttgaacagtatgcgtatgctcttctgggttggaccggctcccgtcaatttggccgcgatctgcgtcgttacgcgacccacgagcgcaagatgatgctcgacaatcatgccctgtacgataaacgcaaacgtgtgttcctgaaagcaggttcagaagaagaaattttcgcgcatttaggcctggattatgtagaaccttgggaacgcaacgca

SEQ ID NO: 3600 - protein, 517 aa, synthetic construct; identical to SEQ ID NO: 3596
  REGION 1..517: note = Orthologs of terminal deoxynucleotidyl transferase

SEQ ID NO: 3601 - DNA, 1563 bp, synthetic construct
  misc_feature 1..1563: note = Orthologs of terminal deoxynucleotidyl transferase
  source 1..1563: mol_type = other DNA
atgcaccatcatcatcatcatggcggtagcggcatggacccactgcaggcggtgcacttaggcccacgcaagaaacgtccgcgtcaactggggacccctgttgcctctactccgtatgacattcgctttcgtgatctcgtactgttcatcctggaaaagaaaatgggcacgacgcgccgcgcatttttaatggagttggctcgtcgcaaaggtttccgtgtcgaaaacgaactgagtgattcggtgacccacattgttgccgagaataattccggctcagacgtgcttgaatggctgcagttgcagaacatcaaagcaagcagcgaactggaactcctcgatatttcgtggctgatcgaatgcatgggagcggggaaacccgtcgagatgatgggtcgccaccaactggtagtgaaccgtaattcttctccaagtccggttccgggctcccagaacgtaccggcgcctgccgtgaagaagatttcacagtacgcgtgtcaacgtcgtaccaccctgaacaactataatcagctgtttacagacgctttggatatccttgcagagaatgatgaactgcgcgaaaacgaaggaagttgccttgcgttcatgcgcgcttcgagcgtcctgaaatccttgccctttccgattactagcatgaaagacacggagggtatcccatgtctgggcgacaaagtgaaaagcattattgaaggcatcatcgaagatggtgagagtagtgaagccaaagcggtcctgaatgatgaacgctacaaatcctttaaattgttcacctcagtgtttggcgttgggctgaagacagcagagaaatggttccgtatgggttttcgtaccctctcgaagattcagagcgataaaagccttcgcttcacgcaaatgcagaaagccggctttctgtattatgaagacctggtttcgtgcgttaaccgtccggaagcggaagctgtgtctatgctggtaaaagaggccgtcgtcacctttcttcctgatgcactggtgactatgacgggaggttttcgccgcggcaagatgaccgggcatgatgtggacttcctcattacatcaccggaagcgaccgaagatgaggagcaacagctgttgcacaaagttactgatttctggaaacagcagggtctgctgctgtactgtgacatcttggaaagcacgtttgagaaattcaaacaaccgtcccgtaaagtggatgcgcttgaccattttcagaaatgctttctgattctcaaactggatcatggccgcgttcactctgaaaaaagcggtcaacaagaaggaaagggctggaaagccatccgtgtcgatttggtgatgtgtccatatgatcgccgcgcattcgcgcttcttggttggaccggctcgcgtcagtttgaacgtgacctgcgtcgctacgctacccatgaacgcaagatgatgctggataatcacgccctgtatgaccgtacgaaacgcgtattcctcgaagcggagtcagaagaagaaatttttgcacatctggggctggattacattgaaccgtgggagcgtaacgct

SEQ ID NO: 3602 - protein, 521 aa, synthetic construct
  REGION 1..521: note = Orthologs of terminal deoxynucleotidyl transferase
MHHHHHHGGSGMDPLQAVHLGPRKKRPRQLGTPVASTPYDIRFRDLVLFILEKKMGTTRRAFLMELARRKGFRVENELSDSVTHIVAENNSGSDVLEWLQLQNIKASSELELLDISWLIECMGAGKPVEMMGRHQLVVNRNSSPSPVPGSQNVPAPAVKKISQYACQRRTTLNNYNQLFTDALDILAENDELRENEGSCLAFMRASSVLKSLPFPITSMKDTEGIPCLGDKVKSIIEGIIEDGESSEAKAVLNDERYKSFKLFTSVFGVGLKTAEKWFRMGFRTLSKIQSDKSLRFTQMQKAGFLYYEDLVSCVNRPEAEAVSMLVKEAVVTFLPDALVTMTGGFRRGKMTGHDVDFLITSPEATEDEEQQLLHKVTDFWKQQGLLLYCDILESTFEKFKQPSRKVDALDHFQKCFLILKLDHGRVHSEKSGQQEGKGWKAIRVDLVMCPYDRRAFALLGWTGSRQFERDLRRYATHERKMMLDNHALYDRTKRVFLEAESEEEIFAHLGLDYIEPWERNA

SEQ ID NO: 3603 - DNA, 1587 bp, synthetic construct
  misc_feature 1..1587: note = Orthologs of terminal deoxynucleotidyl transferase
  source 1..1587: mol_type = other DNA
atgcaccatcatcatcatcatggcggtagcggcatgcaccgcattcgtaccatcgattcggacttcgggaagaaacgccagaagaagatggataaccacattagttccatgatctatgaaatcaaatttcacgagtttgtgctgttcattctcgaaaagaaaatgggtgcgacgcgtcgtacttttctgacagatttagcccgcaagaaagggttccgcgtcgagaatgaactgtcaaacagcgttacccacatcgtggcagaaaataattcaggatctgacgtattggcttggctgaagacccacaagatggagaaaacgacgcaatttgaactgctggatattagctggcttatcgaatgcatgaaagttggtaaaccggtggacaccaaagggaaataccagttgatggaatcgcgtgtcgatagtgcgaacccagatccgacagccggtaccctcaacattctgcctcctactacgaagaccatttctcagtatgcgtgtcaacgccgcaccaccatcaacaaccataatcagcgttttacggacgcattcgaaattcttgcgaagaattacgagttcaaagaaaacgatgatacttgcctgacctttatgcgtgctatttccgtgctgaaatgtcttccgtttgaggtagttagcctgaaagacacggaaggattgccctggatcggtgatgaagtcaaagggattatggaagaaatcatcgaggacggtgaatcgctggaagtgcaggccgtgctcaatgatgagcgctatcaaagcttcaaactgtttaccagtgtctttggagtggggctgaagacagcagacaaatggtaccgtatgggtttccgcacgctcaacaagattcgttccgataagaccctgaaattgaccaagatgcagaaagcgggtctgtgctattatgaagatcttattgattgtgtttcaaaagccgaagctgacgcggtatctctgctggttcaggatgcagtctggactttcttgccggatgcgctggtgactattacgggtggatttcgtcgtgggaaagagtttggtcacgacgttgatttccttatcacatctccgggagctgagaaagaacaagaagaccagctcctgcagaaagtgaccaatctgtggaagaaacaagggttgttgctgtactgcgatctgatcgaaagcacctttgaagatctgaaactcccatcccgcaagattgatgccctggaccatttccagaaatgctttctgatcctcaaactttatcaccataaagaggacaaacgcaaatgggaaatgccgacgggttcgaacgaaagcgaggccaaaagttggaaagcaattcgcgtagatctggttgtttgtccctacgatcgttatgcgtttgcgttgttgggttggagtggaagccgccaattcgaacgtgatctgcgccgctacgccacccacgagaagaagatgatgctggacaatcatgcgctgtatgacaagaccaagaaaatctttctcaaagctaaatcggaagaggaaattttcgcacatctggggcttgaatacattcagccgtccgaacgtaacgca

SEQ ID NO: 3604 - protein, 529 aa, synthetic construct
  REGION 1..529: note = Orthologs of terminal deoxynucleotidyl transferase
MHHHHHHGGSGMHRIRTIDSDFGKKRQKKMDNHISSMIYEIKFHEFVLFILEKKMGATRRTFLTDLARKKGFRVENELSNSVTHIVAENNSGSDVLAWLKTHKMEKTTQFELLDISWLIECMKVGKPVDTKGKYQLMESRVDSANPDPTAGTLNILPPTTKTISQYACQRRTTINNHNQRFTDAFEILAKNYEFKENDDTCLTFMRAISVLKCLPFEVVSLKDTEGLPWIGDEVKGIMEEIIEDGESLEVQAVLNDERYQSFKLFTSVFGVGLKTADKWYRMGFRTLNKIRSDKTLKLTKMQKAGLCYYEDLIDCVSKAEADAVSLLVQDAVWTFLPDALVTITGGFRRGKEFGHDVDFLITSPGAEKEQEDQLLQKVTNLWKKQGLLLYCDLIESTFEDLKLPSRKIDALDHFQKCFLILKLYHHKEDKRKWEMPTGSNESEAKSWKAIRVDLVVCPYDRYAFALLGWSGSRQFERDLRRYATHEKKMMLDNHALYDKTKKIFLKAKSEEEIFAHLGLEYIQPSERNA

SEQ ID NO: 3605 - DNA, 1536 bp, synthetic construct
  misc_feature 1..1536: note = Orthologs of terminal deoxynucleotidyl transferase
  source 1..1536: mol_type = other DNA
atgcaccatcatcatcatcatggcggtagcggcatgaatcatgcgggtatgctggcactcgtgaagaaacgtaaacgcccggttgaagctggagcacagggacaagtcgaggtgaagtttaaagaagtaaccctggaattggttgagcgcaagatgggcagttcgcgtcgtaacttcttaacgcgccttgcgcgctccaaagggtttcgtgtggaagatgtcctgtcagacgacgttactcacgtggtggccgaagataaccaggccgaagtattatgggcgtggctgatggggcacggtctgcgcgatgtctctcgtctggctttgctcgacattagctggttcaccgatagtatgcgtgagggtcgtccagttcgcgtagaaacgcgccacagcatccagaatacacctaccgggaccgattgctcaccgccgactgccgttgcaaacgtgtcgcaatatgcttgtcagcgccgtacgacgaccgagaatcacaacaacaagatttttaccgatgtcatggaagaactggcggaatcttccgagttcaatgaaagcaaaggaccctgccttgcgtttcgtcaagccgcctccgtgctgaaaagcttaccgagtgcagttcactgtctgaaagctatccagggtttgccatgcctcggtgaacacacaaaagcagtgatggaggagattcttacctttgggcgcagcttcaaagtcgaagaaatccgctgtgacgaacgttaccaggccttgaaattatttacgtctgtgttcggtgtaggaccgaagaccgcagagaaatggtatcgccgtgggctccgctcgcttcaggaaattttgactgaacctaacatccaactcaatcgtatgcagcgtgccggttttctttactactcggatatttccaaagctgtcagcaaagccgaagcaaaagctgttgggtgcatcatcgaagataccttccattggattgcaccggacgccattttagccttaacgggtggttttcgtcgtggaaaagagtatgggcatgatgtggacttcttgttgactatgccggagatcggaaaagatgaaggtttacttcttcacgtgattgatcgtctcaaagaccagggtatcctcctctattgcgattatcaaggaagtacctttgacgtctcaaaattgccctcttgtcgcttcgaagatatggattgctttcagaagtgtttccttatcttacgcttggaacaaggtcaggttgaaggtgaacgtgggttacagcgcgatccaggagatagtcgtggttggcgtgctgtacgcgttgacttagtagcacctccggtcgatcgctacgcttttgcactcttggggtggactgggagccgttttggtcgtgatttgcgcaccttcgcccagaaagaacgccagatgctcctcgacaaccatgccctttatgacaagacaaagaaattgtgccttttagctacgacggaggaggacatttttacccatcttggtttggaatacgttgaaccgtggcaacgcaatgca

SEQ ID NO: 3606 - protein, 512 aa, synthetic construct
  REGION 1..512: note = Orthologs of terminal deoxynucleotidyl transferase
MHHHHHHGGSGMNHAGMLALVKKRKRPVEAGAQGQVEVKFKEVTLELVERKMGSSRRNFLTRLARSKGFRVEDVLSDDVTHVVAEDNQAEVLWAWLMGHGLRDVSRLALLDISWFTDSMREGRPVRVETRHSIQNTPTGTDCSPPTAVANVSQYACQRRTTTENHNNKIFTDVMEELAESSEFNESKGPCLAFRQAASVLKSLPSAVHCLKAIQGLPCLGEHTKAVMEEILTFGRSFKVEEIRCDERYQALKLFTSVFGVGPKTAEKWYRRGLRSLQEILTEPNIQLNRMQRAGFLYYSDISKAVSKAEAKAVGCIIEDTFHWIAPDAILALTGGFRRGKEYGHDVDFLLTMPEIGKDEGLLLHVIDRLKDQGILLYCDYQGSTFDVSKLPSCRFEDMDCFQKCFLILRLEQGQVEGERGLQRDPGDSRGWRAVRVDLVAPPVDRYAFALLGWTGSRFGRDLRTFAQKERQMLLDNHALYDKTKKLCLLATTEEDIFTHLGLEYVEPWQRNA

SEQ ID NO: 3607 - DNA, 1554 bp, synthetic construct
  misc_feature 1..1554: note = Orthologs of terminal deoxynucleotidyl transferase
  source 1..1554: mol_type = other DNA
atgcaccatcatcatcatcatggcggtagcggcatgaatccgctgtctcagtcggcgttggtgccactgcgtaagaaagcgaaaatggcaccgatttcccaaagcttctgccagcacaacgtcaaatttaaagaaatcgtactctttctggttgagcgcaagatgggcagtagtcgtcgtaccttccttatggaactggctcgcaaacgcggctttcagacggaaattgagctgagcgattcggtgactcacatcgttgcggaaaacaactctggcgccgaagtgttagagtggctgcagtccaagaaattggggttcaccgtcaagacacacattctggacatcagctggtttaccgagtgtatggaagcaggtcgtcccgtggaaatccaaaatcgccacctcttacctgttcagcaggattgctctgcgaattttaacccgccgctgtcatcgtcatgtgtccaagtgagccagtatgcttgccaacgctgtacgacgcttcaggataccaaccgtattttcactgacgccttcgatattctggcggaacactttgaattctgcgagaataaaggccgtaccgtagcatttttacgcgcgagttccctgatcaaaagcctgccattcccgattacagccatgaaagaacttgaagggttgccttggctgggtgaccagatgaaaggcattatcgaagaaattctggaagagggcaagtcgtacaaagttctggaagtgatgaacgaagagcgctataaatcctttaaacaatttaccagtgtctttggtgtaggactgaagacgagcgataaatggttccgtatgggctttcgcaccctggaagaaatcaagaacgagaaagaactcaaactgacgaagatgcagaaatgcggtctcctgtactacgaagatattacctcgtatgtgtcacgtgctgaagcggaaacaactgagcagctgatcaaaagcattgtctggaaattcgttccggacgccatcgtgaccttgactggtgggtttcgccgcggcaagaagaaaggccatgatgtggacattttgattacctgtgcacgtaaagggaaagagaagaatatcctgcacaatacgatgtcagttttgaaaaaccgtggtctgcttctgttctataatatcattgaatccacctttgatgaaacgaaactgccctctcgccatgtagatgcgcttgaccacttccagaaatgctttaccatcctgaaattgccgaaacgtcaaatggatattggcaacattatcgatccacatgaatgtgaacgcaagaattggaaagccgttcgtcttgacctggtgattactccgtatgagcaatacccttatgcactgctcggatggacaggtagtcgccagtttgaacgtgatctgcgccgctacgcgacccatgagaaacgtatgatgctggataaccacggcctctatgacaagacgaagaataatttcttgaaagctaacaacgaagaagatatctttaaacagctgggtcttgactacttggaaccgtgggaacgtaacgct

SEQ ID NO: 3608 - protein, 518 aa, synthetic construct
  REGION 1..518: note = Orthologs of terminal deoxynucleotidyl transferase
MHHHHHHGGSGMNPLSQSALVPLRKKAKMAPISQSFCQHNVKFKEIVLFLVERKMGSSRRTFLMELARKRGFQTEIELSDSVTHIVAENNSGAEVLEWLQSKKLGFTVKTHILDISWFTECMEAGRPVEIQNRHLLPVQQDCSANFNPPLSSSCVQVSQYACQRCTTLQDTNRIFTDAFDILAEHFEFCENKGRTVAFLRASSLIKSLPFPITAMKELEGLPWLGDQMKGIIEEILEEGKSYKVLEVMNEERYKSFKQFTSVFGVGLKTSDKWFRMGFRTLEEIKNEKELKLTKMQKCGLLYYEDITSYVSRAEAETTEQLIKSIVWKFVPDAIVTLTGGFRRGKKKGHDVDILITCARKGKEKNILHNTMSVLKNRGLLLFYNIIESTFDETKLPSRHVDALDHFQKCFTILKLPKRQMDIGNIIDPHECERKNWKAVRLDLVITPYEQYPYALLGWTGSRQFERDLRRYATHEKRMMLDNHGLYDKTKNNFLKANNEEDIFKQLGLDYLEPWERNA

SEQ ID NO: 3609 - DNA, 1560 bp, synthetic construct
  misc_feature 1..1560: note = Orthologs of terminal deoxynucleotidyl transferase
  source 1..1560: mol_type = other DNA
atgcaccatcatcatcatcatggcggtagcggcatggaccctctgtgtaccgcgagttctgggccacgcaagaaacgtccgcgtcaggtgggcgcatcaatggcctcgccgcctcacgacatcaaatttcaaaacctcgtcctgttcattctggaaaagaaaatgggtactactcgccgcaattttttaatggagctggcgcgtcgtaaaggattccgcgtggaaaacgaattgtccgatagcgttacgcacattgtagccgagaataatagcgggagtgaagttcttgaatggttacaggtgcagaacatccgtgcttcgtcgcaactggaactgctggatgtctcatggctcattgagtctatgggtgcaggtaaacccgtggaaatcaccgggaaacaccagttggttgtacgcacagactatagtgctaccccgaacccaggttttcagaaaaccccgccgctggcggtcaagaagattagccaatacgcatgccagcgcaagacgacgctgaacaactataatcacatcttcaccgatgcctttgaaattcttgcggagaattccgagttcaaagaaaacgaagtgagctacgtgacctttatgcgtgcggcgtccgttctgaaaagcctgccttttacgatcatctccatgaaagacactgaaggaattccgtgcctgggtgataaagtcaagtgtattattgaggaaatcatcgaagatggagaatcgtctgaggttaaagccgtgttgaatgacgaacgctatcagagcttcaaactctttacctcagtctttggtgtggggctgaagacaagcgagaaatggttccgtatggggtttcgctcgctttccaagattatgagcgataagacgctgaaattcaccaagatgcagaaagctggtttcttgtactacgaagatctggtatcttgcgttacccgtgccgaagcagaagcggtgggagtcctggtaaaagaagcagtctgggcttttttaccagacgcgtttgtgacaatgacgggtggttttcgtcgcgggaagaagattgggcacgatgtggacttccttatcacctctcctggaagtgcagaggatgaagaacaattactcccgaaagtcattaacctgtgggagaagaaaggtctgctgctgtattatgatttggtggaaagcactttcgagaaatttaaattaccgagtcgccaagttgacaccctcgatcatttccagaaatgttttctgatcctgaaattacatcaccagcgtgtagattcatcgaaatccaatcaacaggaaggtaagacgtggaaagcgattcgcgttgacttggtaatgtgcccctatgaaaaccgtgcctttgcattacttggatggaccgggagtcgccagttcgaacgtgatattcgtcgttacgcgactcatgagcgcaagatgatgctggacaatcacgccctgtatgataagacaaaacgcgtgtttctcaaagctgaaagcgaagaagagatctttgcgcatcttggtctggattacattgaaccatgggaacgcaacgca

SEQ ID NO: 3610 - protein, 520 aa, synthetic construct
  REGION 1..520: note = Orthologs of terminal deoxynucleotidyl transferase
MHHHHHHGGSGMDPLCTASSGPRKKRPRQVGASMASPPHDIKFQNLVLFILEKKMGTTRRNFLMELARRKGFRVENELSDSVTHIVAENNSGSEVLEWLQVQNIRASSQLELLDVSWLIESMGAGKPVEITGKHQLVVRTDYSATPNPGFQKTPPLAVKKISQYACQRKTTLNNYNHIFTDAFEILAENSEFKENEVSYVTFMRAASVLKSLPFTIISMKDTEGIPCLGDKVKCIIEEIIEDGESSEVKAVLNDERYQSFKLFTSVFGVGLKTSEKWFRMGFRSLSKIMSDKTLKFTKMQKAGFLYYEDLVSCVTRAEAEAVGVLVKEAVWAFLPDAFVTMTGGFRRGKKIGHDVDFLITSPGSAEDEEQLLPKVINLWEKKGLLLYYDLVESTFEKFKLPSRQVDTLDHFQKCFLILKLHHQRVDSSKSNQQEGKTWKAIRVDLVMCPYENRAFALLGWTGSRQFERDIRRYATHERKMMLDNHALYDKTKRVFLKAESEEEIFAHLGLDYIEPWERNA

SEQ ID NO: 3611 - DNA, 1563 bp, synthetic construct
  misc_feature 1..1563: note = Orthologs of terminal deoxynucleotidyl transferase
  source 1..1563: mol_type = other DNA
atgcaccatcatcatcatcatggcggtagcggcatgtatgcgtttccgaccacccgtattgccccacgccgcaaacagccgaagtgcatcaaacctcccaaatgtacgtcgaaatacgatatcaagttcaaagacattgcaatctatattctggaacgtaagatgggagctagtcgccgctactttttaatggagctggcgcgtaagaaaggcttccgtgtggaaccggatttgtccgaatacgtcactcacgttgtttctgagaagaactcaggcgccgaagtactggaatggctccaagcgaagaaagcagggagcatcccaaatgtggccattctggacatttcgtggtttacggattgcatgggtgcaggccagccggtggaaatcgagcgtaaacaccgccttaccctgcagaagatttgtgtctgcaaaagccctagtccggtagttccgtctcgcgtgggtgtgtcgcaatatgcgtgtcagcgcaagacaacactggataacaagaataccttgttcactgacgcgtttgaaatcctggctgagaactatgaattccgtgaaaatgaacgttcctgcctcagctttcgtcaagccgcctcagtcctgaaaagccttacgtttaccattgctgggatggcggatgttgatggcttaccgggtttcggcgaccacattcgcgcagtgatcgaggatctgattgaagatggagaatcctccaaagtcagtgaggtactgaacgacgaagtgtatcgcagcctgaaattgtttaccaccatcttcggtgttggcttacgtactgctgagaaatggcatcgcctggggattcgtacgctcgaagaaatcaaaagtaatgaaaacctgaaattctcgaagatgcagattgcgggccttcagcactacgaggatatcttaggaggtgtgcgcaaagcagaagcggatgccgttgcgatggtcgtccgtgacgccgtgtggacgtttctgccagatgcagtagttaccctgaccggtggttttcgtcgcgggaacaaaacaggccatgacgtggatatgctcattactagccccattcagggcaaagagaaagaactgctgcacaaagtgatcaatctgtggaagaaacaagacttgcttttgtgtcatacgattcacgaatcaaccatggatgaagataacctgccgtcgaaaagcgttaatttactggaccattttcagaaatgcttcgcgatcctgaaatcaaaccaacatcgcggcgaaattagtagttgcgatggtcctcacgattcccgtgagcgcggcaaacgtatctggaaagccattcgcgtagacctcgtcttctgtccgtttgaacagtatgcttttgcgttgttaggatggaccggtagccgtcagtttgaacgcgatctgcgtcgttacgcaagccacgagaagaagatgatgatcgacaatcatgccctgtatgataagacgaaacgcgtgttcgtgaaatgcgaatccgaagaggagatttttggtcatctgggtctggaatacatcgatccggttgaacgtaacgct

SEQ ID NO: 3612 - protein, 521 aa, synthetic construct
  REGION 1..521: note = Orthologs of terminal deoxynucleotidyl transferase
MHHHHHHGGSGMYAFPTTRIAPRRKQPKCIKPPKCTSKYDIKFKDIAIYILERKMGASRRYFLMELARKKGFRVEPDLSEYVTHVVSEKNSGAEVLEWLQAKKAGSIPNVAILDISWFTDCMGAGQPVEIERKHRLTLQKICVCKSPSPVVPSRVGVSQYACQRKTTLDNKNTLFTDAFEILAENYEFRENERSCLSFRQAASVLKSLTFTIAGMADVDGLPGFGDHIRAVIEDLIEDGESSKVSEVLNDEVYRSLKLFTTIFGVGLRTAEKWHRLGIRTLEEIKSNENLKFSKMQIAGLQHYEDILGGVRKAEADAVAMVVRDAVWTFLPDAVVTLTGGFRRGNKTGHDVDMLITSPIQGKEKELLHKVINLWKKQDLLLCHTIHESTMDEDNLPSKSVNLLDHFQKCFAILKSNQHRGEISSCDGPHDSRERGKRIWKAIRVDLVFCPFEQYAFALLGWTGSRQFERDLRRYASHEKKMMIDNHALYDKTKRVFVKCESEEEIFGHLGLEYIDPVERNA

SEQ ID NO: 3613 - DNA, 1539 bp, synthetic construct
  misc_feature 1..1539: note = Orthologs of terminal deoxynucleotidyl transferase
  source 1..1539: mol_type = other DNA
atgcaccatcatcatcatcatggcggtagcggcatggatctgctgcaggcgccgcattcaggcccacgcaagaaacgtccgcgtaaagcaggagccttgatggtgtccggcgctcacgaagttcgctttggtgaccttgtcctgttcattcttgaaaagaaaatggggagtacccgtcgtgcgtttctgatggatttagcccgctcgaaagtgatgctgttgcctcaccttgtagcggaaaacaacagcggcaatgatgttctggaatggctccaagtgcagaatatccaggcatcgtcgcgcctggagctgttagacgtatcttggctgatcgaatgcatgggtgctgggaaaccggtcgaaatgacgcgcaaacaccaattggtggttcgtcgtggctcacccgcctctccgaacccagatgcgcagaagactccgagtcgctccgtccagcgcattagcgagtatgcatgtcaacgtcgtaccaccctgaacaactgcaattacgccttcacaaatgcgtttgaaattctggctgaaaactgtgagttcaaagaaaatgaagacagctatgtgacgtacatccgcgcagcgtctgttctcaaaagcctgccgtttaccattatttccatgaaagatactgaaggtatcccttgcttaggcgatcgcgtgaaatgtatcatcgaggagattattgaagacggagaaagtagtgaagtaaatgccgtcctgaacgatgagcgctataaaagctttaagctgttcacgtccgtgtttggcgttggtctcaagacctcggagaaatggttccgtatggggtttcgtagcctgaacaagattaaatcagacaaaagcttgaaattcacacgcatgcagaaagcgggctttctttactacgaagatttagtgtcatgcgtaacccgtgcagaagccgaagctgtgtctacgctggtcaaagaagcggtttgggcgtttttacccggtgccttcatctctatgactggcggctttcgccgcgggaaagaaattggacacgatgtcgacttcctgatcaccagtccggaaattacggaggatgaagaacagcaggtgctgcataaagttatcaatttgtgggagaacaaaggtctgctgctgtatagcgatcttgtggaatcgacctttgagaaattgaagttaccatcccgtaaagttgacgcgctggatcactttcaaaaatgtttcctcattctgaaactgcatcatcaacgtgaagacaatgaaaagagctcacagcaggaagagaagacatggaaagcaatccgcgtcgatcttgtaatgtgcccgtatgaacgtcgtgcttttgccctgttaggttggaccggctcgcgccaattcgaacgcgatctgcgtcgttatgcaactcacgagcgcaagatgatgctcgataaccatgcgctgtacgacaagacgaaacgcatttttttgaaagccgaatccgaagaagaaattttcgcgcacctgggcctggattatatcgagccttgggaacgcaatgct

SEQ ID NO: 3614 - protein, 513 aa, synthetic construct
  REGION 1..513: note = Orthologs of terminal deoxynucleotidyl transferase
MHHHHHHGGSGMDLLQAPHSGPRKKRPRKAGALMVSGAHEVRFGDLVLFILEKKMGSTRRAFLMDLARSKVMLLPHLVAENNSGNDVLEWLQVQNIQASSRLELLDVSWLIECMGAGKPVEMTRKHQLVVRRGSPASPNPDAQKTPSRSVQRISEYACQRRTTLNNCNYAFTNAFEILAENCEFKENEDSYVTYIRAASVLKSLPFTIISMKDTEGIPCLGDRVKCIIEEIIEDGESSEVNAVLNDERYKSFKLFTSVFGVGLKTSEKWFRMGFRSLNKIKSDKSLKFTRMQKAGFLYYEDLVSCVTRAEAEAVSTLVKEAVWAFLPGAFISMTGGFRRGKEIGHDVDFLITSPEITEDEEQQVLHKVINLWENKGLLLYSDLVESTFEKLKLPSRKVDALDHFQKCFLILKLHHQREDNEKSSQQEEKTWKAIRVDLVMCPYERRAFALLGWTGSRQFERDLRRYATHERKMMLDNHALYDKTKRIFLKAESEEEIFAHLGLDYIEPWERNA

SEQ ID NO: 3615 - DNA, 1563 bp, synthetic construct
  misc_feature 1..1563: note = Orthologs of terminal deoxynucleotidyl transferase
  source 1..1563: mol_type = other DNA
atgcaccatcatcatcatcatggcggtagcggcatggacccactgcaggcggtgcacttaggcccacgcaagaaacgtccgcgtcaaaccggtgcaagtggagcttctacgcctcacgacattcgctttcgtgatctggtcttgttcatcctggaaaagaagatgggcactactcgtcgtgcctttcttatggagctggcacgccgcaaagggttccgcgttgaaaacgaactgtccgattcagtgacccacattgtagcggagaataattcgggaagcgacgttctcgaatggctgcagctccagaacatcaaagcgagtagtgaatttgagttgctggatatttcctggcttatcgaatgcatgggtgcggggaaaccggtggaaatggctggtcgccaccaattagtcgtccgtcgtaacccctctctgagtccggttccaggcagccagacagtacctcctccgcccatgcagaagatttcccaatatgcatgtcagcgtcgcaccaccctgaataatcacaaccagctgtttacggatgcgttcgacatcttggccgagaactacgaatttcgcgaaaacgaagtgtcatgccttccattcatgcgtgcggcgtcggtgctgaaaagcttaagttttccgattgttagcatgaaagatatcgaaggcattccatgtctgggcgacaaagtgaaatgcgtcattgagggcatcatcgaagatggtgagtcttcagaagtaaaagccgtgctgaatgatgaacgctataaatccttcaaactctttacgagtgttttcggcgtggggctgaagaccgctgagaaatggtttcgcatgggttttcgtacactgtcgaagattaaaagcgacaaaagcttacgtttcacccatatgcagaaagcaggcttcctctactacgaagatttggtctcgtgtgttaatcgcgccgaagcggaagccgtgtctatgctggtaaaagaggcagttgttgcttttcttcccgacgcgttggtcacgatgaccggtggttttcgtcgtggcaagatgactgggcacgatgtggatttcctgattaccagtcctgaagcgacggaagaagaagagcaacaactgctgcataaagtgaccaacttctggcgtcagcagggcctgctgctgtattgcgacatcatcgagagcacgtttgagaaatttaaattgccatcacgcaaagtagatgccctcgaccattttcagaaatgtttcctgattcttaaattacaccgcggattagtccgctccgaagaatctggccaacaagaagggaaggattggaaagcaattcgcgtggatctggttatgtgcccctatgaacgtcgtgcgtttgctttattgggttggacaggttcacgccagttcgaacgcgatctgcgtcgttatgccactcatgagcgcaagatgatgctggacaaccacgcgctctacgacaagaccaaacgcgtgtttctggaagcagaaagcgaggaggaaatctttgcccatcttggcctggattatattgaaccttgggaacgcaatgct

SEQ ID NO: 3616 - protein, 521 aa, synthetic construct
  REGION 1..521: note = Orthologs of terminal deoxynucleotidyl transferase
MHHHHHHGGSGMDPLQAVHLGPRKKRPRQTGASGASTPHDIRFRDLVLFILEKKMGTTRRAFLMELARRKGFRVENELSDSVTHIVAENNSGSDVLEWLQLQNIKASSEFELLDISWLIECMGAGKPVEMAGRHQLVVRRNPSLSPVPGSQTVPPPPMQKISQYACQRRTTLNNHNQLFTDAFDILAENYEFRENEVSCLPFMRAASVLKSLSFPIVSMKDIEGIPCLGDKVKCVIEGIIEDGESSEVKAVLNDERYKSFKLFTSVFGVGLKTAEKWFRMGFRTLSKIKSDKSLRFTHMQKAGFLYYEDLVSCVNRAEAEAVSMLVKEAVVAFLPDALVTMTGGFRRGKMTGHDVDFLITSPEATEEEEQQLLHKVTNFWRQQGLLLYCDIIESTFEKFKLPSRKVDALDHFQKCFLILKLHRGLVRSEESGQQEGKDWKAIRVDLVMCPYERRAFALLGWTGSRQFERDLRRYATHERKMMLDNHALYDKTKRVFLEAESEEEIFAHLGLDYIEPWERNA

SEQ ID NO: 3617 - DNA, 1494 bp, synthetic construct
  misc_feature 1..1494: note = Orthologs of terminal deoxynucleotidyl transferase
  source 1..1494: mol_type = other DNA
atgcaccatcatcatcatcatggcggtagcggcatgctgccgagtcgcaaacgcgttcgcgctgaagtttctacctcacagggcggcgagcacgtcaagttttccgatgtgacgttgttcctggttgagaaacgcatgggcaaatcgcgtcgcacctttttaagctctcttgcccgctccaaaggtttctgcgttgacgacgctctgagcggcgcagtaactcacgtggtcagtgaagggctgagtgcgcaagatttatggctctggctggaagatcaggggtttcaggaaacacactcgaaacacgtgctgaacattagctggttcaccgaatcaatgagcgcaggccgtccactgccggtagaagatacgcactgtatccaaaatcctgccgccgaccagcgctcatgcgtgcatctttcggctactccggagtctgcggttagtccctatgcatgtcagcgtcgtaccaccttggaaaaccacaataagatttttacggaagcgctggaggtcctcgcgctgaactccgaatttagcggtaatcaaggttcatgcctgggttttcgccgcgctgccagcgtgttgaaatctttaccggcagcgctgcgttcgccagaagaagccctgcgcctcccgtgtctgggcgataactcgcgtgcggtcttggaggagatctgcgaatgtggtagctcaagtcgcgtggaagagattcagaatgatcaacgttaccgcaccatgaaacttttctgctctgtattcggcgttgggcctaagacagcagaaagctggttttgccgtggcctgaaaacgttcgaacaggtgttaactgaaccgtccatccgtctgaaccgcatgcagaccgccggttttctgttctatgaagacatttctgttcccgtatcacgcgcggaagctgccgcgctcaagatgatgatggaggaggcactgctgtttatcaatccgagtgcgacggtcaccattaccggcggctttcgtcgtgggaaagaattcggtcatgatgtggactttatcatcaaagccccagaaggacaagaagatcgcattcttccggctgtcattaaacgcttcaaaagccagaacgtgctgttgtactcggattttcagaaaagcacttttgacttacgtcaactgcctaaccatcgcttcgaggcgatggatcgctttagcaaatgtttcctgctggttaaattgcagatgcaggaaagtcgtacgggtcgtaattggcgcgcagtgcgtgttgatctcgtagcgccgccgcttgaacgcttcccatatgccttattaggctggacaggttcgaccctgtttgagcgtgacttgcgccgctttgctcgtctcgaacgtggcaagctgctggataaccacaccctgtacgacaaaacgacgaaaacctttcttccggcgaatactgaggaggatattttccaacatctggggctggaatatatcgaaccttggcagcgtaacgca

SEQ ID NO: 3618 - protein, 498 aa, synthetic construct
  REGION 1..498: note = Orthologs of terminal deoxynucleotidyl transferase
MHHHHHHGGSGMLPSRKRVRAEVSTSQGGEHVKFSDVTLFLVEKRMGKSRRTFLSSLARSKGFCVDDALSGAVTHVVSEGLSAQDLWLWLEDQGFQETHSKHVLNISWFTESMSAGRPLPVEDTHCIQNPAADQRSCVHLSATPESAVSPYACQRRTTLENHNKIFTEALEVLALNSEFSGNQGSCLGFRRAASVLKSLPAALRSPEEALRLPCLGDNSRAVLEEICECGSSSRVEEIQNDQRYRTMKLFCSVFGVGPKTAESWFCRGLKTFEQVLTEPSIRLNRMQTAGFLFYEDISVPVSRAEAAALKMMMEEALLFINPSATVTITGGFRRGKEFGHDVDFIIKAPEGQEDRILPAVIKRFKSQNVLLYSDFQKSTFDLRQLPNHRFEAMDRFSKCFLLVKLQMQESRTGRNWRAVRVDLVAPPLERFPYALLGWTGSTLFERDLRRFARLERGKLLDNHTLYDKTTKTFLPANTEEDIFQHLGLEYIEPWQRNA

SEQ ID NO: 3619 - DNA, 1170 bp, synthetic construct
  misc_feature 1..1170: note = Orthologs of terminal deoxynucleotidyl transferase
  source 1..1170: mol_type = other DNA
atgcaccatcatcatcatcatggcggtagcggcagcccgagtccggttccgggtagccagaatgttccggcaccggcagtgaaaaaaatcagccagtatgcatgtcagcgtcgtaccacactgaataactataatcagctgtttaccgatgcgctggatattctggcagaaaatgatgaactgcgtgaaaatgaaggtagctgtctggcatttatgcgtgcaagcagcgttctgaaaagcctgccgtttccgattaccagcatgaaagataccgaaggtattccgtgtctgggtgataaagtgaaaagcattattgaaggcatcatcgaagatggtgaaagcagcgaagcaaaagcagttctgaacgatgaacgttacaaaagcttcaaactgtttaccagcgtttttggtgttggtctgaaaaccgcagaaaaatggtttcgtatgggttttcgtaccctgagcaaaattcagagcgataaaagtctgcgttttacccagatgcagaaagcaggttttctgtattatgaagatctggtgagctgtgttaatcgtccggaagccgaagcagttagcatgctggttaaagaagcagttgttacctttctgccggatgcactggttaccatgaccggtggttttcgtcgtggcaaaatgacaggtcatgatgtggattttctgattacctcaccggaagcaaccgaagatgaagaacagcaactgctgcataaagttaccgatttttggaaacagcagggtctgctgctgtattgtgatatcctggaaagcaccttcgagaaattcaaacagccgagccgtaaagttgatgccctggatcattttcagaagtgttttctgatcctgaaactggatcatggtcgtgttcatagcgaaaaaagcggtcagcaagaaggtaaaggttggaaagcaattcgtgttgatctggttatgtgtccgtatgatcgtcgtgcatttgcactgttaggttggaccggtagccgtcagtttgaacgtgatctgcgtcgttatgcaacccatgaacgtaaaatgatgctggataatcatgcactgtatgatcgcaccaaacgtgtttttctggaagcagaaagcgaagaagaaatctttgcacatctgggccttgattacattgaaccgtgggaacgtaatgca

SEQ ID NO: 3620 - protein, 390 aa, synthetic construct
  REGION 1..390: note = Orthologs of terminal deoxynucleotidyl transferase
MHHHHHHGGSGSPSPVPGSQNVPAPAVKKISQYACQRRTTLNNYNQLFTDALDILAENDELRENEGSCLAFMRASSVLKSLPFPITSMKDTEGIPCLGDKVKSIIEGIIEDGESSEAKAVLNDERYKSFKLFTSVFGVGLKTAEKWFRMGFRTLSKIQSDKSLRFTQMQKAGFLYYEDLVSCVNRPEAEAVSMLVKEAVVTFLPDALVTMTGGFRRGKMTGHDVDFLITSPEATEDEEQQLLHKVTDFWKQQGLLLYCDILESTFEKFKQPSRKVDALDHFQKCFLILKLDHGRVHSEKSGQQEGKGWKAIRVDLVMCPYDRRAFALLGWTGSRQFERDLRRYATHERKMMLDNHALYDRTKRVFLEAESEEEIFAHLGLDYIEPWERNA

SEQ ID NO: 3621 - DNA, 1170 bp, synthetic construct
  misc_feature 1..1170: note = Orthologs of terminal deoxynucleotidyl transferase
  source 1..1170: mol_type = other DNA
atgcaccatcatcatcatcatggcggtagcggcagcctgagcccggtgccgggtagccaaaccgttccaccgccgctgatgcagaagattagccagtatgcctgtcagcgtcgtaccactctgaataaccataaccagttgttcaccgatgcatttgatatcctggcggagaactatgaattccgcgaaaatgaagtctcttgtctgccgttcatgcgtgctgctagcgttctgaaaagccttagctttccgattgtttctatgaaggatatcgagggtattccgtgcctgggcgataaagtaaaatgcgtaattgaaggcatcatcgaggacggtgagtcgtcggaggttaaagctgtcctgaatgatgaacgttacaagtccttcaaattatttacctcagtttttggggtgggtttgaagaccgcagaaaaatggtttaggatgggtttccgtacgctgtccaaaatcaaaagcgacaagagcctgcgcttcacgcacatgcagaaggctggctttctgtactacgaggacttggtgtcttgcgttaacagagcagaagcggaggcggtgtctatgttagtgaaggaggccgttgtagcgtttttgccagacgcgctggtcaccatgacgggcggtttccgccgcggtaagatgacgggccatgacgttgacttcctgatcacctccccggaagcgacggaagaggaagaacagcaattgctccacaaagttaccaatttttggcgtcaacaaggcctgctgctctactgcgatatcattgagtcgaccttcgaaaagtttaagctgccgagccgtaaggtggatgctctggatcattttcaaaagtgctttctgattttaaagttgcaccgcggtctcgtgcgtagcgaagaaagcggtcagcaagaaggtaaggactggaaagcgattcgtgttgacttggtcatgtgcccgtatgagcgtcgtgcgttcgccctgttgggttggaccggctctagacaatttgagcgtgatctgcgtcgctacgcaacccacgagcgcaaaatgatgctggacaaccacgcgctatacgataaaaccaaacgcgttttcctggaagccgagagcgaagaggaaatttttgcgcacctgggtctcgactatattgagccgtgggagcgtaacgca

SEQ ID NO: 3622 - protein, 390 aa, synthetic construct
  REGION 1..390: note = Orthologs of terminal deoxynucleotidyl transferase
MHHHHHHGGSGSLSPVPGSQTVPPPLMQKISQYACQRRTTLNNHNQLFTDAFDILAENYEFRENEVSCLPFMRAASVLKSLSFPIVSMKDIEGIPCLGDKVKCVIEGIIEDGESSEVKAVLNDERYKSFKLFTSVFGVGLKTAEKWFRMGFRTLSKIKSDKSLRFTHMQKAGFLYYEDLVSCVNRAEAEAVSMLVKEAVVAFLPDALVTMTGGFRRGKMTGHDVDFLITSPEATEEEEQQLLHKVTNFWRQQGLLLYCDIIESTFEKFKLPSRKVDALDHFQKCFLILKLHRGLVRSEESGQQEGKDWKAIRVDLVMCPYERRAFALLGWTGSRQFERDLRRYATHERKMMLDNHALYDKTKRVFLEAESEEEIFAHLGLDYIEPWERNA

SEQ ID NO: 3623 - DNA, 1167 bp, synthetic construct
  misc_feature 1..1167: note = Orthologs of terminal deoxynucleotidyl transferase
  source 1..1167: mol_type = other DNA
atgcaccatcatcatcatcatggcggtagcggcagtgatagtactaacccaggtccgccgaaaaccccacctatcgctgtgcagaagatttcacaatacgcatgtcagcgtcgtaccaccctcaacaactgcaatcagatctttacggatgccttcgacattcttgcggagaactgtgaatttcgcgagaatgaagatagctgcgtcacttttatgcgtgctgctagcgtgctgaaatccttacccttcacaatcatctccatgaaagataccgaagggattccgtgtttaggcagcaaagttaaaggcattattgaggagatcatcgaagacggagaatcgtcggaagtcaaagcggtgctgaacgatgaacgctatcagagctttaaactgttcacgtccgtgtttggtgttggcctgaagaccagtgagaaatggttccgtatgggttttcgcacgctgtctaaagtccgtagcgacaaatcgctcaaattcactcgcatgcaaaaagcagggtttctgtactacgaagatcttgtttcatgcgtgacacgtgcggaagcggaagcagtatccgtcctggttaaggaagcggtgtgggcgtttttgccggatgcattcgtgaccatgaccggcggttttcgccgcggcaagaagatgggtcacgacgttgatttcctgattacatcgcctggatctacggaggatgaagagcagctgctccagaaagtcatgaatctgtgggaaaagaaaggccttctgctgtattatgacttggtagaaagcacctttgagaaactgcgtttaccgagccgtaaagtggatgctctcgaccacttccagaaatgttttctgatttttaaattaccacgccaacgtgttgattcggatcaaagtagttggcaggaaggtaagacctggaaagcgatccgcgtggaccttgtattatgcccgtatgaacgtcgtgcgttcgcattattggggtggactggctcacgccagtttgagcgcgatttgcgtcgttacgctacgcatgaacgcaagatgattctcgataaccacgcgctttatgacaagaccaaacgcatcttcttgaaagcagaaagcgaagaggagatttttgctcatttaggcctcgattacattgaaccgtgggaacgcaatgca

SEQ ID NO: 3624 - protein, 389 aa, synthetic construct
  REGION 1..389: note = Orthologs of terminal deoxynucleotidyl transferase
MHHHHHHGGSGSDSTNPGPPKTPPIAVQKISQYACQRRTTLNNCNQIFTDAFDILAENCEFRENEDSCVTFMRAASVLKSLPFTIISMKDTEGIPCLGSKVKGIIEEIIEDGESSEVKAVLNDERYQSFKLFTSVFGVGLKTSEKWFRMGFRTLSKVRSDKSLKFTRMQKAGFLYYEDLVSCVTRAEAEAVSVLVKEAVWAFLPDAFVTMTGGFRRGKKMGHDVDFLITSPGSTEDEEQLLQKVMNLWEKKGLLLYYDLVESTFEKLRLPSRKVDALDHFQKCFLIFKLPRQRVDSDQSSWQEGKTWKAIRVDLVLCPYERRAFALLGWTGSRQFERDLRRYATHERKMILDNHALYDKTKRIFLKAESEEEIFAHLGLDYIEPWERNA

SEQ ID NO: 3625 - DNA, 1158 bp, synthetic construct
  misc_feature 1..1158: note = Orthologs of terminal deoxynucleotidyl transferase
  source 1..1158: mol_type = other DNA
atgcaccatcatcatcatcatggcggtagcggctacccgaccctgaagaccccggaatccgaggtctcctcgttcactgcgtccaaagtttcgcaatacagctgtcagcgtaaaacgaccttaaataactgcaacaaaaagttcacggatgcgtttgagatcatggcggagaactatgagttcaaagagaacgaaatcttctgcctggaattcctgcgtgcggcaagtgtgctgaagagcctgccgtttccggtgacgcgtatgaaagacatccagggtttaccgtgtatgggcgatcgtgttcgtgatgttattgaggaaatcatcgaagaaggtgaaagcagcagagcgaaagacgtgctgaatgatgaacgttataaaagctttaaagagttcacttcagttttcggcgttggcgtgaagacgagcgagaaatggtttcgtatgggtctgcgcaccgtagaagaggttaaggctgataaaaccttgaagcttagcaagatgcagcgtgcgggctttttgtactacgaggacctcgttagctgcgtttccaaggcggaggcagacgcggtttcttctatcgtgaagaacaccgtttgtacctttctgccggatgctctggtcacaattaccggtggtttccgccgtggtaaaaaaattggtcatgatattgattttctgattaccagcccgggtcaacgcgaagacgacgagttgctgcacaaaggcctgttgctgtactgcgatatcatcgaatccaccttcgtgaaagaacaaattccgagccgtcacgttgacgctatggatcactttcaaaaatgctttgcgattctgaagctgtaccagccgcgtgtcgacaactcctcgtacaatatgagcaagaagtgcgacatggccgaggttaaggactggaaagccatccgcgtggatctggttatcacgccgttcgagcaatacgcgtatgccttgctgggttggaccggtagccgccagtttggtcgtgatttgagacgttatgctacccacgagcgtaagatgatgctggacaatcatgcgctgtacgataagcgcaagcgtgtgtttttgaaggcaggcagcgaagaagagattttcgcgcatctgggtttggactatgttgagccttgggaacgtaatgct

SEQ ID NO: 3626 - protein, 386 aa, synthetic construct
  REGION 1..386: note = Orthologs of terminal deoxynucleotidyl transferase
MHHHHHHGGSGYPTLKTPESEVSSFTASKVSQYSCQRKTTLNNCNKKFTDAFEIMAENYEFKENEIFCLEFLRAASVLKSLPFPVTRMKDIQGLPCMGDRVRDVIEEIIEEGESSRAKDVLNDERYKSFKEFTSVFGVGVKTSEKWFRMGLRTVEEVKADKTLKLSKMQRAGFLYYEDLVSCVSKAEADAVSSIVKNTVCTFLPDALVTITGGFRRGKKIGHDIDFLITSPGQREDDELLHKGLLLYCDIIESTFVKEQIPSRHVDAMDHFQKCFAILKLYQPRVDNSSYNMSKKCDMAEVKDWKAIRVDLVITPFEQYAYALLGWTGSRQFGRDLRRYATHERKMMLDNHALYDKRKRVFLKAGSEEEIFAHLGLDYVEPWERNA

SEQ ID NO: 3627 - DNA, 1170 bp, synthetic construct
  misc_feature 1..1170: note = Orthologs of terminal deoxynucleotidyl transferase
  source 1..1170: mol_type = other DNA
atgcaccatcatcatcatcatggcggtagcggctctccaagtccggttccgggctcccagaacgtaccggcgcctgccgtgaagaagatttcacagtacgcgtgtcaacgtcgtaccaccctgaacaactataatcagctgtttacagacgctttggatatccttgcagagaatgatgaactgcgcgaaaacgaaggaagttgccttgcgttcatgcgcgcttcgagcgtcctgaaatccttgccctttccgattactagcatgaaagacacggagggtatcccatgtctgggcgacaaagtgaaaagcattattgaaggcatcatcgaagatggtgagagtagtgaagccaaagcggtcctgaatgatgaacgctacaaatcctttaaattgttcacctcagtgtttggcgttgggctgaagacagcagagaaatggttccgtatgggttttcgtaccctctcgaagattcagagcgataaaagccttcgcttcacgcaaatgcagaaagccggctttctgtattatgaagacctggtttcgtgcgttaaccgtccggaagcggaagctgtgtctatgctggtaaaagaggccgtcgtcacctttcttcctgatgcactggtgactatgacgggaggttttcgccgcggcaagatgaccgggcatgatgtggacttcctcattacatcaccggaagcgaccgaagatgaggagcaacagctgttgcacaaagttactgatttctggaaacagcagggtctgctgctgtactgtgacatcttggaaagcacgtttgagaaattcaaacaaccgtcccgtaaagtggatgcgcttgaccattttcagaaatgctttctgattctcaaactggatcatggccgcgttcactctgaaaaaagcggtcaacaagaaggaaagggctggaaagccatccgtgtcgatttggtgatgtgtccatatgatcgccgcgcattcgcgcttcttggttggaccggctcgcgtcagtttgaacgtgacctgcgtcgctacgctacccatgaacgcaagatgatgctggataatcacgccctgtatgaccgtacgaaacgcgtattcctcgaagcggagtcagaagaagaaatttttgcacatctggggctggattacattgaaccgtgggagcgtaacgct

SEQ ID NO: 3628 - protein, 390 aa, synthetic construct; identical to SEQ ID NO: 3620
  REGION 1..390: note = Orthologs of terminal deoxynucleotidyl transferase

SEQ ID NO: 3629 - DNA, 1197 bp, synthetic construct
  misc_feature 1..1197: note = Orthologs of terminal deoxynucleotidyl transferase
  source 1..1197: mol_type = other DNA
atgcaccatcatcatcatcatggcggtagcggcgatagtgcgaacccagatccgacagccggtaccctcaacattctgcctcctactacgaagaccatttctcagtatgcgtgtcaacgccgcaccaccatcaacaaccataatcagcgttttacggacgcattcgaaattcttgcgaagaattacgagttcaaagaaaacgatgatacttgcctgacctttatgcgtgctatttccgtgctgaaatgtcttccgtttgaggtagttagcctgaaagacacggaaggattgccctggatcggtgatgaagtcaaagggattatggaagaaatcatcgaggacggtgaatcgctggaagtgcaggccgtgctcaatgatgagcgctatcaaagcttcaaactgtttaccagtgtctttggagtggggctgaagacagcagacaaatggtaccgtatgggtttccgcacgctcaacaagattcgttccgataagaccctgaaattgaccaagatgcagaaagcgggtctgtgctattatgaagatcttattgattgtgtttcaaaagccgaagctgacgcggtatctctgctggttcaggatgcagtctggactttcttgccggatgcgctggtgactattacgggtggatttcgtcgtgggaaagagtttggtcacgacgttgatttccttatcacatctccgggagctgagaaagaacaagaagaccagctcctgcagaaagtgaccaatctgtggaagaaacaagggttgttgctgtactgcgatctgatcgaaagcacctttgaagatctgaaactcccatcccgcaagattgatgccctggaccatttccagaaatgctttctgatcctcaaactttatcaccataaagaggacaaacgcaaatgggaaatgccgacgggttcgaacgaaagcgaggccaaaagttggaaagcaattcgcgtagatctggttgtttgtccctacgatcgttatgcgtttgcgttgttgggttggagtggaagccgccaattcgaacgtgatctgcgccgctacgccacccacgagaagaagatgatgctggacaatcatgcgctgtatgacaagaccaagaaaatctttctcaaagctaaatcggaagaggaaattttcgcacatctggggcttgaatacattcagccgtccgaacgtaacgca

SEQ ID NO: 3630 - protein, 399 aa, synthetic construct
  REGION 1..399: note = Orthologs of terminal deoxynucleotidyl transferase
MHHHHHHGGSGDSANPDPTAGTLNILPPTTKTISQYACQRRTTINNHNQRFTDAFEILAKNYEFKENDDTCLTFMRAISVLKCLPFEVVSLKDTEGLPWIGDEVKGIMEEIIEDGESLEVQAVLNDERYQSFKLFTSVFGVGLKTADKWYRMGFRTLNKIRSDKTLKLTKMQKAGLCYYEDLIDCVSKAEADAVSLLVQDAVWTFLPDALVTITGGFRRGKEFGHDVDFLITSPGAEKEQEDQLLQKVTNLWKKQGLLLYCDLIESTFEDLKLPSRKIDALDHFQKCFLILKLYHHKEDKRKWEMPTGSNESEAKSWKAIRVDLVVCPYDRYAFALLGWSGSRQFERDLRRYATHEKKMMLDNHALYDKTKKIFLKAKSEEEIFAHLGLEYIQPSERNA

SEQ ID NO: 3631 - DNA, 1170 bp, synthetic construct
  misc_feature 1..1170: note = Orthologs of terminal deoxynucleotidyl transferase
  source 1..1170: mol_type = other DNA
atgcaccatcatcatcatcatggcggtagcggccagaatacacctaccgggaccgattgctcaccgccgactgccgttgcaaacgtgtcgcaatatgcttgtcagcgccgtacgacgaccgagaatcacaacaacaagatttttaccgatgtcatggaagaactggcggaatcttccgagttcaatgaaagcaaaggaccctgccttgcgtttcgtcaagccgcctccgtgctgaaaagcttaccgagtgcagttcactgtctgaaagctatccagggtttgccatgcctcggtgaacacacaaaagcagtgatggaggagattcttacctttgggcgcagcttcaaagtcgaagaaatccgctgtgacgaacgttaccaggccttgaaattatttacgtctgtgttcggtgtaggaccgaagaccgcagagaaatggtatcgccgtgggctccgctcgcttcaggaaattttgactgaacctaacatccaactcaatcgtatgcagcgtgccggttttctttactactcggatatttccaaagctgtcagcaaagccgaagcaaaagctgttgggtgcatcatcgaagataccttccattggattgcaccggacgccattttagccttaacgggtggttttcgtcgtggaaaagagtatgggcatgatgtggacttcttgttgactatgccggagatcggaaaagatgaaggtttacttcttcacgtgattgatcgtctcaaagaccagggtatcctcctctattgcgattatcaaggaagtacctttgacgtctcaaaattgccctcttgtcgcttcgaagatatggattgctttcagaagtgtttccttatcttacgcttggaacaaggtcaggttgaaggtgaacgtgggttacagcgcgatccaggagatagtcgtggttggcgtgctgtacgcgttgacttagtagcacctccggtcgatcgctacgcttttgcactcttggggtggactgggagccgttttggtcgtgatttgcgcaccttcgcccagaaagaacgccagatgctcctcgacaaccatgccctttatgacaagacaaagaaattgtgccttttagctacgacggaggaggacatttttacccatcttggtttggaatacgttgaaccgtggcaacgcaatgca

SEQ ID NO: 3632 - protein, 390 aa, synthetic construct
  REGION 1..390: note = Orthologs of terminal deoxynucleotidyl transferase
MHHHHHHGGSGQNTPTGTDCSPPTAVANVSQYACQRRTTTENHNNKIFTDVMEELAESSEFNESKGPCLAFRQAASVLKSLPSAVHCLKAIQGLPCLGEHTKAVMEEILTFGRSFKVEEIRCDERYQALKLFTSVFGVGPKTAEKWYRRGLRSLQEILTEPNIQLNRMQRAGFLYYSDISKAVSKAEAKAVGCIIEDTFHWIAPDAILALTGGFRRGKEYGHDVDFLLTMPEIGKDEGLLLHVIDRLKDQGILLYCDYQGSTFDVSKLPSCRFEDMDCFQKCFLILRLEQGQVEGERGLQRDPGDSRGWRAVRVDLVAPPVDRYAFALLGWTGSRFGRDLRTFAQKERQMLLDNHALYDKTKKLCLLATTEEDIFTHLGLEYVEPWQRNA

SEQ ID NO: 3633 - DNA, 1167 bp, synthetic construct
  misc_feature 1..1167: note = Orthologs of terminal deoxynucleotidyl transferase
  source 1..1167: mol_type = other DNA
atgcaccatcatcatcatcatggcggtagcggcagtgctaccccgaacccaggttttcagaaaaccccgccgctggcggtcaagaagattagccaatacgcatgccagcgcaagacgacgctgaacaactataatcacatcttcaccgatgcctttgaaattcttgcggagaattccgagttcaaagaaaacgaagtgagctacgtgacctttatgcgtgcggcgtccgttctgaaaagcctgccttttacgatcatctccatgaaagacactgaaggaattccgtgcctgggtgataaagtcaagtgtattattgaggaaatcatcgaagatggagaatcgtctgaggttaaagccgtgttgaatgacgaacgctatcagagcttcaaactctttacctcagtctttggtgtggggctgaagacaagcgagaaatggttccgtatggggtttcgctcgctttccaagattatgagcgataagacgctgaaattcaccaagatgcagaaagctggtttcttgtactacgaagatctggtatcttgcgttacccgtgccgaagcagaagcggtgggagtcctggtaaaagaagcagtctgggcttttttaccagacgcgtttgtgacaatgacgggtggttttcgtcgcgggaagaagattgggcacgatgtggacttccttatcacctctcctggaagtgcagaggatgaagaacaattactcccgaaagtcattaacctgtgggagaagaaaggtctgctgctgtattatgatttggtggaaagcactttcgagaaatttaaattaccgagtcgccaagttgacaccctcgatcatttccagaaatgttttctgatcctgaaattacatcaccagcgtgtagattcatcgaaatccaatcaacaggaaggtaagacgtggaaagcgattcgcgttgacttggtaatgtgcccctatgaaaaccgtgcctttgcattacttggatggaccgggagtcgccagttcgaacgtgatattcgtcgttacgcgactcatgagcgcaagatgatgctggacaatcacgccctgtatgataagacaaaacgcgtgtttctcaaagctgaaagcgaagaagagatctttgcgcatcttggtctggattacattgaaccatgggaacgcaacgca

SEQ ID NO: 3634 - protein, 389 aa, synthetic construct
  REGION 1..389: note = Orthologs of terminal deoxynucleotidyl transferase
MHHHHHHGGSGSATPNPGFQKTPPLAVKKISQYACQRKTTLNNYNHIFTDAFEILAENSEFKENEVSYVTFMRAASVLKSLPFTIISMKDTEGIPCLGDKVKCIIEEIIEDGESSEVKAVLNDERYQSFKLFTSVFGVGLKTSEKWFRMGFRSLSKIMSDKTLKFTKMQKAGFLYYEDLVSCVTRAEAEAVGVLVKEAVWAFLPDAFVTMTGGFRRGKKIGHDVDFLITSPGSAEDEEQLLPKVINLWEKKGLLLYYDLVESTFEKFKLPSRQVDTLDHFQKCFLILKLHHQRVDSSKSNQQEGKTWKAIRVDLVMCPYENRAFALLGWTGSRQFERDIRRYATHERKMMLDNHALYDKTKRVFLKAESEEEIFAHLGLDYIEPWERNA

SEQ ID NO: 3635 - DNA, 1161 bp, synthetic construct
  misc_feature 1..1161: note = Orthologs of terminal deoxynucleotidyl transferase
  source 1..1161: mol_type = other DNA
atgcaccatcatcatcatcatggcggtagcggcagccctagtccggtagttccgtctcgcgtgggtgtgtcgcaatatgcgtgtcagcgcaagacaacactggataacaagaataccttgttcactgacgcgtttgaaatcctggctgagaactatgaattccgtgaaaatgaacgttcctgcctcagctttcgtcaagccgcctcagtcctgaaaagccttacgtttaccattgctgggatggcggatgttgatggcttaccgggtttcggcgaccacattcgcgcagtgatcgaggatctgattgaagatggagaatcctccaaagtcagtgaggtactgaacgacgaagtgtatcgcagcctgaaattgtttaccaccatcttcggtgttggcttacgtactgctgagaaatggcatcgcctggggattcgtacgctcgaagaaatcaaaagtaatgaaaacctgaaattctcgaagatgcagattgcgggccttcagcactacgaggatatcttaggaggtgtgcgcaaagcagaagcggatgccgttgcgatggtcgtccgtgacgccgtgtggacgtttctgccagatgcagtagttaccctgaccggtggttttcgtcgcgggaacaaaacaggccatgacgtggatatgctcattactagccccattcagggcaaagagaaagaactgctgcacaaagtgatcaatctgtggaagaaacaagacttgcttttgtgtcatacgattcacgaatcaaccatggatgaagataacctgccgtcgaaaagcgttaatttactggaccattttcagaaatgcttcgcgatcctgaaatcaaaccaacatcgcggcgaaattagtagttgcgatggtcctcacgattcccgtgagcgcggcaaacgtatctggaaagccattcgcgtagacctcgtcttctgtccgtttgaacagtatgcttttgcgttgttaggatggaccggtagccgtcagtttgaacgcgatctgcgtcgttacgcaagccacgagaagaagatgatgatcgacaatcatgccctgtatgataagacgaaacgcgtgttcgtgaaatgcgaatccgaagaggagatttttggtcatctgggtctggaatacatcgatccggttgaacgtaacgct

SEQ ID NO: 3636 - protein, 387 aa, synthetic construct
  REGION 1..387: note = Orthologs of terminal deoxynucleotidyl transferase
MHHHHHHGGSGSPSPVVPSRVGVSQYACQRKTTLDNKNTLFTDAFEILAENYEFRENERSCLSFRQAASVLKSLTFTIAGMADVDGLPGFGDHIRAVIEDLIEDGESSKVSEVLNDEVYRSLKLFTTIFGVGLRTAEKWHRLGIRTLEEIKSNENLKFSKMQIAGLQHYEDILGGVRKAEADAVAMVVRDAVWTFLPDAVVTLTGGFRRGNKTGHDVDMLITSPIQGKEKELLHKVINLWKKQDLLLCHTIHESTMDEDNLPSKSVNLLDHFQKCFAILKSNQHRGEISSCDGPHDSRERGKRIWKAIRVDLVFCPFEQYAFALLGWTGSRQFERDLRRYASHEKKMMIDNHALYDKTKRVFVKCESEEEIFGHLGLEYIDPVERNA

SEQ ID NO: 3637 - DNA, 1173 bp, synthetic construct
  misc_feature 1..1173: note = Orthologs of terminal deoxynucleotidyl transferase
  source 1..1173: mol_type = other DNA
atgcaccatcatcatcatcatggcggtagcggctcacccgcctctccgaacccagatgcgcagaagactccgagtcgctccgtccagcgcattagcgagtatgcatgtcaacgtcgtaccaccctgaacaactgcaattacgccttcacaaatgcgtttgaaattctggctgaaaactgtgagttcaaagaaaatgaagacagctatgtgacgtacatccgcgcagcgtctgttctcaaaagcctgccgtttaccattatttccatgaaagatactgaaggtatcccttgcttaggcgatcgcgtgaaatgtatcatcgaggagattattgaagacggagaaagtagtgaagtaaatgccgtcctgaacgatgagcgctataaaagctttaagctgttcacgtccgtgtttggcgttggtctcaagacctcggagaaatggttccgtatggggtttcgtagcctgaacaagattaaatcagacaaaagcttgaaattcacacgcatgcagaaagcgggctttctttactacgaagatttagtgtcatgcgtaacccgtgcagaagccgaagctgtgtctacgctggtcaaagaagcggtttgggcgtttttacccggtgccttcatctctatgactggcggctttcgccgcgggaaagaaattggacacgatgtcgacttcctgatcaccagtccggaaattacggaggatgaagaacagcaggtgctgcataaagttatcaatttgtgggagaacaaaggtctgctgctgtatagcgatcttgtggaatcgacctttgagaaattgaagttaccatcccgtaaagttgacgcgctggatcactttcaaaaatgtttcctcattctgaaactgcatcatcaacgtgaagacaatgaaaagagctcacagcaggaagagaagacatggaaagcaatccgcgtcgatcttgtaatgtgcccgtatgaacgtcgtgcttttgccctgttaggttggaccggctcgcgccaattcgaacgcgatctgcgtcgttatgcaactcacgagcgcaagatgatgctcgataaccatgcgctgtacgacaagacgaaacgcatttttttgaaagccgaatccgaagaagaaattttcgcgcacctgggcctggattatatcgagccttgggaacgcaatgct

SEQ ID NO: 3638 - protein, 391 aa, synthetic construct
  REGION 1..391: note = Orthologs of terminal deoxynucleotidyl transferase
MHHHHHHGGSGSPASPNPDAQKTPSRSVQRISEYACQRRTTLNNCNYAFTNAFEILAENCEFKENEDSYVTYIRAASVLKSLPFTIISMKDTEGIPCLGDRVKCIIEEIIEDGESSEVNAVLNDERYKSFKLFTSVFGVGLKTSEKWFRMGFRSLNKIKSDKSLKFTRMQKAGFLYYEDLVSCVTRAEAEAVSTLVKEAVWAFLPGAFISMTGGFRRGKEIGHDVDFLITSPEITEDEEQQVLHKVINLWENKGLLLYSDLVESTFEKLKLPSRKVDALDHFQKCFLILKLHHQREDNEKSSQQEEKTWKAIRVDLVMCPYERRAFALLGWTGSRQFERDLRRYATHERKMMLDNHALYDKTKRIFLKAESEEEIFAHLGLDYIEPWERNA

SEQ ID NO: 3639 - DNA, 1143 bp, synthetic construct
  misc_feature 1..1143: note = Orthologs of terminal deoxynucleotidyl transferase
  source 1..1143: mol_type = other DNA
atgcaccatcatcatcatcatggcggtagcggcaatcctgccgccgaccagcgctcatgcgtgcatctttcggctactccggagtctgcggttagtccctatgcatgtcagcgtcgtaccaccttggaaaaccacaataagatttttacggaagcgctggaggtcctcgcgctgaactccgaatttagcggtaatcaaggttcatgcctgggttttcgccgcgctgccagcgtgttgaaatctttaccggcagcgctgcgttcgccagaagaagccctgcgcctcccgtgtctgggcgataactcgcgtgcggtcttggaggagatctgcgaatgtggtagctcaagtcgcgtggaagagattcagaatgatcaacgttaccgcaccatgaaacttttctgctctgtattcggcgttgggcctaagacagcagaaagctggttttgccgtggcctgaaaacgttcgaacaggtgttaactgaaccgtccatccgtctgaaccgcatgcagaccgccggttttctgttctatgaagacatttctgttcccgtatcacgcgcggaagctgccgcgctcaagatgatgatggaggaggcactgctgtttatcaatccgagtgcgacggtcaccattaccggcggctttcgtcgtgggaaagaattcggtcatgatgtggactttatcatcaaagccccagaaggacaagaagatcgcattcttccggctgtcattaaacgcttcaaaagccagaacgtgctgttgtactcggattttcagaaaagcacttttgacttacgtcaactgcctaaccatcgcttcgaggcgatggatcgctttagcaaatgtttcctgctggttaaattgcagatgcaggaaagtcgtacgggtcgtaattggcgcgcagtgcgtgttgatctcgtagcgccgccgcttgaacgcttcccatatgccttattaggctggacaggttcgaccctgtttgagcgtgacttgcgccgctttgctcgtctcgaacgtggcaagctgctggataaccacaccctgtacgacaaaacgacgaaaacctttcttccggcgaatactgaggaggatattttccaacatctggggctggaatatatcgaaccttggcagcgtaacgca

SEQ ID NO: 3640 - protein, 381 aa, synthetic construct
  REGION 1..381: note = Orthologs of terminal deoxynucleotidyl transferase
MHHHHHHGGSGNPAADQRSCVHLSATPESAVSPYACQRRTTLENHNKIFTEALEVLALNSEFSGNQGSCLGFRRAASVLKSLPAALRSPEEALRLPCLGDNSRAVLEEICECGSSSRVEEIQNDQRYRTMKLFCSVFGVGPKTAESWFCRGLKTFEQVLTEPSIRLNRMQTAGFLFYEDISVPVSRAEAAALKMMMEEALLFINPSATVTITGGFRRGKEFGHDVDFIIKAPEGQEDRILPAVIKRFKSQNVLLYSDFQKSTFDLRQLPNHRFEAMDRFSKCFLLVKLQMQESRTGRNWRAVRVDLVAPPLERFPYALLGWTGSTLFERDLRRFARLERGKLLDNHTLYDKTTKTFLPANTEEDIFQHLGLEYIEPWQRNA

SEQ ID NO: 3641 - DNA, 1182 bp, synthetic construct
  misc_feature 1..1182: note = Orthologs of terminal deoxynucleotidyl transferase
  source 1..1182: mol_type = other DNA
atgcaccatcatcatcatcatggcggtagcggcagcccaccgctgagcaccccggaactggagatgccagcgttcatcgccacgaaagtgagccagtacagttgccagcgcaaaaccacgctggacaattacaataaaaaatttaccgatgcgtttgaggtgatggccgagaactacgagttcaaagaaaatgagattttctgtctggaatttctgcgtgcggccagtctgctgaaaagtctgccattcagcgtgacccgcatgaaagacatccaaggcctcccatgcatgggtgaccaagttcgcgacattatcgaggagatcatcgaagaaggtgagagcagtcgtgtgaaggaagtgctgaatgacgagcgctataaggcgttcaagcaattcaccagcgttttcggtgtgggtgtgaagaccagtgaaaagtggtaccgcatgggcctccgcacggtggaagaagtgaaggcggacaaaacgctgaagctcagcaaaatgcagaaggccggcttcctctactatgaagacctcgtgagctgtgtgagcaaggccgaagcggatgcggttagcctcatcgtgaagaacacggtgtgtagctttctgccagatgcgctggtgaccatcaccggtggcttccgtcgcggcaaaaacatcggccacgacatcgacttcctcattaccaacccgggcccacgtgaggacgatgagctcctccacaaggtgatcgatctgtggaagaagcaaggtctgctgctgtactgcgacatcatcgagagcacgtttgtgaaggagcagctgccaagtcgcaaagttgacgccatggaccacttccagaagtgcttcgccattctcaagctgtaccagccacgcgtggataacagcacgtgcaacaccagcaagaagctcggtatggcggaagtgaaggattggaaggcgatccgcgttgatctggttatcaccccgttcgagcagtatgcgtacgcgctgctcggttggaccggtagccgtcagtttggtcgcgatctccgtcgctatgccgcgcacgagcgcaagatgattctggacaaccacgcgctgtatgaccgccgcaaacgcatctttctgaaaagcggcagcgaagaggagatctttgcgcatctgggtctggattacgttcagccgtgggaacgcaatgcc

SEQ ID NO: 3642 - protein, 394 aa, synthetic construct
  REGION 1..394: note = Orthologs of terminal deoxynucleotidyl transferase
MHHHHHHGGSGSPPLSTPELEMPAFIATKVSQYSCQRKTTLDNYNKKFTDAFEVMAENYEFKENEIFCLEFLRAASLLKSLPFSVTRMKDIQGLPCMGDQVRDIIEEIIEEGESSRVKEVLNDERYKAFKQFTSVFGVGVKTSEKWYRMGLRTVEEVKADKTLKLSKMQKAGFLYYEDLVSCVSKAEADAVSLIVKNTVCSFLPDALVTITGGFRRGKNIGHDIDFLITNPGPREDDELLHKVIDLWKKQGLLLYCDIIESTFVKEQLPSRKVDAMDHFQKCFAILKLYQPRVDNSTCNTSKKLGMAEVKDWKAIRVDLVITPFEQYAYALLGWTGSRQFGRDLRRYAAHERKMILDNHALYDRRKRIFLKSGSEEEIFAHLGLDYVQPWERNA

SEQ ID NO: 3643 - DNA, 1182 bp, synthetic construct
  misc_feature 1..1182: note = Orthologs of terminal deoxynucleotidyl transferase
  source 1..1182: mol_type = other DNA
atgcaccatcatcatcatcatggcggtagcggcagccatccgctgaacaccccggagctggaaatgccgagcttcatcgccaccaaggttagtcagtacagctgccaacgcaagacgacgctgaataactacaacaaaaagtttaccgacgcgtttgaagtgatggcggagaattacgaatttaaagagaacgagatcttctgcctcgagtttctgcgtgcggcgagtctgctgaaaagtctgccgttcagcgttacccgtatgaaagacatccaaggtctgccgtgcatgggtgatcaagttcgcgacgtgatcgaggagattatcgaagaaggcgaaagtagccgcgtgaaggaagtgctgaacgatgagcgctacaaagccttcaagcagttcacgagcgtgttcggcgttggcgtgaagaccagtgagaaatggtaccgcatgggcctccgcaccgttggcgaagtgaaagccgacaagacgctgaagctgagcaagatgcagaaggccggctttctgtactacgaggatctggtgagctgcgttagcaaagccgaagccgatgccgtgagcctcatcgtgaaaaacaccgtgtgcacgtttctgccagatgccctcgttaccattaccggtggttttcgccgcggcaagaatatcggccacgacatcgactttctcattaccaacccgggtccacgcgaggacgacgaactgctccacaaagtgatcgatctgtggaagaagcaaggtctgctgctgtactgcgacatcatcgagagcacgtttgtgaaggagcagctgccgagtcgcaaaatcgacgcgatggaccacttccagaaatgtttcgcgatcctcaagctgtaccaaccgcgcgttgataacagcacgtgcaacaccagcaagaagctcgagatggcggaagtgaaggattggaaagcgatccgtgtggatctggtgatcaccccgttcgaacagtacagctatgcgctgctgggctggacgggtagccgtcagttcggtcgcgatctgcgtcgctatgccgcgcatgaacgccgcatgattctggataaccatggtctgtacgaccgcaccaaacgcatctttctgaaagccggtagcgaagaagagatcttcgcgcatctgggtctggactatgtggaaccatgggaacgcaatgcc

SEQ ID NO: 3644 - protein, 394 aa, synthetic construct
  REGION 1..394: note = Orthologs of terminal deoxynucleotidyl transferase
MHHHHHHGGSGSHPLNTPELEMPSFIATKVSQYSCQRKTTLNNYNKKFTDAFEVMAENYEFKENEIFCLEFLRAASLLKSLPFSVTRMKDIQGLPCMGDQVRDVIEEIIEEGESSRVKEVLNDERYKAFKQFTSVFGVGVKTSEKWYRMGLRTVGEVKADKTLKLSKMQKAGFLYYEDLVSCVSKAEADAVSLIVKNTVCTFLPDALVTITGGFRRGKNIGHDIDFLITNPGPREDDELLHKVIDLWKKQGLLLYCDIIESTFVKEQLPSRKIDAMDHFQKCFAILKLYQPRVDNSTCNTSKKLEMAEVKDWKAIRVDLVITPFEQYSYALLGWTGSRQFGRDLRRYAAHERRMILDNHGLYDRTKRIFLKAGSEEEIFAHLGLDYVEPWERNA

SEQ ID NO: 3645 - DNA, 1182 bp, synthetic construct
  misc_feature 1..1182: note = Orthologs of terminal deoxynucleotidyl transferase
  source 1..1182: mol_type = other DNA
atgcaccatcatcatcatcatggcggtagcggctcaccaccattgaatacacctgtgcttgaaatgcccgcattcatcgcaactaaggtgtctcaatactcgtgccagcgtaagactacattaaataatagtaacaagaaattcaccgatgcatttgaagttatggcggagaactacgagttcaaagagaacgaaatcttctgcttagagttccttcgtgccgcctcgttgttaaaaagtcttccattctctgttactcgtatgaaagatatccaaggtcttccctgcatgggagatcaagtgcgtgacatcattgaggaaatcatcgaggaaggcgagtcctcccgcgtcaaagaggtattgaacgatgaacgctacaaggcttttaaacagtttacctccgtctttggcgtaggagtcaaaacgagtgagaagtggtatcgcatgggattacgcacagttggggaggtcaaggccgataaaaccctgaagttatcaaagatgcagaaggcggggttgctgtattatgaggatctggtctcttgcgtatctaaggcggaagctgatgctgtctcattaattgtcaaaaacaccgtctgcacattccttcctgacgccttagtaaccattacaggaggtttccgccgtggtaaaaatattggtcatgacatcgacttcttgattactaaccctgggcctcgtgaggatgacgagctgttacacaaagtaatcgacctgtggaagaagcaagggttgttattgtattgtgacattattgagtccacgtttgtaaaagaacagcttccctcgcgcaaggtggatgccatggatcacttccaaaagtgttttgcaattttgaaactttatcaacctcgcgtggataactcaacctgtaatactagcgaacaattggagatggccgaagtgaaagactggaaagcaattcgcgtagatttggttatcacccctttcgaacaatactcttacgctttgttaggttggacaggaagccgtcagtttggccgcgacctgcgccgctacgcagcccatgagcgtaaaatgatccttgacaatcatgggttgtacgatcgccgtaaacgtattttcttaaaagctggttcagaagaagaaattttcgcacacctgggtttagattacgtagaaccttgggagcgcaacgcg

SEQ ID NO: 3646 - protein, 394 aa, synthetic construct
  REGION 1..394: note = Orthologs of terminal deoxynucleotidyl transferase
MHHHHHHGGSGSPPLNTPVLEMPAFIATKVSQYSCQRKTTLNNSNKKFTDAFEVMAENYEFKENEIFCLEFLRAASLLKSLPFSVTRMKDIQGLPCMGDQVRDIIEEIIEEGESSRVKEVLNDERYKAFKQFTSVFGVGVKTSEKWYRMGLRTVGEVKADKTLKLSKMQKAGLLYYEDLVSCVSKAEADAVSLIVKNTVCTFLPDALVTITGGFRRGKNIGHDIDFLITNPGPREDDELLHKVIDLWKKQGLLLYCDIIESTFVKEQLPSRKVDAMDHFQKCFAILKLYQPRVDNSTCNTSEQLEMAEVKDWKAIRVDLVITPFEQYSYALLGWTGSRQFGRDLRRYAAHERKMILDNHGLYDRRKRIFLKAGSEEEIFAHLGLDYVEPWERNA

SEQ ID NO: 3647 - DNA, 10 bp, synthetic construct
  misc_feature 1..10: note = oligo substrate or (by)product
  source 1..10: mol_type = other DNA
tttttttatc

SEQ ID NO: 3648 - DNA, 11 bp, synthetic construct
  misc_feature 1..11: note = oligo substrate or (by)product
  modified_base 11: mod_base = OTHER; note = 3'-NO2-thymine
  source 1..11: mol_type = other DNA
tttttttatct

SEQ ID NO: 3649 - DNA, 11 bp, synthetic construct
  misc_feature 1..11: note = oligo substrate or (by)product
  source 1..11: mol_type = other DNA
tttttttatct

SEQ ID NO: 3650 - DNA, 11 bp, synthetic construct
  misc_feature 1..11: note = oligo substrate or (by)product
  modified_base 11: mod_base = OTHER; note = 3'-PO4-cytosine
  source 1..11: mol_type = other DNA
tttttttatcc

SEQ ID NO: 3651 - DNA, 11 bp, synthetic construct
  misc_feature 1..11: note = oligo substrate or (by)product
  source 1..11: mol_type = other DNA
tttttttatcc

SEQ ID NO: 3652 - DNA, 11 bp, synthetic construct
  misc_feature 1..11: note = oligo substrate or (by)product
  modified_base 11: mod_base = OTHER; note = 3'-PO4-thymine
  source 1..11: mol_type = other DNA
tttttttatct

SEQ ID NO: 3653 - DNA, 10 bp, synthetic construct
  misc_feature 1..10: note = oligo substrate or (by)product
  source 1..10: mol_type = other DNA
tttttttatg

SEQ ID NO: 3654 - DNA, 11 bp, synthetic construct
  misc_feature 1..11: note = oligo substrate or (by)product
  modified_base 11: mod_base = OTHER; note = 3'-PO4-cytosine
  source 1..11: mol_type = other DNA
tttttttatgc

SEQ ID NO: 3655 - DNA, 11 bp, synthetic construct
  misc_feature 1..11: note = oligo substrate or (by)product
  source 1..11: mol_type = other DNA
tttttttatgc

SEQ ID NO: 3656 - DNA, 11 bp, synthetic construct
  misc_feature 1..11: note = oligo substrate or (by)product
  modified_base 11: mod_base = OTHER; note = 3'-PO4-guanine
  source 1..11: mol_type = other DNA
tttttttatcg

SEQ ID NO: 3657 - DNA, 11 bp, synthetic construct
  misc_feature 1..11: note = oligo substrate or (by)product
  source 1..11: mol_type = other DNA
tttttttatcg

SEQ ID NO: 3658 - DNA, 10 bp, synthetic construct
  misc_feature 1..10: note = oligo substrate or (by)product
  source 1..10: mol_type = other DNA
tttttttaca

SEQ ID NO: 3659 - DNA, 11 bp, synthetic construct
  misc_feature 1..11: note = oligo substrate or (by)product
  modified_base 11: mod_base = OTHER; note = 3'-PO4-cytosine
  source 1..11: mol_type = other DNA
tttttttacac

SEQ ID NO: 3660 - DNA, 11 bp, synthetic construct
  misc_feature 1..11: note = oligo substrate or (by)product
  source 1..11: mol_type = other DNA
tttttttacac

SEQ ID NO: 3661 - DNA, 11 bp, synthetic construct
  misc_feature 1..11: note = oligo substrate or (by)product
  modified_base 11: mod_base = OTHER; note = 3'-PO4-thymine
  source 1..11: mol_type = other DNA
tttttttatgt

SEQ ID NO: 3662 - DNA, 11 bp, synthetic construct
  misc_feature 1..11: note = oligo substrate or (by)product
  source 1..11: mol_type = other DNA
tttttttatgt

SEQ ID NO: 3663 - DNA, 11 bp, synthetic construct
  misc_feature 1..11: note = oligo substrate or (by)product
  modified_base 11: mod_base = OTHER; note = 3'-PO4-guanine
  source 1..11: mol_type = other DNA
tttttttacag

SEQ ID NO: 3664 - DNA, 11 bp, synthetic construct
  misc_feature 1..11: note = oligo substrate or (by)product
  source 1..11: mol_type = other DNA
tttttttacag

SEQ ID NO: 3665 - DNA, 11 bp, synthetic construct
  misc_feature 1..11: note = oligo substrate or (by)product
  modified_base 11: mod_base = OTHER; note = 3'-PO4-adenine
  source 1..11: mol_type = other DNA
tttttttatga

SEQ ID NO: 3666 - DNA, 11 bp, synthetic construct
  misc_feature 1..11: note = oligo substrate or (by)product
  source 1..11: mol_type = other DNA
tttttttatga

SEQ ID NO: 3667 - DNA, 10 bp, synthetic construct
  misc_feature 1..10: note = oligo substrate or (by)product
  source 1..10: mol_type = other DNA
tttttttcgg

SEQ ID NO: 3668 - DNA, 11 bp, synthetic construct
  misc_feature 1..11: note = oligo substrate or (by)product
  modified_base 11: mod_base = OTHER; note = 3'-PO4-guanine
  source 1..11: mol_type = other DNA
tttttttcggg

SEQ ID NO: 3669 - DNA, 11 bp, synthetic construct
  misc_feature 1..11: note = oligo substrate or (by)product
  source 1..11: mol_type = other DNA
tttttttcggg

SEQ ID NO: 3670 - DNA, 10 bp, synthetic construct
  misc_feature 1..10: note = oligo substrate or (by)product
  source 1..10: mol_type = other DNA
tttttttctg

SEQ ID NO: 3671 - DNA, 11 bp, synthetic construct
  misc_feature 1..11: note = oligo substrate or (by)product
  modified_base 11: mod_base = OTHER; note = 3'-PO4-cytosine
  source 1..11: mol_type = other DNA
tttttttctgc

SEQ ID NO: 3672 - DNA, 11 bp, synthetic construct
  misc_feature 1..11: note = oligo substrate or (by)product
  source 1..11: mol_type = other DNA
tttttttctgc

SEQ ID NO: 3673 - DNA, 10 bp, synthetic construct
  misc_feature 1..10: note = oligo substrate or (by)product
  source 1..10: mol_type = other DNA
tttttttcga

SEQ ID NO: 3674 - DNA, 11 bp, synthetic construct
  misc_feature 1..11: note = oligo substrate or (by)product
  modified_base 11: mod_base = OTHER; note = 3'-PO4-cytosine
  source 1..11: mol_type = other DNA
tttttttcgac

SEQ ID NO: 3675 - DNA, 11 bp, synthetic construct
  misc_feature 1..11: note = oligo substrate or (by)product
  source 1..11: mol_type = other DNA
tttttttcgac

SEQ ID NO: 3676 - DNA, 10 bp, synthetic construct
  misc_feature 1..10: note = oligo substrate or (by)product
  source 1..10: mol_type = other DNA
tttttttccg

SEQ ID NO: 3677 - DNA, 11 bp, synthetic construct
  misc_feature 1..11: note = oligo substrate or (by)product
  modified_base 11: mod_base = OTHER; note = 3'-PO4-cytosine
  source 1..11: mol_type = other DNA
tttttttccgc

SEQ ID NO: 3678 - DNA, 11 bp, synthetic construct
  misc_feature 1..11: note = oligo substrate or (by)product
  source 1..11: mol_type = other DNA
tttttttccgc

SEQ ID NO: 3679 - DNA, 11 bp, synthetic construct
  misc_feature 1..11: note = oligo substrate or (by)product
  modified_base 11: mod_base = OTHER; note = 3'-PO4-cytosine
  source 1..11: mol_type = other DNA
tttttttcggc

SEQ ID NO: 3680 - DNA, 11 bp, synthetic construct
  misc_feature 1..11: note = oligo substrate or (by)product
  source 1..11: mol_type = other DNA
tttttttcggc

SEQ ID NO: 3681 - DNA, 11 bp, synthetic construct
  misc_feature 1..11: note = oligo substrate or (by)product
  modified_base 11: mod_base = OTHER; note = 3'-PO4-adenine
  source 1..11: mol_type = other DNA
tttttttacaa

SEQ ID NO: 3682 - DNA, 11 bp, synthetic construct
  misc_feature 1..11: note = oligo substrate or (by)product
  source 1..11: mol_type = other DNA
tttttttacaa

SEQ ID NO: 3683 - DNA, 12 bp, synthetic construct
  misc_feature 1..12: note = oligo substrate or (by)product
  source 1..12: mol_type = other DNA
tttttttacaaa

SEQ ID NO: 3684 - DNA, 12 bp, synthetic construct
  misc_feature 1..12: note = oligo substrate or (by)product
  modified_base 12: mod_base = OTHER; note = 3'-PO4-adenine
  source 1..12: mol_type = other DNA
tttttttacaaa

SEQ ID NO: 3685 - DNA, 12 bp, synthetic construct
  misc_feature 1..12: note = oligo substrate or (by)product
  source 1..12: mol_type = other DNA
tttttttatccc

SEQ ID NO: 3686 - DNA, 12 bp, synthetic construct
  misc_feature 1..12: note = oligo substrate or (by)product
  misc_feature 12: note = MODIFIED_BASE - n is a 3'-PO4-cytosine
  source 1..12: mol_type = other DNA
tttttttatccn

SEQ ID NO: 3687 - DNA, 11 bp, synthetic construct
  misc_feature 1..11: note = oligo substrate or (by)product
  modified_base 11: mod_base = OTHER; note = 3'-PO4-thymine
  source 1..11: mol_type = other DNA
tttttttacat

SEQ ID NO: 3688 - DNA, 12 bp, synthetic construct
  misc_feature 1..12: note = oligo substrate or (by)product
  modified_base 12: mod_base = OTHER; note = 3'-PO4-thymine
  source 1..12: mol_type = other DNA
tttttttacaat

SEQ ID NO: 3689 - DNA, 11 bp, synthetic construct
  misc_feature 1..11: note = oligo substrate or (by)product
  modified_base 11: mod_base = OTHER; note = 3'-PO4-adenine
  source 1..11: mol_type = other DNA
tttttttatca

SEQ ID NO: 3690 - DNA, 12 bp, synthetic construct
  misc_feature 1..12: note = oligo substrate or (by)product
  modified_base 12: mod_base = OTHER; note = 3'-PO4-adenine
  source 1..12: mol_type = other DNA
tttttttatcca

SEQ ID NO: 3691 - DNA, 12 bp, synthetic construct
  misc_feature 1..12: note = oligo substrate or (by)product
  modified_base 12: mod_base = OTHER; note = 3'-PO4-thymine
  source 1..12: mol_type = other DNA
tttttttatcct

SEQ ID NO: 3692 - DNA, 12 bp, synthetic construct
  misc_feature 1..12: note = oligo substrate or (by)product
  source 1..12: mol_type = other DNA
tttttttcgggg

SEQ ID NO: 3693 - DNA, 12 bp, synthetic construct
  misc_feature 1..12: note = oligo substrate or (by)product
  modified_base 12: mod_base = OTHER; note = 3'-PO4-guanine
  source 1..12: mol_type = other DNA
tttttttcgggg

SEQ ID NO: 3694 - DNA, 20 bp, synthetic construct
  misc_feature 1..20: note = oligo substrate or (by)product
  modified_base 1: mod_base = OTHER; note = 6-carboxyfluorescein-thymine
  source 1..20: mol_type = other DNA
tttttttttttttttttatc

SEQ ID NO: 3695 - DNA, 21 bp, synthetic construct
  misc_feature 1..21: note = oligo substrate or (by)product
  modified_base 1: mod_base = OTHER; note = 6-carboxyfluorescein-thymine
  modified_base 21: mod_base = OTHER; note = 3'-PO4-guanine
  source 1..21: mol_type = other DNA
tttttttttttttttttatcg

SEQ ID NO: 3696 - DNA, 21 bp, synthetic construct
  misc_feature 1..21: note = oligo substrate or (by)product
  modified_base 1: mod_base = OTHER; note = 6-carboxyfluorescein-thymine
  modified_base 21: mod_base = OTHER; note = 3'-PO4-thymine
  source 1..21: mol_type = other DNA
tttttttttttttttttatct

SEQ ID NO: 3697 - DNA, 1185 bp, synthetic construct
  misc_feature 1..1185: note = Variant of terminal deoxynucleotidyl transferase
  source 1..1185: mol_type = other DNA
atgcatcaccaccatcatcatgggggttctggtcatccgccgagcaataccccggagaaggaggtgccgagcgttatcgcccgtccggttagtcagtacgcgtgccagcgcaagaccacgctgaataactacaacaaaaagttcaccgacgcgctggagatcatggccgagaactacaaatttaaagagaacctgcaggcgtgtctggaagccaagcgcgccgcgagtatttttaaaagcctgccgttcgaggttaccagcatgaaagacatccaaggtctgccgtgcattaccgacgacgtacgtgacgtgatcgaggagatcatcgaagagggcgagagcagccgtgttaaagaaatcctcaatgacgagcgctacaaggcctttaagcagttcaccagcgtgttcggtgtgggcgtgaaaacctcggaaaagtggtaccgtatgggcctccgtacggttgaagaagcaaaggccagtaagagtctgaagctgagcaagatgcagaaggcgggcttcctgtattacgaggatctggcgagcatggttagtaaagaagaagccgatgccgttacgctcatcgtgaaggaaacggtgcgtacctttgtgccggatgcgctggtgaccatcgccggcggtttccgccgtggcaaacctatgggccacgacgttgactttctgatcacgaacccgggccgcaaaatggatgacgagctgctccacaaagtggttgatctgctcaagaagcaaggtctgctgctgtacgaagacatcaaagagagcacgttcgtggaggggcaactgccaagtcataaaatcgacgccatggacaaccatcagaagtgcttcgccattctcaagctgtaccagccgaaggtggataacagtgcggttgggacgagtaagaaaagtgacatggctgaggttaaggattggaaagcggttcgtgtggatctggtgatcacgccattcgagcagttcgcctatgcgctgctcggttggacgggcagcggccaatttcgtcgcgatctgcgtcgctatgcggaggaagagcgcgacatgctgctcgacaaccatgccctctacgacctgaaaaagcgcatctttctgaaagcgggcagcgaagaagagattttcgcgcatctgggtctggattatgtggagccgtgggaacgcaacgcgtaa

SEQ ID NO: 3698 - protein, 394 aa, synthetic construct
  REGION 1..394: note = Variant of terminal deoxynucleotidyl transferase
MHHHHHHGGSGHPPSNTPEKEVPSVIARPVSQYACQRKTTLNNYNKKFTDALEIMAENYKFKENLQACLEAKRAASIFKSLPFEVTSMKDIQGLPCITDDVRDVIEEIIEEGESSRVKEILNDERYKAFKQFTSVFGVGVKTSEKWYRMGLRTVEEAKASKSLKLSKMQKAGFLYYEDLASMVSKEEADAVTLIVKETVRTFVPDALVTIAGGFRRGKPMGHDVDFLITNPGRKMDDELLHKVVDLLKKQGLLLYEDIKESTFVEGQLPSHKIDAMDNHQKCFAILKLYQPKVDNSAVGTSKKSDMAEVKDWKAVRVDLVITPFEQFAYALLGWTGSGQFRRDLRRYAEEERDMLLDNHALYDLKKRIFLKAGSEEEIFAHLGLDYVEPWERNA

SEQ ID NO: 3699 - DNA, 1185 bp, synthetic construct
  misc_feature 1..1185: note = Variant of terminal deoxynucleotidyl transferase
  source 1..1185: mol_type = other DNA
atgcatcaccaccatcatcatgggggttctggtcatccgccgagcaataccccggagaaggaggtgccgagcgttatcgcccgtccggttagtcagtacgcgtgccagcgcaagaccacgctgaataactacaacaaaaagttcaccgacgcgctggagatcatggccgagaactacaaatttaaagagaacctgcaggcgtgtctggaagccaagcgcgccgcgagtatttttaaaagcctgccgttcgaggttaccagcatgaaagacatccaaggtctgccgtgcattaccgacgacgtacgtgacgtgatcgaggagatcatcgaagagggcgagagcagccgtgttaaagaaatcctcaatgacgagcgctacaaggcctttaagcagttcaccagcgtgttcggtgtgggcgtgaaaacctcggaaaagtggtaccgtatgggcctccgtacggttgaagaagcaaaggccagtaagagtctgaagctgagcaagatgcagaaggcgggcttcctgtattacgaggatctggcgagcatggttagtaaagaagaagccgatgccgttacgctcatcgtgaaggaaacggtgcgtacctttgtgccggatgcgctggtgaccatcgccggcggtttccgccgtggcaaacctatgggccacgacgttgactttctgatcacgaacccgggccgcaaaatggatgacgagctgctccacaaagtggttgatctgctcaagaagcaaggtctgctgctgtacgaagacatcaaagagagcacgttcgtggaggggcaactgccaagtcataaaatcgacgccatggacaacttccagaagtgcttcgccattctcaagctgtaccagccgaaggtggataacagtgcggttgggacgagtaagaaaagtgacatggctgaggttaaggattggaaagcggttcgtgtggatctggtgatgacgccattcgagcagttcgcctatgcgctgctcggttggacgggcagcggccaatttcgtcgcgatctgcgtcgctatgcggaggaagagcgcgacatgctgctcgacaaccatgccctctacgacctgaaaaagcgcatctttctgaaagcgggcagcgaagaagagattttcgcgcatctgggtctggattatgtggagccgtgggaacgcaacgcgtaa

SEQ ID NO: 3700 - protein, 394 aa, synthetic construct
  REGION 1..394: note = Variant of terminal deoxynucleotidyl transferase
MHHHHHHGGSGHPPSNTPEKEVPSVIARPVSQYACQRKTTLNNYNKKFTDALEIMAENYKFKENLQACLEAKRAASIFKSLPFEVTSMKDIQGLPCITDDVRDVIEEIIEEGESSRVKEILNDERYKAFKQFTSVFGVGVKTSEKWYRMGLRTVEEAKASKSLKLSKMQKAGFLYYEDLASMVSKEEADAVTLIVKETVRTFVPDALVTIAGGFRRGKPMGHDVDFLITNPGRKMDDELLHKVVDLLKKQGLLLYEDIKESTFVEGQLPSHKIDAMDNFQKCFAILKLYQPKVDNSAVGTSKKSDMAEVKDWKAVRVDLVMTPFEQFAYALLGWTGSGQFRRDLRRYAEEERDMLLDNHALYDLKKRIFLKAGSEEEIFAHLGLDYVEPWERNA

SEQ ID NO: 3701 - DNA, 1185 bp, synthetic construct
  misc_feature 1..1185: note = Variant of terminal deoxynucleotidyl transferase
  source 1..1185: mol_type = other DNA
atgcatcaccaccatcatcatgggggttctggtcatccgccgagcaataccccggagaaggaggtgccgagcgttatcgcccgtccggttagtcagtacgcgtgccagcgcaagaccacgctgaataactacaacaaaaagttcaccgacgcgctggagatcatggccgagaactacaaatttaaagagaacctgcaggcgtgtctggaagccaagcgcgccgcgagtatttttaaaagcctgccgttcgaggttaccagcatgaaagacatccaaggtctgccgtgcattaccgacgacgtacgtgacgtgatcgaggagatcatcgaagagggcgagagcagccgtgttaaagaaatcctcaatgacgagcgctacaaggcctttaagcagttcaccagcgtgttcggtgtgggcgtgaaaacctcggaaaagtggtaccgtatgggcctccgtacggttgaagaagcaaaggccagtaagagtctgaagctgagcaagatgcagaaggcgggcttcctgtattacgaggatctggcgagcatggttagtaaagaagaagccgatgccgttacgctcatcgtgaaggaaacggtgcgtacctttgtgccggatgcgctggtgaccatcgccggcggtttccgccgtggcaaacctatgggccacgacgttgactttctgatcacgaacccgggccgcaaaatggatgacgagctgctccacaaagtggttgatctgctcaagaagcaaggtctgctgctgtacgaagacatcaaagagagcacgttcgtggaggggcaactgccaagtcataaaatcgacgagatggacaacttccagaagtgcttcgccattctcaagctgtaccagccgaaggtggataacagtgcggttgggacgagtaagaaaagtgacatggctgaggttaaggattggaaagcggttcgtgtggatctggtgatcacgccattcgagcagttcgcctatgcgctgctcggttggacgggcagcggccaatttcgtcgcgatctgcgtcgctatgcggaggaagagcgcgacatgctgctcgacaaccatgccctctacgacctgaaaaagcgcatctttctgaaagcgggcagcgaagaagagattttcgcgcatctgggtctggattatgtggagccgtgggaacgcaacgcgtaa

SEQ ID NO: 3702 - protein, 394 aa, synthetic construct
  REGION 1..394: note = Variant of terminal deoxynucleotidyl transferase
MHHHHHHGGSGHPPSNTPEKEVPSVIARPVSQYACQRKTTLNNYNKKFTDALEIMAENYKFKENLQACLEAKRAASIFKSLPFEVTSMKDIQGLPCITDDVRDVIEEIIEEGESSRVKEILNDERYKAFKQFTSVFGVGVKTSEKWYRMGLRTVEEAKASKSLKLSKMQKAGFLYYEDLASMVSKEEADAVTLIVKETVRTFVPDALVTIAGGFRRGKPMGHDVDFLITNPGRKMDDELLHKVVDLLKKQGLLLYEDIKESTFVEGQLPSHKIDEMDNFQKCFAILKLYQPKVDNSAVGTSKKSDMAEVKDWKAVRVDLVITPFEQFAYALLGWTGSGQFRRDLRRYAEEERDMLLDNHALYDLKKRIFLKAGSEEEIFAHLGLDYVEPWERNA

SEQ ID NO: 3703 - DNA, 1185 bp, synthetic construct
  misc_feature 1..1185: note = Variant of terminal deoxynucleotidyl transferase
  source 1..1185: mol_type = other DNA
atgcatcaccaccatcatcatgggggttctggtcatccgccgagcaataccccggagaaggaggtgccgagcgttatcgcccgtccggttagtcagtacgcgtgccagcgcaagaccacgctgaataactacaacaaaaagttcaccgacgcgctggagatcatggccgagaactacaaatttaaagagaacctgcaggcgtgtctggaagccaagcgcgccgcgagtatttttaaaagcctgccgttcgaggttaccagcatgaaagacatccaaggtctgccgtgcattaccgacgacgtacgtgacgtgatcgaggagatcatcgaagagggcgagagcagccgtgttaaagaaatcctcaatgacgagcgctacaaggcctttaagcagttcaccagcgtgttcggtgtgggcgtgaaaacctcggaaaagtggtaccgtatgggcctccgtacggttgaagaagcaaaggccagtaagagtctgaagctgagcaagatgcagaaggcgggcttcctgtattacgaggatctggcgagcatggttagtaaagaagaagccgatgccgttacgctcatcgtgaaggaaacggtgcgtacctttgtgccggatgcgctggtgaccatcgccggcggtttccgccgtggcaaacctatgggccacgacgttgactttctgatcacgaacccgggccgcaaaatggatgacgagctgctccacaaagtggttgatctgctcaagaagcaaggtctgctgctgtacgaagacatcaaagagagcacgttcgtggaggggcaactgccaagtcataaaatcgacgccatggacaacttccagaagtgcttcgccattctcaagctgtaccagccgaaggtggataacagtgcggttgggacgagtaagaaaagtgacatggctgaggttaaggattggaaagcggttcgtgtggatctggtgatcacgccattcgagcagttcgcctatgcgctgctcggttggacgggcagcggccaatttcgtcgcgatctgcgtcgctatgcggaggaagagcgcgacatgctgctcgacaaccatgccctctacgacctgaaaaagcgcatctttctgaaagcgggcagcgaagaagagattttcggtcatctgggtctggattatgtggagccgtgggaacgcaacgcgtaa

SEQ ID NO: 3704 - protein, 394 aa, synthetic construct
  REGION 1..394: note = Variant of terminal deoxynucleotidyl transferase
MHHHHHHGGSGHPPSNTPEKEVPSVIARPVSQYACQRKTTLNNYNKKFTDALEIMAENYKFKENLQACLEAKRAASIFKSLPFEVTSMKDIQGLPCITDDVRDVIEEIIEEGESSRVKEILNDERYKAFKQFTSVFGVGVKTSEKWYRMGLRTVEEAKASKSLKLSKMQKAGFLYYEDLASMVSKEEADAVTLIVKETVRTFVPDALVTIAGGFRRGKPMGHDVDFLITNPGRKMDDELLHKVVDLLKKQGLLLYEDIKESTFVEGQLPSHKIDAMDNFQKCFAILKLYQPKVDNSAVGTSKKSDMAEVKDWKAVRVDLVITPFEQFAYALLGWTGSGQFRRDLRRYAEEERDMLLDNHALYDLKKRIFLKAGSEEEIFGHLGLDYVEPWERNA

SEQ ID NO: 3705 - DNA, 1185 bp, synthetic construct
  misc_feature 1..1185: note = Variant of terminal deoxynucleotidyl transferase
  source 1..1185: mol_type = other DNA
atgcatcaccaccatcatcatgggggttctggtcatccgccgagcaataccccggagaaggaggtgccgagcgttatcgcccgtccggttagtcagtacgcgtgccagcgcaagaccacgctgaataactacaacaaaaagttcaccgacgcgctggagatcatggccgagaactacaaatttaaagagaacctgcaggcgtgtctggaagccaagcgcgccgcgagtatttttaaaagcctgccgttcgaggttaccagcatgaaagacatccaaggtctgccgtgcattaccgacgacgtacgtgacgtgatcgaggagatcatcgaagagggcgagagcagccgtgttaaagaaatcctcaatgacgagcgctacaaggcctttaagcagttcaccagcgtgttcggtgtgggcgtgaaaacctcggaaaagtggtaccgtatgggcctccgtacggttgaagaagcaaaggccagtaagagtctgaagctgagcaagatgcagaaggcgggcttcctgtattacgaggatctggcgagcatggttagtaaagaagaagccgatgccgttacgctcatcgtgaaggaaacggtgcgtacctttgtgccggatgcgctggtgaccatcgccggcggtttccgccgtggcaaacctatgggccacgacgttgactttctgatcacgaacccgggccgcaaaatggatgacgagctgctccacaaagtggttgatctgctcaagaagcaaggtctgctgctgtacgaagacatcaaagagagcacgttcgtggaggggcaactgccaagtcataaaatcgacgccatggacaacttccagaagtgcttcgccattctcaagctgtaccagccgaaggtggataacagtgcggttgggacgagtaagaaaagtgacatggctgaggttaaggattggaaagcggttcgtgtggatctggtgatcacgccattcgagcagttcgcctatgcgctgctcggttggacgggcagcggccaatttcgtcgcgatctgcgtcgctatgcggaggaagagcgcgacatgctgctcgacaaccatgccctctacgacctgaaaaagcgccaatttctgaaagcgggcagcgaagaagagattttcgcgcatctgggtctggattatgtggagccgtgggaacgcaacgcgtaa

SEQ ID NO: 3706 - protein, 394 aa, synthetic construct
  REGION 1..394: note = Variant of terminal deoxynucleotidyl transferase
MHHHHHHGGSGHPPSNTPEKEVPSVIARPVSQYACQRKTTLNNYNKKFTDALEIMAENYKFKENLQACLEAKRAASIFKSLPFEVTSMKDIQGLPCITDDVRDVIEEIIEEGESSRVKEILNDERYKAFKQFTSVFGVGVKTSEKWYRMGLRTVEEAKASKSLKLSKMQKAGFLYYEDLASMVSKEEADAVTLIVKETVRTFVPDALVTIAGGFRRGKPMGHDVDFLITNPGRKMDDELLHKVVDLLKKQGLLLYEDIKESTFVEGQLPSHKIDAMDNFQKCFAILKLYQPKVDNSAVGTSKKSDMAEVKDWKAVRVDLVITPFEQFAYALLGWTGSGQFRRDLRRYAEEERDMLLDNHALYDLKKRQFLKAGSEEEIFAHLGLDYVEPWERNA

SEQ ID NO: 3707 - DNA, 1185 bp, synthetic construct
  misc_feature 1..1185: note = Variant of terminal deoxynucleotidyl transferase
  source 1..1185: mol_type = other DNA
atgcatcaccaccatcatcatgggggttctggtcatccgccgagcaataccccggagaaggaggtgccgagcgttatcgcccgtccggttagtcagtacgcgtgccagcgcaagaccacgctgaataactacaacaaaaagttcaccgacgcgctggagatcatggccgagaactacaaatttaaagagaacctgcaggcgtgtctggaagccaagcgcgccgcgagtatttttaaaagcctgccgttcgaggttaccagcatgaaagacatccaaggtctgccgtgcattaccgacgacgtacgtgacgtgatcgaggagatcatcgaagagggcgagagcagccgtgttaaagaaatcctcaatgacgagcgctacaaggcctttaagcagttcaccagcgtgttcggtgtgggcgtgaaaacctcggaaaagtggtaccgtatgggcctccgtacggttgaagaagcaaaggccagtaagagtctgaagctgagcaagatgcagaaggcgggcttcctgtattacgaggatctggcgagcatggttagtaaagaagaagccgatgccgttacgctcatcgtgaaggaaacggtgcgtacctttgtgccggatgcgctggtgaccatcgccggcggtttccgccgtggcaaacctatgggccacgacgttgactttctgatcacgaacccgggccgcaaaatggatgacgtgctgctccacaaagtggttgatctgctcaagaagcaaggtctgctgctgtacgaagacatcaaagagagcacgttcgtggaggggcaactgccaagtcataaaatcgacgccatggacaacttccagaagtgcttcgccattctcaagctgtaccagccgaaggtggataacagtgcggttgggacgagtaagaaaagtgacatggctgaggttaaggattggaaagcggttcgtgtggatctggtgatcacgccattcgagcagttcgcctatgcgctgctcggttggacgggcagcggccaatttcgtcgcgatctgcgtcgctatgcggaggaagagcgcgacatgctgctcgacaaccatgccctctacgacctgaaaaagcgcatctttctgaaagcgggcagcgaagaagagattttcgcgcatctgggtctggattatgtggagccgtgggaacgcaacgcgtaa

SEQ ID NO: 3708 - protein, 394 aa, synthetic construct
  REGION 1..394: note = Variant of terminal deoxynucleotidyl transferase
MHHHHHHGGSGHPPSNTPEKEVPSVIARPVSQYACQRKTTLNNYNKKFTDALEIMAENYKFKENLQACLEAKRAASIFKSLPFEVTSMKDIQGLPCITDDVRDVIEEIIEEGESSRVKEILNDERYKAFKQFTSVFGVGVKTSEKWYRMGLRTVEEAKASKSLKLSKMQKAGFLYYEDLASMVSKEEADAVTLIVKETVRTFVPDALVTIAGGFRRGKPMGHDVDFLITNPGRKMDDVLLHKVVDLLKKQGLLLYEDIKESTFVEGQLPSHKIDAMDNFQKCFAILKLYQPKVDNSAVGTSKKSDMAEVKDWKAVRVDLVITPFEQFAYALLGWTGSGQFRRDLRRYAEEERDMLLDNHALYDLKKRIFLKAGSEEEIFAHLGLDYVEPWERNA

SEQ ID NO: 3709 - DNA, 1185 bp, synthetic construct
  misc_feature 1..1185: note = Variant of terminal deoxynucleotidyl transferase
  source 1..1185: mol_type = other DNA
atgcatcaccaccatcatcatgggggttctggtcatccgccgagcaataccccggagaaggaggtgccgagcgttatcgcccgtccggttagtcagtacgcgtgccagcgcaagaccacgctgaataactacaacaaaaagttcaccgacgcgctggagatcatggccgagaactacaaatttaaagagaacctgcaggcgtgtctggaagccaagcgcgccgcgagtatttttaaaagcctgccgttcgaggttaccagcatgaaagacatccaaggtctgccgtgcattaccgacgacgtacgtgacgtgatcgaggagatcatcgaagagggcgagagcagccgtgttaaagaaatcctcaatgacgagcgctacaaggcctttaagcagttcaccagcgtgttcggtgtgggcgtgaaaacctcggaaaagtggtaccgtatgggcctccgtacggttgaagaagcaaaggccagtaagagtctgaagctgagcaagatgcagaaggcgggcttcctgtattacgaggatctggcgagcatggttagtaaagaagaagccgatgccgttacgctcatcgtgaaggaaacggtgcgtacctttgtgccggatgcgctggtgaccatcgccggcggtttccgccgtggcaaacctatgggccacgacgttgactttctgatcacgaacccgggccgcctgatggatgacgagctgctccacaaagtggttgatctgctcaagaagcaaggtctgctgctgtacgaagacatcaaagagagcacgttcgtggaggggcaactgccaagtcataaaatcgacgccatggacaacttccagaagtgcttcgccattctcaagctgtaccagccgaaggtggataacagtgcggttgggacgagtaagaaaagtgacatggctgaggttaaggattggaaagcggttcgtgtggatctggtgatcacgccattcgagcagttcgcctatgcgctgctcggttggacgggcagcggccaatttcgtcgcgatctgcgtcgctatgcggaggaagagcgcgacatgctgctcgacaaccatgccctctacgacctgaaaaagcgcatctttctgaaagcgggcagcgaagaagagattttcgcgcatctgggtctggattatgtggagccgtgggaacgcaacgcgtaa

SEQ ID NO: 3710 - protein, 394 aa, synthetic construct
  REGION 1..394: note = Variant of terminal deoxynucleotidyl transferase
MHHHHHHGGSGHPPSNTPEKEVPSVIARPVSQYACQRKTTLNNYNKKFTDALEIMAENYKFKENLQACLEAKRAASIFKSLPFEVTSMKDIQGLPCITDDVRDVIEEIIEEGESSRVKEILNDERYKAFKQFTSVFGVGVKTSEKWYRMGLRTVEEAKASKSLKLSKMQKAGFLYYEDLASMVSKEEADAVTLIVKETVRTFVPDALVTIAGGFRRGKPMGHDVDFLITNPGRLMDDELLHKVVDLLKKQGLLLYEDIKESTFVEGQLPSHKIDAMDNFQKCFAILKLYQPKVDNSAVGTSKKSDMAEVKDWKAVRVDLVITPFEQFAYALLGWTGSGQFRRDLRRYAEEERDMLLDNHALYDLKKRIFLKAGSEEEIFAHLGLDYVEPWERNA

SEQ ID NO: 3711 - DNA, 1185 bp, synthetic construct
  misc_feature 1..1185: note = Variant of terminal deoxynucleotidyl transferase
  source 1..1185: mol_type = other DNA
atgcatcaccaccatcatcatgggggttctggtcatccgccgagcaataccccggagaaggaggtgccgagcgttatcgcccgtccggttagtcagtacgcgtgccagcgcaagaccacgctgaataactacaacaaaaagttcaccgacgcgctggagatcatggccgagaactacaaatttaaagagaacctgcaggcgtgtctggaagccaagcgcgccgcgagtatttttaaaagcctgccgttcgaggttaccagcatgaaagacatccaaggtctgccgtgcattaccgacgacgtacgtgacgtgatcgaggagatcatcgaagagggcgagagcagccgtgttaaagaaatcctcaatgacgagcgctacaaggcctttaagcagttcaccagcgtgttcggtgtgggcgtgaaaacctcggaaaagtggtaccgtatgggcctccgtacggttgaagaagcaaaggccagtaagagtctgaagctgagcaagatgcagaaggcgggcttcctgtattacgaggatctggcgagcatggttagtaaagaagaagccgatgccgttacgctcatcgtgaaggaaacggtgcgtacctttgtgccggatgcgctggtgaccatcgccggcggtttccgccgtggcaaacctatgggccacgacgttgactttctgatcacgaacccgggccgcaaaatggatgacgagctgctccacaaagtggttgatctgctcaagaagcaaggtctgctgctgtacgaagacatcaaagagagcacgttcgtggaggggcaactgccaagtcataaagatgacgccatggacaacttccagaagtgcttcgccattctcaagctgtaccagccgaaggtggataacagtgcggttgggacgagtaagaaaagtgacatggctgaggttaaggattggaaagcggttcgtgtggatctggtgatcacgccattcgagcagttcgcctatgcgctgctcggttggacgggcagcggccaatttcgtcgcgatctgcgtcgctatgcggaggaagagcgcgacatgctgctcgacaaccatgccctctacgacctgaaaaagcgcatctttctgaaagcgggcagcgaagaagagattttcgcgcatctgggtctggattatgtggagccgtgggaacgcaacgcgtaa

SEQ ID NO: 3712 - protein, 394 aa, synthetic construct
  REGION 1..394: note = Variant of terminal deoxynucleotidyl transferase
MHHHHHHGGSGHPPSNTPEKEVPSVIARPVSQYACQRKTTLNNYNKKFTDALEIMAENYKFKENLQACLEAKRAASIFKSLPFEVTSMKDIQGLPCITDDVRDVIEEIIEEGESSRVKEILNDERYKAFKQFTSVFGVGVKTSEKWYRMGLRTVEEAKASKSLKLSKMQKAGFLYYEDLASMVSKEEADAVTLIVKETVRTFVPDALVTIAGGFRRGKPMGHDVDFLITNPGRKMDDELLHKVVDLLKKQGLLLYEDIKESTFVEGQLPSHKDDAMDNFQKCFAILKLYQPKVDNSAVGTSKKSDMAEVKDWKAVRVDLVITPFEQFAYALLGWTGSGQFRRDLRRYAEEERDMLLDNHALYDLKKRIFLKAGSEEEIFAHLGLDYVEPWERNA

SEQ ID NO: 3713 - DNA, 1185 bp, synthetic construct
  misc_feature 1..1185: note = Variant of terminal deoxynucleotidyl transferase
  source 1..1185: mol_type = other DNA
atgcatcaccaccatcatcatgggggttctggtcatccgccgagcaataccccggagaaggaggtgccgagcgttatcgcccgtccggttagtcagtacgcgtgccagcgcaagaccacgctgaataactacaacaaaaagttcaccgacgcgctggagatcatggccgagaactacaaatttaaagagaacctgcaggcgtgtctggaagccaagcgcgccgcgagtatttttaaaagcctgccgttcgaggttaccagcatgaaagacatccaaggtctgccgtgcattaccgacgacgtacgtgacgtgatcgaggagatcatcgaagagggcgagagcagccgtgttaaagaaatcctcaatgacgagcgctacaaggcctttaagcagttcaccagcgtgttcggtgtgggcgtgaaaacctcggaaaagtggtaccgtatgggcctccgtacggttgaagaagcaaaggccagtaagagtctgaagctgagcaagatgcagaaggcgggcttcctgtattacgaggatctggcgagcatggttagtaaagaagaagccgatgccgttacgctcatcgtgaaggaaacggtgcgtacctttgtgccggatgcgctggtgaccatcgccggcggtttccgccgtggcaaacctatgggccacgacgttgactttctgatcacgaacccgggccgcaaaatggatgacgagctgctccacaaagtggttgatctgctcaagaagcaaggtctgctgctgtacgaagacatcaaagagagcacgttcgtggaggggcaactgccaagtccgaaaatcgacgccatggacaacttccagaagtgcttcgccattctcaagctgtaccagccgaaggtggataacagtgcggttgggacgagtaagaaaagtgacatggctgaggttaaggattggaaagcggttcgtgtggatctggtgatcacgccattcgagcagttcgcctatgcgctgctcggttggacgggcagcggccaatttcgtcgcgatctgcgtcgctatgcggaggaagagcgcgacatgctgctcgacaaccatgccctctacgacctgaaaaagcgcatctttctgaaagcgggcagcgaagaagagattttcgcgcatctgggtctggattatgtggagccgtgggaacgcaacgcgtaa

SEQ ID NO: 3714 - protein, 394 aa, synthetic construct
  REGION 1..394: note = Variant of terminal deoxynucleotidyl transferase
MHHHHHHGGSGHPPSNTPEKEVPSVIARPVSQYACQRKTTLNNYNKKFTDALEIMAENYKFKENLQACLEAKRAASIFKSLPFEVTSMKDIQGLPCITDDVRDVIEEIIEEGESSRVKEILNDERYKAFKQFTSVFGVGVKTSEKWYRMGLRTVEEAKASKSLKLSKMQKAGFLYYEDLASMVSKEEADAVTLIVKETVRTFVPDALVTIAGGFRRGKPMGHDVDFLITNPGRKMDDELLHKVVDLLKKQGLLLYEDIKESTFVEGQLPSPKIDAMDNFQKCFAILKLYQPKVDNSAVGTSKKSDMAEVKDWKAVRVDLVITPFEQFAYALLGWTGSGQFRRDLRRYAEEERDMLLDNHALYDLKKRIFLKAGSEEEIFAHLGLDYVEPWERNA

SEQ ID NO: 3715 - DNA, 1185 bp, synthetic construct
  misc_feature 1..1185: note = Variant of terminal deoxynucleotidyl transferase
  source 1..1185: mol_type = other DNA
atgcatcaccaccatcatcatgggggttctggtcatccgccgagcaataccccggagaaggaggtgccgagcgttatcgcccgtccggttagtcagtacgcgtgccagcgcaagaccacgctgaataactacaacaaaaagttcaccgacgcgctggagatcatggccgagaactacaaatttaaagagaacctgcaggcgtgtctggaagccaagcgcgccgcgagtatttttaaaagcctgccgttcgaggttaccagcatgaaagacatccaaggtctgccgtgcattaccgacgacgtacgtgacgtgatcgaggagatcatcgaagagggcgagagcagccgtgttaaagaaatcctcaatgacgagcgctacaaggcctttaagcagttcaccagcgtgttcggtgtgggcgtgaaaacctcggaaaagtggtaccgtatgggcctccgtacggttgaagaagcaaaggccagtaagagtctgaagctgagcaagatgcagaaggcgggcttcctgtattacgaggatctggcgagcatggttagtaaagaagaagccgatgccgttacgctcatcgtgaaggaaacggtgcgtacctttgtgccggatgcgctggtgaccatcgccggcggtttccgccgtggcaaacctatgggccacgacgttgactttctgatcacgaacccgggccgcccgatggatgacgagctgctccacaaagtggttgatctgctcaagaagcaaggtctgctgctgtacgaagacatcaaagagagcacgttcgtggaggggcaactgccaagtcataaaatcgacgccatggacaacttccagaagtgcttcgccattctcaagctgtaccagccgaaggtggataacagtgcggttgggacgagtaagaaaagtgacatggctgaggttaaggattggaaagcggttcgtgtggatctggtgatcacgccattcgagcagttcgcctatgcgctgctcggttggacgggcagcggccaatttcgtcgcgatctgcgtcgctatgcggaggaagagcgcgacatgctgctcgacaaccatgccctctacgacctgaaaaagcgcatctttctgaaagcgggcagcgaagaagagattttcgcgcatctgggtctggattatgtggagccgtgggaacgcaacgcgtaa

SEQ ID NO: 3716 - protein, 394 aa, synthetic construct
  REGION 1..394: note = Variant of terminal deoxynucleotidyl transferase
MHHHHHHGGSGHPPSNTPEKEVPSVIARPVSQYACQRKTTLNNYNKKFTDALEIMAENYKFKENLQACLEAKRAASIFKSLPFEVTSMKDIQGLPCITDDVRDVIEEIIEEGESSRVKEILNDERYKAFKQFTSVFGVGVKTSEKWYRMGLRTVEEAKASKSLKLSKMQKAGFLYYEDLASMVSKEEADAVTLIVKETVRTFVPDALVTIAGGFRRGKPMGHDVDFLITNPGRPMDDELLHKVVDLLKKQGLLLYEDIKESTFVEGQLPSHKIDAMDNFQKCFAILKLYQPKVDNSAVGTSKKSDMAEVKDWKAVRVDLVITPFEQFAYALLGWTGSGQFRRDLRRYAEEERDMLLDNHALYDLKKRIFLKAGSEEEIFAHLGLDYVEPWERNA

SEQ ID NO: 3717 - DNA, 1185 bp, synthetic construct
  misc_feature 1..1185: note = Variant of terminal deoxynucleotidyl transferase
  source 1..1185: mol_type = other DNA
atgcatcaccaccatcatcatgggggttctggtcatccgccgagcaataccccggagaaggaggtgccgagcgttatcgcccgtccggttagtcagtacgcgtgccagcgcaagaccacgctgaataactacaacaaaaagttcaccgacgcgctggagatcatggccgagaactacaaatttaaagagaacctgcaggcgtgtctggaagccaagcgcgccgcgagtatttttaaaagcctgccgttcgaggttaccagcatgaaagacatccaaggtctgccgtgcattaccgacgacgtacgtgacgtgatcgaggagatcatcgaagagggcgagagcagccgtgttaaagaaatcctcaatgacgagcgctacaaggcctttaagcagttcaccagcgtgttcggtgtgggcgtgaaaacctcggaaaagtggtaccgtatgggcctccgtacggttgaagaagcaaaggccagtaagagtctgaagctgagcaagatgcagaaggcgggcttcctgtattacgaggatctggcgagcatggttagtaaagaagaagccgatgccgttacgctcatcgtgaaggaaacggtgcgtacctttatcccggatgcgctggtgaccatcgccggcggtttccgccgtggcaaacctatgggccacgacgttgactttctgatcacgaacccgggccgcaaaatggatgacgagctgctccacaaagtggttgatctgctcaagaagcaaggtctgctgctgtacgaagacatcaaagagagcacgttcgtggaggggcaactgccaagtcataaaatcgacgccatggacaacttccagaagtgcttcgccattctcaagctgtaccagccgaaggtggataacagtgcggttgggacgagtaagaaaagtgacatggctgaggttaaggattggaaagcggttcgtgtggatctggtgatcacgccattcgagcagttcgcctatgcgctgctcggttggacgggcagcggccaatttcgtcgcgatctgcgtcgctatgcggaggaagagcgcgacatgctgctcgacaaccatgccctctacgacctgaaaaagcgcatctttctgaaagcgggcagcgaagaagagattttcgcgcatctgggtctggattatgtggagccgtgggaacgcaacgcgtaa

SEQ ID NO: 3718 - protein, 394 aa, synthetic construct
  REGION 1..394: note = Variant of terminal deoxynucleotidyl transferase
MHHHHHHGGSGHPPSNTPEKEVPSVIARPVSQYACQRKTTLNNYNKKFTDALEIMAENYKFKENLQACLEAKRAASIFKSLPFEVTSMKDIQGLPCITDDVRDVIEEIIEEGESSRVKEILNDERYKAFKQFTSVFGVGVKTSEKWYRMGLRTVEEAKASKSLKLSKMQKAGFLYYEDLASMVSKEEADAVTLIVKETVRTFIPDALVTIAGGFRRGKPMGHDVDFLITNPGRKMDDELLHKVVDLLKKQGLLLYEDIKESTFVEGQLPSHKIDAMDNFQKCFAILKLYQPKVDNSAVGTSKKSDMAEVKDWKAVRVDLVITPFEQFAYALLGWTGSGQFRRDLRRYAEEERDMLLDNHALYDLKKRIFLKAGSEEEIFAHLGLDYVEPWERNA

SEQ ID NO: 3719 - DNA, 1185 bp, synthetic construct
  misc_feature 1..1185: note = Variant of terminal deoxynucleotidyl transferase
  source 1..1185: mol_type = other DNA
atgcatcaccaccatcatcatgggggttctggtcatccgccgagcaataccccggagaaggaggtgccgagcgttatcgcccgtccggttagtcagtacgcgtgccagcgcaagaccacgctgaataactacaacaaaaagttcaccgacgcgctggagatcatggccgagaactacaaatttaaagagaacctgcaggcgtgtctggaagccaagcgcgccgcgagtatttttaaaagcctgccgttcgaggttaccagcatgaaagacatccaaggtctgccgtgcattaccgacgacgtacgtgacgtgatcgaggagatcatcgaagagggcgagagcagccgtgttaaagaaatcctcaatgacgagcgctacaaggcctttaagcagttcaccagcgtgttcggtgtgggcgtgaaaacctcggaaaagtggtaccgtatgggcctccgtacggttgaagaagcaaaggccagtaagagtctgaagctgagcaagatgcagaaggcgggcttcctgtattacgaggatctggcgagcatggttagtaaagaagaagccgatgccgttacgctcatcgtgaaggaaacggtgcgtacctttgtgccggatgcgctggtgaccatcgccggcggtttccgccgtggcaaacctatgggccacgacgttgactttctgatcacgaacccgggccgcaaatgtgatgacgagctgctccacaaagtggttgatctgctcaagaagcaaggtctgctgctgtacgaagacatcaaagagagcacgttcgtggaggggcaactgccaagtcataaaatcgacgccatggacaacttccagaagtgcttcgccattctcaagctgtaccagccgaaggtggataacagtgcggttgggacgagtaagaaaagtgacatggctgaggttaaggattggaaagcggttcgtgtggatctggtgatcacgccattcgagcagttcgcctatgcgctgctcggttggacgggcagcggccaatttcgtcgcgatctgcgtcgctatgcggaggaagagcgcgacatgctgctcgacaaccatgccctctacgacctgaaaaagcgcatctttctgaaagcgggcagcgaagaagagattttcgcgcatctgggtctggattatgtggagccgtgggaacgcaacgcgtaa

SEQ ID NO: 3720 - protein, 394 aa, synthetic construct
  REGION 1..394: note = Variant of terminal deoxynucleotidyl transferase
MHHHHHHGGSGHPPSNTPEKEVPSVIARPVSQYACQRKTTLNNYNKKFTDALEIMAENYKFKENLQACLEAKRAASIFKSLPFEVTSMKDIQGLPCITDDVRDVIEEIIEEGESSRVKEILNDERYKAFKQFTSVFGVGVKTSEKWYRMGLRTVEEAKASKSLKLSKMQKAGFLYYEDLASMVSKEEADAVTLIVKETVRTFVPDALVTIAGGFRRGKPMGHDVDFLITNPGRKCDDELLHKVVDLLKKQGLLLYEDIKESTFVEGQLPSHKIDAMDNFQKCFAILKLYQPKVDNSAVGTSKKSDMAEVKDWKAVRVDLVITPFEQFAYALLGWTGSGQFRRDLRRYAEEERDMLLDNHALYDLKKRIFLKAGSEEEIFAHLGLDYVEPWERNA

SEQ ID NO: 3721 - DNA, 1185 bp, synthetic construct
  misc_feature 1..1185: note = Variant of terminal deoxynucleotidyl transferase
  source 1..1185: mol_type = other DNA
atgcatcaccaccatcatcatgggggttctggtcatccgccgagcaataccccggagaaggaggtgccgagcgttatcgcccgtccggttagtcagtacgcgtgccagcgcaagaccacgctgaataactacaacaaaaagttcaccgacgcgctggagatcatggccgagaactacaaatttaaagagaacctgcaggcgtgtctggaagccaagcgcgccgcgagtatttttaaaagcctgccgttcgaggttaccagcatgaaagacatccaaggtctgccgtgcattaccgacgacgtacgtgacgtgatcgaggagatcatcgaagagggcgagagcagccgtgttaaagaaatcctcaatgacgagcgctacaaggcctttaagcagttcaccagcgtgttcggtgtgggcgtgaaaacctcggaaaagtggtaccgtatgggcctccgtacggttgaagaagcaaaggccagtaagagtctgaagctgagcaagatgcagaaggcgggcttcctgtattacgaggatctggcgagcatggttagtaaagaagaagccgatgccgttacgctcatcgtgaaggaaacggtgcgtacctttggcccggatgcgctggtgaccatcgccggcggtttccgccgtggcaaacctatgggccacgacgttgactttctgatcacgaacccgggccgcaaaatggatgacgagctgctccacaaagtggttgatctgctcaagaagcaaggtctgctgctgtacgaagacatcaaagagagcacgttcgtggaggggcaactgccaagtcataaaatcgacgccatggacaacttccagaagtgcttcgccattctcaagctgtaccagccgaaggtggataacagtgcggttgggacgagtaagaaaagtgacatggctgaggttaaggattggaaagcggttcgtgtggatctggtgatcacgccattcgagcagttcgcctatgcgctgctcggttggacgggcagcggccaatttcgtcgcgatctgcgtcgctatgcggaggaagagcgcgacatgctgctcgacaaccatgccctctacgacctgaaaaagcgcatctttctgaaagcgggcagcgaagaagagattttcgcgcatctgggtctggattatgtggagccgtgggaacgcaacgcgtaa

SEQ ID NO: 3722 - protein, 394 aa, synthetic construct
  REGION 1..394: note = Variant of terminal deoxynucleotidyl transferase
MHHHHHHGGSGHPPSNTPEKEVPSVIARPVSQYACQRKTTLNNYNKKFTDALEIMAENYKFKENLQACLEAKRAASIFKSLPFEVTSMKDIQGLPCITDDVRDVIEEIIEEGESSRVKEILNDERYKAFKQFTSVFGVGVKTSEKWYRMGLRTVEEAKASKSLKLSKMQKAGFLYYEDLASMVSKEEADAVTLIVKETVRTFGPDALVTIAGGFRRGKPMGHDVDFLITNPGRKMDDELLHKVVDLLKKQGLLLYEDIKESTFVEGQLPSHKIDAMDNFQKCFAILKLYQPKVDNSAVGTSKKSDMAEVKDWKAVRVDLVITPFEQFAYALLGWTGSGQFRRDLRRYAEEERDMLLDNHALYDLKKRIFLKAGSEEEIFAHLGLDYVEPWERNA

SEQ ID NO: 3723 - DNA, 1185 bp, synthetic construct
  misc_feature 1..1185: note = Variant of terminal deoxynucleotidyl transferase
  source 1..1185: mol_type = other DNA
atgcatcaccaccatcatcatgggggttctggtcatccgccgagcaataccccggagaaggaggtgccgagcgttatcgcccgtccggttagtcagtacgcgtgccagcgcaagaccacgctgaataactacaacaaaaagttcaccgacgcgctggagatcatggccgagaactacaaatttaaagagaacctgcaggcgtgtctggaagccaagcgcgccgcgagtatttttaaaagcctgccgttcgaggttaccagcatgaaagacatccaaggtctgccgtgcattaccgacgacgtacgtgacgtgatcgaggagatcatcgaagagggcgagagcagccgtgttaaagaaatcctcaatgacgagcgctacaaggcctttaagcagttcaccagcgtgttcggtgtgggcgtgaaaacctcggaaaagtggtaccgtatgggcctccgtacggttgaagaagcaaaggccagtaagagtctgaagctgagcaagatgcagaaggcgggcttcctgtattacgaggatctggcgagcatggttagtaaagaagaagccgatgccgttacgctcatcgtgaaggaaacggtgcgtacctttgtgccggatgcgctggtgaccatcgccggcggtttccgccgtggcaaacctatgggccacgacgttgactttctgatcacgaacccgggccgcaaaatggatgacgagctgctccacaaagtggttgatctgctcaagaagcaaggtctgctgctgtacgaagacatcaaagagagcacgttcgtggaggggcaactgccaagtcataaaatcgacgccatggacaacttccagaagtgcttcgccattctcaagctgtaccagccgaaggtggataacagtgcggttgggacgagtaagaaaagtgacatggctgaggttaaggattggaaagcggttcgtgtggatctggtgatcacgccattcgagcagttcgcctatgcgctgctcggttggacgggcagcggccaatttcgtcgcgatctgcgtcgctatgcggaggaagagcgcgacatgctgctcgacaaccatgccctctacgacctgaaaaagcgcatctttctgaaagcgaatagcgaagaagagattttcgcgcatctgggtctggattatgtggagccgtgggaacgcaacgcgtaa

SEQ ID NO: 3724 - protein, 394 aa, synthetic construct; identical to SEQ ID NO: 3202
  REGION 1..394: note = Variant of terminal deoxynucleotidyl transferase

SEQ ID NO: 3725 - DNA, 1185 bp, synthetic construct
  misc_feature 1..1185: note = Variant of terminal deoxynucleotidyl transferase
  source 1..1185: mol_type = other DNA
atgcatcaccaccatcatcatgggggttctggtcatccgccgagcaataccccggagaaggaggtgccgagcgttatcgcccgtccggttagtcagtacgcgtgccagcgcaagaccacgctgaataactacaacaaaaagttcaccgacgcgctggagatcatggccgagaactacaaatttaaagagaacctgcaggcgtgtctggaagccaagcgcgccgcgagtatttttaaaagcctgccgttcgaggttaccagcatgaaagacatccaaggtctgccgtgcattaccgacgacgtacgtgacgtgatcgaggagatcatcgaagagggcgagagcagccgtgttaaagaaatcctcaatgacgagcgctacaaggcctttaagcagttcaccagcgtgttcggtgtgggcgtgaaaacctcggaaaagtggtaccgtatgggcctccgtacggttgaagaagcaaaggccagtaagagtctgaagctgagcaagatgcagaaggcgggcttcctgtattacgaggatctggcgagcatggttagtaaagaagaagccgatgccgttacgctcatcgtgaaggaaacggtgcgtacctttgtgccggatgcgctggtgaccatcgccggcggtttccgccgtggcaaacctatgggccacgacgttgactttctgatcacggagccgggccgcaaaatggatgacgagctgctccacaaagtggttgatctgctcaagaagcaaggtctgctgctgtacgaagacatcaaagagagcacgttcgtggaggggcaactgccaagtcataaaatcgacgccatggacaacttccagaagtgcttcgccattctcaagctgtaccagccgaaggtggataacagtgcggttgggacgagtaagaaaagtgacatggctgaggttaaggattggaaagcggttcgtgtggatctggtgatcacgccattcgagcagttcgcctatgcgctgctcggttggacgggcagcggccaatttcgtcgcgatctgcgtcgctatgcggaggaagagcgcgacatgctgctcgacaaccatgccctctacgacctgaaaaagcgcatctttctgaaagcgggcagcgaagaagagattttcgcgcatctgggtctggattatgtggagccgtgggaacgcaacgcgtaa

SEQ ID NO: 3726 - protein, 394 aa, synthetic construct
  REGION 1..394: note = Variant of terminal deoxynucleotidyl transferase
MHHHHHHGGSGHPPSNTPEKEVPSVIARPVSQYACQRKTTLNNYNKKFTDALEIMAENYKFKENLQACLEAKRAASIFKSLPFEVTSMKDIQGLPCITDDVRDVIEEIIEEGESSRVKEILNDERYKAFKQFTSVFGVGVKTSEKWYRMGLRTVEEAKASKSLKLSKMQKAGFLYYEDLASMVSKEEADAVTLIVKETVRTFVPDALVTIAGGFRRGKPMGHDVDFLITEPGRKMDDELLHKVVDLLKKQGLLLYEDIKESTFVEGQLPSHKIDAMDNFQKCFAILKLYQPKVDNSAVGTSKKSDMAEVKDWKAVRVDLVITPFEQFAYALLGWTGSGQFRRDLRRYAEEERDMLLDNHALYDLKKRIFLKAGSEEEIFAHLGLDYVEPWERNA

SEQ ID NO: 3727 - DNA, 1185 bp, synthetic construct
  misc_feature 1..1185: note = Variant of terminal deoxynucleotidyl transferase
  source 1..1185: mol_type = other DNA
atgcatcaccaccatcatcatgggggttctggtcatccgccgagcaataccccggagaaggaggtgccgagcgttatcgcccgtccggttagtcagtacgcgtgccagcgcaagaccacgctgaataactacaacaaaaagttcaccgacgcgctggagatcatggccgagaactacaaatttaaagagaacctgcaggcgtgtctggaagccaagcgcgccgcgagtatttttaaaagcctgccgttcgaggttaccagcatgaaagacatccaaggtctgccgtgcattaccgacgacgtacgtgacgtgatcgaggagatcatcgaagagggcgagagcagccgtgttaaagaaatcctcaatgacgagcgctacaaggcctttaagcagttcaccagcgtgttcggtgtgggcgtgaaaacctcggaaaagtggtaccgtatgggcctccgtacggttgaagaagcaaaggccagtaagagtctgaagctgagcaagatgcagaaggcgggcttcctgtattacgaggatctggcgagcatggttagtaaagaagaagccgatgccgttacgctcatcgtgaaggaaacggtgcgtacctttgtgccggatgcgctggtgaccatcgccggcggtttccgccgtggcaaacctatgggccacgacgttgactttctgatcacgaacccgggccgcaaaatggatgacgagctgctccacaaagtggttgatctgctcaagaagcaaggtctgctgctgtacgaagacatcaaagagagcacgttcgtggaggggcaactgccaagtcataaaatcgacgccatggacaacttccagaagtgcttcgccattctcaagctgtaccagccgaaggtggataacagtgcggttgggacgagtaagaaaagtgacatggctgaggttaaggattggaaagcggttcgtgtggatctggtgatcacgccattcgagcagttcgcctatgcgctgctcggttggacgggcagcggccaatttcgtcgcgattgccgtcgctatgcggaggaagagcgcgacatgctgctcgacaaccatgccctctacgacctgaaaaagcgcatctttctgaaagcgggcagcgaagaagagattttcgcgcatctgggtctggattatgtggagccgtgggaacgcaacgcgtaa

SEQ ID NO: 3728 - protein, 394 aa, synthetic construct
  REGION 1..394: note = Variant of terminal deoxynucleotidyl transferase
MHHHHHHGGSGHPPSNTPEKEVPSVIARPVSQYACQRKTTLNNYNKKFTDALEIMAENYKFKENLQACLEAKRAASIFKSLPFEVTSMKDIQGLPCITDDVRDVIEEIIEEGESSRVKEILNDERYKAFKQFTSVFGVGVKTSEKWYRMGLRTVEEAKASKSLKLSKMQKAGFLYYEDLASMVSKEEADAVTLIVKETVRTFVPDALVTIAGGFRRGKPMGHDVDFLITNPGRKMDDELLHKVVDLLKKQGLLLYEDIKESTFVEGQLPSHKIDAMDNFQKCFAILKLYQPKVDNSAVGTSKKSDMAEVKDWKAVRVDLVITPFEQFAYALLGWTGSGQFRRDCRRYAEEERDMLLDNHALYDLKKRIFLKAGSEEEIFAHLGLDYVEPWERNA

SEQ ID NO: 3729 - DNA, 1185 bp, synthetic construct
  misc_feature 1..1185: note = Variant of terminal deoxynucleotidyl transferase
  source 1..1185: mol_type = other DNA
atgcatcaccaccatcatcatgggggttctggtcatccgccgagcatgaccccggagaaggaggtgccgagcgttatcgcccgtccggttagtcagtacgcgtgccagcgcaagaccacgctgaataactacaacaaaaagttcaccgacgcgctggagatcatggccgagaactacaaatttaaagagaacctgcaggcgtgtctggaagccaagcgcgccgcgagtatttttaaaagcctgccgttcgaggttaccagcatgaaagacatccaaggtctgccgtgcattaccgacgacgtacgtgacgtgatcgaggagatcatcgaagagggcgagagcagccgtgttaaagaaatcctcaatgacgagcgctacaaggcctttaagcagttcaccagcgtgttcggtgtgggcgtgaaaacctcggaaaagtggtaccgtatgggcctccgtacggttgaagaagcaaaggccagtaagagtctgaagctgagcaagatgcagaaggcgggcttcctgtattacgaggatctggcgagcatggttagtaaagaagaagccgatgccgttacgctcatcgtgaaggaaacggtgcgtacctttgtgccggatgcgctggtgaccatcgccggcggtttccgccgtggcaaacctatgggccacgacgttgactttctgatcacgaacccgggccgcaaaatggatgacgagctgctccacaaagtggttgatctgctcaagaagcaaggtctgctgctgtacgaagacatcaaagagagcacgttcgtggaggggcaactgccaagtcataaaatcgacgccatggacaacttccagaagtgcttcgccattctcaagctgtaccagccgaaggtggataacagtgcggttgggacgagtaagaaaagtgacatggctgaggttaaggattggaaagcggttcgtgtggatctggtgatcacgccattcgagcagttcgcctatgcgctgctcggttggacgggcagcggccaatttcgtcgcgatctgcgtcgctatgcggaggaagagcgcgacatgctgctcgacaaccatgccctctacgacctgaaaaagcgcatctttctgaaagcgggcagcgaagaagagattttcgcgcatctgggtctggattatgtggagccgtgggaacgcaacgcgtaa

SEQ ID NO: 3730 - protein, 394 aa, synthetic construct; identical to SEQ ID NO: 3204
  REGION 1..394: note = Variant of terminal deoxynucleotidyl transferase

SEQ ID NO: 3731 - DNA, 1185 bp, synthetic construct
  misc_feature 1..1185: note = Variant of terminal deoxynucleotidyl transferase
  source 1..1185: mol_type = other DNA
atgcatcaccaccatcatcatgggggttctggtcatccgccgagcaataccccggagaaggaggtgccgagcgttatcgcccgtccggttagtcagtacgcgtgccagcgcaagaccacgctgaataactacaacaaaaagttcaccgacgcgctggagatcatggccgagaactacaaatttaaagagaacctgcaggcgtgtctggaagccaagcgcgccgcgagtatttttaaaagcctgccgttcgaggttaccagcatgaaagacatccaaggtctgccgtgcattaccgacgacgtacgtgacgtgatcgaggagatcatcgaagagggcgagagcagccgtgttaaagaaatcctcaatgacgagcgctacaaggcctttaagcagttcaccagcgtgttcggtgtgggcgtgaaaacctcggaaaagtggtaccgtatgggcctccgtacggttgaagaagcaaaggccagtaagagtctgaagctgagcaagatgcagaaggcgggcttcctgtattacgaggatctggcgagcatggttagtaaagaagaagccgatgccgttacgctcatcgtgaaggaaacggtgcgtacctttgtgccggatgcgctggtgaccatcgccggcggtttccgccgtggcaaacctatgggccacgacgttgactttctgatcacgaacccgggccgcaaaatggatgacgagctgctccacaaagtggttgatctgctcaagaagcaaggtctgctgctgtacgaagacatcaaagagagcacgttcgtggaggggcaactgccaagtcataaaatcgacgccatggacaacttccagaagtgcttcgccattctcaagctgtaccagccgaaggtggataacagtgcggttgggacgagtaagaaaagtgacatggctgaggttaaggattggaaagcggttcgtgtggatctggtgatcacgccattcgagcagttcgcctatgcgctgctcggttggacgggcagcggccaatttcgtcgcgatctgcgtcgctatgcgtgcgaagagcgcgacatgctgctcgacaaccatgccctctacgacctgaaaaagcgcatctttctgaaagcgggcagcgaagaagagattttcgcgcatctgggtctggattatgtggagccgtgggaacgcaacgcgtaa

SEQ ID NO: 3732 - protein, 394 aa, synthetic construct
  REGION 1..394: note = Variant of terminal deoxynucleotidyl transferase
MHHHHHHGGSGHPPSNTPEKEVPSVIARPVSQYACQRKTTLNNYNKKFTDALEIMAENYKFKENLQACLEAKRAASIFKSLPFEVTSMKDIQGLPCITDDVRDVIEEIIEEGESSRVKEILNDERYKAFKQFTSVFGVGVKTSEKWYRMGLRTVEEAKASKSLKLSKMQKAGFLYYEDLASMVSKEEADAVTLIVKETVRTFVPDALVTIAGGFRRGKPMGHDVDFLITNPGRKMDDELLHKVVDLLKKQGLLLYEDIKESTFVEGQLPSHKIDAMDNFQKCFAILKLYQPKVDNSAVGTSKKSDMAEVKDWKAVRVDLVITPFEQFAYALLGWTGSGQFRRDLRRYACEERDMLLDNHALYDLKKRIFLKAGSEEEIFAHLGLDYVEPWERNA

SEQ ID NO: 3733 - DNA, 1185 bp, synthetic construct
  misc_feature 1..1185: note = Variant of terminal deoxynucleotidyl transferase
  source 1..1185: mol_type = other DNA
atgcatcaccaccatcatcatgggggttctggtcatccgccgagcaataccccggagaaggaggtgccgagcgttatcgcccgtccggttagtcagtacgcgtgccagcgcaagaccacgctgaataactacaacaaaaagttcaccgacgcgctggagatcatggccgagaactacaaatttaaagagaacctgcaggcgtgtctggaagccaagcgcgccgcgagtatttttaaaagcctgccgttcgaggttaccagcatgaaagacatccaaggtctgccgtgcattaccgacgacgtacgtgacgtgatcgaggagatcatcgaagagggcgagagcagccgtgttaaagaaatcctcaatgacgagcgctacaaggcctttaagcagttcaccagcgtgttcggtgtgggcgtgaaaacctcggaaaagtggtaccgtatgggcctccgtacggttgaagaagcaaaggccagtaagagtctgaagctgagcaagatgcagaaggcgggcttcctgtattacgaggatctggcgagcatggttagtaaagaagaagccgatgccgttacgctcatcgtgaaggaaacggtgcgtacctttgtgccggatgcgctggtgaccatcgccggcggtttccgccgtggcaaacctatgggccacgacgttgactttctgatcacgaacccgggccgcaaaatggatgacgagctgctccacaaagtggttgatctgctcaagaagcaaggtctgctgctgtacgaagacatcaaagagagcacgttcgtggaggggcaactgccaagtcagaaaatcgacgccatggacaacttccagaagtgcttcgccattctcaagctgtaccagccgaaggtggataacagtgcggttgggacgagtaagaaaagtgacatggctgaggttaaggattggaaagcggttcgtgtggatctggtgatcacgccattcgagcagttcgcctatgcgctgctcggttggacgggcagcggccaatttcgtcgcgatctgcgtcgctatgcggaggaagagcgcgacatgctgctcgacaaccatgccctctacgacctgaaaaagcgcatctttctgaaagcgggcagcgaagaagagattttcgcgcatctgggtctggattatgtggagccgtgggaacgcaacgcgtaa

SEQ ID NO: 3734 - protein, 394 aa, synthetic construct
  REGION 1..394: note = Variant of terminal deoxynucleotidyl transferase
MHHHHHHGGSGHPPSNTPEKEVPSVIARPVSQYACQRKTTLNNYNKKFTDALEIMAENYKFKENLQACLEAKRAASIFKSLPFEVTSMKDIQGLPCITDDVRDVIEEIIEEGESSRVKEILNDERYKAFKQFTSVFGVGVKTSEKWYRMGLRTVEEAKASKSLKLSKMQKAGFLYYEDLASMVSKEEADAVTLIVKETVRTFVPDALVTIAGGFRRGKPMGHDVDFLITNPGRKMDDELLHKVVDLLKKQGLLLYEDIKESTFVEGQLPSQKIDAMDNFQKCFAILKLYQPKVDNSAVGTSKKSDMAEVKDWKAVRVDLVITPFEQFAYALLGWTGSGQFRRDLRRYAEEERDMLLDNHALYDLKKRIFLKAGSEEEIFAHLGLDYVEPWERNA

SEQ ID NO: 3735 - DNA, 1185 bp, synthetic construct
  misc_feature 1..1185: note = Variant of terminal deoxynucleotidyl transferase
  source 1..1185: mol_type = other DNA
atgcatcaccaccatcatcatgggggttctggtcatccgccgagcaataccccggagaaggaggtgccgagcgttatcgcccgtccggttagtcagtacgcgtgccagcgcaagaccacgctgaataactacaacaaaaagttcaccgacgcgctggagatcatggccgagaactacaaatttaaagagaacctgcaggcgtgtctggaagccaagcgcgccgcgagtatttttaaaagcctgccgttcgaggttaccagcatgaaagacatccaaggtctgccgtgcattaccgacgacgtacgtgacgtgatcgaggagatcatcgaagagggcgagagcagccgtgttaaagaaatcctcaatgacgagcgctacaaggcctttaagcagttcaccagcgtgttcggtgtgggcgtgaaaacctcggaaaagtggtaccgtatgggcctccgtacggttgaagaagcaaaggccagtaagagtctgaagctgagcaagatgcagaaggcgggcttcctgtattacgaggatctggcgagcatggttagtaaagaagaagccgatgccgttacgctcatcgtgaaggaaacggtgcgtacctttgtgccggatgcgctggtgaccatcgccggcggtttccgccgtggcaaacctatgggccacgacgttgactttctgatcacgaacccgggccgcgctatggatgacgagctgctccacaaagtggttgatctgctcaagaagcaaggtctgctgctgtacgaagacatcaaagagagcacgttcgtggaggggcaactgccaagtcataaaatcgacgccatggacaacttccagaagtgcttcgccattctcaagctgtaccagccgaaggtggataacagtgcggttgggacgagtaagaaaagtgacatggctgaggttaaggattggaaagcggttcgtgtggatctggtgatcacgccattcgagcagttcgcctatgcgctgctcggttggacgggcagcggccaatttcgtcgcgatctgcgtcgctatgcggaggaagagcgcgacatgctgctcgacaaccatgccctctacgacctgaaaaagcgcatctttctgaaagcgggcagcgaagaagagattttcgcgcatctgggtctggattatgtggagccgtgggaacgcaacgcgtaa

SEQ ID NO: 3736 - protein, 394 aa, synthetic construct; identical to SEQ ID NO: 3206
  REGION 1..394: note = Variant of terminal deoxynucleotidyl transferase

SEQ ID NO: 3737 - DNA, 1185 bp, synthetic construct
  misc_feature 1..1185: note = Variant of terminal deoxynucleotidyl transferase
  source 1..1185: mol_type = other DNA
atgcatcaccaccatcatcatgggggttctggtcatccgccgagcaataccccggagaaggaggtgccgagcgttatcgcccgtccggttagtcagtacgcgtgccagcgcaagaccacgctgaataactacaacaaaaagttcaccgacgcgctggagatcatggccgagaactacaaatttaaagagaacctgcaggcgtgtctggaagccaagcgcgccgcgagtatttttaaaagcctgccgttcgaggttaccagcatgaaagacatccaaggtctgccgtgcattaccgacgacgtacgtgacgtgatcgaggagatcatcgaagagggcgagagcagccgtgttaaagaaatcctcaatgacgagcgctacaaggcctttaagcagttcaccagcgtgttcggtgtgggcgtgaaaacctcggaaaagtggtaccgtatgggcctccgtacggttgaagaagcaaaggccagtaagagtctgaagctgagcaagatgcagaaggcgggcttcctgtattacgaggatctggcgagcatggttagtaaagaagaagccgatgccgttacgctcatcgtgaaggaaacggtgcgtacctttgtgccggatgcgctggtgaccatcgccggcggtttccgccgtggcaaacctatgggccacgacgttgactttctgatcacgaacccgggccgccagatggatgacgagctgctccacaaagtggttgatctgctcaagaagcaaggtctgctgctgtacgaagacatcaaagagagcacgttcgtggaggggcaactgccaagtcataaaatcgacgccatggacaacttccagaagtgcttcgccattctcaagctgtaccagccgaaggtggataacagtgcggttgggacgagtaagaaaagtgacatggctgaggttaaggattggaaagcggttcgtgtggatctggtgatcacgccattcgagcagttcgcctatgcgctgctcggttggacgggcagcggccaatttcgtcgcgatctgcgtcgctatgcggaggaagagcgcgacatgctgctcgacaaccatgccctctacgacctgaaaaagcgcatctttctgaaagcgggcagcgaagaagagattttcgcgcatctgggtctggattatgtggagccgtgggaacgcaacgcgtaa

SEQ ID NO: 3738 - protein, 394 aa, synthetic construct; identical to SEQ ID NO: 3208
  REGION 1..394: note = Variant of terminal deoxynucleotidyl transferase

SEQ ID NO: 3739 - DNA, 1185 bp, synthetic construct
  misc_feature 1..1185: note = Variant of terminal deoxynucleotidyl transferase
  source 1..1185: mol_type = other DNA
atgcatcaccaccatcatcatgggggttctggtcatccgccgagcaataccccggagaaggaggtgccgagcgttatcgcccgtccggttagtcagtacgcgtgccagcgcaagaccacgctgaataactacaacaaaaagttcaccgacgcgctggagatcatggccgagaactacaaatttaaagagaacctgcaggcgtgtctggaagccaagcgcgccgcgagtatttttaaaagcctgccgttcgaggttaccagcatgaaagacatccaaggtctgccgtgcattaccgacgacgtacgtgacgtgatcgaggagatcatcgaagagggcgagagcagccgtgttaaagaaatcctcaatgacgagcgctacaaggcctttaagcagttcaccagcgtgttcggtgtgggcgtgaaaacctcggaaaagtggtaccgtatgggcctccgtacggttgaagaagcaaaggccagtaagagtctgaagctgagcaagatgcagaaggcgggcttcctgtattacgaggatctggcgagcatggttagtaaagaagaagccgatgccgttacgctcatcgtgaaggaaacggtgcgtacctttgtgccggatgcgctggtgaccatcgccggcggtttccgccgtggcaaacctatgggccacgacgttgactttctgatcacgaacccgggccgcaaagttgatgacgagctgctccacaaagtggttgatctgctcaagaagcaaggtctgctgctgtacgaagacatcaaagagagcacgttcgtggaggggcaactgccaagtcataaaatcgacgccatggacaacttccagaagtgcttcgccattctcaagctgtaccagccgaaggtggataacagtgcggttgggacgagtaagaaaagtgacatggctgaggttaaggattggaaagcggttcgtgtggatctggtgatcacgccattcgagcagttcgcctatgcgctgctcggttggacgggcagcggccaatttcgtcgcgatctgcgtcgctatgcggaggaagagcgcgacatgctgctcgacaaccatgccctctacgacctgaaaaagcgcatctttctgaaagcgggcagcgaagaagagattttcgcgcatctgggtctggattatgtggagccgtgggaacgcaacgcgtaa

SEQ ID NO: 3740 - protein, 394 aa, synthetic construct
  REGION 1..394: note = Variant of terminal deoxynucleotidyl transferase
MHHHHHHGGSGHPPSNTPEKEVPSVIARPVSQYACQRKTTLNNYNKKFTDALEIMAENYKFKENLQACLEAKRAASIFKSLPFEVTSMKDIQGLPCITDDVRDVIEEIIEEGESSRVKEILNDERYKAFKQFTSVFGVGVKTSEKWYRMGLRTVEEAKASKSLKLSKMQKAGFLYYEDLASMVSKEEADAVTLIVKETVRTFVPDALVTIAGGFRRGKPMGHDVDFLITNPGRKVDDELLHKVVDLLKKQGLLLYEDIKESTFVEGQLPSHKIDAMDNFQKCFAILKLYQPKVDNSAVGTSKKSDMAEVKDWKAVRVDLVITPFEQFAYALLGWTGSGQFRRDLRRYAEEERDMLLDNHALYDLKKRIFLKAGSEEEIFAHLGLDYVEPWERNA

SEQ ID NO: 3741 - DNA, 1185 bp, synthetic construct
  misc_feature 1..1185: note = Variant of terminal deoxynucleotidyl transferase
  source 1..1185: mol_type = other DNA
atgcatcaccaccatcatcatgggggttctggtcatccgccgagcaataccccggagaaggaggtgccgagcgttatcgcccgtccggttagtcagtacgcgtgccagcgcaagaccacgctgaataactacaacaaaaagttcaccgacgcgctggagatcatggccgagaactacaaatttaaagagaacctgcaggcgtgtctggaagccaagcgcgccgcgagtatttttaaaagcctgccgttcgaggttaccagcatgaaagacatccaaggtctgccgtgcattaccgacgacgtacgtgacgtgatcgaggagatcatcgaagagggcgagagcagccgtgttaaagaaatcctcaatgacgagcgctacaaggcctttaagcagttcaccagcgtgttcggtgtgggcgtgaaaacctcggaaaagtggtaccgtatgggcctccgtacggttgaagaagcaaaggccagtaagagtctgaagctgagcaagatgcagaaggcgggcttcctgtattacgaggatctggcgagcatggttagtaaagaagaagccgatgccgttacgctcatcgtgaaggaaacggtgcgtacctttgtgccggatgcgctggtgaccatcgccggcggtttccgccgtggcaaacctatgggccacgacgttgactttctgatcacgaacccgggccgcaaaatggatgacgagctgctccacaaagtggttgatctgctcaagaagcaaggtctgctgctgtacgaagacatcaaagagagcacgttcgtggaggggcaactgccaagtcataaaatcgacgccatggacaacttccagaagtgcttcgccattctcaagctgtaccagccgaaggtggataacagtgcggttgggacgagtaagaaaagtgacatggctgaggttaaggattggaaagcggttcgtgtggatctggtgatcacgccattcgagcagttcgcctatgcgctgctcggttggacgggcagcggccaatttcgtcgcgatctgcgtcgctatgcggaggaagagcgcgacatgctgctcgacaaccatgccctctacgacctgaaaaagcgcatctttctgaaagcgggcagcgaagaagagattttcagtcatctgggtctggattatgtggagccgtgggaacgcaacgcgtaa

SEQ ID NO: 3742 - protein, 394 aa, synthetic construct; identical to SEQ ID NO: 3210
  REGION 1..394: note = Variant of terminal deoxynucleotidyl transferase

SEQ ID NO: 3743 - DNA, 1185 bp, synthetic construct
  misc_feature 1..1185: note = Variant of terminal deoxynucleotidyl transferase
  source 1..1185: mol_type = other DNA
atgcatcaccaccatcatcatgggggttctggtcatccgccgagcaataccccggagaaggaggtgccgagcgttatcgcccgtccggttagtcagtacgcgtgccagcgcaagaccacgctgaataactacaacaaaaagttcaccgacgcgctggagatcatggccgagaactacaaatttaaagagaacctgcaggcgtgtctggaagccaagcgcgccgcgagtatttttaaaagcctgccgttcgaggttaccagcatgaaagacatccaaggtctgccgtgcattaccgacgacgtacgtgacgtgatcgaggagatcatcgaagagggcgagagcagccgtgttaaagaaatcctcaatgacgagcgctacaaggcctttaagcagttcaccagcgtgttcggtgtgggcgtgaaaacctcggaaaagtggtaccgtatgggcctccgtacggttgaagaagcaaaggccagtaagagtctgaagctgagcaagatgcagaaggcgggcttcctgtattacgaggatctggcgagcatggttagtaaagaagaagccgatgccgttacgctcatcgtgaaggaaacggtgcgtacctttgtgccggatgcgctggtgaccatcgccggcggtttccgccgtggcaaacctatgggccacgacgttgactttctgatcacgaacattggccgcaaaatggatgacgagctgctccacaaagtggttgatctgctcaagaagcaaggtctgctgctgtacgaagacatcaaagagagcacgttcgtggaggggcaactgccaagtcataaaatcgacgccatggacaacttccagaagtgcttcgccattctcaagctgtaccagccgaaggtggataacagtgcggttgggacgagtaagaaaagtgacatggctgaggttaaggattggaaagcggttcgtgtggatctggtgatcacgccattcgagcagttcgcctatgcgctgctcggttggacgggcagcggccaatttcgtcgcgatctgcgtcgctatgcggaggaagagcgcgacatgctgctcgacaaccatgccctctacgacctgaaaaagcgcatctttctgaaagcgggcagcgaagaagagattttcgcgcatctgggtctggattatgtggagccgtgggaacgcaacgcgtaa

SEQ ID NO: 3744 - protein, 394 aa, synthetic construct
  REGION 1..394: note = Variant of terminal deoxynucleotidyl transferase
MHHHHHHGGSGHPPSNTPEKEVPSVIARPVSQYACQRKTTLNNYNKKFTDALEIMAENYKFKENLQACLEAKRAASIFKSLPFEVTSMKDIQGLPCITDDVRDVIEEIIEEGESSRVKEILNDERYKAFKQFTSVFGVGVKTSEKWYRMGLRTVEEAKASKSLKLSKMQKAGFLYYEDLASMVSKEEADAVTLIVKETVRTFVPDALVTIAGGFRRGKPMGHDVDFLITNIGRKMDDELLHKVVDLLKKQGLLLYEDIKESTFVEGQLPSHKIDAMDNFQKCFAILKLYQPKVDNSAVGTSKKSDMAEVKDWKAVRVDLVITPFEQFAYALLGWTGSGQFRRDLRRYAEEERDMLLDNHALYDLKKRIFLKAGSEEEIFAHLGLDYVEPWERNA

SEQ ID NO: 3745 - DNA, 1185 bp, synthetic construct
  misc_feature 1..1185: note = Variant of terminal deoxynucleotidyl transferase
  source 1..1185: mol_type = other DNA
atgcatcaccaccatcatcatgggggttctggtcatccgccgagcaataccccggagaaggaggtgccgagcgttatcgcccgtccggttagtcagtacgcgtgccagcgcaagaccacgctgaataactacaacaaaaagttcaccgacgcgctggagatcatggccgagaactacaaatttaaagagaacctgcaggcgtgtctggaagccaagcgcgccgcgagtatttttaaaagcctgccgttcgaggttaccagcatgaaagacatccaaggtctgccgtgcattaccgacgacgtacgtgacgtgatcgaggagatcatcgaagagggcgagagcagccgtgttaaagaaatcctcaatgacgagcgctacaaggcctttaagcagttcaccagcgtgttcggtgtgggcgtgaaaacctcggaaaagtggtaccgtatgggcctccgtacggttgaagaagcaaaggccagtaagagtctgaagctgagcaagatgcagaaggcgggcttcctgtattacgaggatctggcgagcatggttagtaaagaagaagccgatgccgttacgctcatcgtgaaggaaacggtgcgtgtgtttgtgccggatgcgctggtgaccatcgccggcggtttccgccgtggcaaacctatgggccacgacgttgactttctgatcacgaacccgggccgcaaaatggatgacgagctgctccacaaagtggttgatctgctcaagaagcaaggtctgctgctgtacgaagacatcaaagagagcacgttcgtggaggggcaactgccaagtcataaaatcgacgccatggacaacttccagaagtgcttcgccattctcaagctgtaccagccgaaggtggataacagtgcggttgggacgagtaagaaaagtgacatggctgaggttaaggattggaaagcggttcgtgtggatctggtgatcacgccattcgagcagttcgcctatgcgctgctcggttggacgggcagcggccaatttcgtcgcgatctgcgtcgctatgcggaggaagagcgcgacatgctgctcgacaaccatgccctctacgacctgaaaaagcgcatctttctgaaagcgggcagcgaagaagagattttcgcgcatctgggtctggattatgtggagccgtgggaacgcaacgcgtaa

SEQ ID NO: 3746 - protein, 394 aa, synthetic construct
  REGION 1..394: note = Variant of terminal deoxynucleotidyl transferase
MHHHHHHGGSGHPPSNTPEKEVPSVIARPVSQYACQRKTTLNNYNKKFTDALEIMAENYKFKENLQACLEAKRAASIFKSLPFEVTSMKDIQGLPCITDDVRDVIEEIIEEGESSRVKEILNDERYKAFKQFTSVFGVGVKTSEKWYRMGLRTVEEAKASKSLKLSKMQKAGFLYYEDLASMVSKEEADAVTLIVKETVRVFVPDALVTIAGGFRRGKPMGHDVDFLITNPGRKMDDELLHKVVDLLKKQGLLLYEDIKESTFVEGQLPSHKIDAMDNFQKCFAILKLYQPKVDNSAVGTSKKSDMAEVKDWKAVRVDLVITPFEQFAYALLGWTGSGQFRRDLRRYAEEERDMLLDNHALYDLKKRIFLKAGSEEEIFAHLGLDYVEPWERNA

SEQ ID NO: 3747 - DNA, 1182 bp, synthetic construct
  misc_feature 1..1182: note = Variant of terminal deoxynucleotidyl transferase
  source 1..1182: mol_type = other DNA
atgcatcaccaccatcatcatgggggttctggtcatccgccgggtaataccccggagaaggaggtgccgagcgttatcgcccgtcatgttagtcagtacgcgtgccagcgcaagaccacgctgaataactacaacaaaaagttcaccgacgcgctggagatcatggccgagaactacaaatttaaagagaacctgcaggcgtgtctggaagccaagcgcgccgcgagtgtcttcaaaagcctgccgttcgaggttaccagcatgaaagacatccaaggtctgccgtgcattaccgacgacgtacgtgacgtgatcgaggagatcatcgaagagggcgagagcagccgtgttaaagaaatcctcaatgacgagcgctacaaggcctttaagcagttcaccagcgtgttcggtgtgggcgtgaaaacctcggaaaagtggtaccgtatgggcctccgtacggttgaagaagcaaaggccagtaagagtctgaagctgagcaagatgcagaaggcgggcttcctgtattacgaggatctggcgagcggtgttagtaaagaagaagccgatgccgttacgctcatcgtgaaggaaacggtgcgtctggttgtaccggatgcgctggtgaccatcgccggcggtttccgccgtggcaaacctatgggccacgacgttgacctgctgatcacgattccgggccgtcctgaagatgacgagctgctccacaaagtggttgatctgctcaagaagcaaggtctgctgctgtacgaagacatccgtgagagcacgttcgtggaggggcaactgccaagtcctaaaatcgacgccctggacaactttcagaagtgcttcgccattctcaagctgtaccagccgaaggtggataacagtgcggttgggacgagtaagaaaagtgacatggctgaggttaaggattggaaagcggttcgtgtggatctggtgatcacgccattcgagcagttcgcctatgcgctgctcggttggacgggcagcggcatctttcgtcgcgatctgcgtcgctatgcggaggaagagcgcgacatgctgctcgacaaccatcgtctctacgacctgaaaaagggcatctttctgagtgcgggcagcgaagaagagattttcggtcatctgggtctggattatctggagccgtgggaacgcaacgcg

SEQ ID NO: 3748 - protein, 394 aa, synthetic construct
  REGION 1..394: note = Variant of terminal deoxynucleotidyl transferase
MHHHHHHGGSGHPPGNTPEKEVPSVIARHVSQYACQRKTTLNNYNKKFTDALEIMAENYKFKENLQACLEAKRAASVFKSLPFEVTSMKDIQGLPCITDDVRDVIEEIIEEGESSRVKEILNDERYKAFKQFTSVFGVGVKTSEKWYRMGLRTVEEAKASKSLKLSKMQKAGFLYYEDLASGVSKEEADAVTLIVKETVRLVVPDALVTIAGGFRRGKPMGHDVDLLITIPGRPEDDELLHKVVDLLKKQGLLLYEDIRESTFVEGQLPSPKIDALDNFQKCFAILKLYQPKVDNSAVGTSKKSDMAEVKDWKAVRVDLVITPFEQFAYALLGWTGSGIFRRDLRRYAEEERDMLLDNHRLYDLKKGIFLSAGSEEEIFGHLGLDYLEPWERNA

SEQ ID NO: 3749 - DNA, 1182 bp, synthetic construct
  misc_feature 1..1182: note = Variant of terminal deoxynucleotidyl transferase
  source 1..1182: mol_type = other DNA
atgcatcaccaccatcatcatgggggttctggtcatccggaaggtaataccccggagaaggaggtgccgagcgttatcgcccgtcatgttagtcagtacgcgtgccagcgcaagaccacgctgaataactacaacaaaaagttcaccgacgcgctggagatcatggccgagaactacaaatttaaagagaacctgcaggcgtgtctggaagccaagcgcgccgcgagtgtcttcaaaagcctgccgttcgaggttaccagcatgaaagacatccaaggtctgccgtgcattaccgacgacgtacgtgacgtgatcgaggagatcatcgaagagggcgagagcagccgtgttaaagaaatcctcaatgacgagcgctacaaggcctttaagcagttcaccagcgtgttcggtgtgggcgtgaaaacctcggaaaagtggtaccgtatgggcctccgtacggttgaagaagcaaaggccagtaagagtctgaagctgagcaagatgcagaaggcgggcttcctgtattacgaggatctggcgagcggtgttagtaaagaagaagccgatgccgttacgctcatcgtgaaggaaacggtggcgactgttgtaccggatgcgctggtgaccatcgccggcggtttccgccgtggcaaacctatgggccacgacgttgacctgctgatcacgccgccgggccgtcctgaagatgacgagctgctccacaaagtggttgatctgctcaagaagcaaggtctgctgctgtacgaagatatccgtgagagcacgttcgtggaggggcaactgccaagtcctaaaatcgacgccctggacaactttcagaagtgcttcgccattctcaagctgtaccagccgaaggtggataacagtgcggttgggacgagtaagaaaagtgacatggctgaggttaaggattggaaagcggttcgtgtggatctggtgatcacgccattcgagcagttcgcctatgcgctgctcggttggacgggcagcggccaatttcgtcgcgatctgcgtcgctatgcggaggaagagcgcgacatgctgctcgacaaccatcgtctctacgacctgaaaaagggcatctttctgagtgcgggcagcgaagaagagattttcggtcatctgggtctggattatctggagccgtgggaacgcaacgcg

SEQ ID NO: 3750 - protein, 394 aa, synthetic construct
  REGION 1..394: note = Variant of terminal deoxynucleotidyl transferase
MHHHHHHGGSGHPEGNTPEKEVPSVIARHVSQYACQRKTTLNNYNKKFTDALEIMAENYKFKENLQACLEAKRAASVFKSLPFEVTSMKDIQGLPCITDDVRDVIEEIIEEGESSRVKEILNDERYKAFKQFTSVFGVGVKTSEKWYRMGLRTVEEAKASKSLKLSKMQKAGFLYYEDLASGVSKEEADAVTLIVKETVATVVPDALVTIAGGFRRGKPMGHDVDLLITPPGRPEDDELLHKVVDLLKKQGLLLYEDIRESTFVEGQLPSPKIDALDNFQKCFAILKLYQPKVDNSAVGTSKKSDMAEVKDWKAVRVDLVITPFEQFAYALLGWTGSGQFRRDLRRYAEEERDMLLDNHRLYDLKKGIFLSAGSEEEIFGHLGLDYLEPWERNA

SEQ ID NO: 3751 - DNA, 1182 bp, synthetic construct
  misc_feature 1..1182: note = Variant of terminal deoxynucleotidyl transferase
  source 1..1182: mol_type = other DNA
atgcatcaccaccatcatcatgggggttctggtcatccgccgggtaataccccggagaaggaggtgccgagcgttatcgcccgtcatgttagtcagtacgcgtgccagcgcaagaccacgctgaataactacaacaaaaagttcaccgacgcgctggagatcatggccgagaactacaaatttaaagagaacctgcaggcgtgtctggaagccaagcgcgccgcgagtatcctgaaaagcctgccgttcgaggttaccagcatgaaagacatccaaggtctgccgtgcattaccgacgacgtacgtgacgtgatcgaggagatcatcgaagagggcgagagcagccgtgttaaagaaatcctcaatgacgagcgctacaaggcctttaagcagttcaccagcgtgttcggtgtgggcgtgaaaacctcggaaaagtggtaccgtatgggcctccgtacggttgaagaagcaaaggccagtaagagtctgaagctgagcaagatgcagaaggcgggcttcctgtattacgaggatctggcgagcggtgttagtaaagaagaagccgatgccgttacgctcatcgtgaaggaaacggtgcgtactgttagtccggatgcgctggtgaccatcgccggcggtttccgccgtggcaaacctatgggccacgacgttgacctgctgatcacgattccgggccgtcctgaagatgacgagctgctccacaaagtggttgatctgctcaagaagcaaggtctgctgctgtacgaagacatccgtgagagcacgttcgtggaggggcaactgccaagtcctaaaatcgacgccctggacaactttcagaagtgcttcgccattctcaagctgtaccagccgaaggtggataacagtgcggttgggacgagtaagaaaagtgacatggctgaggttaaggattggaaagcggttcgtgtggatctggtgatcacgccattcgagcagttcgcctatgcgctgctcggttggacgggcagcggccaatttcgtcgcgatctgcgtcgctatgcggaggaagagcgcgacatgctgctcgacaaccatcgtctctacgacctgaaaaagggcatctttctgagtgcgggcagcgaagaagagattttcggtcatctgggtctggattatctggagccgtgggaacgcaacgcg

SEQ ID NO: 3752 - protein, 394 aa, synthetic construct
  REGION 1..394: note = Variant of terminal deoxynucleotidyl transferase
MHHHHHHGGSGHPPGNTPEKEVPSVIARHVSQYACQRKTTLNNYNKKFTDALEIMAENYKFKENLQACLEAKRAASILKSLPFEVTSMKDIQGLPCITDDVRDVIEEIIEEGESSRVKEILNDERYKAFKQFTSVFGVGVKTSEKWYRMGLRTVEEAKASKSLKLSKMQKAGFLYYEDLASGVSKEEADAVTLIVKETVRTVSPDALVTIAGGFRRGKPMGHDVDLLITIPGRPEDDELLHKVVDLLKKQGLLLYEDIRESTFVEGQLPSPKIDALDNFQKCFAILKLYQPKVDNSAVGTSKKSDMAEVKDWKAVRVDLVITPFEQFAYALLGWTGSGQFRRDLRRYAEEERDMLLDNHRLYDLKKGIFLSAGSEEEIFGHLGLDYLEPWERNA

SEQ ID NO: 3753 - DNA, 1182 bp, synthetic construct
  misc_feature 1..1182: note = Variant of terminal deoxynucleotidyl transferase
  source 1..1182: mol_type = other DNA
atgcatcaccaccatcatcatgggggttctggtcatccgccgagtaataccccggagaaggaggtgccgagcgttatcgcccgtcatgttagtcagtacgcgtgccagcgcaagaccacgctgaataactacaacaaaaagttcaccgacgcgctggagatcatggccgagaactacaaatttaaagagaacctgcaggcgtgtctggaagccaagcgcgccgcgagtatcctgaaaagcctgccgttcgaggttaccagcatgaaagacatccaaggtctgccgtgcattaccgacgacgtacgtgacgtgatcgaggagatcatcgaagagggcgagagcagccgtgttaaagaaatcctcaatgacgagcgctacaaggcctttaagcagttcaccagcgtgttcggtgtgggcgtgaaaacctcggaaaagtggtaccgtatgggcctccgtacggttgaagaagcaaaggccagtaagagtctgaagctgagcaagatgcagaaggcgggcttcctgtattacgaggatctggcgagcggtgttagtaaagaagaagccgatgccgttacgctcatcgtgaaggaaacggtgcgtactgttgtaccggatgcgctggtgaccatcgccggcggtttccgccgtggcaaacctatgggccacgacgttgacctgctgatcacgccgccgggccgtcctgaagatgacgagctgctccacaaagtggttgatctgctcaagaagcaaggtctgctgctgtacgaagacatccgtgagagcacgttcgtggaggggcaactgccaagtcctaaaatcgacgccctggacaactttcagaagtgcttcgccattctcaagctgtaccagccgaaggtggataacagtgcggttgggacgagtaagaaaagtgacatggctgaggttaaggattggaaagcggttcgtgtggatctggtgatcacgccattcgagcagttcgcctatgcgctgctcggttggacgggcagcggccaatttcgtcgcgatctgcgtcgctatgcggaggaagagcgcgacatgctgctcgacaaccatcgtctctacgacctgaaaaagggcatctttctgagtgcgggcagcgaagaagagattttcggtcatctgggtctggattatctggagccgtgggaacgcaacgcg

SEQ ID NO: 3754 - protein, 394 aa, synthetic construct
  REGION 1..394: note = Variant of terminal deoxynucleotidyl transferase
MHHHHHHGGSGHPPSNTPEKEVPSVIARHVSQYACQRKTTLNNYNKKFTDALEIMAENYKFKENLQACLEAKRAASILKSLPFEVTSMKDIQGLPCITDDVRDVIEEIIEEGESSRVKEILNDERYKAFKQFTSVFGVGVKTSEKWYRMGLRTVEEAKASKSLKLSKMQKAGFLYYEDLASGVSKEEADAVTLIVKETVRTVVPDALVTIAGGFRRGKPMGHDVDLLITPPGRPEDDELLHKVVDLLKKQGLLLYEDIRESTFVEGQLPSPKIDALDNFQKCFAILKLYQPKVDNSAVGTSKKSDMAEVKDWKAVRVDLVITPFEQFAYALLGWTGSGQFRRDLRRYAEEERDMLLDNHRLYDLKKGIFLSAGSEEEIFGHLGLDYLEPWERNA

SEQ ID NO: 3755 - DNA, 1182 bp, synthetic construct
  misc_feature 1..1182: note = Variant of terminal deoxynucleotidyl transferase
  source 1..1182: mol_type = other DNA
atgcatcaccaccatcatcatgggggttctggtcatccggaaggtaataccccggagaaggaggtgccgagcgttatcgcccgtcatgttagtcagtacgcgtgccagcgcaagaccacgctgaataactacaacaaaaagttcaccgacgcgctggagatcatggccgagaactacaaatttaaagagaacctgcaggcgtgtctggaagccaagcgcgccgcgagtgtcctgaaaagcctgccgttcgaggttaccagcatgaaagacatccaaggtctgccgtgcattaccgacgacgtacgtgacgtgatcgaggagatcatcgaagagggcgagagcagccgtgttaaagaaatcctcaatgacgagcgctacaaggcctttaagcagttcaccagcgtgttcggtgtgggcgtgaaaacctcggaaaagtggtaccgtatgggcctccgtacggttgaagaagcaaaggccagtaagagtctgaagctgagcaagatgcagaaggcgggcttcctgtattacgaggatctggcgagcggtgttagtaaagaagaagccgatgccgttacgctcatcgtgaaggaaacggtggcgactgttagtccggatgcgctggtgaccatcgccggcggtttccgccgtggcaaacctatgggccacgacgttgacttcctgatcacgattccgggccgtcctgaagatgacgagctgctccacaaagtggttgatctgctcaagaagcaaggtctgctgctgtacgaagatatccgtgagagcacgttcgtggaggggcaactgccaagtcctaaaatcgacgccctggacaactttcagaagtgcttcgccattctcaagctgtaccatccgaaggtggataacagtgcggttgggacgagtaagaaaagtgacatggctgaggttaaggattggaaagcggttcgtgtggatctggtgatcacgccattcgagcagttcgcctatgcgctgctcggttggacgggcagcggccaatttcgtcgcgatctgcgtcgctatgcggaggaagagcgcgacatgctgctcgacaaccatcgtctctacgacctgaaaaagggcatctttctgagtgcgggcagcgaagaagagattttcggtcatctgggtctggattatctggagccgtgggaacgcaacgcg

SEQ ID NO: 3756 - protein, 394 aa, synthetic construct
  REGION 1..394: note = Variant of terminal deoxynucleotidyl transferase
MHHHHHHGGSGHPEGNTPEKEVPSVIARHVSQYACQRKTTLNNYNKKFTDALEIMAENYKFKENLQACLEAKRAASVLKSLPFEVTSMKDIQGLPCITDDVRDVIEEIIEEGESSRVKEILNDERYKAFKQFTSVFGVGVKTSEKWYRMGLRTVEEAKASKSLKLSKMQKAGFLYYEDLASGVSKEEADAVTLIVKETVATVSPDALVTIAGGFRRGKPMGHDVDFLITIPGRPEDDELLHKVVDLLKKQGLLLYEDIRESTFVEGQLPSPKIDALDNFQKCFAILKLYHPKVDNSAVGTSKKSDMAEVKDWKAVRVDLVITPFEQFAYALLGWTGSGQFRRDLRRYAEEERDMLLDNHRLYDLKKGIFLSAGSEEEIFGHLGLDYLEPWERNA

SEQ ID NO: 3757 - DNA, 1182 bp, synthetic construct
  misc_feature 1..1182: note = Variant of terminal deoxynucleotidyl transferase
  source 1..1182: mol_type = other DNA
atgcatcaccaccatcatcatgggggttctggtcatccgccgggtaataccccggagaaggaggtgccgagcgttatcgcccgtcatgttagtcagtacgcgtgccagcgcaagaccacgctgaataactacaacaaaaagttcaccgacgcgctggagatcatggccgagaactacaaatttaaagagaacctgcaggcgtgtctggaagccaagcgcgccgcgagtatcctgaaaagcctgccgttcgaggttaccagcatgaaagacatccaaggtctgccgtgcattaccgacgacgtacgtgacgtgatcgaggagatcatcgaagagggcgagagcagccgtgttaaagaaatcctcaatgacgagcgctacaaggcctttaagcagttcaccagcgtgttcggtgtgggcgtgaaaacctcggaaaagtggtaccgtatgggcctccgtacggttgaagaagcaaaggccagtaagagtctgaagctgagcaagatgcagaaggcgggcttcctgtattacgaggatctggcgagcggtgttagtaaagaagaagccgatgccgttacgctcatcgtgaaggaaacggtgcgtctggttagtccggatgcgctggtgaccatcgccggcggtttccgccgtggcaaacctatgggccacgacgttgacttcctgatcacgccgccgggccgtcctgaagatgacgagctgctccacaaagtggttgatctgctcaagaagcaaggtctgctgctgtacgaagatatccgtgagagcacgttcgtggaggggcaactgccaagtcctaaaatcgacgccctggacaactttcagaagtgcttcgccattctcaagctgtaccagccgaaggtggataacagtgcggttgggacgagtaagaaaagtgacatggctgaggttaaggattggaaagcggttcgtgtggatctggtgatcacgccattcgagcagttcgcctatgcgctgctcggttggacgggcagcggccaatttcgtcgcgatctgcgtcgctatgcggaggaagagcgcgacatgctgctcgacaaccatcgtctctacgacctgaaaaagggcatctttctgagtgcgggcagcgaagaagagattttcggtcatctgggtctggattatctggagccgtgggaacgcaacgcg

SEQ ID NO: 3758 - protein, 394 aa, synthetic construct
  REGION 1..394: note = Variant of terminal deoxynucleotidyl transferase
MHHHHHHGGSGHPPGNTPEKEVPSVIARHVSQYACQRKTTLNNYNKKFTDALEIMAENYKFKENLQACLEAKRAASILKSLPFEVTSMKDIQGLPCITDDVRDVIEEIIEEGESSRVKEILNDERYKAFKQFTSVFGVGVKTSEKWYRMGLRTVEEAKASKSLKLSKMQKAGFLYYEDLASGVSKEEADAVTLIVKETVRLVSPDALVTIAGGFRRGKPMGHDVDFLITPPGRPEDDELLHKVVDLLKKQGLLLYEDIRESTFVEGQLPSPKIDALDNFQKCFAILKLYQPKVDNSAVGTSKKSDMAEVKDWKAVRVDLVITPFEQFAYALLGWTGSGQFRRDLRRYAEEERDMLLDNHRLYDLKKGIFLSAGSEEEIFGHLGLDYLEPWERNA

SEQ ID NO: 3759 - DNA, 1182 bp, synthetic construct
  misc_feature 1..1182: note = Variant of terminal deoxynucleotidyl transferase
  source 1..1182: mol_type = other DNA
atgcatcaccaccatcatcatgggggttctggtcatccggaaagtaataccccggagaaggaggtgccgagcgttatcgcccgtcatgttagtcagtacgcgtgccagcgcaagaccacgctgaataactacaacaaaaagttcaccgacgcgctggagatcatggccgagaactacaaatttaaagagaacctgcaggcgtgtctggaagccaagcgcgccgcgagtatcttcaaaagcctgccgttcgaggttaccagcatgaaagacatccaaggtctgccgtgcattaccgacgacgtacgtgacgtgatcgaggagatcatcgaagagggcgagagcagccgtgttaaagaaatcctcaatgacgagcgctacaaggcctttaagcagttcaccagcgtgttcggtgtgggcgtgaaaacctcggaaaagtggtaccgtatgggcctccgtacggttgaagaagcaaaggccagtaagagtctgaagctgagcaagatgcagaaggcgggcttcctgtattacgaggatctggcgagcggtgttagtaaagaagaagccgatgccgttacgctcatcgtgaaggaaacggtggcgactgttagtccggatgcgctggtgaccatcgccggcggtttccgccgtggcaaacctatgggccacgacgttgacctgctgatcacgattccgggccgtcctgaagatgacgagctgctccacaaagtggttgatctgctcaagaagcaaggtctgctgctgtacgaagacatccgtgagagcacgttcgtggaggggcaactgccaagtcctaaaatcgacgccctggacaactttcagaagtgcttcgccattctcaagctgtaccagccgaaggtggataacagtgcggttgggacgagtaagaaaagtgacatggctgaggttaaggattggaaagcggttcgtgtggatctggtgatcacgccattcgagcagttcgcctatgcgctgctcggttggacgggcagcggccaatttcgtcgcgatctgcgtcgctatgcggaggaagagcgcgacatgctgctcgacaaccatcgtctctacgacctgaaaaagggcatctttctgagtgcgggcagcgaagaagagattttcggtcatctgggtctggattatctggagccgtgggaacgcaacgcg

SEQ ID NO: 3760 - protein, 394 aa, synthetic construct
  REGION 1..394: note = Variant of terminal deoxynucleotidyl transferase
MHHHHHHGGSGHPESNTPEKEVPSVIARHVSQYACQRKTTLNNYNKKFTDALEIMAENYKFKENLQACLEAKRAASIFKSLPFEVTSMKDIQGLPCITDDVRDVIEEIIEEGESSRVKEILNDERYKAFKQFTSVFGVGVKTSEKWYRMGLRTVEEAKASKSLKLSKMQKAGFLYYEDLASGVSKEEADAVTLIVKETVATVSPDALVTIAGGFRRGKPMGHDVDLLITIPGRPEDDELLHKVVDLLKKQGLLLYEDIRESTFVEGQLPSPKIDALDNFQKCFAILKLYQPKVDNSAVGTSKKSDMAEVKDWKAVRVDLVITPFEQFAYALLGWTGSGQFRRDLRRYAEEERDMLLDNHRLYDLKKGIFLSAGSEEEIFGHLGLDYLEPWERNA

SEQ ID NO: 3761 - DNA, 1182 bp, synthetic construct
  misc_feature 1..1182: note = Variant of terminal deoxynucleotidyl transferase
  source 1..1182: mol_type = other DNA
atgcatcaccaccatcatcatgggggttctggtcatccgccgagtaataccccggagaaggaggtgccgagcgttatcgcccgtcatgttagtcagtacgcgtgccagcgcaagaccacgctgaataactacaacaaaaagttcaccgacgcgctggagatcatggccgagaactacaaatttaaagagaacctgcaggcgtgtctggaagccaagcgcgccgcgagtgtcctgaaaagcctgccgttcgaggttaccagcatgaaagacatccaaggtctgccgtgcattaccgacgacgtacgtgacgtgatcgaggagatcatcgaagagggcgagagcagccgtgttaaagaaatcctcaatgacgagcgctacaaggcctttaagcagttcaccagcgtgttcggtgtgggcgtgaaaacctcggaaaagtggtaccgtatgggcctccgtacggttgaagaagcaaaggccagtaagagtctgaagctgagcaagatgcagaaggcgggcttcctgtattacgaggatctggcgagcggtgttagtaaagaagaagccgatgccgttacgctcatcgtgaaggaaacggtgcgtactgttagtccggatgcgctggtgaccatcgccggcggtttccgccgtggcaaacctatgggccacgacgttgacttcctgatcacgccgccgggccgtcctgaagatgacgagctgctccacaaagtggttgatctgctcaagaagcaaggtctgctgctgtacgaagacatccgtgagagcacgttcgtggaggggcaactgccaagtcctaaaatcgacgccctggacaactttcagaagtgcttcgccattctcaagctgtaccagccgaaggtggataacagtgcggttgggacgagtaagaaaagtgacatggctgaggttaaggattggaaagcggttcgtgtggatctggtgatcacgccattcgagcagttcgcctatgcgctgctcggttggacgggcagcggcatctttcgtcgcgatctgcgtcgctatgcggaggaagagcgcgacatgctgctcgacaaccatcgtctctacgacctgaaaaagggcatctttctgagtgcgggcagcgaagaagagattttcggtcatctgggtctggattatctggagccgtgggaacgcaacgcg

SEQ ID NO: 3762 - protein, 394 aa, synthetic construct
  REGION 1..394: note = Variant of terminal deoxynucleotidyl transferase
MHHHHHHGGSGHPPSNTPEKEVPSVIARHVSQYACQRKTTLNNYNKKFTDALEIMAENYKFKENLQACLEAKRAASVLKSLPFEVTSMKDIQGLPCITDDVRDVIEEIIEEGESSRVKEILNDERYKAFKQFTSVFGVGVKTSEKWYRMGLRTVEEAKASKSLKLSKMQKAGFLYYEDLASGVSKEEADAVTLIVKETVRTVSPDALVTIAGGFRRGKPMGHDVDFLITPPGRPEDDELLHKVVDLLKKQGLLLYEDIRESTFVEGQLPSPKIDALDNFQKCFAILKLYQPKVDNSAVGTSKKSDMAEVKDWKAVRVDLVITPFEQFAYALLGWTGSGIFRRDLRRYAEEERDMLLDNHRLYDLKKGIFLSAGSEEEIFGHLGLDYLEPWERNA

SEQ ID NO: 3763 - DNA, 1182 bp, synthetic construct
  misc_feature 1..1182: note = Variant of terminal deoxynucleotidyl transferase
  source 1..1182: mol_type = other DNA
atgcatcaccaccatcatcatgggggttctggtcatccggaaagtaataccccggagaaggaggtgccgagcgttatcgcccgtcatgttagtcagtacgcgtgccagcgcaagaccacgctgaataactacaacaaaaagttcaccgacgcgctggagatcatggccgagaactacaaatttaaagagaacctgcaggcgtgtctggaagccaagcgcgccgcgagtatcctgaaaagcctgccgttcgaggttaccagcatgaaagacatccaaggtctgccgtgcattaccgacgacgtacgtgacgtgatcgaggagatcatcgaagagggcgagagcagccgtgttaaagaaatcctcaatgacgagcgctacaaggcctttaagcagttcaccagcgtgttcggtgtgggcgtgaaaacctcggaaaagtggtaccgtatgggcctccgtacggttgaagaagcaaaggccagtaagagtctgaagctgagcaagatgcagaaggcgggcttcctgtattacgaggatctggcgagcggtgttagtaaagaagaagccgatgccgttacgctcatcgtgaaggaaacggtggcgactgttgtaccggatgcgctggtgaccatcgccggcggtttccgccgtggcaaacctatgggccacgacgttgacctgctgatcacgccgccgggccgtcctgaagatgacgagctgctccacaaagtggttgatctgctcaagaagcaaggtctgctgctgtacgaagatatccgtgagagcacgttcgtggaggggcaactgccaagtcctaaaatcgacgccctggacaactttcagaagtgcttcgccattctcaagctgtaccagccgaaggtggataacagtgcggttgggacgagtaagaaaagtgacatggctgaggttaaggattggaaagcggttcgtgtggatctggtgatcacgccattcgagcagttcgcctatgcgctgctcggttggacgggcagcggcatctttcgtcgcgatctgcgtcgctatgcggaggaagagcgcgacatgctgctcgacaaccatcgtctctacgacctgaaaaagggcatctttctgagtgcgggcagcgaagaagagattttcggtcatctgggtctggattatctggagccgtgggaacgcaacgcg

SEQ ID NO: 3764 - protein, 394 aa, synthetic construct
  REGION 1..394: note = Variant of terminal deoxynucleotidyl transferase
MHHHHHHGGSGHPESNTPEKEVPSVIARHVSQYACQRKTTLNNYNKKFTDALEIMAENYKFKENLQACLEAKRAASILKSLPFEVTSMKDIQGLPCITDDVRDVIEEIIEEGESSRVKEILNDERYKAFKQFTSVFGVGVKTSEKWYRMGLRTVEEAKASKSLKLSKMQKAGFLYYEDLASGVSKEEADAVTLIVKETVATVVPDALVTIAGGFRRGKPMGHDVDLLITPPGRPEDDELLHKVVDLLKKQGLLLYEDIRESTFVEGQLPSPKIDALDNFQKCFAILKLYQPKVDNSAVGTSKKSDMAEVKDWKAVRVDLVITPFEQFAYALLGWTGSGIFRRDLRRYAEEERDMLLDNHRLYDLKKGIFLSAGSEEEIFGHLGLDYLEPWERNA

SEQ ID NO: 3765 - DNA, 1182 bp, synthetic construct
  misc_feature 1..1182: note = Variant of terminal deoxynucleotidyl transferase
  source 1..1182: mol_type = other DNA
atgcatcaccaccatcatcatgggggttctggtcatccgccgggtaataccccggagaaggaggtgccgagcgttatcgcccgtcatgttagtcagtacgcgtgccagcgcaagaccacgctgaataactacaacaaaaagttcaccgacgcgctggagatcatggccgagaactacaaatttaaagagaacctgcaggcgtgtctggaagccaagcgcgccgcgagtgtcctgaaaagcctgccgttcgaggttaccagcatgaaagacatccaaggtctgccgtgcattaccgacgacgtacgtgacgtgatcgaggagatcatcgaagagggcgagagcagccgtgttaaagaaatcctcaatgacgagcgctacaaggcctttaagcagttcaccagcgtgttcggtgtgggcgtgaaaacctcggaaaagtggtaccgtatgggcctccgtacggttgaagaagcaaaggccagtaagagtctgaagctgagcaagatgcagaaggcgggcttcctgtattacgaggatctggcgagcggtgttagtaaagaagaagccgatgccgttacgctcatcgtgaaggaaacggtgcgtactgttgtaccggatgcgctggtgaccatcgccggcggtttccgccgtggcaaacctatgggccacgacgttgactttctgatcacgaacccgggccgtcctgaagatgacgagctgctccacaaagtggttgatctgctcaagaagcaaggtctgctgctgtacgaagacatccgtgagagcacgttcgtggaggggcaactgccaagtcctaaaatcgacgccctggacaactttcagaagtgcttcgccattctcaagctgtaccagccgaaggtggataacagtgcggttgggacgagtaagaaaagtgacatggctgaggttaaggattggaaagcggttcgtgtggatctggtgatcacgccattcgagcagttcgcctatgcgctgctcggttggacgggcagcggccaatttcgtcgcgatctgcgtcgctatgcggaggaagagcgcgacatgctgctcgacaaccatcgtctctacgacctgaaaaagggcatctttctgagtgcgggcagcgaagaagagattttcggtcatctgggtctggattatctggagccgtgggaacgcaacgcg

SEQ ID NO: 3766 - protein, 394 aa, synthetic construct
  REGION 1..394: note = Variant of terminal deoxynucleotidyl transferase
MHHHHHHGGSGHPPGNTPEKEVPSVIARHVSQYACQRKTTLNNYNKKFTDALEIMAENYKFKENLQACLEAKRAASVLKSLPFEVTSMKDIQGLPCITDDVRDVIEEIIEEGESSRVKEILNDERYKAFKQFTSVFGVGVKTSEKWYRMGLRTVEEAKASKSLKLSKMQKAGFLYYEDLASGVSKEEADAVTLIVKETVRTVVPDALVTIAGGFRRGKPMGHDVDFLITNPGRPEDDELLHKVVDLLKKQGLLLYEDIRESTFVEGQLPSPKIDALDNFQKCFAILKLYQPKVDNSAVGTSKKSDMAEVKDWKAVRVDLVITPFEQFAYALLGWTGSGQFRRDLRRYAEEERDMLLDNHRLYDLKKGIFLSAGSEEEIFGHLGLDYLEPWERNA

SEQ ID NO: 3767 - DNA, 1182 bp, synthetic construct
  misc_feature 1..1182: note = Variant of terminal deoxynucleotidyl transferase
  source 1..1182: mol_type = other DNA
atgcatcaccaccatcatcatgggggttctggtcatccgccgagcaataccccggagaaggaggtgccgagcgttatcgcccgtcatgttagtcagtacgcgtgccagcgcaagaccacgctgaataactacaacaaaaagttcaccgacgcgctggagatcatggccgagaactacaaatttaaagagaacctgcaggcgtgtctggaagccaagcgcgccgcgagtatcctgaaaagcctgccgttcgaggttaccagcatgaaagacatccaaggtctgccgtgcattaccgacgacgtacgtgacgtgatcgaggagatcatcgaagagggcgagagcagccgtgttaaagaaatcctcaatgacgagcgctacaaggcctttaagcagttcaccagcgtgttcggtgtgggcgtgaaaacctcggaaaagtggtaccgtatgggcctccgtacggttgaagaagcaaaggccagtaagagtctgaagctgagcaagatgcagaaggcgggcttcctgtattacgaggatctggcgagcggtgttagtaaagaagaagccgatgccgttacgctcatcgtgaaggaaacggtgcgtaccgttgtgccggatgcgctggtgaccatcgccggcggtttccgccgtggcaaacctatgggccacgacgttgacctgctgatcacgaatccgggccgtcctgaagatgacgagctgctccacaaagtggttgatctgctcaagaagcaaggtctgctgctgtacgaagacatccgtgagagcacgttcgtggaggggcaactgccaagtcctaaaatcgacgccctggacaactttcagaagtgcttcgccattctcaagctgtaccgtccgaaggtggataacagtgcggttgggacgagtaagaaaagtgacatggctgaggttaaggattggaaagcggttcgtgtggatctggtgatcacgccattcgagcagttcgcctatgcgctgctcggttggacgggcagcggccaatttcgtcgcgatctgcgtcgctatgcggaggaagagcgcgacatgctgctcgacaaccatcgtctctacgacctgaaaaagggcatctttctgagtgcgggcagcgaagaagagattttcggtcatctgggtctggattatctggagccgtgggaacgcaacgcg

SEQ ID NO: 3768 - protein, 394 aa, synthetic construct
  REGION 1..394: note = Variant of terminal deoxynucleotidyl transferase
MHHHHHHGGSGHPPSNTPEKEVPSVIARHVSQYACQRKTTLNNYNKKFTDALEIMAENYKFKENLQACLEAKRAASILKSLPFEVTSMKDIQGLPCITDDVRDVIEEIIEEGESSRVKEILNDERYKAFKQFTSVFGVGVKTSEKWYRMGLRTVEEAKASKSLKLSKMQKAGFLYYEDLASGVSKEEADAVTLIVKETVRTVVPDALVTIAGGFRRGKPMGHDVDLLITNPGRPEDDELLHKVVDLLKKQGLLLYEDIRESTFVEGQLPSPKIDALDNFQKCFAILKLYRPKVDNSAVGTSKKSDMAEVKDWKAVRVDLVITPFEQFAYALLGWTGSGQFRRDLRRYAEEERDMLLDNHRLYDLKKGIFLSAGSEEEIFGHLGLDYLEPWERNA

SEQ ID NO: 3769 - DNA, 1182 bp, synthetic construct
  misc_feature 1..1182: note = Variant of terminal deoxynucleotidyl transferase
  source 1..1182: mol_type = other DNA
atgcatcaccaccatcatcatgggggttctggtcatccggaaagtaataccccggagaaggaggtgccgagcgttatcgcccgtcatgttagtcagtacgcgtgccagcgcaagaccacgctgaataactacaacaaaaagttcaccgacgcgctggagatcatggccgagaactacaaatttaaagagaacctgcaggcgtgtctggaagccaagcgcgccgcgagtatttttaaaagcctgccgttcgaggttaccagcatgaaagacatccaaggtctgccgtgcattaccgacgacgtacgtgacgtgatcgaggagatcatcgaagagggcgagagcagccgtgttaaagaaatcctcaatgacgagcgctacaaggcctttaagcagttcaccagcgtgttcggtgtgggcgtgaaaacctcggaaaagtggtaccgtatgggcctccgtacggttgaagaagcaaaggccagtaagagtctgaagctgagcaagatgcagaaggcgggcttcctgtattacgaggatctggcgagcggtgttagtaaagaagaagccgatgccgttacgctcatcgtgaaggaaacggtgcgtctggttagtccggatgcgctggtgaccatcgccggcggtttccgccgtggcaaacctatgggccacgacgttgacctgctgatcacgaatccgggccgtcctgaagatgacgagctgctccacaaagtggttgatctgctcaagaagcaaggtctgctgctgtacgaagacatccgtgagagcacgttcgtggaggggcaactgccaagtcctaaaatcgacgccctggacaactttcagaagtgcttcgccattctcaagctgtaccagccgaaggtggataacagtgcggttgggacgagtaagaaaagtgacatggctgaggttaaggattggaaagcggttcgtgtggatctggtgatcacgccattcgagcagttcgcctatgcgctgctcggttggacgggcagcggccaatttcgtcgcgatctgcgtcgctatgcggaggaagagcgcgacatgctgctcgacaaccatcgtctctacgacctgaaaaagggcatctttctgagtgcgggcagcgaagaagagattttcggtcatctgggtctggattatctggagccgtgggaacgcaacgcg

SEQ ID NO: 3770 - protein, 394 aa, synthetic construct
  REGION 1..394: note = Variant of terminal deoxynucleotidyl transferase
MHHHHHHGGSGHPESNTPEKEVPSVIARHVSQYACQRKTTLNNYNKKFTDALEIMAENYKFKENLQACLEAKRAASIFKSLPFEVTSMKDIQGLPCITDDVRDVIEEIIEEGESSRVKEILNDERYKAFKQFTSVFGVGVKTSEKWYRMGLRTVEEAKASKSLKLSKMQKAGFLYYEDLASGVSKEEADAVTLIVKETVRLVSPDALVTIAGGFRRGKPMGHDVDLLITNPGRPEDDELLHKVVDLLKKQGLLLYEDIRESTFVEGQLPSPKIDALDNFQKCFAILKLYQPKVDNSAVGTSKKSDMAEVKDWKAVRVDLVITPFEQFAYALLGWTGSGQFRRDLRRYAEEERDMLLDNHRLYDLKKGIFLSAGSEEEIFGHLGLDYLEPWERNA

SEQ ID NO: 3771 - DNA, 1182 bp, synthetic construct
  misc_feature 1..1182: note = Variant of terminal deoxynucleotidyl transferase
  source 1..1182: mol_type = other DNA
atgcatcaccaccatcatcatgggggttctggtcatccgccgagtaataccccggagaaggaggtgccgagcgttatcgcccgtcatgttagtcagtacgcgtgccagcgcaagaccacgctgaataactacaacaaaaagttcaccgacgcgctggagatcatggccgagaactacaaatttaaagagaacctgcaggcgtgtctggaagccaagcgcgccgcgagtatcctgaaaagcctgccgttcgaggttaccagcatgaaagacatccaaggtctgccgtgcattaccgacgacgtacgtgacgtgatcgaggagatcatcgaagagggcgagagcagccgtgttaaagaaatcctcaatgacgagcgctacaaggcctttaagcagttcaccagcgtgttcggtgtgggcgtgaaaacctcggaaaagtggtaccgtatgggcctccgtacggttgaagaagcaaaggccagtaagagtctgaagctgagcaagatgcagaaggcgggcttcctgtattacgaggatctggcgagcggtgttagtaaagaagaagccgatgccgttacgctcatcgtgaaggaaacggtgcgtaccgttgtgccggatgcgctggtgaccatcgccggcggtttccgccgtggcaaacctatgggccacgacgttgacctgctgatcacgattccgggccgtcctgaagatgacgagctgctccacaaagtggttgatctgctcaagaagcaaggtctgctgctgtacgaagacatccgtgagagcacgttcgtggaggggcaactgccaagtcctaaaatcgacgccctggacaactttcagaagtgcttcgccattctcaagctgtaccagccgaaggtggataacagtgcggttgggacgagtaagaaaagtgacatggctgaggttaaggattggaaagcggttcgtgtggatctggtgatcacgccattcgagcagttcgcctatgcgctgctcggttggacgggcagcggccaatttcgtcgcgatctgcgtcgctatgcggaggaagagcgcgacatgctgctcgacaaccatcgtctctacgacctgaaaaagggcatctttctgagtgcgggcagcgaagaagagattttcggtcatctgggtctggattatctggagccgtgggaacgcaacgcg

SEQ ID NO: 3772 - protein, 394 aa, synthetic construct
  REGION 1..394: note = Variant of terminal deoxynucleotidyl transferase
MHHHHHHGGSGHPPSNTPEKEVPSVIARHVSQYACQRKTTLNNYNKKFTDALEIMAENYKFKENLQACLEAKRAASILKSLPFEVTSMKDIQGLPCITDDVRDVIEEIIEEGESSRVKEILNDERYKAFKQFTSVFGVGVKTSEKWYRMGLRTVEEAKASKSLKLSKMQKAGFLYYEDLASGVSKEEADAVTLIVKETVRTVVPDALVTIAGGFRRGKPMGHDVDLLITIPGRPEDDELLHKVVDLLKKQGLLLYEDIRESTFVEGQLPSPKIDALDNFQKCFAILKLYQPKVDNSAVGTSKKSDMAEVKDWKAVRVDLVITPFEQFAYALLGWTGSGQFRRDLRRYAEEERDMLLDNHRLYDLKKGIFLSAGSEEEIFGHLGLDYLEPWERNA

SEQ ID NO: 3773 - DNA, 1182 bp, synthetic construct
  misc_feature 1..1182: note = Variant of terminal deoxynucleotidyl transferase
  source 1..1182: mol_type = other DNA
atgcatcaccaccatcatcatgggggttctggtcatccggaaagtaataccccggagaaggaggtgccgagcgttatcgcccgtcatgttagtcagtacgcgtgccagcgcaagaccacgctgaataactacaacaaaaagttcaccgacgcgctggagatcatggccgagaactacaaatttaaagagaacctgcaggcgtgtctggaagccaagcgcgccgcgagtgtcctgaaaagcctgccgttcgaggttaccagcatgaaagacatccaaggtctgccgtgcattaccgacgacgtacgtgacgtgatcgaggagatcatcgaagagggcgagagcagccgtgttaaagaaatcctcaatgacgagcgctacaaggcctttaagcagttcaccagcgtgttcggtgtgggcgtgaaaacctcggaaaagtggtaccgtatgggcctccgtacggttgaagaagcaaaggccagtaagagtctgaagctgagcaagatgcagaaggcgggcttcctgtattacgaggatctggcgagcggtgttagtaaagaagaagccgatgccgttacgctcatcgtgaaggaaacggtggcgactgttgtaccggatgcgctggtgaccatcgccggcggtttccgccgtggcaaacctatgggccacgacgttgacctgctgatcacgccgccgggccgtcctgaagatgacgagctgctccacaaagtggttgatctgctcaagaagcaaggtctgctgctgtacgaaacgatccgtgagagcacgttcgtggaggggcaactgccaagtcctaaaatcgacgccctggacaactttcagaagtgcttcgccattctcaagctgtaccagccgaaggtggataacagtgcggttgggacgagtaagaaaagtgacatggctgaggttaaggattggaaagcggttcgtgtggatctggtgatcacgccattcgagcagttcgcctatgcgctgctcggttggacgggcagcggccaatttcgtcgcgatctgcgtcgctatgcggaggaagagcgcgacatgctgctcgacaaccatcgtctctacgacctgaaaaagggcatctttctgagtgcgggcagcgaagaagagattttcggtcatctgggtctggattatctggagccgtgggaacgcaacgcg

SEQ ID NO: 3774 - protein, 394 aa, synthetic construct
  REGION 1..394: note = Variant of terminal deoxynucleotidyl transferase
MHHHHHHGGSGHPESNTPEKEVPSVIARHVSQYACQRKTTLNNYNKKFTDALEIMAENYKFKENLQACLEAKRAASVLKSLPFEVTSMKDIQGLPCITDDVRDVIEEIIEEGESSRVKEILNDERYKAFKQFTSVFGVGVKTSEKWYRMGLRTVEEAKASKSLKLSKMQKAGFLYYEDLASGVSKEEADAVTLIVKETVATVVPDALVTIAGGFRRGKPMGHDVDLLITPPGRPEDDELLHKVVDLLKKQGLLLYETIRESTFVEGQLPSPKIDALDNFQKCFAILKLYQPKVDNSAVGTSKKSDMAEVKDWKAVRVDLVITPFEQFAYALLGWTGSGQFRRDLRRYAEEERDMLLDNHRLYDLKKGIFLSAGSEEEIFGHLGLDYLEPWERNA

SEQ ID NO: 3775 - DNA, 1182 bp, synthetic construct
  misc_feature 1..1182: note = Variant of terminal deoxynucleotidyl transferase
  source 1..1182: mol_type = other DNA
atgcatcaccaccatcatcatgggggttctggtcatccggaaggtaataccccggagaaggaggtgccgagcgttatcgcccgtcatgttagtcagtacgcgtgccagcgcaagaccacgctgaataactacaacaaaaagttcaccgacgcgctggagatcatggccgagaactacaaatttaaagagaacctgcaggcgtgtctggaagccaagcgcgccgcgagtatcttcaaaagcctgccgttcgaggttaccagcatgaaagacatccaaggtctgccgtgcattaccgacgacgtacgtgacgtgatcgaggagatcatcgaagagggcgagagcagccgtgttaaagaaatcctcaatgacgagcgctacaaggcctttaagcagttcaccagcgtgttcggtgtgggcgtgaaaacctcggaaaagtggtaccgtatgggcctccgtacggttgaagaagcaaaggccagtaagagtctgaagctgagcaagatgcagaaggcgggcttcctgtattacgaggatctggcgagcggtgttagtaaagaagaagccgatgccgttacgctcatcgtgaaggaaacggtggcgactgttgtaccggatgcgctggtgaccatcgccggcggtttccgccgtggcaaacctatgggccacgacgttgacttcctgatcacgattccgggccgtcctgaagatgacgagctgctccacaaagtggttgatctgctcaagaagcaaggtctgctgctgtacgaagacatccgtgagagcacgttcgtggaggggcaactgccaagtcctaaaatcgacgccctggacaactttcagaagtgcttcgccattctcaagctgtaccagccgaaggtggataacagtgcggttgggacgagtaagaaaagtgacatggctgaggttaaggattggaaagcggttcgtgtggatctggtgatcacgccattcgagcagttcgcctatgcgctgctcggttggacgggcagcggccaatttcgtcgcgatctgcgtcgctatgcggaggaagagcgcgacatgctgctcgacaaccatcgtctctacgacctgaaaaagggcatctttctgagtgcgggcagcgaagaagagattttcggtcatctgggtctggattatctggagccgtgggaacgcaacgcg

SEQ ID NO: 3776 - protein, 394 aa, synthetic construct
  REGION 1..394: note = Variant of terminal deoxynucleotidyl transferase
MHHHHHHGGSGHPEGNTPEKEVPSVIARHVSQYACQRKTTLNNYNKKFTDALEIMAENYKFKENLQACLEAKRAASIFKSLPFEVTSMKDIQGLPCITDDVRDVIEEIIEEGESSRVKEILNDERYKAFKQFTSVFGVGVKTSEKWYRMGLRTVEEAKASKSLKLSKMQKAGFLYYEDLASGVSKEEADAVTLIVKETVATVVPDALVTIAGGFRRGKPMGHDVDFLITIPGRPEDDELLHKVVDLLKKQGLLLYEDIRESTFVEGQLPSPKIDALDNFQKCFAILKLYQPKVDNSAVGTSKKSDMAEVKDWKAVRVDLVITPFEQFAYALLGWTGSGQFRRDLRRYAEEERDMLLDNHRLYDLKKGIFLSAGSEEEIFGHLGLDYLEPWERNA

SEQ ID NO: 3777 - DNA, 1182 bp, synthetic construct
  misc_feature 1..1182: note = Variant of terminal deoxynucleotidyl transferase
  source 1..1182: mol_type = other DNA
atgcatcaccaccatcatcatgggggttctggtcatccgccgagtaataccccggagaaggaggtgccgagcgttatcgcccgtcatgttagtcagtacgcgtgccagcgcaagaccacgctgaataactacaacaaaaagttcaccgacgcgctggagatcatggccgagaactacaaatttaaagagaacctgcaggcgtgtctggaagccaagcgcgccgcgagtatcctgaaaagcctgccgttcgaggttaccagcatgaaagacatccaaggtctgccgtgcattaccgacgacgtacgtgacgtgatcgaggagatcatcgaagagggcgagagcagccgtgttaaagaaatcctcaatgacgagcgctacaaggcctttaagcagttcaccagcgtgttcggtgtgggcgtgaaaacctcggaaaagtggtaccgtatgggcctccgtacggttgaagaagcaaaggccagtaagagtctgaagctgagcaagatgcagaaggcgggcttcctgtattacgaggatctggcgagcggtgttagtaaagaagaagccgatgccgttacgctcatcgtgaaggaaacggtggcgactgttgtaccggatgcgctggtgaccatcgccggcggtttccgccgtggcaaacctatgggccacgacgttgacttcctgatcacgccgccgggccgtcctgaagatgacgagctgctccacaaagtggttgatctgctcaagaagcaaggtctgctgctgtacgaagatatccgtgagagcacgttcgtggaggggcaactgccaagtcctaaaatcgacgccctggacaactttcagaagtgcttcgccattctcaagctgtaccagccgaaggtggataacagtgcggttgggacgagtaagaaaagtgacatggctgaggttaaggattggaaagcggttcgtgtggatctggtgatcacgccattcgagcagttcgcctatgcgctgctcggttggacgggcagcggccaatttcgtcgcgatctgcgtcgctatgcggaggaagagcgcgacatgctgctcgacaaccatcgtctctacgacctgaaaaagggcatctttctgagtgcgggcagcgaagaagagattttcggtcatctgggtctggattatctggagccgtgggaacgcaacgcg

SEQ ID NO: 3778 - protein, 394 aa, synthetic construct
  REGION 1..394: note = Variant of terminal deoxynucleotidyl transferase
MHHHHHHGGSGHPPSNTPEKEVPSVIARHVSQYACQRKTTLNNYNKKFTDALEIMAENYKFKENLQACLEAKRAASILKSLPFEVTSMKDIQGLPCITDDVRDVIEEIIEEGESSRVKEILNDERYKAFKQFTSVFGVGVKTSEKWYRMGLRTVEEAKASKSLKLSKMQKAGFLYYEDLASGVSKEEADAVTLIVKETVATVVPDALVTIAGGFRRGKPMGHDVDFLITPPGRPEDDELLHKVVDLLKKQGLLLYEDIRESTFVEGQLPSPKIDALDNFQKCFAILKLYQPKVDNSAVGTSKKSDMAEVKDWKAVRVDLVITPFEQFAYALLGWTGSGQFRRDLRRYAEEERDMLLDNHRLYDLKKGIFLSAGSEEEIFGHLGLDYLEPWERNA

SEQ ID NO: 3779 - DNA, 1182 bp, synthetic construct
  misc_feature 1..1182: note = Variant of terminal deoxynucleotidyl transferase
  source 1..1182: mol_type = other DNA
atgcatcaccaccatcatcatgggggttctggtcatccgccgagcaataccccggagaaggaggtgccgagcgttatcgcccgtcatgttagtcagtacgcgtgccagcgcaagaccacgctgaataactacaacaaaaagttcaccgacgcgctggagatcatggccgagaactacaaatttaaagagaacctgcaggcgtgtctggaagccaagcgcgccgcgagtgtcttcaaaagcctgccgttcgaggttaccagcatgaaagacatccaaggtctgccgtgcattaccgacgacgtacgtgacgtgatcgaggagatcatcgaagagggcgagagcagccgtgttaaagaaatcctcaatgacgagcgctacaaggcctttaagcagttcaccagcgtgttcggtgtgggcgtgaaaacctcggaaaagtggtaccgtatgggcctccgtacggttgaagaagcaaaggccagtaagagtctgaagctgagcaagatgcagaaggcgggcttcctgtattacgaggatctggcgagcggtgttagtaaagaagaagccgatgccgttacgctcatcgtgaaggaaacggtggcgctggttgtaccggatgcgctggtgaccatcgccggcggtttccgccgtggcaaacctatgggccacgacgttgacctgctgatcacgccgccgggccgtcctgaagatgacgagctgctccacaaagtggttgatctgctcaagaagcaaggtctgctgctgtacgaagatatccgtgagagcacgttcgtggaggggcaactgccaagtcctaaaatcgacgccctggacaactttcagaagtgcttcgccattctcaagctgtaccagccgaaggtggataacagtgcggttgggacgagtaagaaaagtgacatggctgaggttaaggattggaaagcggttcgtgtggatctggtgatcacgccattcgagcagttcgcctatgcgctgctcggttggacgggcagcggcatctttcgtcgcgatctgcgtcgctatgcggaggaagagcgcgacatgctgctcgacaaccatcgtctctacgacctgaaaaagggcatctttctgagtgcgggcagcgaagaagagattttcggtcatctgggtctggattatctggagccgtgggaacgcaacgcg

SEQ ID NO: 3780 - protein, 394 aa, synthetic construct
  REGION 1..394: note = Variant of terminal deoxynucleotidyl transferase
MHHHHHHGGSGHPPSNTPEKEVPSVIARHVSQYACQRKTTLNNYNKKFTDALEIMAENYKFKENLQACLEAKRAASVFKSLPFEVTSMKDIQGLPCITDDVRDVIEEIIEEGESSRVKEILNDERYKAFKQFTSVFGVGVKTSEKWYRMGLRTVEEAKASKSLKLSKMQKAGFLYYEDLASGVSKEEADAVTLIVKETVALVVPDALVTIAGGFRRGKPMGHDVDLLITPPGRPEDDELLHKVVDLLKKQGLLLYEDIRESTFVEGQLPSPKIDALDNFQKCFAILKLYQPKVDNSAVGTSKKSDMAEVKDWKAVRVDLVITPFEQFAYALLGWTGSGIFRRDLRRYAEEERDMLLDNHRLYDLKKGIFLSAGSEEEIFGHLGLDYLEPWERNA

SEQ ID NO: 3781 - DNA, 1182 bp, synthetic construct
  misc_feature 1..1182: note = Variant of terminal deoxynucleotidyl transferase
  source 1..1182: mol_type = other DNA
atgcatcaccaccatcatcatgggggttctggtcatccggaaagtaataccccggagaaggaggtgccgagcgttatcgcccgtcatgttagtcagtacgcgtgccagcgcaagaccacgctgaataactacaacaaaaagttcaccgacgcgctggagatcatggccgagaactacaaatttaaagagaacctgcaggcgtgtctggaagccaagcgcgccgcgagtgtcttcaaaagcctgccgttcgaggttaccagcatgaaagacatccaaggtctgccgtgcattaccgacgacgtacgtgacgtgatcgaggagatcatcgaagagggcgagagcagccgtgttaaagaaatcctcaatgacgagcgctacaaggcctttaagcagttcaccagcgtgttcggtgtgggcgtgaaaacctcggaaaagtggtaccgtatgggcctccgtacggttgaagaagcaaaggccagtaagagtctgaagctgagcaagatgcagaaggcgggcttcctgtattacgaggatctggcgagcggtgttagtaaagaagaagccgatgccgttacgctcatcgtgaaggaaacggtgcgtctggttgtaccggatgcgctggtgaccatcgccggcggtttccgccgtggcaaacctatgggccacgacgttgacttcctgatcacgattccgggccgtcctgaagatgacgagctgctccacaaagtggttgatctgctcaagaagcaaggtctgctgctgtacgaagatatccgtgagagcacgttcgtggaggggcaactgccaagtcctaaaatcgacgccctggacaactttcagaagtgcttcgccattctcaagctgtaccagccgaaggtggataacagtgcggttgggacgagtaagaaaagtgacatggctgaggttaaggattggaaagcggttcgtgtggatctggtgatcacgccattcgagcagttcgcctatgcgctgctcggttggacgggcagcggccaatttcgtcgcgatctgcgtcgctatgcggaggaagagcgcgacatgctgctcgacaaccatcgtctctacgacctgaaaaagggcatctttctgagtgcgggcagcgaagaagagattttcggtcatctgggtctggattatctggagccgtgggaacgcaacgcg

SEQ ID NO: 3782 - protein, 394 aa, synthetic construct
  REGION 1..394: note = Variant of terminal deoxynucleotidyl transferase
MHHHHHHGGSGHPESNTPEKEVPSVIARHVSQYACQRKTTLNNYNKKFTDALEIMAENYKFKENLQACLEAKRAASVFKSLPFEVTSMKDIQGLPCITDDVRDVIEEIIEEGESSRVKEILNDERYKAFKQFTSVFGVGVKTSEKWYRMGLRTVEEAKASKSLKLSKMQKAGFLYYEDLASGVSKEEADAVTLIVKETVRLVVPDALVTIAGGFRRGKPMGHDVDFLITIPGRPEDDELLHKVVDLLKKQGLLLYEDIRESTFVEGQLPSPKIDALDNFQKCFAILKLYQPKVDNSAVGTSKKSDMAEVKDWKAVRVDLVITPFEQFAYALLGWTGSGQFRRDLRRYAEEERDMLLDNHRLYDLKKGIFLSAGSEEEIFGHLGLDYLEPWERNA

SEQ ID NO: 3783 - DNA, 1182 bp, synthetic construct
  misc_feature 1..1182: note = Variant of terminal deoxynucleotidyl transferase
  source 1..1182: mol_type = other DNA
atgcatcaccaccatcatcatgggggttctggtcatccgccgagtaataccccggagaaggaggtgccgagcgttatcgcccgtcatgttagtcagtacgcgtgccagcgcaagaccacgctgaataactacaacaaaaagttcaccgacgcgctggagatcatggccgagaactacaaatttaaagagaacctgcaggcgtgtctggaagccaagcgcgccgcgagtatcctgaaaagcctgccgttcgaggttaccagcatgaaagacatccaaggtctgccgtgcattaccgacgacgtacgtgacgtgatcgaggagatcatcgaagagggcgagagcagccgtgttaaagaaatcctcaatgacgagcgctacaaggcctttaagcagttcaccagcgtgttcggtgtgggcgtgaaaacctcggaaaagtggtaccgtatgggcctccgtacggttgaagaagcaaaggccagtaagagtctgaagctgagcaagatgcagaaggcgggcttcctgtattacgaggatctggcgagcggtgttagtaaagaagaagccgatgccgttacgctcatcgtgaaggaaacggtgcgtactgttagtccggatgcgctggtgaccatcgccggcggtttccgccgtggcaaacctatgggccacgacgttgacttcctgatcacgccgccgggccgtcctgaagatgacgagctgctccacaaagtggttgatctgctcaagaagcaaggtctgctgctgtacgaagacatccgtgagagcacgttcgtggaggggcaactgccaagtcctaaaatcgacgccctggacaactttcagaagtgcttcgccattctcaagctgtaccgtccgaaggtggataacagtgcggttgggacgagtaagaaaagtgacatggctgaggttaaggattggaaagcggttcgtgtggatctggtgatcacgccattcgagcagttcgcctatgcgctgctcggttggacgggcagcggccaatttcgtcgcgatctgcgtcgctatgcggaggaagagcgcgacatgctgctcgacaaccatcgtctctacgacctgaaaaagggcatctttctgagtgcgggcagcgaagaagagattttcggtcatctgggtctggattatctggagccgtgggaacgcaacgcg

SEQ ID NO: 3784 - protein, 394 aa, synthetic construct
  REGION 1..394: note = Variant of terminal deoxynucleotidyl transferase
MHHHHHHGGSGHPPSNTPEKEVPSVIARHVSQYACQRKTTLNNYNKKFTDALEIMAENYKFKENLQACLEAKRAASILKSLPFEVTSMKDIQGLPCITDDVRDVIEEIIEEGESSRVKEILNDERYKAFKQFTSVFGVGVKTSEKWYRMGLRTVEEAKASKSLKLSKMQKAGFLYYEDLASGVSKEEADAVTLIVKETVRTVSPDALVTIAGGFRRGKPMGHDVDFLITPPGRPEDDELLHKVVDLLKKQGLLLYEDIRESTFVEGQLPSPKIDALDNFQKCFAILKLYRPKVDNSAVGTSKKSDMAEVKDWKAVRVDLVITPFEQFAYALLGWTGSGQFRRDLRRYAEEERDMLLDNHRLYDLKKGIFLSAGSEEEIFGHLGLDYLEPWERNA

SEQ ID NO: 3785 - DNA, 1182 bp, synthetic construct
  misc_feature 1..1182: note = Variant of terminal deoxynucleotidyl transferase
  source 1..1182: mol_type = other DNA
atgcatcaccaccatcatcatgggggttctggtcatccgccgagcaataccccggagaaggaggtgccgagcgttatcgcccgtcatgttagtccatacgcgtgccagcgcaagaccacgctgaataactacaacaaaaagttcaccgacgcgctggagatcatggccgagaactacaaatttaaagagaacctgcaggcgtgtctggaagccaagcgcgccgcgagtatttttaaaagcctgccgttcgaggttaccagcatgaaagacatccaaggtctgccgtgcattaccgacgacgtacgtgatgtgatcgaggagatcatcgaagagggcgagagcagccgtgttaaagaaatcctcaatgacgagcgctacaaggcctttaagcagttcaccagcgtgttcggtgtgggcgtgaaaacctcggaaaagtggtaccgtatgggcctccgtacggttgaagaagcaaaggccagtaagagtctgaagctgagcaagatgcagaaggcgggcttcctgtattacgaggatctggcgagcggtgttagtaaagaagaagccgatgccgttacgctcatcgtgaaggaaacggtgcgtaccgttgtgccggatgcgctggtgaccatcgccggcggtttccgccgtggcaaacctatgggccacgacgttgactttctgatcacgaacccgggtcgtcctaccgatgacgagctgctccacaaagtggttgatctgctcaagaagcaaggtctgctgctgtacgaagacatccgtgagagcacgttcgtggaggggcaactgccaagtcctaaacaagacgccctggacaactttcagaagtgcttcgccattctcaagctgtaccagccgaaggtggataacagtgcggttgggacgagtaagaaaagtgacatggctgaggttaaggattggaaagcggttcgtgtggatctggtgatcacgccattcgagcagttcgcctatgcgctgctcggttggacgggcagcggccaatttcgtcgcgatctgcgtcgctatgcggaggaagagcgcgacatgctgctcgacaaccatcgtctctacgacctgaaaaagggcatctttctgagtgcgggcagcgaagaagagattttcggtcatctgggtctggattatctggagccgtgggaacgcaacgcg

SEQ ID NO: 3786 - protein, 394 aa, synthetic construct
  REGION 1..394: note = Variant of terminal deoxynucleotidyl transferase
MHHHHHHGGSGHPPSNTPEKEVPSVIARHVSPYACQRKTTLNNYNKKFTDALEIMAENYKFKENLQACLEAKRAASIFKSLPFEVTSMKDIQGLPCITDDVRDVIEEIIEEGESSRVKEILNDERYKAFKQFTSVFGVGVKTSEKWYRMGLRTVEEAKASKSLKLSKMQKAGFLYYEDLASGVSKEEADAVTLIVKETVRTVVPDALVTIAGGFRRGKPMGHDVDFLITNPGRPTDDELLHKVVDLLKKQGLLLYEDIRESTFVEGQLPSPKQDALDNFQKCFAILKLYQPKVDNSAVGTSKKSDMAEVKDWKAVRVDLVITPFEQFAYALLGWTGSGQFRRDLRRYAEEERDMLLDNHRLYDLKKGIFLSAGSEEEIFGHLGLDYLEPWERNA

SEQ ID NO: 3787 - DNA, 1182 bp, synthetic construct
  misc_feature 1..1182: note = Variant of terminal deoxynucleotidyl transferase
  source 1..1182: mol_type = other DNA
atgcatcaccaccatcatcatgggggttctggtcatccggaaggtaataccccggagaaggaggtgccgagcgttatcgcccgtcatgttagtcagtacgcgtgccagcgcaagaccacgctgaataactacaacaaaaagttcaccgacgcgctggagatcatggccgagaactacaaatttaaagagaacctgcaggcgtgtctggaagccaagcgcgccgcgagtgtcctgaaaagcctgccgttcgaggttaccagcatgaaagacatccaaggtctgccgtgcattaccgacgacgtacgtgacgtgatcgaggagatcatcgaagagggcgagagcagccgtgttaaagaaatcctcaatgacgagcgctacaaggcctttaagcagttcaccagcgtgttcggtgtgggcgtgaaaacctcggaaaagtggtaccgtatgggcctccgtacggttgaagaagcaaaggccagtaagagtctgaagctgagcaagatgcagaaggcgggcttcctgtattacgaggatctggcgagcggtgttagtaaagaagaagccgatgccgttacgctcatcgtgaaggaaacggtgcgtactgttagtccggatgcgctggtgaccatcgccggcggtttccgccgtggcaaacctatgggccacgacgttgacctgctgatcacgattccgggccgtcctgaagatgacgagctgctccacaaagtggttgatctgctcaagaagcaaggtctgctgctgtacgaagacatccgtgagagcacgttcgtggaggggcaactgccaagtcctaaaatcgacgccctggacaactttcagaagtgcttcgccattctcaagctgtaccgtccgaaggtggataacagtgcggttgggacgagtaagaaaagtgacatggctgaggttaaggattggaaagcggttcgtgtggatctggtgatcacgccattcgagcagttcgcctatgcgctgctcggttggacgggcagcggccaatttcgtcgcgatctgcgtcgctatgcggaggaagagcgcgacatgctgctcgacaaccatcgtctctacgacctgaaaaagggcatctttctgagtgcgggcagcgaagaagagattttcggtcatctgggtctggattatctggagccgtgggaacgcaacgcg

SEQ ID NO: 3788 - protein, 394 aa, synthetic construct
  REGION 1..394: note = Variant of terminal deoxynucleotidyl transferase
MHHHHHHGGSGHPEGNTPEKEVPSVIARHVSQYACQRKTTLNNYNKKFTDALEIMAENYKFKENLQACLEAKRAASVLKSLPFEVTSMKDIQGLPCITDDVRDVIEEIIEEGESSRVKEILNDERYKAFKQFTSVFGVGVKTSEKWYRMGLRTVEEAKASKSLKLSKMQKAGFLYYEDLASGVSKEEADAVTLIVKETVRTVSPDALVTIAGGFRRGKPMGHDVDLLITIPGRPEDDELLHKVVDLLKKQGLLLYEDIRESTFVEGQLPSPKIDALDNFQKCFAILKLYRPKVDNSAVGTSKKSDMAEVKDWKAVRVDLVITPFEQFAYALLGWTGSGQFRRDLRRYAEEERDMLLDNHRLYDLKKGIFLSAGSEEEIFGHLGLDYLEPWERNA

SEQ ID NO: 3789 - DNA, 1182 bp, synthetic construct
  misc_feature 1..1182: note = Variant of terminal deoxynucleotidyl transferase
  source 1..1182: mol_type = other DNA
atgcatcaccaccatcatcatgggggttctggtcatccgccgggtaataccccggagaaggaggtgccgagcgttatcgcccgtcatgttagtcagtacgcgtgccagcgcaagaccacgctgaataactacaacaaaaagttcaccgacgcgctggagatcatggccgagaactacaaatttaaagagaacctgcaggcgtgtctggaagccaagcgcgccgcgagtgtcttcaaaagcctgccgttcgaggttaccagcatgaaagacatccaaggtctgccgtgcattaccgacgacgtacgtgacgtgatcgaggagatcatcgaagagggcgagagcagccgtgttaaagaaatcctcaatgacgagcgctacaaggcctttaagcagttcaccagcgtgttcggtgtgggcgtgaaaacctcggaaaagtggtaccgtatgggcctccgtacggttgaagaagcaaaggccagtaagagtctgaagctgagcaagatgcagaaggcgggcttcctgtattacgaggatctggcgagcggtgttagtaaagaagaagccgatgccgttacgctcatcgtgaaggaaacggtggcgctggttagtccggatgcgctggtgaccatcgccggcggtttccgccgtggcaaacctatgggccacgacgttgacctgctgatcacgccgccgggccgtcctgaagatgacgagctgctccacaaagtggttgatctgctcaagaagcaaggtctgctgctgtacgaagatatccgtgagagcacgttcgtggaggggcaactgccaagtcctaaaatcgacgccctggacaactttcagaagtgcttcgccattctcaagctgtaccgtccgaaggtggataacagtgcggttgggacgagtaagaaaagtgacatggctgaggttaaggattggaaagcggttcgtgtggatctggtgatcacgccattcgagcagttcgcctatgcgctgctcggttggacgggcagcggcatctttcgtcgcgatctgcgtcgctatgcggaggaagagcgcgacatgctgctcgacaaccatcgtctctacgacctgaaaaagggcatctttctgagtgcgggcagcgaagaagagattttcggtcatctgggtctggattatctggagccgtgggaacgcaacgcg

SEQ ID NO: 3790 - protein, 394 aa, synthetic construct
  REGION 1..394: note = Variant of terminal deoxynucleotidyl transferase
MHHHHHHGGSGHPPGNTPEKEVPSVIARHVSQYACQRKTTLNNYNKKFTDALEIMAENYKFKENLQACLEAKRAASVFKSLPFEVTSMKDIQGLPCITDDVRDVIEEIIEEGESSRVKEILNDERYKAFKQFTSVFGVGVKTSEKWYRMGLRTVEEAKASKSLKLSKMQKAGFLYYEDLASGVSKEEADAVTLIVKETVALVSPDALVTIAGGFRRGKPMGHDVDLLITPPGRPEDDELLHKVVDLLKKQGLLLYEDIRESTFVEGQLPSPKIDALDNFQKCFAILKLYRPKVDNSAVGTSKKSDMAEVKDWKAVRVDLVITPFEQFAYALLGWTGSGIFRRDLRRYAEEERDMLLDNHRLYDLKKGIFLSAGSEEEIFGHLGLDYLEPWERNA

SEQ ID NO: 3791 - DNA, 1182 bp, synthetic construct
  misc_feature 1..1182: note = Variant of terminal deoxynucleotidyl transferase
  source 1..1182: mol_type = other DNA
atgcatcaccaccatcatcatgggggttctggtcatccgccgggtaataccccggagaaggaggtgccgagcgttatcgcccgtcatgttagtcagtacgcgtgccagcgcaagaccacgctgaataactacaacaaaaagttcaccgacgcgctggagatcatggccgagaactacaaatttaaagagaacctgcaggcgtgtctggaagccaagcgcgccgcgagtatcttcaaaagcctgccgttcgaggttaccagcatgaaagacatccaaggtctgccgtgcattaccgacgacgtacgtgacgtgatcgaggagatcatcgaagagggcgagagcagccgtgttaaagaaatcctcaatgacgagcgctacaaggcctttaagcagttcaccagcgtgttcggtgtgggcgtgaaaacctcggaaaagtggtaccgtatgggcctccgtacggttgaagaagcaaaggccagtaagagtctgaagctgagcaagatgcagaaggcgggcttcctgtattacgaggatctggcgagcggtgttagtaaagaagaagccgatgccgttacgctcatcgtgaaggaaacggtgcgtactgttgtaccggatgcgctggtgaccatcgccggcggtttccgccgtggcaaacctatgggccacgacgttgacctgctgatcacgattccgggccgtcctgaagatgacgagctgctccacaaagtggttgatctgctcaagaagcaaggtctgctgctgtacgaagacatccgtgagagcacgttcgtggaggggcaactgccaagtcctaaaatcgacgccctggacaactttcagaagtgcttcgccattctcaagctgtaccagccgaaggtggataacagtgcggttgggacgagtaagaaaagtgacatggctgaggttaaggattggaaagcggttcgtgtggatctggtgatcacgccattcgagcagttcgcctatgcgctgctcggttggacgggcagcggcatctttcgtcgcgatctgcgtcgctatgcggaggaagagcgcgacatgctgctcgacaaccatcgtctctacgacctgaaaaagggcatctttctgagtgcgggcagcgaagaagagattttcggtcatctgggtctggattatctggagccgtgggaacgcaacgcg

SEQ ID NO: 3792 - protein, 394 aa, synthetic construct
  REGION 1..394: note = Variant of terminal deoxynucleotidyl transferase
MHHHHHHGGSGHPPGNTPEKEVPSVIARHVSQYACQRKTTLNNYNKKFTDALEIMAENYKFKENLQACLEAKRAASIFKSLPFEVTSMKDIQGLPCITDDVRDVIEEIIEEGESSRVKEILNDERYKAFKQFTSVFGVGVKTSEKWYRMGLRTVEEAKASKSLKLSKMQKAGFLYYEDLASGVSKEEADAVTLIVKETVRTVVPDALVTIAGGFRRGKPMGHDVDLLITIPGRPEDDELLHKVVDLLKKQGLLLYEDIRESTFVEGQLPSPKIDALDNFQKCFAILKLYQPKVDNSAVGTSKKSDMAEVKDWKAVRVDLVITPFEQFAYALLGWTGSGIFRRDLRRYAEEERDMLLDNHRLYDLKKGIFLSAGSEEEIFGHLGLDYLEPWERNA

SEQ ID NO: 3793 - DNA, 1182 bp, synthetic construct
  misc_feature 1..1182: note = Variant of terminal deoxynucleotidyl transferase
  source 1..1182: mol_type = other DNA
atgcatcaccaccatcatcatgggggttctggtcatccgccgagtaataccccggagaaggaggtgccgagcgttatcgcccgtcatgttagtcagtacgcgtgccagcgcaagaccacgctgaataactacaacaaaaagttcaccgacgcgctggagatcatggccgagaactacaaatttaaagagaacctgcaggcgtgtctggaagccaagcgcgccgcgagtgtcctgaaaagcctgccgttcgaggttaccagcatgaaagacatccaaggtctgccgtgcattaccgacgacgtacgtgacgtgatcgaggagatcatcgaagagggcgagagcagccgtgttaaagaaatcctcaatgacgagcgctacaaggcctttaagcagttcaccagcgtgttcggtgtgggcgtgaaaacctcggaaaagtggtaccgtatgggcctccgtacggttgaagaagcaaaggccagtaagagtctgaagctgagcaagatgcagaaggcgggcttcctgtattacgaggatctggcgagcggtgttagtaaagaagaagccgatgccgttacgctcatcgtgaaggaaacggtggcgactgttgtaccggatgcgctggtgaccatcgccggcggtttccgccgtggcaaacctatgggccacgacgttgacctgctgatcacgaatccgggccgtcctgaagatgacgagctgctccacaaagtggttgatctgctcaagaagcaaggtctgctgctgtacgaagatatccgtgagagcacgttcgtggaggggcaactgccaagtcctaaaatcgacgccctggacaactttcagaagtgcttcgccattctcaagctgtaccagccgaaggtggataacagtgcggttgggacgagtaagaaaagtgacatggctgaggttaaggattggaaagcggttcgtgtggatctggtgatcacgccattcgagcagttcgcctatgcgctgctcggttggacgggcagcggcatctttcgtcgcgatctgcgtcgctatgcggaggaagagcgcgacatgctgctcgacaaccatcgtctctacgacctgaaaaagggcatctttctgagtgcgggcagcgaagaagagattttcggtcatctgggtctggattatctggagccgtgggaacgcaacgcg

SEQ ID NO: 3794 - protein, 394 aa, synthetic construct
  REGION 1..394: note = Variant of terminal deoxynucleotidyl transferase
MHHHHHHGGSGHPPSNTPEKEVPSVIARHVSQYACQRKTTLNNYNKKFTDALEIMAENYKFKENLQACLEAKRAASVLKSLPFEVTSMKDIQGLPCITDDVRDVIEEIIEEGESSRVKEILNDERYKAFKQFTSVFGVGVKTSEKWYRMGLRTVEEAKASKSLKLSKMQKAGFLYYEDLASGVSKEEADAVTLIVKETVATVVPDALVTIAGGFRRGKPMGHDVDLLITNPGRPEDDELLHKVVDLLKKQGLLLYEDIRESTFVEGQLPSPKIDALDNFQKCFAILKLYQPKVDNSAVGTSKKSDMAEVKDWKAVRVDLVITPFEQFAYALLGWTGSGIFRRDLRRYAEEERDMLLDNHRLYDLKKGIFLSAGSEEEIFGHLGLDYLEPWERNA

SEQ ID NO: 3795 - DNA, 1182 bp, synthetic construct
  misc_feature 1..1182: note = Variant of terminal deoxynucleotidyl transferase
  source 1..1182: mol_type = other DNA
atgcatcaccaccatcatcatgggggttctggtcatccggaaggtaataccccggagaaggaggtgccgagcgttatcgcccgtcatgttagtcagtacgcgtgccagcgcaagaccacgctgaataactacaacaaaaagttcaccgacgcgctggagatcatggccgagaactacaaatttaaagagaacctgcaggcgtgtctggaagccaagcgcgccgcgagtgtcctgaaaagcctgccgttcgaggttaccagcatgaaagacatccaaggtctgccgtgcattaccgacgacgtacgtgacgtgatcgaggagatcatcgaagagggcgagagcagccgtgttaaagaaatcctcaatgacgagcgctacaaggcctttaagcagttcaccagcgtgttcggtgtgggcgtgaaaacctcggaaaagtggtaccgtatgggcctccgtacggttgaagaagcaaaggccagtaagagtctgaagctgagcaagatgcagaaggcgggcttcctgtattacgaggatctggcgagcggtgttagtaaagaagaagccgatgccgttacgctcatcgtgaaggaaacggtggcgctggttgtaccggatgcgctggtgaccatcgccggcggtttccgccgtggcaaacctatgggccacgacgttgacctgctgatcacgccgccgggccgtcctgaagatgacgagctgctccacaaagtggttgatctgctcaagaagcaaggtctgctgctgtacgaagatatccgtgagagcacgttcgtggaggggcaactgccaagtcctaaaatcgacgccctggacaactttcagaagtgcttcgccattctcaagctgtaccgtccgaaggtggataacagtgcggttgggacgagtaagaaaagtgacatggctgaggttaaggattggaaagcggttcgtgtggatctggtgatcacgccattcgagcagttcgcctatgcgctgctcggttggacgggcagcggccaatttcgtcgcgatctgcgtcgctatgcggaggaagagcgcgacatgctgctcgacaaccatcgtctctacgacctgaaaaagggcatctttctgagtgcgggcagcgaagaagagattttcggtcatctgggtctggattatctggagccgtgggaacgcaacgcg

SEQ ID NO: 3796 - protein, 394 aa, synthetic construct
  REGION 1..394: note = Variant of terminal deoxynucleotidyl transferase
MHHHHHHGGSGHPEGNTPEKEVPSVIARHVSQYACQRKTTLNNYNKKFTDALEIMAENYKFKENLQACLEAKRAASVLKSLPFEVTSMKDIQGLPCITDDVRDVIEEIIEEGESSRVKEILNDERYKAFKQFTSVFGVGVKTSEKWYRMGLRTVEEAKASKSLKLSKMQKAGFLYYEDLASGVSKEEADAVTLIVKETVALVVPDALVTIAGGFRRGKPMGHDVDLLITPPGRPEDDELLHKVVDLLKKQGLLLYEDIRESTFVEGQLPSPKIDALDNFQKCFAILKLYRPKVDNSAVGTSKKSDMAEVKDWKAVRVDLVITPFEQFAYALLGWTGSGQFRRDLRRYAEEERDMLLDNHRLYDLKKGIFLSAGSEEEIFGHLGLDYLEPWERNA

SEQ ID NO: 3797 - DNA, 1182 bp, synthetic construct
  misc_feature 1..1182: note = Variant of terminal deoxynucleotidyl transferase
  source 1..1182: mol_type = other DNA
atgcatcaccaccatcatcatgggggttctggtcatccggaaagtaataccccggagaaggaggtgccgagcgttatcgcccgtcatgttagtcagtacgcgtgccagcgcaagaccacgctgaataactacaacaaaaagttcaccgacgcgctggagatcatggccgagaactacaaatttaaagagaacctgcaggcgtgtctggaagccaagcgcgccgcgagtatcctgaaaagcctgccgttcgaggttaccagcatgaaagacatccaaggtctgccgtgcattaccgacgacgtacgtgacgtgatcgaggagatcatcgaagagggcgagagcagccgtgttaaagaaatcctcaatgacgagcgctacaaggcctttaagcagttcaccagcgtgttcggtgtgggcgtgaaaacctcggaaaagtggtaccgtatgggcctccgtacggttgaagaagcaaaggccagtaagagtctgaagctgagcaagatgcagaaggcgggcttcctgtattacgaggatctggcgagcggtgttagtaaagaagaagccgatgccgttacgctcatcgtgaaggaaacggtggcgactgttgtaccggatgcgctggtgaccatcgccggcggtttccgccgtggcaaacctatgggccacgacgttgacttcctgatcacgattccgggccgtcctgaagatgacgagctgctccacaaagtggttgatctgctcaagaagcaaggtctgctgctgtacgaagacatccgtgagagcacgttcgtggaggggcaactgccaagtcctaaaatcgacgccctggacaactttcagaagtgcttcgccattctcaagctgtaccagccgaaggtggataacagtgcggttgggacgagtaagaaaagtgacatggctgaggttaaggattggaaagcggttcgtgtggatctggtgatcacgccattcgagcagttcgcctatgcgctgctcggttggacgggcagcggcatctttcgtcgcgatctgcgtcgctatgcggaggaagagcgcgacatgctgctcgacaaccatcgtctctacgacctgaaaaagggcatctttctgagtgcgggcagcgaagaagagattttcggtcatctgggtctggattatctggagccgtgggaacgcaacgcg

SEQ ID NO: 3798 - protein, 394 aa, synthetic construct
  REGION 1..394: note = Variant of terminal deoxynucleotidyl transferase
MHHHHHHGGSGHPESNTPEKEVPSVIARHVSQYACQRKTTLNNYNKKFTDALEIMAENYKFKENLQACLEAKRAASILKSLPFEVTSMKDIQGLPCITDDVRDVIEEIIEEGESSRVKEILNDERYKAFKQFTSVFGVGVKTSEKWYRMGLRTVEEAKASKSLKLSKMQKAGFLYYEDLASGVSKEEADAVTLIVKETVATVVPDALVTIAGGFRRGKPMGHDVDFLITIPGRPEDDELLHKVVDLLKKQGLLLYEDIRESTFVEGQLPSPKIDALDNFQKCFAILKLYQPKVDNSAVGTSKKSDMAEVKDWKAVRVDLVITPFEQFAYALLGWTGSGIFRRDLRRYAEEERDMLLDNHRLYDLKKGIFLSAGSEEEIFGHLGLDYLEPWERNA

SEQ ID NO: 3799 - DNA, 1182 bp, synthetic construct
  misc_feature 1..1182: note = Variant of terminal deoxynucleotidyl transferase
  source 1..1182: mol_type = other DNA
atgcatcaccaccatcatcatgggggttctggtcatccgccgagcaataccccggagaaggaggtgccgagcgttatcgcccgtcatgttagtccatacgcgtgccagcgcaagaccacgctgaataactacaacaaaaagttcaccgacgcgctggagatcatggccgagaactacaaatttaaagagaacctgcaggcgtgtctggaagccaagcgcgccgcgagtatttttaaaagcctgccgttcgaggttaccagcatgaaagacatccaaggtctgccgtgcattaccgacgacgtacgtgacgtgatcgaggagatcatcgaagagggcgagagcagccgtgttaaagaaatcctcaatgacgagcgctacaaggcctttaagcagttcaccagcgtgttcggtgtgggcgtgaaaacctcggaaaagtggtaccgtatgggcctccgtacggttgaagaagcaaaggccagtaagagtctgaagctgagcaagatgcagaaggcgggcttcctgtattacgaggatctggcgagcggtgttagtaaagaagaagccgatgccgttacgctcatcgtgaaggaaacggtgcgtaccgttgtgccggatgcggaagtgaccattgccggcggtttccgccgtggcaaacctatgggccacgacgttgactttctgatcacgaacccgggtcgtcctaccgatgacgaactgctccacaaagtggttgatctgctcaagaagcaaggtctgctgctgtacgaagacatccgtgagagcacgttcgtggaggggcaactgccaagtcctaaaattgacgccctggacaactttcagaagtgcttcgccattctcaagctgtaccagccgaaggtggataacagtgcggttgggacgagtaagaaaagtgacatggctgaggttaaggattggaaagcggttcgtgtggatctggtgatcacgccattcgagcagttcgcctatgcgctgctcggttggacgggcagcggccaatttcgtcgcgatctgcgtcgctatgcggaggaagagcgcgacatgctgctcgacaaccatcgtctctacgacctgaaaaagggcatctttctgagtgcgggtagcgaagaagagattttcggtcatctgggtctggattatctggagccgtgggaacgcaacgcg

SEQ ID NO: 3800 - protein, 394 aa, synthetic construct
  REGION 1..394: note = Variant of terminal deoxynucleotidyl transferase
MHHHHHHGGSGHPPSNTPEKEVPSVIARHVSPYACQRKTTLNNYNKKFTDALEIMAENYKFKENLQACLEAKRAASIFKSLPFEVTSMKDIQGLPCITDDVRDVIEEIIEEGESSRVKEILNDERYKAFKQFTSVFGVGVKTSEKWYRMGLRTVEEAKASKSLKLSKMQKAGFLYYEDLASGVSKEEADAVTLIVKETVRTVVPDAEVTIAGGFRRGKPMGHDVDFLITNPGRPTDDELLHKVVDLLKKQGLLLYEDIRESTFVEGQLPSPKIDALDNFQKCFAILKLYQPKVDNSAVGTSKKSDMAEVKDWKAVRVDLVITPFEQFAYALLGWTGSGQFRRDLRRYAEEERDMLLDNHRLYDLKKGIFLSAGSEEEIFGHLGLDYLEPWERNA

SEQ ID NO: 3801 - DNA, 1182 bp, synthetic construct
  misc_feature 1..1182: note = Variant of terminal deoxynucleotidyl transferase
  source 1..1182: mol_type = other DNA
atgcatcaccaccatcatcatgggggttctggtcatccgccgagtaataccccggagaaggaggtgccgagcgttatcgcccgtcatgttagtcagtacgcgtgccagcgcaagaccacgctgaataactacaacaaaaagttcaccgacgcgctggagatcatggccgagaactacaaatttaaagagaacctgcaggcgtgtctggaagccaagcgcgccgcgagtgtcttcaaaagcctgccgttcgaggttaccagcatgaaagacatccaaggtctgccgtgcattaccgacgacgtacgtgacgtgatcgaggagatcatcgaagagggcgagagcagccgtgttaaagaaatcctcaatgacgagcgctacaaggcctttaagcagttcaccagcgtgttcggtgtgggcgtgaaaacctcggaaaagtggtaccgtatgggcctccgtacggttgaagaagcaaaggccagtaagagtctgaagctgagcaagatgcagaaggcgggcttcctgtattacgaggatctggcgagcggtgttagtaaagaagaagccgatgccgttacgctcatcgtgaaggaaacggtggcgactgttgtaccggatgcgctggtgaccatcgccggcggtttccgccgtggcaaacctatgggccacgacgttgacttcctgatcacgccgccgggccgtcctgaagatgacgagctgctccacaaagtggttgatctgctcaagaagcaaggtctgctgctgtacgaagatatccgtgagagcacgttcgtggaggggcaactgccaagtcctaaaatcgacgccctggacaactttcagaagtgcttcgccattctcaagctgtaccagccgaaggtggataacagtgcggttgggacgagtaagaaaagtgacatggctgaggttaaggattggaaagcggttcgtgtggatctggtgatcacgccattcgagcagttcgcctatgcgctgctcggttggacgggcagcggccaatttcgtcgcgatctgcgtcgctatgcggaggaagagcgcgacatgctgctcgacaaccatcgtctctacgacctgaaaaagggcatctttctgagtgcgggcagcgaagaagagattttcggtcatctgggtctggattatctggagccgtgggaacgcaacgcg

SEQ ID NO: 3802 - protein, 394 aa, synthetic construct
  REGION 1..394: note = Variant of terminal deoxynucleotidyl transferase
MHHHHHHGGSGHPPSNTPEKEVPSVIARHVSQYACQRKTTLNNYNKKFTDALEIMAENYKFKENLQACLEAKRAASVFKSLPFEVTSMKDIQGLPCITDDVRDVIEEIIEEGESSRVKEILNDERYKAFKQFTSVFGVGVKTSEKWYRMGLRTVEEAKASKSLKLSKMQKAGFLYYEDLASGVSKEEADAVTLIVKETVATVVPDALVTIAGGFRRGKPMGHDVDFLITPPGRPEDDELLHKVVDLLKKQGLLLYEDIRESTFVEGQLPSPKIDALDNFQKCFAILKLYQPKVDNSAVGTSKKSDMAEVKDWKAVRVDLVITPFEQFAYALLGWTGSGQFRRDLRRYAEEERDMLLDNHRLYDLKKGIFLSAGSEEEIFGHLGLDYLEPWERNA

SEQ ID NO: 3803 - DNA, 1182 bp, synthetic construct
  misc_feature 1..1182: note = Variant of terminal deoxynucleotidyl transferase
  source 1..1182: mol_type = other DNA
atgcatcaccaccatcatcatgggggttctggtcatccgccgggtaataccccggagaaggaggtgccgagcgttatcgcccgtcatgttagtcagtacgcgtgccagcgcaagaccacgctgaataactacaacaaaaagttcaccgacgcgctggagatcatggccgagaactacaaatttaaagagaacctgcaggcgtgtctggaagccaagcgcgccgcgagtgtcttcaaaagcctgccgttcgaggttaccagcatgaaagacatccaaggtctgccgtgcattaccgacgacgtacgtgacgtgatcgaggagatcatcgaagagggcgagagcagccgtgttaaagaaatcctcaatgacgagcgctacaaggcctttaagcagttcaccagcgtgttcggtgtgggcgtgaaaacctcggaaaagtggtaccgtatgggcctccgtacggttgaagaagcaaaggccagtaagagtctgaagctgagcaagatgcagaaggcgggcttcctgtattacgaggatctggcgagcggtgttagtaaagaagaagccgatgccgttacgctcatcgtgaaggaaacggtggcgactgttgtaccggatgcgctggtgaccatcgccggcggtttccgccgtggcaaacctatgggccacgacgttgacttcctgatcacgccgccgggccgtcctgaagatgacgagctgctccacaaagtggttgatctgctcaagaagcaaggtctgctgctgtacgaagatatccgtgagagcacgttcgtggaggggcaactgccaagtcctaaaatcgacgccctggacaactttcagaagtgcttcgccattctcaagctgtaccagccgaaggtggataacagtgcggttgggacgagtaagaaaagtgacatggctgaggttaaggattggaaagcggttcgtgtggatctggtgatcacgccattcgagcagttcgcctatgcgctgctcggttggacgggcagcggccaatttcgtcgcgatctgcgtcgctatgcggaggaagagcgcgacatgctgctcgacaaccatcgtctctacgacctgaaaaagggcatctttctgagtgcgggcagcgaagaagagattttcggtcatctgggtctggattatctggagccgtgggaacgcaacgcg

SEQ ID NO: 3804 - protein, 394 aa, synthetic construct
  REGION 1..394: note = Variant of terminal deoxynucleotidyl transferase
MHHHHHHGGSGHPPGNTPEKEVPSVIARHVSQYACQRKTTLNNYNKKFTDALEIMAENYKFKENLQACLEAKRAASVFKSLPFEVTSMKDIQGLPCITDDVRDVIEEIIEEGESSRVKEILNDERYKAFKQFTSVFGVGVKTSEKWYRMGLRTVEEAKASKSLKLSKMQKAGFLYYEDLASGVSKEEADAVTLIVKETVATVVPDALVTIAGGFRRGKPMGHDVDFLITPPGRPEDDELLHKVVDLLKKQGLLLYEDIRESTFVEGQLPSPKIDALDNFQKCFAILKLYQPKVDNSAVGTSKKSDMAEVKDWKAVRVDLVITPFEQFAYALLGWTGSGQFRRDLRRYAEEERDMLLDNHRLYDLKKGIFLSAGSEEEIFGHLGLDYLEPWERNA

SEQ ID NO: 3805 - DNA, 1182 bp, synthetic construct
  misc_feature 1..1182: note = Variant of terminal deoxynucleotidyl transferase
  source 1..1182: mol_type = other DNA
atgcatcaccaccatcatcatgggggttctggtcatccgccgggtaataccccggagaaggaggtgccgagcgttatcgcccgtcatgttagtcagtacgcgtgccagcgcaagaccacgctgaataactacaacaaaaagttcaccgacgcgctggagatcatggccgagaactacaaatttaaagagaacctgcaggcgtgtctggaagccaagcgcgccgcgagtgtcttcaaaagcctgccgttcgaggttaccagcatgaaagacatccaaggtctgccgtgcattaccgacgacgtacgtgacgtgatcgaggagatcatcgaagagggcgagagcagccgtgttaaagaaatcctcaatgacgagcgctacaaggcctttaagcagttcaccagcgtgttcggtgtgggcgtgaaaacctcggaaaagtggtaccgtatgggcctccgtacggttgaagaagcaaaggccagtaagagtctgaagctgagcaagatgcagaaggcgggcttcctgtattacgaggatctggcgagcggtgttagtaaagaagaagccgatgccgttacgctcatcgtgaaggaaacggtgcgtaccgttgtgccggatgcgctggtgaccatcgccggcggtttccgccgtggcaaacctatgggccacgacgttgacctgctgatcacgccgccgggccgtcctgaagatgacgagctgctccacaaagtggttgatctgctcaagaagcaaggtctgctgctgtacgaagacatccgtgagagcacgttcgtggaggggcaactgccaagtcctaaaatcgacgccctggacaactttcagaagtgcttcgccattctcaagctgtaccgtccgaaggtggataacagtgcggttgggacgagtaagaaaagtgacatggctgaggttaaggattggaaagcggttcgtgtggatctggtgatcacgccattcgagcagttcgcctatgcgctgctcggttggacgggcagcggcatctttcgtcgcgatctgcgtcgctatgcggaggaagagcgcgacatgctgctcgacaaccatcgtctctacgacctgaaaaagggcatctttctgagtgcgggcagcgaagaagagattttcggtcatctgggtctggattatctggagccgtgggaacgcaacgcg

SEQ ID NO: 3806 - protein, 394 aa, synthetic construct
  REGION 1..394: note = Variant of terminal deoxynucleotidyl transferase
MHHHHHHGGSGHPPGNTPEKEVPSVIARHVSQYACQRKTTLNNYNKKFTDALEIMAENYKFKENLQACLEAKRAASVFKSLPFEVTSMKDIQGLPCITDDVRDVIEEIIEEGESSRVKEILNDERYKAFKQFTSVFGVGVKTSEKWYRMGLRTVEEAKASKSLKLSKMQKAGFLYYEDLASGVSKEEADAVTLIVKETVRTVVPDALVTIAGGFRRGKPMGHDVDLLITPPGRPEDDELLHKVVDLLKKQGLLLYEDIRESTFVEGQLPSPKIDALDNFQKCFAILKLYRPKVDNSAVGTSKKSDMAEVKDWKAVRVDLVITPFEQFAYALLGWTGSGIFRRDLRRYAEEERDMLLDNHRLYDLKKGIFLSAGSEEEIFGHLGLDYLEPWERNA

SEQ ID NO: 3807 - DNA, 1182 bp, synthetic construct
  misc_feature 1..1182: note = Variant of terminal deoxynucleotidyl transferase
  source 1..1182: mol_type = other DNA
atgcatcaccaccatcatcatgggggttctggtcatccggaaggtaataccccggagaaggaggtgccgagcgttatcgcccgtcatgttagtcagtacgcgtgccagcgcaagaccacgctgaataactacaacaaaaagttcaccgacgcgctggagatcatggccgagaactacaaatttaaagagaacctgcaggcgtgtctggaagccaagcgcgccgcgagtgtcctgaaaagcctgccgttcgaggttaccagcatgaaagacatccaaggtctgccgtgcattaccgacgacgtacgtgacgtgatcgaggagatcatcgaagagggcgagagcagccgtgttaaagaaatcctcaatgacgagcgctacaaggcctttaagcagttcaccagcgtgttcggtgtgggcgtgaaaacctcggaaaagtggtaccgtatgggcctccgtacggttgaagaagcaaaggccagtaagagtctgaagctgagcaagatgcagaaggcgggcttcctgtattacgaggatctggcgagcggtgttagtaaagaagaagccgatgccgttacgctcatcgtgaaggaaacggtgcgtactgttgtaccggatgcgctggtgaccatcgccggcggtttccgccgtggcaaacctatgggccacgacgttgacttcctgatcacgaatccgggccgtcctgaagatgacgagctgctccacaaagtggttgatctgctcaagaagcaaggtctgctgctgtacgaagatatccgtgagagcacgttcgtggaggggcaactgccaagtcctaaaatcgacgccctggacaactttcagaagtgcttcgccattctcaagctgtaccagccgaaggtggataacagtgcggttgggacgagtaagaaaagtgacatggctgaggttaaggattggaaagcggttcgtgtggatctggtgatcacgccattcgagcagttcgcctatgcgctgctcggttggacgggcagcggccaatttcgtcgcgatctgcgtcgctatgcggaggaagagcgcgacatgctgctcgacaaccatcgtctctacgacctgaaaaagggcatctttctgagtgcgggcagcgaagaagagattttcggtcatctgggtctggattatctggagccgtgggaacgcaacgcg

SEQ ID NO: 3808 - protein, 394 aa, synthetic construct
  REGION 1..394: note = Variant of terminal deoxynucleotidyl transferase
MHHHHHHGGSGHPEGNTPEKEVPSVIARHVSQYACQRKTTLNNYNKKFTDALEIMAENYKFKENLQACLEAKRAASVLKSLPFEVTSMKDIQGLPCITDDVRDVIEEIIEEGESSRVKEILNDERYKAFKQFTSVFGVGVKTSEKWYRMGLRTVEEAKASKSLKLSKMQKAGFLYYEDLASGVSKEEADAVTLIVKETVRTVVPDALVTIAGGFRRGKPMGHDVDFLITNPGRPEDDELLHKVVDLLKKQGLLLYEDIRESTFVEGQLPSPKIDALDNFQKCFAILKLYQPKVDNSAVGTSKKSDMAEVKDWKAVRVDLVITPFEQFAYALLGWTGSGQFRRDLRRYAEEERDMLLDNHRLYDLKKGIFLSAGSEEEIFGHLGLDYLEPWERNA

SEQ ID NO: 3809 - DNA, 1182 bp, synthetic construct
  misc_feature 1..1182: note = Variant of terminal deoxynucleotidyl transferase
  source 1..1182: mol_type = other DNA
atgcatcaccaccatcatcatgggggttctggtcatccgccgggtaataccccggagaaggaggtgccgagcgttatcgcccgtcatgttagtcagtacgcgtgccagcgcaagaccacgctgaataactacaacaaaaagttcaccgacgcgctggagatcatggccgagaactacaaatttaaagagaacctgcaggcgtgtctggaagccaagcgcgccgcgagtatttttaaaagcctgccgttcgaggttaccagcatgaaagacatccaaggtctgccgtgcattaccgacgacgtacgtgacgtgatcgaggagatcatcgaagagggcgagagcagccgtgttaaagaaatcctcaatgacgagcgctacaaggcctttaagcagttcaccagcgtgttcggtgtgggcgtgaaaacctcggaaaagtggtaccgtatgggcctccgtacggttgaagaagcaaaggccagtaagagtctgaagctgagcaagatgcagaaggcgggcttcctgtattacgaggatctggcgagcggtgttagtaaagaagaagccgatgccgttacgctcatcgtgaaggaaacggtgcgtactgttgtaccggatgcgctggtgaccatcgccggcggtttccgccgtggcaaacctatgggccacgacgttgacttcctgatcacgccgccgggccgtcctgaagatgacgagctgctccacaaagtggttgatctgctcaagaagcaaggtctgctgctgtacgaagatatccgtgagagcacgttcgtggaggggcaactgccaagtcctaaaatcgacgccctggacaactttcagaagtgcttcgccattctcaagctgtaccagccgaaggtggataacagtgcggttgggacgagtaagaaaagtgacatggctgaggttaaggattggaaagcggttcgtgtggatctggtgatcacgccattcgagcagttcgcctatgcgctgctcggttggacgggcagcggccaatttcgtcgcgatctgcgtcgctatgcggaggaagagcgcgacatgctgctcgacaaccatcgtctctacgacctgaaaaagggcatctttctgagtgcgggcagcgaagaagagattttcggtcatctgggtctggattatctggagccgtgggaacgcaacgcg

SEQ ID NO: 3810 - protein, 394 aa, synthetic construct
  REGION 1..394: note = Variant of terminal deoxynucleotidyl transferase
MHHHHHHGGSGHPPGNTPEKEVPSVIARHVSQYACQRKTTLNNYNKKFTDALEIMAENYKFKENLQACLEAKRAASIFKSLPFEVTSMKDIQGLPCITDDVRDVIEEIIEEGESSRVKEILNDERYKAFKQFTSVFGVGVKTSEKWYRMGLRTVEEAKASKSLKLSKMQKAGFLYYEDLASGVSKEEADAVTLIVKETVRTVVPDALVTIAGGFRRGKPMGHDVDFLITPPGRPEDDELLHKVVDLLKKQGLLLYEDIRESTFVEGQLPSPKIDALDNFQKCFAILKLYQPKVDNSAVGTSKKSDMAEVKDWKAVRVDLVITPFEQFAYALLGWTGSGQFRRDLRRYAEEERDMLLDNHRLYDLKKGIFLSAGSEEEIFGHLGLDYLEPWERNA

SEQ ID NO: 3811 - DNA, 1182 bp, synthetic construct
  misc_feature 1..1182: note = Variant of terminal deoxynucleotidyl transferase
  source 1..1182: mol_type = other DNA
atgcatcaccaccatcatcatgggggttctggtcatccgccgagtaataccccggagaaggaggtgccgagcgttatcgcccgtcatgttagtcagtacgcgtgccagcgcaagaccacgctgaataactacaacaaaaagttcaccgacgcgctggagatcatggccgagaactacaaatttaaagagaacctgcaggcgtgtctggaagccaagcgcgccgcgagtatttttaaaagcctgccgttcgaggttaccagcatgaaagacatccaaggtctgccgtgcattaccgacgacgtacgtgacgtgatcgaggagatcatcgaagagggcgagagcagccgtgttaaagaaatcctcaatgacgagcgctacaaggcctttaagcagttcaccagcgtgttcggtgtgggcgtgaaaacctcggaaaagtggtaccgtatgggcctccgtacggttgaagaagcaaaggccagtaagagtctgaagctgagcaagatgcagaaggcgggcttcctgtattacgaggatctggcgagcggtgttagtaaagaagaagccgatgccgttacgctcatcgtgaaggaaacggtggcgactgttagtccggatgcgctggtgaccatcgccggcggtttccgccgtggcaaacctatgggccacgacgttgacctgctgatcacgccgccgggccgtcctgaagatgacgagctgctccacaaagtggttgatctgctcaagaagcaaggtctgctgctgtacgaagacatccgtgagagcacgttcgtggaggggcaactgccaagtcctaaaatcgacgccctggacaactttcagaagtgcttcgccattctcaagctgtaccagccgaaggtggataacagtgcggttgggacgagtaagaaaagtgacatggctgaggttaaggattggaaagcggttcgtgtggatctggtgatcacgccattcgagcagttcgcctatgcgctgctcggttggacgggcagcggcatctttcgtcgcgatctgcgtcgctatgcggaggaagagcgcgacatgctgctcgacaaccatcgtctctacgacctgaaaaagggcatctttctgagtgcgggcagcgaagaagagattttcggtcatctgggtctggattatctggagccgtgggaacgcaacgcg

SEQ ID NO: 3812 - protein, 394 aa, synthetic construct
  REGION 1..394: note = Variant of terminal deoxynucleotidyl transferase
MHHHHHHGGSGHPPSNTPEKEVPSVIARHVSQYACQRKTTLNNYNKKFTDALEIMAENYKFKENLQACLEAKRAASIFKSLPFEVTSMKDIQGLPCITDDVRDVIEEIIEEGESSRVKEILNDERYKAFKQFTSVFGVGVKTSEKWYRMGLRTVEEAKASKSLKLSKMQKAGFLYYEDLASGVSKEEADAVTLIVKETVATVSPDALVTIAGGFRRGKPMGHDVDLLITPPGRPEDDELLHKVVDLLKKQGLLLYEDIRESTFVEGQLPSPKIDALDNFQKCFAILKLYQPKVDNSAVGTSKKSDMAEVKDWKAVRVDLVITPFEQFAYALLGWTGSGIFRRDLRRYAEEERDMLLDNHRLYDLKKGIFLSAGSEEEIFGHLGLDYLEPWERNA

SEQ ID NO: 3813 - DNA, 1182 bp, synthetic construct
  misc_feature 1..1182: note = Variant of terminal deoxynucleotidyl transferase
  source 1..1182: mol_type = other DNA
atgcatcaccaccatcatcatgggggttctggtcatccgccgggtaataccccggagaaggaggtgccgagcgttatcgcccgtcatgttagtcagtacgcgtgccagcgcaagaccacgctgaataactacaacaaaaagttcaccgacgcgctggagatcatggccgagaactacaaatttaaagagaacctgcaggcgtgtctggaagccaagcgcgccgcgagtgtcctgaaaagcctgccgttcgaggttaccagcatgaaagacatccaaggtctgccgtgcattaccgacgacgtacgtgacgtgatcgaggagatcatcgaagagggcgagagcagccgtgttaaagaaatcctcaatgacgagcgctacaaggcctttaagcagttcaccagcgtgttcggtgtgggcgtgaaaacctcggaaaagtggtaccgtatgggcctccgtacggttgaagaagcaaaggccagtaagagtctgaagctgagcaagatgcagaaggcgggcttcctgtattacgaggatctggcgagcggtgttagtaaagaagaagccgatgccgttacgctcatcgtgaaggaaacggtggcgctggttagtccggatgcgctggtgaccatcgccggcggtttccgccgtggcaaacctatgggccacgacgttgacctgctgatcacgccgccgggccgtcctgaagatgacgagctgctccacaaagtggttgatctgctcaagaagcaaggtctgctgctgtacgaagacatccgtgagagcacgttcgtggaggggcaactgccaagtcctaaaatcgacgccctggacaactttcagaagtgcttcgccattctcaagctgtaccagccgaaggtggataacagtgcggttgggacgagtaagaaaagtgacatggctgaggttaaggattggaaagcggttcgtgtggatctggtgatcacgccattcgagcagttcgcctatgcgctgctcggttggacgggcagcggccaatttcgtcgcgatctgcgtcgctatgcggaggaagagcgcgacatgctgctcgacaaccatcgtctctacgacctgaaaaagggcatctttctgagtgcgggcagcgaagaagagattttcggtcatctgggtctggattatctggagccgtgggaacgcaacgcg

SEQ ID NO: 3814 - protein, 394 aa, synthetic construct
  REGION 1..394: note = Variant of terminal deoxynucleotidyl transferase
MHHHHHHGGSGHPPGNTPEKEVPSVIARHVSQYACQRKTTLNNYNKKFTDALEIMAENYKFKENLQACLEAKRAASVLKSLPFEVTSMKDIQGLPCITDDVRDVIEEIIEEGESSRVKEILNDERYKAFKQFTSVFGVGVKTSEKWYRMGLRTVEEAKASKSLKLSKMQKAGFLYYEDLASGVSKEEADAVTLIVKETVALVSPDALVTIAGGFRRGKPMGHDVDLLITPPGRPEDDELLHKVVDLLKKQGLLLYEDIRESTFVEGQLPSPKIDALDNFQKCFAILKLYQPKVDNSAVGTSKKSDMAEVKDWKAVRVDLVITPFEQFAYALLGWTGSGQFRRDLRRYAEEERDMLLDNHRLYDLKKGIFLSAGSEEEIFGHLGLDYLEPWERNA

SEQ ID NO: 3815 - DNA, 1182 bp, synthetic construct
  misc_feature 1..1182: note = Variant of terminal deoxynucleotidyl transferase
  source 1..1182: mol_type = other DNA
atgcatcaccaccatcatcatgggggttctggtcatccggaaagtaataccccggagaaggaggtgccgagcgttatcgcccgtcatgttagtcagtacgcgtgccagcgcaagaccacgctgaataactacaacaaaaagttcaccgacgcgctggagatcatggccgagaactacaaatttaaagagaacctgcaggcgtgtctggaagccaagcgcgccgcgagtatttttaaaagcctgccgttcgaggttaccagcatgaaagacatccaaggtctgccgtgcattaccgacgacgtacgtgacgtgatcgaggagatcatcgaagagggcgagagcagccgtgttaaagaaatcctcaatgacgagcgctacaaggcctttaagcagttcaccagcgtgttcggtgtgggcgtgaaaacctcggaaaagtggtaccgtatgggcctccgtacggttgaagaagcaaaggccagtaagagtctgaagctgagcaagatgcagaaggcgggcttcctgtattacgaggatctggcgagcggtgttagtaaagaagaagccgatgccgttacgctcatcgtgaaggaaacggtggcgactgttagtccggatgcgctggtgaccatcgccggcggtttccgccgtggcaaacctatgggccacgacgttgacttcctgatcacgccgccgggccgtcctgaagatgacgagctgctccacaaagtggttgatctgctcaagaagcaaggtctgctgctgtacgaagatatccgtgagagcacgttcgtggaggggcaactgccaagtcctaaaatcgacgccctggacaactttcagaagtgcttcgccattctcaagctgtaccagccgaaggtggataacagtgcggttgggacgagtaagaaaagtgacatggctgaggttaaggattggaaagcggttcgtgtggatctggtgatcacgccattcgagcagttcgcctatgcgctgctcggttggacgggcagcggcatctttcgtcgcgatctgcgtcgctatgcggaggaagagcgcgacatgctgctcgacaaccatcgtctctacgacctgaaaaagggcatctttctgagtgcgggcagcgaagaagagattttcggtcatctgggtctggattatctggagccgtgggaacgcaacgcg

SEQ ID NO: 3816 - protein, 394 aa, synthetic construct
  REGION 1..394: note = Variant of terminal deoxynucleotidyl transferase
MHHHHHHGGSGHPESNTPEKEVPSVIARHVSQYACQRKTTLNNYNKKFTDALEIMAENYKFKENLQACLEAKRAASIFKSLPFEVTSMKDIQGLPCITDDVRDVIEEIIEEGESSRVKEILNDERYKAFKQFTSVFGVGVKTSEKWYRMGLRTVEEAKASKSLKLSKMQKAGFLYYEDLASGVSKEEADAVTLIVKETVATVSPDALVTIAGGFRRGKPMGHDVDFLITPPGRPEDDELLHKVVDLLKKQGLLLYEDIRESTFVEGQLPSPKIDALDNFQKCFAILKLYQPKVDNSAVGTSKKSDMAEVKDWKAVRVDLVITPFEQFAYALLGWTGSGIFRRDLRRYAEEERDMLLDNHRLYDLKKGIFLSAGSEEEIFGHLGLDYLEPWERNA

SEQ ID NO: 3817 - DNA, 1182 bp, synthetic construct
  misc_feature 1..1182: note = Variant of terminal deoxynucleotidyl transferase
  source 1..1182: mol_type = other DNA
atgcatcaccaccatcatcatgggggttctggtcatccgccgggtaataccccggagaaggaggtgccgagcgttatcgcccgtcatgttagtcagtacgcgtgccagcgcaagaccacgctgaataactacaacaaaaagttcaccgacgcgctggagatcatggccgagaactacaaatttaaagagaacctgcaggcgtgtctggaagccaagcgcgccgcgagtgtcttcaaaagcctgccgttcgaggttaccagcatgaaagacatccaaggtctgccgtgcattaccgacgacgtacgtgacgtgatcgaggagatcatcgaagagggcgagagcagccgtgttaaagaaatcctcaatgacgagcgctacaaggcctttaagcagttcaccagcgtgttcggtgtgggcgtgaaaacctcggaaaagtggtaccgtatgggcctccgtacggttgaagaagcaaaggccagtaagagtctgaagctgagcaagatgcagaaggcgggcttcctgtattacgaggatctggcgagcggtgttagtaaagaagaagccgatgccgttacgctcatcgtgaaggaaacggtggcgactgttgtaccggatgcgctggtgaccatcgccggcggtttccgccgtggcaaacctatgggccacgacgttgacttcctgatcacgccgccgggccgtcctgaagatgacgagctgctccacaaagtggttgatctgctcaagaagcaaggtctgctgctgtacgaagacatccgtgagagcacgttcgtggaggggcaactgccaagtcctaaaatcgacgccctggacaactttcagaagtgcttcgccattctcaagctgtaccgtccgaaggtggataacagtgcggttgggacgagtaagaaaagtgacatggctgaggttaaggattggaaagcggttcgtgtggatctggtgatcacgccattcgagcagttcgcctatgcgctgctcggttggacgggcagcggcatctttcgtcgcgatctgcgtcgctatgcggaggaagagcgcgacatgctgctcgacaaccatcgtctctacgacctgaaaaagggcatctttctgagtgcgggcagcgaagaagagattttcggtcatctgggtctggattatctggagccgtgggaacgcaacgcg

SEQ ID NO: 3818 - protein, 394 aa, synthetic construct
  REGION 1..394: note = Variant of terminal deoxynucleotidyl transferase
MHHHHHHGGSGHPPGNTPEKEVPSVIARHVSQYACQRKTTLNNYNKKFTDALEIMAENYKFKENLQACLEAKRAASVFKSLPFEVTSMKDIQGLPCITDDVRDVIEEIIEEGESSRVKEILNDERYKAFKQFTSVFGVGVKTSEKWYRMGLRTVEEAKASKSLKLSKMQKAGFLYYEDLASGVSKEEADAVTLIVKETVATVVPDALVTIAGGFRRGKPMGHDVDFLITPPGRPEDDELLHKVVDLLKKQGLLLYEDIRESTFVEGQLPSPKIDALDNFQKCFAILKLYRPKVDNSAVGTSKKSDMAEVKDWKAVRVDLVITPFEQFAYALLGWTGSGIFRRDLRRYAEEERDMLLDNHRLYDLKKGIFLSAGSEEEIFGHLGLDYLEPWERNA

SEQ ID NO: 3819 - DNA, 1182 bp, synthetic construct
  misc_feature 1..1182: note = Variant of terminal deoxynucleotidyl transferase
  source 1..1182: mol_type = other DNA
atgcatcaccaccatcatcatgggggttctggtcatccgccgagcaataccccggagaaggaggtgccgagcgttatcgcccgtcatgttagtccatacgcgtgccagcgcaagaccacgctgaataactacaacaaaaagttcaccgacgcgctggagatcatggccgagaactacaaatttaaagagaacctgcaggcgtgtctggaagccaagcgcgccgcgagtatttttaaaagcctgccgttcgaggttaccagcatgaaagacatccaaggtctgccgtgcattaccgacgacgtacgtgatgtgatcgaggagatcatcgaagagggcgagagcagccgtgttaaagaaatcctcaatgacgagcgctacaaggcctttaagcagttcaccagcgtgttcggtgtgggcgtgaaaacctcggaaaagtggtaccgtatgggcctccgtacggttgaagaagcaaaggccagtaagagtctgaagctgagcaagatgcagaaggcgggcttcctgtattacgaggatctggcgagcggtgttagtaaagaagaagccgatgccgttacgctcatcgtgaaggaaacggtgcgtaccgttgtgccggatgcgctggtgaccctggccggcggtttccgccgtggcaaacctatgggccacgacgttgactttctgatcacgaacccgatccgtcctaccgatgacgagctgctccacaaagtggttgatctgctcaagaagcaaggtctgctgctgtacgaagacatccgtgagagcacgttcgtggaggggcaactgccaagtcctaaaatcgacgccctggacaactttcagaagtgcttcgccattctcaagctgtaccagccgaaggtggataacagtgcggttgggacgagtaagaaaagtgacatggctgaggttaaggattggaaagcggttcgtgtggatctggtgatcacgccattcgagcagttcgcctatgcgctgctcggttggacgggcagcggccaatttcgtcgcgatctgcgtcgctatgcggaggaagagcgcgacatgctgctcgacaaccatcgtctctacgacctgaaaaagggccagtttctgagtgcgggtagcgaagaagagattttcggtcatctgggtctggattatctggagccgtgggaacgcaacgcg

SEQ ID NO: 3820 - protein, 394 aa, synthetic construct
  REGION 1..394: note = Variant of terminal deoxynucleotidyl transferase
MHHHHHHGGSGHPPSNTPEKEVPSVIARHVSPYACQRKTTLNNYNKKFTDALEIMAENYKFKENLQACLEAKRAASIFKSLPFEVTSMKDIQGLPCITDDVRDVIEEIIEEGESSRVKEILNDERYKAFKQFTSVFGVGVKTSEKWYRMGLRTVEEAKASKSLKLSKMQKAGFLYYEDLASGVSKEEADAVTLIVKETVRTVVPDALVTLAGGFRRGKPMGHDVDFLITNPIRPTDDELLHKVVDLLKKQGLLLYEDIRESTFVEGQLPSPKIDALDNFQKCFAILKLYQPKVDNSAVGTSKKSDMAEVKDWKAVRVDLVITPFEQFAYALLGWTGSGQFRRDLRRYAEEERDMLLDNHRLYDLKKGQFLSAGSEEEIFGHLGLDYLEPWERNA

SEQ ID NO: 3821 - DNA, 1182 bp, synthetic construct
  misc_feature 1..1182: note = Variant of terminal deoxynucleotidyl transferase
  source 1..1182: mol_type = other DNA
atgcatcaccaccatcatcatgggggttctggtcatccggaaggtaataccccggagaaggaggtgccgagcgttatcgcccgtcatgttagtcagtacgcgtgccagcgcaagaccacgctgaataactacaacaaaaagttcaccgacgcgctggagatcatggccgagaactacaaatttaaagagaacctgcaggcgtgtctggaagccaagcgcgccgcgagtatcctgaaaagcctgccgttcgaggttaccagcatgaaagacatccaaggtctgccgtgcattaccgacgacgtacgtgacgtgatcgaggagatcatcgaagagggcgagagcagccgtgttaaagaaatcctcaatgacgagcgctacaaggcctttaagcagttcaccagcgtgttcggtgtgggcgtgaaaacctcggaaaagtggtaccgtatgggcctccgtacggttgaagaagcaaaggccagtaagagtctgaagctgagcaagatgcagaaggcgggcttcctgtattacgaggatctggcgagcggtgttagtaaagaagaagccgatgccgttacgctcatcgtgaaggaaacggtgcgtactgttgtaccggatgcgctggtgaccatcgccggcggtttccgccgtggcaaacctatgggccacgacgttgactttctgatcacgaatccgggccgtcctgaagatgacgagctgctccacaaagtggttgatctgctcaagaagcaaggtctgctgctgtacgaagatatccgtgagagcacgttcgtggaggggcaactgccaagtcctaaaatcgacgccctggacaactttcagaagtgcttcgccattctcaagctgtaccagccgaaggtggataacagtgcggttgggacgagtaagaaaagtgacatggctgaggttaaggattggaaagcggttcgtgtggatctggtgatcacgccattcgagcagttcgcctatgcgctgctcggttggacgggcagcggccaatttcgtcgcgatctgcgtcgctatgcggaggaagagcgcgacatgctgctcgacaaccatcgtctctacgacctgaaaaagggcatctttctgagtgcgggcagcgaagaagagattttcggtcatctgggtctggattatctggagccgtgggaacgcaacgcg

SEQ ID NO: 3822 - protein, 394 aa, synthetic construct
  REGION 1..394: note = Variant of terminal deoxynucleotidyl transferase
MHHHHHHGGSGHPEGNTPEKEVPSVIARHVSQYACQRKTTLNNYNKKFTDALEIMAENYKFKENLQACLEAKRAASILKSLPFEVTSMKDIQGLPCITDDVRDVIEEIIEEGESSRVKEILNDERYKAFKQFTSVFGVGVKTSEKWYRMGLRTVEEAKASKSLKLSKMQKAGFLYYEDLASGVSKEEADAVTLIVKETVRTVVPDALVTIAGGFRRGKPMGHDVDFLITNPGRPEDDELLHKVVDLLKKQGLLLYEDIRESTFVEGQLPSPKIDALDNFQKCFAILKLYQPKVDNSAVGTSKKSDMAEVKDWKAVRVDLVITPFEQFAYALLGWTGSGQFRRDLRRYAEEERDMLLDNHRLYDLKKGIFLSAGSEEEIFGHLGLDYLEPWERNA

SEQ ID NO: 3823 - DNA, 1182 bp, synthetic construct
  misc_feature 1..1182: note = Variant of terminal deoxynucleotidyl transferase
  source 1..1182: mol_type = other DNA
atgcatcaccaccatcatcatgggggttctggtcatccgccgagcaataccccggagaaggaggtgccgagcgttatcgcccgtcatgttagtccatacgcgtgccagcgcaagaccacgctgaataactacaacaaaaagttcaccgacgcgctggagatcatggccgagaactacaaatttaaagagaacctgcaggcgtgtctggaagccaagcgcgccgcgagtatttttaaaagcctgccgttcgaggttaccagcatgaaagacatccaaggtctgccgtgcattaccgacgacgtacgtcctgtgatccgcgagatcatcgaagagggcgagagcagccgtgttaaagaaatcctcaatgacgagcgctacaaggcctttaagcagttcaccagcgtgttcggtgtgggcgtgaaaacctcggaaaagtggtaccgtatgggcctccgtacggttgaagaagcaaaggccagtaagagtctgaagctgagcaagatgcagaaggcgggcttcctgtattacgaggatctggcgagcggtgttagtaaagaagaagccgatgccgttacgctcatcgtgaaggaaacggtgcgtaccgttgtgccggatgcggaagtgaccctggccggcggtttccgccgtggcaaacctatgggccacgacgttgactttctgatcacgaacccgggtcgtcctaccgatgacgagctgctccacaaagtggttgatctgctcaagaagcaaggtctgctgctgtacgaagacatccgtgagagcacgttcgtggaggggcaactgccaagtcctaaaattgacgccctggacaactttcagaagtgcttcgccattctcaagctgtaccagccgaaggtggataacagtgcggttgggacgagtaagaaaagtgacatggctgaggttaaggattggaaagcggttcgtgtggatctggtgatgacgccattcgagcagttcgcctatgcgctgctcggttggacgggcagcggccaatttcgtcgcgatctgcgtcgctatgcggaggaagagcgcgacatgctgctcgacaaccatcgtctctacgacctgaaaaagggccagtttctgagtgcgggtagcgaagaagagattttcggtcatctgggtctggattatctggagccgtgggaacgcaacgcg

SEQ ID NO: 3824 - protein, 394 aa, synthetic construct
  REGION 1..394: note = Variant of terminal deoxynucleotidyl transferase
MHHHHHHGGSGHPPSNTPEKEVPSVIARHVSPYACQRKTTLNNYNKKFTDALEIMAENYKFKENLQACLEAKRAASIFKSLPFEVTSMKDIQGLPCITDDVRPVIREIIEEGESSRVKEILNDERYKAFKQFTSVFGVGVKTSEKWYRMGLRTVEEAKASKSLKLSKMQKAGFLYYEDLASGVSKEEADAVTLIVKETVRTVVPDAEVTLAGGFRRGKPMGHDVDFLITNPGRPTDDELLHKVVDLLKKQGLLLYEDIRESTFVEGQLPSPKIDALDNFQKCFAILKLYQPKVDNSAVGTSKKSDMAEVKDWKAVRVDLVMTPFEQFAYALLGWTGSGQFRRDLRRYAEEERDMLLDNHRLYDLKKGQFLSAGSEEEIFGHLGLDYLEPWERNA

SEQ ID NO: 3825 - DNA, 1182 bp, synthetic construct
  misc_feature 1..1182: note = Variant of terminal deoxynucleotidyl transferase
  source 1..1182: mol_type = other DNA
atgcatcaccaccatcatcatgggggttctggtcatccgccgggtaataccccggagaaggaggtgccgagcgttatcgcccgtcatgttagtcagtacgcgtgccagcgcaagaccacgctgaataactacaacaaaaagttcaccgacgcgctggagatcatggccgagaactacaaatttaaagagaacctgcaggcgtgtctggaagccaagcgcgccgcgagtatcctgaaaagcctgccgttcgaggttaccagcatgaaagacatccaaggtctgccgtgcattaccgacgacgtacgtgacgtgatcgaggagatcatcgaagagggcgagagcagccgtgttaaagaaatcctcaatgacgagcgctacaaggcctttaagcagttcaccagcgtgttcggtgtgggcgtgaaaacctcggaaaagtggtaccgtatgggcctccgtacggttgaagaagcaaaggccagtaagagtctgaagctgagcaagatgcagaaggcgggcttcctgtattacgaggatctggcgagcggtgttagtaaagaagaagccgatgccgttacgctcatcgtgaaggaaacggtgcgtctggttgtaccggatgcgctggtgaccatcgccggcggtttccgccgtggcaaacctatgggccacgacgttgacttcctgatcacgccgccgggccgtcctgaagatgacgagctgctccacaaagtggttgatctgctcaagaagcaaggtctgctgctgtacgaagacatccgtgagagcacgttcgtggaggggcaactgccaagtcctaaaatcgacgccctggacaactttcagaagtgcttcgccattctcaagctgtaccgtccgaaggtggataacagtgcggttgggacgagtaagaaaagtgacatggctgaggttaaggattggaaagcggttcgtgtggatctggtgatcacgccattcgagcagttcgcctatgcgctgctcggttggacgggcagcggccaatttcgtcgcgatctgcgtcgctatgcggaggaagagcgcgacatgctgctcgacaaccatcgtctctacgacctgaaaaagggcatctttctgagtgcgggcagcgaagaagagattttcggtcatctgggtctggattatctggagccgtgggaacgcaacgcg

SEQ ID NO: 3826 - protein, 394 aa, synthetic construct
  REGION 1..394: note = Variant of terminal deoxynucleotidyl transferase
MHHHHHHGGSGHPPGNTPEKEVPSVIARHVSQYACQRKTTLNNYNKKFTDALEIMAENYKFKENLQACLEAKRAASILKSLPFEVTSMKDIQGLPCITDDVRDVIEEIIEEGESSRVKEILNDERYKAFKQFTSVFGVGVKTSEKWYRMGLRTVEEAKASKSLKLSKMQKAGFLYYEDLASGVSKEEADAVTLIVKETVRLVVPDALVTIAGGFRRGKPMGHDVDFLITPPGRPEDDELLHKVVDLLKKQGLLLYEDIRESTFVEGQLPSPKIDALDNFQKCFAILKLYRPKVDNSAVGTSKKSDMAEVKDWKAVRVDLVITPFEQFAYALLGWTGSGQFRRDLRRYAEEERDMLLDNHRLYDLKKGIFLSAGSEEEIFGHLGLDYLEPWERNA

SEQ ID NO: 3827 - DNA, 1182 bp, synthetic construct
  misc_feature 1..1182: note = Variant of terminal deoxynucleotidyl transferase
  source 1..1182: mol_type = other DNA
atgcatcaccaccatcatcatgggggttctggtcatccggaaagtaataccccggagaaggaggtgccgagcgttatcgcccgtcatgttagtcagtacgcgtgccagcgcaagaccacgctgaataactacaacaaaaagttcaccgacgcgctggagatcatggccgagaactacaaatttaaagagaacctgcaggcgtgtctggaagccaagcgcgccgcgagtatcctgaaaagcctgccgttcgaggttaccagcatgaaagacatccaaggtctgccgtgcattaccgacgacgtacgtgacgtgatcgaggagatcatcgaagagggcgagagcagccgtgttaaagaaatcctcaatgacgagcgctacaaggcctttaagcagttcaccagcgtgttcggtgtgggcgtgaaaacctcggaaaagtggtaccgtatgggcctccgtacggttgaagaagcaaaggccagtaagagtctgaagctgagcaagatgcagaaggcgggcttcctgtattacgaggatctggcgagcggtgttagtaaagaagaagccgatgccgttacgctcatcgtgaaggaaacggtggcgctggttgtaccggatgcgctggtgaccatcgccggcggtttccgccgtggcaaacctatgggccacgacgttgacctgctgatcacgaatccgggccgtcctgaagatgacgagctgctccacaaagtggttgatctgctcaagaagcaaggtctgctgctgtacgaagacatccgtgagagcacgttcgtggaggggcaactgccaagtcctaaaatcgacgccctggacaactttcagaagtgcttcgccattctcaagctgtaccgtccgaaggtggataacagtgcggttgggacgagtaagaaaagtgacatggctgaggttaaggattggaaagcggttcgtgtggatctggtgatcacgccattcgagcagttcgcctatgcgctgctcggttggacgggcagcggccaatttcgtcgcgatctgcgtcgctatgcggaggaagagcgcgacatgctgctcgacaaccatcgtctctacgacctgaaaaagggcatctttctgagtgcgggcagcgaagaagagattttcggtcatctgggtctggattatctggagccgtgggaacgcaacgcg

SEQ ID NO: 3828 - protein, 394 aa, synthetic construct
  REGION 1..394: note = Variant of terminal deoxynucleotidyl transferase
MHHHHHHGGSGHPESNTPEKEVPSVIARHVSQYACQRKTTLNNYNKKFTDALEIMAENYKFKENLQACLEAKRAASILKSLPFEVTSMKDIQGLPCITDDVRDVIEEIIEEGESSRVKEILNDERYKAFKQFTSVFGVGVKTSEKWYRMGLRTVEEAKASKSLKLSKMQKAGFLYYEDLASGVSKEEADAVTLIVKETVALVVPDALVTIAGGFRRGKPMGHDVDLLITNPGRPEDDELLHKVVDLLKKQGLLLYEDIRESTFVEGQLPSPKIDALDNFQKCFAILKLYRPKVDNSAVGTSKKSDMAEVKDWKAVRVDLVITPFEQFAYALLGWTGSGQFRRDLRRYAEEERDMLLDNHRLYDLKKGIFLSAGSEEEIFGHLGLDYLEPWERNA

SEQ ID NO: 3829 - DNA, 1182 bp, synthetic construct
  misc_feature 1..1182: note = Variant of terminal deoxynucleotidyl transferase
  source 1..1182: mol_type = other DNA
atgcatcaccaccatcatcatgggggttctggtcatccggaaagtaataccccggagaaggaggtgccgagcgttatcgcccgtcatgttagtcagtacgcgtgccagcgcaagaccacgctgaataactacaacaaaaagttcaccgacgcgctggagatcatggccgagaactacaaatttaaagagaacctgcaggcgtgtctggaagccaagcgcgccgcgagtatcctgaaaagcctgccgttcgaggttaccagcatgaaagacatccaaggtctgccgtgcattaccgacgacgtacgtgacgtgatcgaggagatcatcgaagagggcgagagcagccgtgttaaagaaatcctcaatgacgagcgctacaaggcctttaagcagttcaccagcgtgttcggtgtgggcgtgaaaacctcggaaaagtggtaccgtatgggcctccgtacggttgaagaagcaaaggccagtaagagtctgaagctgagcaagatgcagaaggcgggcttcctgtattacgaggatctggcgagcggtgttagtaaagaagaagccgatgccgttacgctcatcgtgaaggaaacggtggcgactgttgtaccggatgcgctggtgaccatcgccggcggtttccgccgtggcaaacctatgggccacgacgttgacctgctgatcacgaatccgggccgtcctgaagatgacgagctgctccacaaagtggttgatctgctcaagaagcaaggtctgctgctgtacgaagatatccgtgagagcacgttcgtggaggggcaactgccaagtcctaaaatcgacgccctggacaactttcagaagtgcttcgccattctcaagctgtaccgtccgaaggtggataacagtgcggttgggacgagtaagaaaagtgacatggctgaggttaaggattggaaagcggttcgtgtggatctggtgatcacgccattcgagcagttcgcctatgcgctgctcggttggacgggcagcggcatctttcgtcgcgatctgcgtcgctatgcggaggaagagcgcgacatgctgctcgacaaccatcgtctctacgacctgaaaaagggcatctttctgagtgcgggcagcgaagaagagattttcggtcatctgggtctggattatctggagccgtgggaacgcaacgcg

SEQ ID NO: 3830 - protein, 394 aa, synthetic construct
  REGION 1..394: note = Variant of terminal deoxynucleotidyl transferase
MHHHHHHGGSGHPESNTPEKEVPSVIARHVSQYACQRKTTLNNYNKKFTDALEIMAENYKFKENLQACLEAKRAASILKSLPFEVTSMKDIQGLPCITDDVRDVIEEIIEEGESSRVKEILNDERYKAFKQFTSVFGVGVKTSEKWYRMGLRTVEEAKASKSLKLSKMQKAGFLYYEDLASGVSKEEADAVTLIVKETVATVVPDALVTIAGGFRRGKPMGHDVDLLITNPGRPEDDELLHKVVDLLKKQGLLLYEDIRESTFVEGQLPSPKIDALDNFQKCFAILKLYRPKVDNSAVGTSKKSDMAEVKDWKAVRVDLVITPFEQFAYALLGWTGSGIFRRDLRRYAEEERDMLLDNHRLYDLKKGIFLSAGSEEEIFGHLGLDYLEPWERNA

SEQ ID NO: 3831 - DNA, 1182 bp, synthetic construct
  misc_feature 1..1182: note = Variant of terminal deoxynucleotidyl transferase
  source 1..1182: mol_type = other DNA
atgcatcaccaccatcatcatgggggttctggtcatccgccgagcaataccccggagaaggaggtgccgagcgttatcgcccgtcatgttagtcagtacgcgtgccagcgcaagaccacgctgaataactacaacaaaaagttcaccgacgcgctggagatcatggccgagaactacaaatttaaagagaacctgcaggcgtgtctggaagccaagcgcgccgcgagtatttttaaaagcctgccgttcgaggttaccagcatgaaagacatccaaggtctgccgtgcattaccgacgacgtacgtgacgtgatcgaggagatcatcgaagagggcgagagcagccgtgttaaagaaatcctcaatgacgagcgctacaaggcctttaagcagttcaccagcgtgttcggtgtgggcgtgaaaacctcggaaaagtggtaccgtatgggcctccgtacggttgaagaagcaaaggccagtaagagtctgaagctgagcaagatgcagaaggcgggcttcctgtattacgaggatctggcgagcggtgttagtaaagaagaagccgatgccgttacgctcatcgtgaaggaaacggtgcgtactgttagtccggatgcgctggtgaccatcgccggcggtttccgccgtggcaaacctatgggccacgacgttgacctgctgatcacgccgccgggccgtcctgaagatgacgagctgctccacaaagtggttgatctgctcaagaagcaaggtctgctgctgtacgaagatatccgtgagagcacgttcgtggaggggcaactgccaagtcctaaaatcgacgccctggacaactttcagaagtgcttcgccattctcaagctgtaccagccgaaggtggataacagtgcggttgggacgagtaagaaaagtgacatggctgaggttaaggattggaaagcggttcgtgtggatctggtgatcacgccattcgagcagttcgcctatgcgctgctcggttggacgggcagcggccaatttcgtcgcgatctgcgtcgctatgcggaggaagagcgcgacatgctgctcgacaaccatcgtctctacgacctgaaaaagggcatctttctgagtgcgggcagcgaagaagagattttcggtcatctgggtctggattatctggagccgtgggaacgcaacgcg

SEQ ID NO: 3832 - protein, 394 aa, synthetic construct
  REGION 1..394: note = Variant of terminal deoxynucleotidyl transferase
MHHHHHHGGSGHPPSNTPEKEVPSVIARHVSQYACQRKTTLNNYNKKFTDALEIMAENYKFKENLQACLEAKRAASIFKSLPFEVTSMKDIQGLPCITDDVRDVIEEIIEEGESSRVKEILNDERYKAFKQFTSVFGVGVKTSEKWYRMGLRTVEEAKASKSLKLSKMQKAGFLYYEDLASGVSKEEADAVTLIVKETVRTVSPDALVTIAGGFRRGKPMGHDVDLLITPPGRPEDDELLHKVVDLLKKQGLLLYEDIRESTFVEGQLPSPKIDALDNFQKCFAILKLYQPKVDNSAVGTSKKSDMAEVKDWKAVRVDLVITPFEQFAYALLGWTGSGQFRRDLRRYAEEERDMLLDNHRLYDLKKGIFLSAGSEEEIFGHLGLDYLEPWERNA

SEQ ID NO: 3833 - DNA, 1182 bp, synthetic construct
  misc_feature 1..1182: note = Variant of terminal deoxynucleotidyl transferase
  source 1..1182: mol_type = other DNA
atgcatcaccaccatcatcatgggggttctggtcatccgccgagcaataccccggagaaggaggtgccgagcgttatcgcccgtcatgttagtcagtacgcgtgccagcgcaagaccacgctgaataactacaacaaaaagttcaccgacgcgctggagatcatggccgagaactacaaatttaaagagaacctgcaggcgtgtctggaagccaagcgcgccgcgagtatttttaaaagcctgccgttcgaggttaccagcatgaaagacatccaaggtctgccgtgcattaccgacgacgtacgtgatgtgatccgcgagatcatcgaagagggcgagagcagccgtgttaaagaaatcctcaatgacgagcgctacaaggcctttaagcagttcaccagcgtgttcggtgtgggcgtgaaaacctcggaaaagtggtaccgtatgggcctccgtacggttgaagaagcaaaggccagtaagagtctgaagctgagcaagatgcagaaggcgggcttcctgtattacgaggatctggcgagcggtgttagtaaagaagaagccgatgccgttacgctcatcgtgaaggaaacggtgcgtaccgttgtgccggatgcgctggtgaccattgccggcggtttccgccgtggcaaacctatgggccacgacgttgactttctgatcacgaacccgggtcgtcctaccgatgacgagctgctccacaaagtggttgatctgctcaagaagcaaggtctgctgctgtacgaagacatccgtgagagcacgttcgtggaggggcaactgccaagtcctaaaccagacgccctggacaactttcagaagtgcttcgccattctcaagctgtaccagccgaaggtggataacagtgcggttgggacgagtaagaaaagtgacatggctgaggttaaggattggaaagcggttcgtgtggatctggtgatcacgccattcgagcagttcgcctatgcgctgctcggttggacgggcagcggccaatttcgtcgcgatctgcgtcgctatgcggaggaagagcgcgacatgctgctcgacaaccatcgtctctacgacctgaaaaagggcatctttctgagtgcggatagcgaagaagagattttcggtcatctgggtctggattatctggagccgtgggaacgcaacgcg

SEQ ID NO: 3834 - protein, 394 aa, synthetic construct
  REGION 1..394: note = Variant of terminal deoxynucleotidyl transferase
MHHHHHHGGSGHPPSNTPEKEVPSVIARHVSQYACQRKTTLNNYNKKFTDALEIMAENYKFKENLQACLEAKRAASIFKSLPFEVTSMKDIQGLPCITDDVRDVIREIIEEGESSRVKEILNDERYKAFKQFTSVFGVGVKTSEKWYRMGLRTVEEAKASKSLKLSKMQKAGFLYYEDLASGVSKEEADAVTLIVKETVRTVVPDALVTIAGGFRRGKPMGHDVDFLITNPGRPTDDELLHKVVDLLKKQGLLLYEDIRESTFVEGQLPSPKPDALDNFQKCFAILKLYQPKVDNSAVGTSKKSDMAEVKDWKAVRVDLVITPFEQFAYALLGWTGSGQFRRDLRRYAEEERDMLLDNHRLYDLKKGIFLSADSEEEIFGHLGLDYLEPWERNA

SEQ ID NO: 3835 - DNA, 1182 bp, synthetic construct
  misc_feature 1..1182: note = Variant of terminal deoxynucleotidyl transferase
  source 1..1182: mol_type = other DNA
atgcatcaccaccatcatcatgggggttctggtcatccgccgagcaataccccggagaaggaggtgccgagcgttatcgcccgtcatgttagtccatacgcgtgccagcgcaagaccacgctgaataactacaacaaaaagttcaccgacgcgctggagatcatggccgagaactacaaatttaaagagaacctgcaggcgtgtctggaagccaagcgcgccgcgagtatttttaaaagcctgccgttcgaggttaccagcatgaaagacatccaaggtctgccgtgcattaccgacgacgtacgtgatgtgatcgaggagatcatcgaagagggcgagagcagccgtgttaaagaaatcctcaatgacgagcgctacaaggcctttaagcagttcaccagcgtgttcggtgtgggcgtgaaaacctcggaaaagtggtaccgtatgggcctccgtacggttgaagaagcaaaggccagtaagagtctgaagctgagcaagatgcagaaggcgggcttcctgtattacgaggatctggcgagcggtgttagtaaagaagaagccgatgccgttacgctcatcgtgaaggaaacggtgcgtaccgttgtgccggatgcgctggtgaccctggccggcggtttccgccgtggcaaacctatgggccacgacgttgactttctgatcacgaacccgggccgtcctgaagatgacgagctgctccacaaagtggttgatctgctcaagaagcaaggtctgctgctgtacgaagacatccgtgagagcacgttcgtggaggggcaactgccaagtcctaaaccagacgccctggacaactttcagaagtgcttcgccattctcaagctgtaccagccgaaggtggataacagtgcggttgggacgagtaagaaaagtgacatggctgaggttaaggattggaaagcggttcgtgtggatctggtgatcacgccattcgagcagttcgcctatgcgctgctcggttggacgggcagcggccaatttcgtcgcgatctgcgtcgctatgcggaggaagagcgcgacatgctgctcgacaaccatcgtctctacgacctgaaaaagggcatctttctgagtgcgggtagcgaagaagagattttcggtcatctgggtctggattatctggagccgtgggaacgcaacgcg

SEQ ID NO: 3836 - protein, 394 aa, synthetic construct
  REGION 1..394: note = Variant of terminal deoxynucleotidyl transferase
MHHHHHHGGSGHPPSNTPEKEVPSVIARHVSPYACQRKTTLNNYNKKFTDALEIMAENYKFKENLQACLEAKRAASIFKSLPFEVTSMKDIQGLPCITDDVRDVIEEIIEEGESSRVKEILNDERYKAFKQFTSVFGVGVKTSEKWYRMGLRTVEEAKASKSLKLSKMQKAGFLYYEDLASGVSKEEADAVTLIVKETVRTVVPDALVTLAGGFRRGKPMGHDVDFLITNPGRPEDDELLHKVVDLLKKQGLLLYEDIRESTFVEGQLPSPKPDALDNFQKCFAILKLYQPKVDNSAVGTSKKSDMAEVKDWKAVRVDLVITPFEQFAYALLGWTGSGQFRRDLRRYAEEERDMLLDNHRLYDLKKGIFLSAGSEEEIFGHLGLDYLEPWERNA

SEQ ID NO: 3837 - DNA, 1182 bp, synthetic construct
  misc_feature 1..1182: note = Variant of terminal deoxynucleotidyl transferase
  source 1..1182: mol_type = other DNA
atgcatcaccaccatcatcatgggggttctggtcatccgccgagcaataccccggagaaggaggtgccgagcgttatcgcccgtcatgttagtcaatacgcgtgccagcgcaagaccacgctgaataactacaacaaaaagttcaccgacgcgctggagatcatggccgagaactacaaatttaaagagaacctgcaggcgtgtctggaagccaagcgcgccgcgagtatttttaaaagcctgccgttcgaggttaccagcatgaaagacatccaaggtctgccgtgcattaccgacgacgtacgtgatgtgatcgaggagatcatcgaagagggcgagagcagccgtgttaaagaaatcctcaatgacgagcgctacaaggcctttaagcagttcaccagcgtgttcggtgtgggcgtgaaaacctcggaaaagtggtaccgtatgggcctccgtacggttgaagaagcaaaggccagtaagagtctgaagctgagcaagatgcagaaggcgggcttcctgtattacgaggatctggcgagcggtgttagtaaagaagaagccgatgccgttacgctcatcgtgaaggaaacggtgcgtaccgttgtgccggatgcggaagtgaccatcgccggcggtttccgccgtggcaaacctatgggccacgacgttgactttctgatcacgaacccgggtcgtcctaccgatgacgagctgctccacaaagtggttgatctgctcaagaagcaaggtctgctgctgtacgaagacatccgtgagagcacgttcgtggaggggcaactgccaagtcctaaaatcgacgccctggacaactttcagaagtgcttcgccattctcaagctgtaccagccgaaggtggataacagtgcggttgggacgagtaagaaaagtgacatggctgaggttaaggattggaaagcggttcgtgtggatctggtgatcacgccattcgagcagttcgcctatgcgctgctcggttggacgggcagcggccaatttcgtcgcgatctgcgtcgctatgcggaggaagagcgcgacatgctgctcgacaaccatcgtctctacgacctgaaaaagggccagtttctgagtgcgggtagcgaagaagagattttcggtcatctgggtctggattatctggagccgtgggaacgcaacgcg

SEQ ID NO: 3838 - protein, 394 aa, synthetic construct
  REGION 1..394: note = Variant of terminal deoxynucleotidyl transferase
MHHHHHHGGSGHPPSNTPEKEVPSVIARHVSQYACQRKTTLNNYNKKFTDALEIMAENYKFKENLQACLEAKRAASIFKSLPFEVTSMKDIQGLPCITDDVRDVIEEIIEEGESSRVKEILNDERYKAFKQFTSVFGVGVKTSEKWYRMGLRTVEEAKASKSLKLSKMQKAGFLYYEDLASGVSKEEADAVTLIVKETVRTVVPDAEVTIAGGFRRGKPMGHDVDFLITNPGRPTDDELLHKVVDLLKKQGLLLYEDIRESTFVEGQLPSPKIDALDNFQKCFAILKLYQPKVDNSAVGTSKKSDMAEVKDWKAVRVDLVITPFEQFAYALLGWTGSGQFRRDLRRYAEEERDMLLDNHRLYDLKKGQFLSAGSEEEIFGHLGLDYLEPWERNA

SEQ ID NO: 3839 - DNA, 1182 bp, synthetic construct
  misc_feature 1..1182: note = Variant of terminal deoxynucleotidyl transferase
  source 1..1182: mol_type = other DNA
atgcatcaccaccatcatcatgggggttctggtcatccgccgagtaataccccggagaaggaggtgccgagcgttatcgcccgtcatgttagtcagtacgcgtgccagcgcaagaccacgctgaataactacaacaaaaagttcaccgacgcgctggagatcatggccgagaactacaaatttaaagagaacctgcaggcgtgtctggaagccaagcgcgccgcgagtgtcttcaaaagcctgccgttcgaggttaccagcatgaaagacatccaaggtctgccgtgcattaccgacgacgtacgtgacgtgatcgaggagatcatcgaagagggcgagagcagccgtgttaaagaaatcctcaatgacgagcgctacaaggcctttaagcagttcaccagcgtgttcggtgtgggcgtgaaaacctcggaaaagtggtaccgtatgggcctccgtacggttgaagaagcaaaggccagtaagagtctgaagctgagcaagatgcagaaggcgggcttcctgtattacgaggatctggcgagcggtgttagtaaagaagaagccgatgccgttacgctcatcgtgaaggaaacggtggcgctggttgtaccggatgcgctggtgaccatcgccggcggtttccgccgtggcaaacctatgggccacgacgttgactttctgatcacgaatccgggccgtcctgaagatgacgagctgctccacaaagtggttgatctgctcaagaagcaaggtctgctgctgtacgaagacatccgtgagagcacgttcgtggaggggcaactgccaagtcctaaaatcgacgccctggacaactttcagaagtgcttcgccattctcaagctgtaccagccgaaggtggataacagtgcggttgggacgagtaagaaaagtgacatggctgaggttaaggattggaaagcggttcgtgtggatctggtgatcacgccattcgagcagttcgcctatgcgctgctcggttggacgggcagcggccaatttcgtcgcgatctgcgtcgctatgcggaggaagagcgcgacatgctgctcgacaaccatcgtctctacgacctgaaaaagggcatctttctgagtgcgggcagcgaagaagagattttcggtcatctgggtctggattatctggagccgtgggaacgcaacgcg

SEQ ID NO: 3840 - protein, 394 aa, synthetic construct
  REGION 1..394: note = Variant of terminal deoxynucleotidyl transferase
MHHHHHHGGSGHPPSNTPEKEVPSVIARHVSQYACQRKTTLNNYNKKFTDALEIMAENYKFKENLQACLEAKRAASVFKSLPFEVTSMKDIQGLPCITDDVRDVIEEIIEEGESSRVKEILNDERYKAFKQFTSVFGVGVKTSEKWYRMGLRTVEEAKASKSLKLSKMQKAGFLYYEDLASGVSKEEADAVTLIVKETVALVVPDALVTIAGGFRRGKPMGHDVDFLITNPGRPEDDELLHKVVDLLKKQGLLLYEDIRESTFVEGQLPSPKIDALDNFQKCFAILKLYQPKVDNSAVGTSKKSDMAEVKDWKAVRVDLVITPFEQFAYALLGWTGSGQFRRDLRRYAEEERDMLLDNHRLYDLKKGIFLSAGSEEEIFGHLGLDYLEPWERNA

SEQ ID NO: 3841 - DNA, 1182 bp, synthetic construct
  misc_feature 1..1182: note = Variant of terminal deoxynucleotidyl transferase
  source 1..1182: mol_type = other DNA
atgcatcaccaccatcatcatgggggttctggtcatccggaaggtaataccccggagaaggaggtgccgagcgttatcgcccgtcatgttagtcagtacgcgtgccagcgcaagaccacgctgaataactacaacaaaaagttcaccgacgcgctggagatcatggccgagaactacaaatttaaagagaacctgcaggcgtgtctggaagccaagcgcgccgcgagtatcctgaaaagcctgccgttcgaggttaccagcatgaaagacatccaaggtctgccgtgcattaccgacgacgtacgtgacgtgatcgaggagatcatcgaagagggcgagagcagccgtgttaaagaaatcctcaatgacgagcgctacaaggcctttaagcagttcaccagcgtgttcggtgtgggcgtgaaaacctcggaaaagtggtaccgtatgggcctccgtacggttgaagaagcaaaggccagtaagagtctgaagctgagcaagatgcagaaggcgggcttcctgtattacgaggatctggcgagcggtgttagtaaagaagaagccgatgccgttacgctcatcgtgaaggaaacggtgcgtaccgttgtgccggatgcgctggtgaccatcgccggcggtttccgccgtggcaaacctatgggccacgacgttgacctgctgatcacgccgccgggccgtcctgaagatgacgagctgctccacaaagtggttgatctgctcaagaagcaaggtctgctgctgtacgaagacatccgtgagagcacgttcgtggaggggcaactgccaagtcctaaaatcgacgccctggacaactttcagaagtgcttcgccattctcaagctgtaccagccgaaggtggataacagtgcggttgggacgagtaagaaaagtgacatggctgaggttaaggattggaaagcggttcgtgtggatctggtgatcacgccattcgagcagttcgcctatgcgctgctcggttggacgggcagcggccaatttcgtcgcgatctgcgtcgctatgcggaggaagagcgcgacatgctgctcgacaaccatcgtctctacgacctgaaaaagggcatctttctgagtgcgggcagcgaagaagagattttcggtcatctgggtctggattatctggagccgtgggaacgcaacgcg

SEQ ID NO: 3842 - protein, 394 aa, synthetic construct
  REGION 1..394: note = Variant of terminal deoxynucleotidyl transferase
MHHHHHHGGSGHPEGNTPEKEVPSVIARHVSQYACQRKTTLNNYNKKFTDALEIMAENYKFKENLQACLEAKRAASILKSLPFEVTSMKDIQGLPCITDDVRDVIEEIIEEGESSRVKEILNDERYKAFKQFTSVFGVGVKTSEKWYRMGLRTVEEAKASKSLKLSKMQKAGFLYYEDLASGVSKEEADAVTLIVKETVRTVVPDALVTIAGGFRRGKPMGHDVDLLITPPGRPEDDELLHKVVDLLKKQGLLLYEDIRESTFVEGQLPSPKIDALDNFQKCFAILKLYQPKVDNSAVGTSKKSDMAEVKDWKAVRVDLVITPFEQFAYALLGWTGSGQFRRDLRRYAEEERDMLLDNHRLYDLKKGIFLSAGSEEEIFGHLGLDYLEPWERNA

SEQ ID NO: 3843 - DNA, 1182 bp, synthetic construct
  misc_feature 1..1182: note = Variant of terminal deoxynucleotidyl transferase
  source 1..1182: mol_type = other DNA
atgcatcaccaccatcatcatgggggttctggtcatccgccgagcaataccccggagaaggaggtgccgagcgttatcgcccgtcatgttagtcagtacgcgtgccagcgcaagaccacgctgaataactacaacaaaaagttcaccgacgcgctggagatcatggccgagaactacaaatttaaagagaacctgcaggcgtgtctggaagccaagcgcgccgcgagtatcctgaaaagcctgccgttcgaggttaccagcatgaaagacatccaaggtctgccgtgcattaccgacgacgtacgtgacgtgatcgaggagatcatcgaagagggcgagagcagccgtgttaaagaaatcctcaatgacgagcgctacaaggcctttaagcagttcaccagcgtgttcggtgtgggcgtgaaaacctcggaaaagtggtaccgtatgggcctccgtacggttgaagaagcaaaggccagtaagagtctgaagctgagcaagatgcagaaggcgggcttcctgtattacgaggatctggcgagcggtgttagtaaagaagaagccgatgccgttacgctcatcgtgaaggaaacggtgcgtaccgttgtgccggatgcgctggtgaccatcgccggcggtttccgccgtggcaaacctatgggccacgacgttgactttctgatcacgaacccgggccgtcctgaagatgacgagctgctccacaaagtggttgatctgctcaagaagcaaggtctgctgctgtacgaagacatccgtgagagcacgttcgtggaggggcaactgccaagtcctaaaatcgacgccctggacaactttcagaagtgcttcgccattctcaagctgtaccagccgaaggtggataacagtgcggttgggacgagtaagaaaagtgacatggctgaggttaaggattggaaagcggttcgtgtggatctggtgatcacgccattcgagcagttcgcctatgcgctgctcggttggacgggcagcggccaatttcgtcgcgatctgcgtcgctatgcggaggaagagcgcgacatgctgctcgacaaccatcgtctctacgacctgaaaaagggcatctttctgagtgcgggcagcgaagaagagattttcggtcatctgggtctggattatctggagccgtgggaacgcaacgcg

SEQ ID NO: 3844 - protein, 394 aa, synthetic construct
  REGION 1..394: note = Variant of terminal deoxynucleotidyl transferase
MHHHHHHGGSGHPPSNTPEKEVPSVIARHVSQYACQRKTTLNNYNKKFTDALEIMAENYKFKENLQACLEAKRAASILKSLPFEVTSMKDIQGLPCITDDVRDVIEEIIEEGESSRVKEILNDERYKAFKQFTSVFGVGVKTSEKWYRMGLRTVEEAKASKSLKLSKMQKAGFLYYEDLASGVSKEEADAVTLIVKETVRTVVPDALVTIAGGFRRGKPMGHDVDFLITNPGRPEDDELLHKVVDLLKKQGLLLYEDIRESTFVEGQLPSPKIDALDNFQKCFAILKLYQPKVDNSAVGTSKKSDMAEVKDWKAVRVDLVITPFEQFAYALLGWTGSGQFRRDLRRYAEEERDMLLDNHRLYDLKKGIFLSAGSEEEIFGHLGLDYLEPWERNA

SEQ ID NO: 3845 - DNA, 1182 bp, synthetic construct
  misc_feature 1..1182: note = Variant of terminal deoxynucleotidyl transferase
  source 1..1182: mol_type = other DNA
atgcatcaccaccatcatcatgggggttctggtcatccgccgggtaataccccggagaaggaggtgccgagcgttatcgcccgtcatgttagtcagtacgcgtgccagcgcaagaccacgctgaataactacaacaaaaagttcaccgacgcgctggagatcatggccgagaactacaaatttaaagagaacctgcaggcgtgtctggaagccaagcgcgccgcgagtatttttaaaagcctgccgttcgaggttaccagcatgaaagacatccaaggtctgccgtgcattaccgacgacgtacgtgacgtgatcgaggagatcatcgaagagggcgagagcagccgtgttaaagaaatcctcaatgacgagcgctacaaggcctttaagcagttcaccagcgtgttcggtgtgggcgtgaaaacctcggaaaagtggtaccgtatgggcctccgtacggttgaagaagcaaaggccagtaagagtctgaagctgagcaagatgcagaaggcgggcttcctgtattacgaggatctggcgagcggtgttagtaaagaagaagccgatgccgttacgctcatcgtgaaggaaacggtgcgtaccgttgtgccggatgcgctggtgaccatcgccggcggtttccgccgtggcaaacctatgggccacgacgttgacttcctgatcacgattccgggccgtcctgaagatgacgagctgctccacaaagtggttgatctgctcaagaagcaaggtctgctgctgtacgaagacatccgtgagagcacgttcgtggaggggcaactgccaagtcctaaaatcgacgccctggacaactttcagaagtgcttcgccattctcaagctgtaccagccgaaggtggataacagtgcggttgggacgagtaagaaaagtgacatggctgaggttaaggattggaaagcggttcgtgtggatctggtgatcacgccattcgagcagttcgcctatgcgctgctcggttggacgggcagcggccaatttcgtcgcgatctgcgtcgctatgcggaggaagagcgcgacatgctgctcgacaaccatcgtctctacgacctgaaaaagggcatctttctgagtgcgggcagcgaagaagagattttcggtcatctgggtctggattatctggagccgtgggaacgcaacgcg

SEQ ID NO: 3846 - protein, 394 aa, synthetic construct
  REGION 1..394: note = Variant of terminal deoxynucleotidyl transferase
MHHHHHHGGSGHPPGNTPEKEVPSVIARHVSQYACQRKTTLNNYNKKFTDALEIMAENYKFKENLQACLEAKRAASIFKSLPFEVTSMKDIQGLPCITDDVRDVIEEIIEEGESSRVKEILNDERYKAFKQFTSVFGVGVKTSEKWYRMGLRTVEEAKASKSLKLSKMQKAGFLYYEDLASGVSKEEADAVTLIVKETVRTVVPDALVTIAGGFRRGKPMGHDVDFLITIPGRPEDDELLHKVVDLLKKQGLLLYEDIRESTFVEGQLPSPKIDALDNFQKCFAILKLYQPKVDNSAVGTSKKSDMAEVKDWKAVRVDLVITPFEQFAYALLGWTGSGQFRRDLRRYAEEERDMLLDNHRLYDLKKGIFLSAGSEEEIFGHLGLDYLEPWERNA

SEQ ID NO: 3847 - DNA, 1182 bp, synthetic construct
  misc_feature 1..1182: note = Variant of terminal deoxynucleotidyl transferase
  source 1..1182: mol_type = other DNA
atgcatcaccaccatcatcatgggggttctggtcatccgccgagcaataccccggagaaggaggtgccgagcgttatcgcccgtcatgttagtccatacgcgtgccagcgcaagaccacgctgaataactacaacaaaaagttcaccgacgcgctggagatcatggccgagaactacaaatttaaagagaacctgcaggcgtgtctggaagccaagcgcgccgcgagtatttttaaaagcctgccgttcgaggttaccagcatgaaagacatccaaggtctgccgtgcattaccgacgacgtacgtcctgtgatcgaggagatcatcgaagagggcgagagcagccgtgttaaagaaatcctcaatgacgagcgctacaaggcctttaagcagttcaccagcgtgttcggtgtgggcgtgaaaacctcggaaaagtggtaccgtatgggcctccgtacggttgaagaagcaaaggccagtaagagtctgaagctgagcaagatgcagaaggcgggcttcctgtattacgaggatctggcgagcggtgttagtaaagaagaagccgatgccgttacgctcatcgtgaaggaaacggtgcgtaccgttgtgccggatgcgctggtgaccatcgccggcggtttccgccgtggcaaacctatgggccacgacgttgactttctgatcacgaacccgggccgtcctgaagatgacgagctgctccacaaagtggttgatctgctcaagaagcaaggtctgctgctgtacgaagacatccgtgagagcacgttcgtggaggggcaactgccaagtcctaaaccagacgccctggacaactttcagaagtgcttcgccattctcaagctgtaccagccgaaggtggataacagtgcggttgggacgagtaagaaaagtgacatggctgaggttaaggattggaaagcggttcgtgtggatctggtgatcacgccattcgagcagttcgcctatgcgctgctcggttggacgggcagcggccaatttcgtcgcgatctgcgtcgctatgcggaggaagagcgcgacatgctgctcgacaaccatcgtctctacgacctgaaaaagggcatctttctgagtgcgggtagcgaagaagagattttcggtcatctgggtctggattatctggagccgtgggaacgcaacgcg

SEQ ID NO: 3848 - protein, 394 aa, synthetic construct
  REGION 1..394: note = Variant of terminal deoxynucleotidyl transferase
MHHHHHHGGSGHPPSNTPEKEVPSVIARHVSPYACQRKTTLNNYNKKFTDALEIMAENYKFKENLQACLEAKRAASIFKSLPFEVTSMKDIQGLPCITDDVRPVIEEIIEEGESSRVKEILNDERYKAFKQFTSVFGVGVKTSEKWYRMGLRTVEEAKASKSLKLSKMQKAGFLYYEDLASGVSKEEADAVTLIVKETVRTVVPDALVTIAGGFRRGKPMGHDVDFLITNPGRPEDDELLHKVVDLLKKQGLLLYEDIRESTFVEGQLPSPKPDALDNFQKCFAILKLYQPKVDNSAVGTSKKSDMAEVKDWKAVRVDLVITPFEQFAYALLGWTGSGQFRRDLRRYAEEERDMLLDNHRLYDLKKGIFLSAGSEEEIFGHLGLDYLEPWERNA

SEQ ID NO: 3849 - DNA, 1182 bp, synthetic construct
  misc_feature 1..1182: note = Variant of terminal deoxynucleotidyl transferase
  source 1..1182: mol_type = other DNA
atgcatcaccaccatcatcatgggggttctggtcatccgccgagcaataccccggagaaggaggtgccgagcgttatcgcccgtcatgttagtcagtacgcgtgccagcgcaagaccacgctgaataactacaacaaaaagttcaccgacgcgctggagatcatggccgagaactacaaatttaaagagaacctgcaggcgtgtctggaagccaagcgcgccgcgagtatttttaaaagcctgccgttcgaggttaccagcatgaaagacatccaaggtctgccgtgcattaccgacgacgtacgtgatgtgatcgaggagatcatcgaagagggcgagagcagccgtgttaaagaaatcctcaatgacgagcgctacaaggcctttaagcagttcaccagcgtgttcggtgtgggcgtgaaaacctcggaaaagtggtaccgtatgggcctccgtacggttgaagaagcaaaggccagtaagagtctgaagctgagcaagatgcagaaggcgggcttcctgtattacgaggatctggcgagcggtgttagtaaagaagaagccgatgccgttacgctcatcgtgaaggaaacggtgcgtaccgttgtgccggatgcgctggtgaccatcgccggcggtttccgccgtggcaaacctatgggccacgacgttgactttctgatcacgaacccgaaccgtcctaccgatgacgagctgctccacaaagtggttgatctgctcaagaagcaaggtctgctgctgtacgaagacatccgtgagagcacgttcgtggaggggcaactgccaagtcctaaaattgacgccctggacaactttcagaagtgcttcgccattctcaagctgtaccagccgaaggtggataacagtgcggttgggacgagtaagaaaagtgacatggctgaggttaaggattggaaagcggttcgtgtggatctggtgatgacgccattcgagcagttcgcctatgcgctgctcggttggacgggcagcggccaatttcgtcgcgatctgcgtcgctatgcggaggaagagcgcgacatgctgctcgacaaccatcgtctctacgacctgaaaaagggcatctttctgagtgcgggtagcgaagaagagattttcggtcatctgggtctggattatctggagccgtgggaacgcaacgcg

SEQ ID NO: 3850 - protein, 394 aa, synthetic construct
  REGION 1..394: note = Variant of terminal deoxynucleotidyl transferase
MHHHHHHGGSGHPPSNTPEKEVPSVIARHVSQYACQRKTTLNNYNKKFTDALEIMAENYKFKENLQACLEAKRAASIFKSLPFEVTSMKDIQGLPCITDDVRDVIEEIIEEGESSRVKEILNDERYKAFKQFTSVFGVGVKTSEKWYRMGLRTVEEAKASKSLKLSKMQKAGFLYYEDLASGVSKEEADAVTLIVKETVRTVVPDALVTIAGGFRRGKPMGHDVDFLITNPNRPTDDELLHKVVDLLKKQGLLLYEDIRESTFVEGQLPSPKIDALDNFQKCFAILKLYQPKVDNSAVGTSKKSDMAEVKDWKAVRVDLVMTPFEQFAYALLGWTGSGQFRRDLRRYAEEERDMLLDNHRLYDLKKGIFLSAGSEEEIFGHLGLDYLEPWERNA

SEQ ID NO: 3851 - DNA, 1182 bp, synthetic construct
  misc_feature 1..1182: note = Variant of terminal deoxynucleotidyl transferase
  source 1..1182: mol_type = other DNA
atgcatcaccaccatcatcatgggggttctggtcatccgccgagcaataccccggagaaggaggtgccgagcgttatcgcccgtcatgttagtcagtacgcgtgccagcgcaagaccacgctgaataactacaacaaaaagttcaccgacgcgctggagatcatggccgagaactacaaatttaaagagaacctgcaggcgtgtctggaagccaagcgcgccgcgagtatttttaaaagcctgccgttcgaggttaccagcatgaaagacatccaaggtctgccgtgcattaccgacgacgtacgtcctgtgatcgaggagatcatcgaagagggcgagagcagccgtgttaaagaaatcctcaatgacgagcgctacaaggcctttaagcagttcaccagcgtgttcggtgtgggcgtgaaaacctcggaaaagtggtaccgtatgggcctccgtacggttgaagaagcaaaggccagtaagagtctgaagctgagcaagatgcagaaggcgggcttcctgtattacgaggatctggcgagcggtgttagtaaagaagaagccgatgccgttacgctcatcgtgaaggaaacggtgcgtaccgttgtgccggatgcgctggtgaccatcgccggcggtttccgccgtggcaaacctatgggccacgacgttgactttctgatcacgaacccgatccgtcctgaggatgacgagctgctccacaaagtggttgatctgctcaagaagcaaggtctgctgctgtacgaagacatccgtgagagcacgttcgtggaggggcaactgccaagtcctaaacaagacgccctggacaactttcagaagtgcttcgccattctcaagctgtaccagccgaaggtggataacagtgcggttgggacgagtaagaaaagtgacatggctgaggttaaggattggaaagcggttcgtgtggatctggtgatcacgccattcgagcagttcgcctatgcgctgctcggttggacgggcagcggccaatttcgtcgcgatctgcgtcgctatgcggaggaagagcgcgacatgctgctcgacaaccatcgtctctacgacctgaaaaagggcatctttctgagtgcgggtagcgaagaagagattttcggtcatctgggtctggattatctggagccgtgggaacgcaacgcg

SEQ ID NO: 3852 - protein, 394 aa, synthetic construct
  REGION 1..394: note = Variant of terminal deoxynucleotidyl transferase
MHHHHHHGGSGHPPSNTPEKEVPSVIARHVSQYACQRKTTLNNYNKKFTDALEIMAENYKFKENLQACLEAKRAASIFKSLPFEVTSMKDIQGLPCITDDVRPVIEEIIEEGESSRVKEILNDERYKAFKQFTSVFGVGVKTSEKWYRMGLRTVEEAKASKSLKLSKMQKAGFLYYEDLASGVSKEEADAVTLIVKETVRTVVPDALVTIAGGFRRGKPMGHDVDFLITNPIRPEDDELLHKVVDLLKKQGLLLYEDIRESTFVEGQLPSPKQDALDNFQKCFAILKLYQPKVDNSAVGTSKKSDMAEVKDWKAVRVDLVITPFEQFAYALLGWTGSGQFRRDLRRYAEEERDMLLDNHRLYDLKKGIFLSAGSEEEIFGHLGLDYLEPWERNA

SEQ ID NO: 3853 - DNA, 1182 bp, synthetic construct
  misc_feature 1..1182: note = Variant of terminal deoxynucleotidyl transferase
  source 1..1182: mol_type = other DNA
atgcatcaccaccatcatcatgggggttctggtcatccgccgagcaataccccggagaaggaggtgccgagcgttatcgcccgtcatgttagtccatacgcgtgccagcgcaagaccacgctgaataactacaacaaaaagttcaccgacgcgctggagatcatggccgagaactacaaatttaaagagaacctgcaggcgtgtctggaagccaagcgcgccgcgagtatttttaaaagcctgccgttcgaggttaccagcatgaaagacatccaaggtctgccgtgcattaccgacgacgtacgtgatgtgatccgcgagatcatcgaagagggcgagagcagccgtgttaaagaaatcctcaatgacgagcgctacaaggcctttaagcagttcaccagcgtgttcggtgtgggcgtgaaaacctcggaaaagtggtaccgtatgggcctccgtacggttgaagaagcaaaggccagtaagagtctgaagctgagcaagatgcagaaggcgggcttcctgtattacgaggatctggcgagcggtgttagtaaagaagaagccgatgccgttacgctcatcgtgaaggaaacggtgcgtaccgttgtgccggatgcggaagtgaccctggccggcggtttccgccgtggcaaacctatgggccacgacgttgactttctgatcacgaacccgatccgtcctgaggatgacgagctgctccacaaagtggttgatctgctcaagaagcaaggtctgctgctgtacgaagacatccgtgagagcacgttcgtggaggggcaactgccaagtcctaaaattgacgccctggacaactttcagaagtgcttcgccattctcaagctgtaccagccgaaggtggataacagtgcggttgggacgagtaagaaaagtgacatggctgaggttaaggattggaaagcggttcgtgtggatctggtgatcacgccattcgagcagttcgcctatgcgctgctcggttggacgggcagcggccaatttcgtcgcgatctgcgtcgctatgcggaggaagagcgcgacatgctgctcgacaaccatcgtctctacgacctgaaaaagggcatctttctgagtgcgggtagcgaagaagagattttcggtcatctgggtctggattatctggagccgtgggaacgcaacgcg

SEQ ID NO: 3854 - protein, 394 aa, synthetic construct
  REGION 1..394: note = Variant of terminal deoxynucleotidyl transferase
MHHHHHHGGSGHPPSNTPEKEVPSVIARHVSPYACQRKTTLNNYNKKFTDALEIMAENYKFKENLQACLEAKRAASIFKSLPFEVTSMKDIQGLPCITDDVRDVIREIIEEGESSRVKEILNDERYKAFKQFTSVFGVGVKTSEKWYRMGLRTVEEAKASKSLKLSKMQKAGFLYYEDLASGVSKEEADAVTLIVKETVRTVVPDAEVTLAGGFRRGKPMGHDVDFLITNPIRPEDDELLHKVVDLLKKQGLLLYEDIRESTFVEGQLPSPKIDALDNFQKCFAILKLYQPKVDNSAVGTSKKSDMAEVKDWKAVRVDLVITPFEQFAYALLGWTGSGQFRRDLRRYAEEERDMLLDNHRLYDLKKGIFLSAGSEEEIFGHLGLDYLEPWERNA

SEQ ID NO: 3855 - DNA, 1182 bp, synthetic construct
  misc_feature 1..1182: note = Variant of terminal deoxynucleotidyl transferase
  source 1..1182: mol_type = other DNA
atgcatcaccaccatcatcatgggggttctggtcatccggaaagtaataccccggagaaggaggtgccgagcgttatcgcccgtcatgttagtcagtacgcgtgccagcgcaagaccacgctgaataactacaacaaaaagttcaccgacgcgctggagatcatggccgagaactacaaatttaaagagaacctgcaggcgtgtctggaagccaagcgcgccgcgagtgtcctgaaaagcctgccgttcgaggttaccagcatgaaagacatccaaggtctgccgtgcattaccgacgacgtacgtgacgtgatcgaggagatcatcgaagagggcgagagcagccgtgttaaagaaatcctcaatgacgagcgctacaaggcctttaagcagttcaccagcgtgttcggtgtgggcgtgaaaacctcggaaaagtggtaccgtatgggcctccgtacggttgaagaagcaaaggccagtaagagtctgaagctgagcaagatgcagaaggcgggcttcctgtattacgaggatctggcgagcggtgttagtaaagaagaagccgatgccgttacgctcatcgtgaaggaaacggtgcgtactgttgtaccggatgcgctggtgaccatcgccggcggtttccgccgtggcaaacctatgggccacgacgttgacctgctgatcacgccgccgggccgtcctgaagatgacgagctgctccacaaagtggttgatctgctcaagaagcaaggtctgctgctgtacgaaacgatccgtgagagcacgttcgtggaggggcaactgccaagtcctaaaatcgacgccctggacaactttcagaagtgcttcgccattctcaagctgtaccagccgaaggtggataacagtgcggttgggacgagtaagaaaagtgacatggctgaggttaaggattggaaagcggttcgtgtggatctggtgatcacgccattcgagcagttcgcctatgcgctgctcggttggacgggcagcggccaatttcgtcgcgatctgcgtcgctatgcggaggaagagcgcgacatgctgctcgacaaccatcgtctctacgacctgaaaaagggcatctttctgagtgcgggcagcgaagaagagattttcggtcatctgggtctggattatctggagccgtgggaacgcaacgcg

SEQ ID NO: 3856 - protein, 394 aa, synthetic construct
  REGION 1..394: note = Variant of terminal deoxynucleotidyl transferase
MHHHHHHGGSGHPESNTPEKEVPSVIARHVSQYACQRKTTLNNYNKKFTDALEIMAENYKFKENLQACLEAKRAASVLKSLPFEVTSMKDIQGLPCITDDVRDVIEEIIEEGESSRVKEILNDERYKAFKQFTSVFGVGVKTSEKWYRMGLRTVEEAKASKSLKLSKMQKAGFLYYEDLASGVSKEEADAVTLIVKETVRTVVPDALVTIAGGFRRGKPMGHDVDLLITPPGRPEDDELLHKVVDLLKKQGLLLYETIRESTFVEGQLPSPKIDALDNFQKCFAILKLYQPKVDNSAVGTSKKSDMAEVKDWKAVRVDLVITPFEQFAYALLGWTGSGQFRRDLRRYAEEERDMLLDNHRLYDLKKGIFLSAGSEEEIFGHLGLDYLEPWERNA

SEQ ID NO: 3857 - DNA, 1182 bp, synthetic construct
  misc_feature 1..1182: note = Variant of terminal deoxynucleotidyl transferase
  source 1..1182: mol_type = other DNA
atgcatcaccaccatcatcatgggggttctggtcatccgccgagcaataccccggagaaggaggtgccgagcgttatcgcccgtcatgttagtcagtacgcgtgccagcgcaagaccacgctgaataactacaacaaaaagttcaccgacgcgctggagatcatggccgagaactacaaatttaaagagaacctgcaggcgtgtctggaagccaagcgcgccgcgagtatttttaaaagcctgccgttcgaggttaccagcatgaaagacatccaaggtctgccgtgcattaccgacgacgtacgtgacgtgatcgaggagatcatcgaagagggcgagagcagccgtgttaaagaaatcctcaatgacgagcgctacaaggcctttaagcagttcaccagcgtgttcggtgtgggcgtgaaaacctcggaaaagtggtaccgtatgggcctccgtacggttgaagaagcaaaggccagtaagagtctgaagctgagcaagatgcagaaggcgggcttcctgtattacgaggatctggcgagcggtgttagtaaagaagaagccgatgccgttacgctcatcgtgaaggaaacggtgcgtaccgttgtgccggatgcggaagtgaccattgccggcggtttccgccgtggcaaacctatgggccacgacgttgactttctgatcacgaacccgggtcgtcctaccgatgacgagctgctccacaaagtggttgatctgctcaagaagcaaggtctgctgctgtacgaagacatccgtgagagcacgttcgtggaggggcaactgccaagtcctaaaattgacgccctggacaactttcagaagtgcttcgccattctcaagctgtaccagccgaaggtggataacagtgcggttgggacgagtaagaaaagtgacatggctgaggttaaggattggaaagcggttcgtgtggatctggtgatcacgccattcgagcagttcgcctatgcgctgctcggttggacgggcagcggccaatttcgtcgcgatctgcgtcgctatgcggaggaagagcgcgacatgctgctcgacaaccatcgtctctacgacctgaaaaagggcatctttctgagtgcgggtagcgaagaagagattttcggtcatctgggtctggattatctggagccgtgggaacgcaacgcg

SEQ ID NO: 3858 - protein, 394 aa, synthetic construct
  REGION 1..394: note = Variant of terminal deoxynucleotidyl transferase
MHHHHHHGGSGHPPSNTPEKEVPSVIARHVSQYACQRKTTLNNYNKKFTDALEIMAENYKFKENLQACLEAKRAASIFKSLPFEVTSMKDIQGLPCITDDVRDVIEEIIEEGESSRVKEILNDERYKAFKQFTSVFGVGVKTSEKWYRMGLRTVEEAKASKSLKLSKMQKAGFLYYEDLASGVSKEEADAVTLIVKETVRTVVPDAEVTIAGGFRRGKPMGHDVDFLITNPGRPTDDELLHKVVDLLKKQGLLLYEDIRESTFVEGQLPSPKIDALDNFQKCFAILKLYQPKVDNSAVGTSKKSDMAEVKDWKAVRVDLVITPFEQFAYALLGWTGSGQFRRDLRRYAEEERDMLLDNHRLYDLKKGIFLSAGSEEEIFGHLGLDYLEPWERNA

SEQ ID NO: 3859 - DNA, 1182 bp, synthetic construct
  misc_feature 1..1182: note = Variant of terminal deoxynucleotidyl transferase
  source 1..1182: mol_type = other DNA
atgcatcaccaccatcatcatgggggttctggtcatccgccgagcaataccccggagaaggaggtgccgagcgttatcgcccgtcatgttagtcagtacgcgtgccagcgcaagaccacgctgaataactacaacaaaaagttcaccgacgcgctggagatcatggccgagaactacaaatttaaagagaacctgcaggcgtgtctggaagccaagcgcgccgcgagtatttttaaaagcctgccgttcgaggttaccagcatgaaagacatccaaggtctgccgtgcattaccgacgacgtacgtgatgtgatcgaggagatcatcgaagagggcgagagcagccgtgttaaagaaatcctcaatgacgagcgctacaaggcctttaagcagttcaccagcgtgttcggtgtgggcgtgaaaacctcggaaaagtggtaccgtatgggcctccgtacggttgaagaagcaaaggccagtaagagtctgaagctgagcaagatgcagaaggcgggcttcctgtattacgaggatctggcgagcggtgttagtaaagaagaagccgatgccgttacgctcatcgtgaaggaaacggtgcgtaccgttgtgccggatgcgctggtgaccatcgccggcggtttccgccgtggcaaacctatgggccacgacgttgactttctgatcacgaacccgggtcgtcctaccgatgacgagctgctccacaaagtggttgatctgctcaagaagcaaggtctgctgctgtacgaagacatccgtgagagcacgttcgtggaggggcaactgccaagtcctaaaatcgacgccctggacaactttcagaagtgcttcgccattctcaagctgtaccagccgaaggtggataacagtgcggttgggacgagtaagaaaagtgacatggctgaggttaaggattggaaagcggttcgtgtggatctggtgatcacgccattcgagcagttcgcctatgcgctgctcggttggacgggcagcggccaatttcgtcgcgatctgcgtcgctatgcggaggaagagcgcgacatgctgctcgacaaccatcgtctctacgacctgaaaaagggcatctttctgagtgcgggcagcgaagaagagattttcggtcatctgggtctggattatctggagccgtgggaacgcaacgcg

SEQ ID NO: 3860 - protein, 394 aa, synthetic construct
  REGION 1..394: note = Variant of terminal deoxynucleotidyl transferase
MHHHHHHGGSGHPPSNTPEKEVPSVIARHVSQYACQRKTTLNNYNKKFTDALEIMAENYKFKENLQACLEAKRAASIFKSLPFEVTSMKDIQGLPCITDDVRDVIEEIIEEGESSRVKEILNDERYKAFKQFTSVFGVGVKTSEKWYRMGLRTVEEAKASKSLKLSKMQKAGFLYYEDLASGVSKEEADAVTLIVKETVRTVVPDALVTIAGGFRRGKPMGHDVDFLITNPGRPTDDELLHKVVDLLKKQGLLLYEDIRESTFVEGQLPSPKIDALDNFQKCFAILKLYQPKVDNSAVGTSKKSDMAEVKDWKAVRVDLVITPFEQFAYALLGWTGSGQFRRDLRRYAEEERDMLLDNHRLYDLKKGIFLSAGSEEEIFGHLGLDYLEPWERNA

SEQ ID NO: 3861 - DNA, 1182 bp, synthetic construct
  misc_feature 1..1182: note = Variant of terminal deoxynucleotidyl transferase
  source 1..1182: mol_type = other DNA
atgcatcaccaccatcatcatgggggttctggtcatccgccgagcaataccccggagaaggaggtgccgagcgttatcgcccgtcatgttagtccatacgcgtgccagcgcaagaccacgctgaataactacaacaaaaagttcaccgacgcgctggagatcatggccgagaactacaaatttaaagagaacctgcaggcgtgtctggaagccaagcgcgccgcgagtatttttaaaagcctgccgttcgaggttaccagcatgaaagacatccaaggtctgccgtgcattaccgacgacgtacgtgatgtgatcgaggagatcatcgaagagggcgagagcagccgtgttaaagaaatcctcaatgacgagcgctacaaggcctttaagcagttcaccagcgtgttcggtgtgggcgtgaaaacctcggaaaagtggtaccgtatgggcctccgtacggttgaagaagcaaaggccagtaagagtctgaagctgagcaagatgcagaaggcgggcttcctgtattacgaggatctggcgagcggtgttagtaaagaagaagccgatgccgttacgctcatcgtgaaggaaacggtgcgtaccgttgtgccggatgcggaagtgaccctggccggcggtttccgccgtggcaaacctatgggccacgacgttgactttctgatcacgaacccgggtcgtcctgaggatgacgagctgctccacaaagtggttgatctgctcaagaagcaaggtctgctgctgtacgaagacatccgtgagagcacgttcgtggaggggcaactgccaagtcctaaaattgacgccctggacaactttcagaagtgcttcgccattctcaagctgtaccagccgaaggtggataacagtgcggttgggacgagtaagaaaagtgacatggctgaggttaaggattggaaagcggttcgtgtggatctggtgatcacgccattcgagcagttcgcctatgcgctgctcggttggacgggcagcggccaatttcgtcgcgatctgcgtcgctatgcggaggaagagcgcgacatgctgctcgacaaccatcgtctctacgacctgaaaaagggccagtttctgagtgcggatagcgaagaagagattttcggtcatctgggtctggattatctggagccgtgggaacgcaacgcg

SEQ ID NO: 3862 - protein, 394 aa, synthetic construct
  REGION 1..394: note = Variant of terminal deoxynucleotidyl transferase
MHHHHHHGGSGHPPSNTPEKEVPSVIARHVSPYACQRKTTLNNYNKKFTDALEIMAENYKFKENLQACLEAKRAASIFKSLPFEVTSMKDIQGLPCITDDVRDVIEEIIEEGESSRVKEILNDERYKAFKQFTSVFGVGVKTSEKWYRMGLRTVEEAKASKSLKLSKMQKAGFLYYEDLASGVSKEEADAVTLIVKETVRTVVPDAEVTLAGGFRRGKPMGHDVDFLITNPGRPEDDELLHKVVDLLKKQGLLLYEDIRESTFVEGQLPSPKIDALDNFQKCFAILKLYQPKVDNSAVGTSKKSDMAEVKDWKAVRVDLVITPFEQFAYALLGWTGSGQFRRDLRRYAEEERDMLLDNHRLYDLKKGQFLSADSEEEIFGHLGLDYLEPWERNA

SEQ ID NO: 3863 - DNA, 1182 bp, synthetic construct
  misc_feature 1..1182: note = Variant of terminal deoxynucleotidyl transferase
  source 1..1182: mol_type = other DNA
atgcatcaccaccatcatcatgggggttctggtcatccgccgagcaataccccggagaaggaggtgccgagcgttatcgcccgtcatgttagtccatacgcgtgccagcgcaagaccacgctgaataactacaacaaaaagttcaccgacgcgctggagatcatggccgagaactacaaatttaaagagaacctgcaggcgtgtctggaagccaagcgcgccgcgagtatttttaaaagcctgccgttcgaggttaccagcatgaaagacatccaaggtctgccgtgcattaccgacgacgtacgtgatgtgatccgcgagatcatcgaagagggcgagagcagccgtgttaaagaaatcctcaatgacgagcgctacaaggcctttaagcagttcaccagcgtgttcggtgtgggcgtgaaaacctcggaaaagtggtaccgtatgggcctccgtacggttgaagaagcaaaggccagtaagagtctgaagctgagcaagatgcagaaggcgggcttcctgtattacgaggatctggcgagcggtgttagtaaagaagaagccgatgccgttacgctcatcgtgaaggaaacggtgcgtaccgttgtgccggatgcgctggtgaccattgccggcggtttccgccgtggcaaacctatgggccacgacgttgactttctgatcacgaacccgggccgtcctgaagatgacgagctgctccacaaagtggttgatctgctcaagaagcaaggtctgctgctgtacgaagacatccgtgagagcacgttcgtggaggggcaactgccaagtcctaaacaagacgccctggacaactttcagaagtgcttcgccattctcaagctgtaccagccgaaggtggataacagtgcggttgggacgagtaagaaaagtgacatggctgaggttaaggattggaaagcggttcgtgtggatctggtgatgacgccattcgagcagttcgcctatgcgctgctcggttggacgggcagcggccaatttcgtcgcgatctgcgtcgctatgcggaggaagagcgcgacatgctgctcgacaaccatcgtctctacgacctgaaaaagggcatctttctgagtgcggatagcgaagaagagattttcggtcatctgggtctggattatctggagccgtgggaacgcaacgcg

SEQ ID NO: 3864 - protein, 394 aa, synthetic construct
  REGION 1..394: note = Variant of terminal deoxynucleotidyl transferase
MHHHHHHGGSGHPPSNTPEKEVPSVIARHVSPYACQRKTTLNNYNKKFTDALEIMAENYKFKENLQACLEAKRAASIFKSLPFEVTSMKDIQGLPCITDDVRDVIREIIEEGESSRVKEILNDERYKAFKQFTSVFGVGVKTSEKWYRMGLRTVEEAKASKSLKLSKMQKAGFLYYEDLASGVSKEEADAVTLIVKETVRTVVPDALVTIAGGFRRGKPMGHDVDFLITNPGRPEDDELLHKVVDLLKKQGLLLYEDIRESTFVEGQLPSPKQDALDNFQKCFAILKLYQPKVDNSAVGTSKKSDMAEVKDWKAVRVDLVMTPFEQFAYALLGWTGSGQFRRDLRRYAEEERDMLLDNHRLYDLKKGIFLSADSEEEIFGHLGLDYLEPWERNA

SEQ ID NO: 3865 - DNA, 1182 bp, synthetic construct
  misc_feature 1..1182: note = Variant of terminal deoxynucleotidyl transferase
  source 1..1182: mol_type = other DNA
atgcatcaccaccatcatcatgggggttctggtcatccgccgggtaataccccggagaaggaggtgccgagcgttatcgcccgtcatgttagtcagtacgcgtgccagcgcaagaccacgctgaataactacaacaaaaagttcaccgacgcgctggagatcatggccgagaactacaaatttaaagagaacctgcaggcgtgtctggaagccaagcgcgccgcgagtatcctgaaaagcctgccgttcgaggttaccagcatgaaagacatccaaggtctgccgtgcattaccgacgacgtacgtgacgtgatcgaggagatcatcgaagagggcgagagcagccgtgttaaagaaatcctcaatgacgagcgctacaaggcctttaagcagttcaccagcgtgttcggtgtgggcgtgaaaacctcggaaaagtggtaccgtatgggcctccgtacggttgaagaagcaaaggccagtaagagtctgaagctgagcaagatgcagaaggcgggcttcctgtattacgaggatctggcgagcggtgttagtaaagaagaagccgatgccgttacgctcatcgtgaaggaaacggtgcgtctggttgtaccggatgcgctggtgaccatcgccggcggtttccgccgtggcaaacctatgggccacgacgttgacttcctgatcacgaatccgggccgtcctgaagatgacgagctgctccacaaagtggttgatctgctcaagaagcaaggtctgctgctgtacgaagatatccgtgagagcacgttcgtggaggggcaactgccaagtcctaaaatcgacgccctggacaactttcagaagtgcttcgccattctcaagctgtaccagccgaaggtggataacagtgcggttgggacgagtaagaaaagtgacatggctgaggttaaggattggaaagcggttcgtgtggatctggtgatcacgccattcgagcagttcgcctatgcgctgctcggttggacgggcagcggccaatttcgtcgcgatctgcgtcgctatgcggaggaagagcgcgacatgctgctcgacaaccatcgtctctacgacctgaaaaagggcatctttctgagtgcgggcagcgaagaagagattttcggtcatctgggtctggattatctggagccgtgggaacgcaacgcg

SEQ ID NO: 3866 - protein, 394 aa, synthetic construct
  REGION 1..394: note = Variant of terminal deoxynucleotidyl transferase
MHHHHHHGGSGHPPGNTPEKEVPSVIARHVSQYACQRKTTLNNYNKKFTDALEIMAENYKFKENLQACLEAKRAASILKSLPFEVTSMKDIQGLPCITDDVRDVIEEIIEEGESSRVKEILNDERYKAFKQFTSVFGVGVKTSEKWYRMGLRTVEEAKASKSLKLSKMQKAGFLYYEDLASGVSKEEADAVTLIVKETVRLVVPDALVTIAGGFRRGKPMGHDVDFLITNPGRPEDDELLHKVVDLLKKQGLLLYEDIRESTFVEGQLPSPKIDALDNFQKCFAILKLYQPKVDNSAVGTSKKSDMAEVKDWKAVRVDLVITPFEQFAYALLGWTGSGQFRRDLRRYAEEERDMLLDNHRLYDLKKGIFLSAGSEEEIFGHLGLDYLEPWERNA

SEQ ID NO: 3867 - DNA, 1182 bp, synthetic construct
  misc_feature 1..1182: note = Variant of terminal deoxynucleotidyl transferase
  source 1..1182: mol_type = other DNA
atgcatcaccaccatcatcatgggggttctggtcatccggaaagtaataccccggagaaggaggtgccgagcgttatcgcccgtcatgttagtcagtacgcgtgccagcgcaagaccacgctgaataactacaacaaaaagttcaccgacgcgctggagatcatggccgagaactacaaatttaaagagaacctgcaggcgtgtctggaagccaagcgcgccgcgagtatttttaaaagcctgccgttcgaggttaccagcatgaaagacatccaaggtctgccgtgcattaccgacgacgtacgtgacgtgatcgaggagatcatcgaagagggcgagagcagccgtgttaaagaaatcctcaatgacgagcgctacaaggcctttaagcagttcaccagcgtgttcggtgtgggcgtgaaaacctcggaaaagtggtaccgtatgggcctccgtacggttgaagaagcaaaggccagtaagagtctgaagctgagcaagatgcagaaggcgggcttcctgtattacgaggatctggcgagcggtgttagtaaagaagaagccgatgccgttacgctcatcgtgaaggaaacggtggcgactgttagtccggatgcgctggtgaccatcgccggcggtttccgccgtggcaaacctatgggccacgacgttgacctgctgatcacgccgccgggccgtcctgaagatgacgagctgctccacaaagtggttgatctgctcaagaagcaaggtctgctgctgtacgaaacgatccgtgagagcacgttcgtggaggggcaactgccaagtcctaaaatcgacgccctggacaactttcagaagtgcttcgccattctcaagctgtaccagccgaaggtggataacagtgcggttgggacgagtaagaaaagtgacatggctgaggttaaggattggaaagcggttcgtgtggatctggtgatcacgccattcgagcagttcgcctatgcgctgctcggttggacgggcagcggcatctttcgtcgcgatctgcgtcgctatgcggaggaagagcgcgacatgctgctcgacaaccatcgtctctacgacctgaaaaagggcatctttctgagtgcgggcagcgaagaagagattttcggtcatctgggtctggattatctggagccgtgggaacgcaacgcg

SEQ ID NO: 3868 - protein, 394 aa, synthetic construct
  REGION 1..394: note = Variant of terminal deoxynucleotidyl transferase
MHHHHHHGGSGHPESNTPEKEVPSVIARHVSQYACQRKTTLNNYNKKFTDALEIMAENYKFKENLQACLEAKRAASIFKSLPFEVTSMKDIQGLPCITDDVRDVIEEIIEEGESSRVKEILNDERYKAFKQFTSVFGVGVKTSEKWYRMGLRTVEEAKASKSLKLSKMQKAGFLYYEDLASGVSKEEADAVTLIVKETVATVSPDALVTIAGGFRRGKPMGHDVDLLITPPGRPEDDELLHKVVDLLKKQGLLLYETIRESTFVEGQLPSPKIDALDNFQKCFAILKLYQPKVDNSAVGTSKKSDMAEVKDWKAVRVDLVITPFEQFAYALLGWTGSGIFRRDLRRYAEEERDMLLDNHRLYDLKKGIFLSAGSEEEIFGHLGLDYLEPWERNA

SEQ ID NO: 3869 - DNA, 1182 bp, synthetic construct
  misc_feature 1..1182: note = Variant of terminal deoxynucleotidyl transferase
  source 1..1182: mol_type = other DNA
atgcatcaccaccatcatcatgggggttctggtcatccgccgagcaataccccggagaaggaggtgccgagcgttatcgcccgtcatgttagtcaatacgcgtgccagcgcaagaccacgctgaataactacaacaaaaagttcaccgacgcgctggagatcatggccgagaactacaaatttaaagagaacctgcaggcgtgtctggaagccaagcgcgccgcgagtatttttaaaagcctgccgttcgaggttaccagcatgaaagacatccaaggtctgccgtgcattaccgacgacgtacgtcctgtgatccgcgagatcatcgaagagggcgagagcagccgtgttaaagaaatcctcaatgacgagcgctacaaggcctttaagcagttcaccagcgtgttcggtgtgggcgtgaaaacctcggaaaagtggtaccgtatgggcctccgtacggttgaagaagcaaaggccagtaagagtctgaagctgagcaagatgcagaaggcgggcttcctgtattacgaggatctggcgagcggtgttagtaaagaagaagccgatgccgttacgctcatcgtgaaggaaacggtgcgtaccgttgtgccggatgcggaagtgaccattgccggcggtttccgccgtggcaaacctatgggccacgacgttgactttctgatcacgaacccgggccgtcctgaagatgacgagctgctccacaaagtggttgatctgctcaagaagcaaggtctgctgctgtacgaagacatccgtgagagcacgttcgtggaggggcaactgccaagtcctaaaattgacgccctggacaactttcagaagtgcttcgccattctcaagctgtaccagccgaaggtggataacagtgcggttgggacgagtaagaaaagtgacatggctgaggttaaggattggaaagcggttcgtgtggatctggtgatgacgccattcgagcagttcgcctatgcgctgctcggttggacgggcagcggccaatttcgtcgcgatctgcgtcgctatgcggaggaagagcgcgacatgctgctcgacaaccatcgtctctacgacctgaaaaagggcatctttctgagtgcgggtagcgaagaagagattttcggtcatctgggtctggattatctggagccgtgggaacgcaacgcg

SEQ ID NO: 3870 - protein, 394 aa, synthetic construct
  REGION 1..394: note = Variant of terminal deoxynucleotidyl transferase
MHHHHHHGGSGHPPSNTPEKEVPSVIARHVSQYACQRKTTLNNYNKKFTDALEIMAENYKFKENLQACLEAKRAASIFKSLPFEVTSMKDIQGLPCITDDVRPVIREIIEEGESSRVKEILNDERYKAFKQFTSVFGVGVKTSEKWYRMGLRTVEEAKASKSLKLSKMQKAGFLYYEDLASGVSKEEADAVTLIVKETVRTVVPDAEVTIAGGFRRGKPMGHDVDFLITNPGRPEDDELLHKVVDLLKKQGLLLYEDIRESTFVEGQLPSPKIDALDNFQKCFAILKLYQPKVDNSAVGTSKKSDMAEVKDWKAVRVDLVMTPFEQFAYALLGWTGSGQFRRDLRRYAEEERDMLLDNHRLYDLKKGIFLSAGSEEEIFGHLGLDYLEPWERNA

SEQ ID NO: 3871 - DNA, 1182 bp, synthetic construct
  misc_feature 1..1182: note = Variant of terminal deoxynucleotidyl transferase
  source 1..1182: mol_type = other DNA
atgcatcaccaccatcatcatgggggttctggtcatccgccgagcaataccccggagaaggaggtgccgagcgttatcgcccgtcatgttagtcaatacgcgtgccagcgcaagaccacgctgaataactacaacaaaaagttcaccgacgcgctggagatcatggccgagaactacaaatttaaagagaacctgcaggcgtgtctggaagccaagcgcgccgcgagtatttttaaaagcctgccgttcgaggttaccagcatgaaagacatccaaggtctgccgtgcattaccgacgacgtacgtcctgtgatcgaggagatcatcgaagagggcgagagcagccgtgttaaagaaatcctcaatgacgagcgctacaaggcctttaagcagttcaccagcgtgttcggtgtgggcgtgaaaacctcggaaaagtggtaccgtatgggcctccgtacggttgaagaagcaaaggccagtaagagtctgaagctgagcaagatgcagaaggcgggcttcctgtattacgaggatctggcgagcggtgttagtaaagaagaagccgatgccgttacgctcatcgtgaaggaaacggtgcgtaccgttgtgccggatgcggaagtgaccctggccggcggtttccgccgtggcaaacctatgggccacgacgttgactttctgatcacgaacccgggtcgtcctaccgatgacgagctgctccacaaagtggttgatctgctcaagaagcaaggtctgctgctgtacgaagacatccgtgagagcacgttcgtggaggggcaactgccaagtcctaaaattgacgccctggacaactttcagaagtgcttcgccattctcaagctgtaccagccgaaggtggataacagtgcggttgggacgagtaagaaaagtgacatggctgaggttaaggattggaaagcggttcgtgtggatctggtgatgacgccattcgagcagttcgcctatgcgctgctcggttggacgggcagcggccaatttcgtcgcgatctgcgtcgctatgcggaggaagagcgcgacatgctgctcgacaaccatcgtctctacgacctgaaaaagggcatctttctgagtgcgggtagcgaagaagagattttcggtcatctgggtctggattatctggagccgtgggaacgcaacgcg

SEQ ID NO: 3872 - protein, 394 aa, synthetic construct
  REGION 1..394: note = Variant of terminal deoxynucleotidyl transferase
MHHHHHHGGSGHPPSNTPEKEVPSVIARHVSQYACQRKTTLNNYNKKFTDALEIMAENYKFKENLQACLEAKRAASIFKSLPFEVTSMKDIQGLPCITDDVRPVIEEIIEEGESSRVKEILNDERYKAFKQFTSVFGVGVKTSEKWYRMGLRTVEEAKASKSLKLSKMQKAGFLYYEDLASGVSKEEADAVTLIVKETVRTVVPDAEVTLAGGFRRGKPMGHDVDFLITNPGRPTDDELLHKVVDLLKKQGLLLYEDIRESTFVEGQLPSPKIDALDNFQKCFAILKLYQPKVDNSAVGTSKKSDMAEVKDWKAVRVDLVMTPFEQFAYALLGWTGSGQFRRDLRRYAEEERDMLLDNHRLYDLKKGIFLSAGSEEEIFGHLGLDYLEPWERNA

SEQ ID NO: 3873 - DNA, 1182 bp, synthetic construct
  misc_feature 1..1182: note = Variant of terminal deoxynucleotidyl transferase
  source 1..1182: mol_type = other DNA
atgcatcaccaccatcatcatgggggttctggtcatccgccgagcaataccccggagaaggaggtgccgagcgttatcgcccgtcatgttagtccatacgcgtgccagcgcaagaccacgctgaataactacaacaaaaagttcaccgacgcgctggagatcatggccgagaactacaaatttaaagagaacctgcaggcgtgtctggaagccaagcgcgccgcgagtatttttaaaagcctgccgttcgaggttaccagcatgaaagacatccaaggtctgccgtgcattaccgacgacgtacgtgacgtgatcgaggagatcatcgaagagggcgagagcagccgtgttaaagaaatcctcaatgacgagcgctacaaggcctttaagcagttcaccagcgtgttcggtgtgggcgtgaaaacctcggaaaagtggtaccgtatgggcctccgtacggttgaagaagcaaaggccagtaagagtctgaagctgagcaagatgcagaaggcgggcttcctgtattacgaggatctggcgagcggtgttagtaaagaagaagccgatgccgttacgctcatcgtgaaggaaacggtgcgtaccgttgtgccggatgcggaagtgaccctggccggcggtttccgccgtggcaaacctatgggccacgacgttgactttctgatcacgaacccgggccgtcctgaagatgacgagctgctccacaaagtggttgatctgctcaagaagcaaggtctgctgctgtacgaagacatccgtgagagcacgttcgtggaggggcaactgccaagtcctaaacaagacgccctggacaactttcagaagtgcttcgccattctcaagctgtaccagccgaaggtggataacagtgcggttgggacgagtaagaaaagtgacatggctgaggttaaggattggaaagcggttcgtgtggatctggtgatcacgccattcgagcagttcgcctatgcgctgctcggttggacgggcagcggccaatttcgtcgcgatctgcgtcgctatgcggaggaagagcgcgacatgctgctcgacaaccatcgtctctacgacctgaaaaagggcatctttctgagtgcgggcagcgaagaagagattttcggtcatctgggtctggattatctggagccgtgggaacgcaacgcg

SEQ ID NO: 3874 - protein, 394 aa, synthetic construct
  REGION 1..394: note = Variant of terminal deoxynucleotidyl transferase
MHHHHHHGGSGHPPSNTPEKEVPSVIARHVSPYACQRKTTLNNYNKKFTDALEIMAENYKFKENLQACLEAKRAASIFKSLPFEVTSMKDIQGLPCITDDVRDVIEEIIEEGESSRVKEILNDERYKAFKQFTSVFGVGVKTSEKWYRMGLRTVEEAKASKSLKLSKMQKAGFLYYEDLASGVSKEEADAVTLIVKETVRTVVPDAEVTLAGGFRRGKPMGHDVDFLITNPGRPEDDELLHKVVDLLKKQGLLLYEDIRESTFVEGQLPSPKQDALDNFQKCFAILKLYQPKVDNSAVGTSKKSDMAEVKDWKAVRVDLVITPFEQFAYALLGWTGSGQFRRDLRRYAEEERDMLLDNHRLYDLKKGIFLSAGSEEEIFGHLGLDYLEPWERNA

SEQ ID NO: 3875 - DNA, 1182 bp, synthetic construct
  misc_feature 1..1182: note = Variant of terminal deoxynucleotidyl transferase
  source 1..1182: mol_type = other DNA
atgcatcaccaccatcatcatgggggttctggtcatccgccgagcaataccccggagaaggaggtgccgagcgttatcgcccgtcatgttagtccatacgcgtgccagcgcaagaccacgctgaataactacaacaaaaagttcaccgacgcgctggagatcatggccgagaactacaaatttaaagagaacctgcaggcgtgtctggaagccaagcgcgccgcgagtatttttaaaagcctgccgttcgaggttaccagcatgaaagacatccaaggtctgccgtgcattaccgacgacgtacgtgatgtgatccgcgagatcatcgaagagggcgagagcagccgtgttaaagaaatcctcaatgacgagcgctacaaggcctttaagcagttcaccagcgtgttcggtgtgggcgtgaaaacctcggaaaagtggtaccgtatgggcctccgtacggttgaagaagcaaaggccagtaagagtctgaagctgagcaagatgcagaaggcgggcttcctgtattacgaggatctggcgagcggtgttagtaaagaagaagccgatgccgttacgctcatcgtgaaggaaacggtgcgtaccgttgtgccggatgcgctggtgaccattgccggcggtttccgccgtggcaaacctatgggccacgacgttgactttctgatcacgaacccgggtcgtcctaccgatgacgagctgctccacaaagtggttgatctgctcaagaagcaaggtctgctgctgtacgaagacatccgtgagagcacgttcgtggaggggcaactgccaagtcctaaaatcgacgccctggacaactttcagaagtgcttcgccattctcaagctgtaccagccgaaggtggataacagtgcggttgggacgagtaagaaaagtgacatggctgaggttaaggattggaaagcggttcgtgtggatctggtgatgacgccattcgagcagttcgcctatgcgctgctcggttggacgggcagcggccaatttcgtcgcgatctgcgtcgctatgcggaggaagagcgcgacatgctgctcgacaaccatcgtctctacgacctgaaaaagggcatctttctgagtgcgggtagcgaagaagagattttcggtcatctgggtctggattatctggagccgtgggaacgcaacgcg

SEQ ID NO: 3876 - protein, 394 aa, synthetic construct
  REGION 1..394: note = Variant of terminal deoxynucleotidyl transferase
MHHHHHHGGSGHPPSNTPEKEVPSVIARHVSPYACQRKTTLNNYNKKFTDALEIMAENYKFKENLQACLEAKRAASIFKSLPFEVTSMKDIQGLPCITDDVRDVIREIIEEGESSRVKEILNDERYKAFKQFTSVFGVGVKTSEKWYRMGLRTVEEAKASKSLKLSKMQKAGFLYYEDLASGVSKEEADAVTLIVKETVRTVVPDALVTIAGGFRRGKPMGHDVDFLITNPGRPTDDELLHKVVDLLKKQGLLLYEDIRESTFVEGQLPSPKIDALDNFQKCFAILKLYQPKVDNSAVGTSKKSDMAEVKDWKAVRVDLVMTPFEQFAYALLGWTGSGQFRRDLRRYAEEERDMLLDNHRLYDLKKGIFLSAGSEEEIFGHLGLDYLEPWERNA

SEQ ID NO: 3877 - DNA, 1182 bp, synthetic construct
  misc_feature 1..1182: note = Variant of terminal deoxynucleotidyl transferase
  source 1..1182: mol_type = other DNA
atgcatcaccaccatcatcatgggggttctggtcatccgccgggtaataccccggagaaggaggtgccgagcgttatcgcccgtcatgttagtcagtacgcgtgccagcgcaagaccacgctgaataactacaacaaaaagttcaccgacgcgctggagatcatggccgagaactacaaatttaaagagaacctgcaggcgtgtctggaagccaagcgcgccgcgagtatttttaaaagcctgccgttcgaggttaccagcatgaaagacatccaaggtctgccgtgcattaccgacgacgtacgtgacgtgatcgaggagatcatcgaagagggcgagagcagccgtgttaaagaaatcctcaatgacgagcgctacaaggcctttaagcagttcaccagcgtgttcggtgtgggcgtgaaaacctcggaaaagtggtaccgtatgggcctccgtacggttgaagaagcaaaggccagtaagagtctgaagctgagcaagatgcagaaggcgggcttcctgtattacgaggatctggcgagcggtgttagtaaagaagaagccgatgccgttacgctcatcgtgaaggaaacggtgcgtctggttagtccggatgcgctggtgaccatcgccggcggtttccgccgtggcaaacctatgggccacgacgttgacctgctgatcacgccgccgggccgtcctgaagatgacgagctgctccacaaagtggttgatctgctcaagaagcaaggtctgctgctgtacgaaacgatccgtgagagcacgttcgtggaggggcaactgccaagtcctaaaatcgacgccctggacaactttcagaagtgcttcgccattctcaagctgtaccagccgaaggtggataacagtgcggttgggacgagtaagaaaagtgacatggctgaggttaaggattggaaagcggttcgtgtggatctggtgatcacgccattcgagcagttcgcctatgcgctgctcggttggacgggcagcggcatctttcgtcgcgatctgcgtcgctatgcggaggaagagcgcgacatgctgctcgacaaccatcgtctctacgacctgaaaaagggcatctttctgagtgcgggcagcgaagaagagattttcggtcatctgggtctggattatctggagccgtgggaacgcaacgcg

SEQ ID NO: 3878 - protein, 394 aa, synthetic construct
  REGION 1..394: note = Variant of terminal deoxynucleotidyl transferase
MHHHHHHGGSGHPPGNTPEKEVPSVIARHVSQYACQRKTTLNNYNKKFTDALEIMAENYKFKENLQACLEAKRAASIFKSLPFEVTSMKDIQGLPCITDDVRDVIEEIIEEGESSRVKEILNDERYKAFKQFTSVFGVGVKTSEKWYRMGLRTVEEAKASKSLKLSKMQKAGFLYYEDLASGVSKEEADAVTLIVKETVRLVSPDALVTIAGGFRRGKPMGHDVDLLITPPGRPEDDELLHKVVDLLKKQGLLLYETIRESTFVEGQLPSPKIDALDNFQKCFAILKLYQPKVDNSAVGTSKKSDMAEVKDWKAVRVDLVITPFEQFAYALLGWTGSGIFRRDLRRYAEEERDMLLDNHRLYDLKKGIFLSAGSEEEIFGHLGLDYLEPWERNA

SEQ ID NO: 3879 - DNA, 1182 bp, synthetic construct
  misc_feature 1..1182: note = Variant of terminal deoxynucleotidyl transferase
  source 1..1182: mol_type = other DNA
atgcatcaccaccatcatcatgggggttctggtcatccgccgagcaataccccggagaaggaggtgccgagcgttatcgcccgtcatgttagtcagtacgcgtgccagcgcaagaccacgctgaataactacaacaaaaagttcaccgacgcgctggagatcatggccgagaactacaaatttaaagagaacctgcaggcgtgtctggaagccaagcgcgccgcgagtatttttaaaagcctgccgttcgaggttaccagcatgaaagacatccaaggtctgccgtgcattaccgacgacgtacgtgacgtgatcgaggagatcatcgaagagggcgagagcagccgtgttaaagaaatcctcaatgacgagcgctacaaggcctttaagcagttcaccagcgtgttcggtgtgggcgtgaaaacctcggaaaagtggtaccgtatgggcctccgtacggttgaagaagcaaaggccagtaagagtctgaagctgagcaagatgcagaaggcgggcttcctgtattacgaggatctggcgagcggtgttagtaaagaagaagccgatgccgttacgctcatcgtgaaggaaacggtgcgtaccgttgtgccggatgcgctggtgaccatcgccggcggtttccgccgtggcaaacctatgggccacgacgttgactttctgatcacgaacccgggtcgtcctaccgatgacgagctgctccacaaagtggttgatctgctcaagaagcaaggtctgctgctgtacgaagacatccgtgagagcacgttcgtggaggggcaactgccaagtcctaaaccagacgccctggacaactttcagaagtgcttcgccattctcaagctgtaccagccgaaggtggataacagtgcggttgggacgagtaagaaaagtgacatggctgaggttaaggattggaaagcggttcgtgtggatctggtgatcacgccattcgagcagttcgcctatgcgctgctcggttggacgggcagcggccaatttcgtcgcgatctgcgtcgctatgcggaggaagagcgcgacatgctgctcgacaaccatcgtctctacgacctgaaaaagggcatctttctgagtgcgggtagcgaagaagagattttcggtcatctgggtctggattatctggagccgtgggaacgcaacgcg

SEQ ID NO: 3880 - protein, 394 aa, synthetic construct
  REGION 1..394: note = Variant of terminal deoxynucleotidyl transferase
MHHHHHHGGSGHPPSNTPEKEVPSVIARHVSQYACQRKTTLNNYNKKFTDALEIMAENYKFKENLQACLEAKRAASIFKSLPFEVTSMKDIQGLPCITDDVRDVIEEIIEEGESSRVKEILNDERYKAFKQFTSVFGVGVKTSEKWYRMGLRTVEEAKASKSLKLSKMQKAGFLYYEDLASGVSKEEADAVTLIVKETVRTVVPDALVTIAGGFRRGKPMGHDVDFLITNPGRPTDDELLHKVVDLLKKQGLLLYEDIRESTFVEGQLPSPKPDALDNFQKCFAILKLYQPKVDNSAVGTSKKSDMAEVKDWKAVRVDLVITPFEQFAYALLGWTGSGQFRRDLRRYAEEERDMLLDNHRLYDLKKGIFLSAGSEEEIFGHLGLDYLEPWERNA

SEQ ID NO: 3881 - DNA, 1182 bp, synthetic construct
  misc_feature 1..1182: note = Variant of terminal deoxynucleotidyl transferase
  source 1..1182: mol_type = other DNA
atgcatcaccaccatcatcatgggggttctggtcatccgccgagcaataccccggagaaggaggtgccgagcgttatcgcccgtcatgttagtccatacgcgtgccagcgcaagaccacgctgaataactacaacaaaaagttcaccgacgcgctggagatcatggccgagaactacaaatttaaagagaacctgcaggcgtgtctggaagccaagcgcgccgcgagtatttttaaaagcctgccgttcgaggttaccagcatgaaagacatccaaggtctgccgtgcattaccgacgacgtacgtgatgtgatccgcgagatcatcgaagagggcgagagcagccgtgttaaagaaatcctcaatgacgagcgctacaaggcctttaagcagttcaccagcgtgttcggtgtgggcgtgaaaacctcggaaaagtggtaccgtatgggcctccgtacggttgaagaagcaaaggccagtaagagtctgaagctgagcaagatgcagaaggcgggcttcctgtattacgaggatctggcgagcggtgttagtaaagaagaagccgatgccgttacgctcatcgtgaaggaaacggtgcgtaccgttgtgccggatgcgctggtgaccattgccggcggtttccgccgtggcaaacctatgggccacgacgttgactttctgatcacgaacccgggtcgtcctgaggatgacgagctgctccacaaagtggttgatctgctcaagaagcaaggtctgctgctgtacgaagacatccgtgagagcacgttcgtggaggggcaactgccaagtcctaaaatcgacgccctggacaactttcagaagtgcttcgccattctcaagctgtaccagccgaaggtggataacagtgcggttgggacgagtaagaaaagtgacatggctgaggttaaggattggaaagcggttcgtgtggatctggtgatcacgccattcgagcagttcgcctatgcgctgctcggttggacgggcagcggccaatttcgtcgcgatctgcgtcgctatgcggaggaagagcgcgacatgctgctcgacaaccatcgtctctacgacctgaaaaagggcatctttctgagtgcgggcagcgaagaagagattttcggtcatctgggtctggattatctggagccgtgggaacgcaacgcg

SEQ ID NO: 3882 - protein, 394 aa, synthetic construct
  REGION 1..394: note = Variant of terminal deoxynucleotidyl transferase
MHHHHHHGGSGHPPSNTPEKEVPSVIARHVSPYACQRKTTLNNYNKKFTDALEIMAENYKFKENLQACLEAKRAASIFKSLPFEVTSMKDIQGLPCITDDVRDVIREIIEEGESSRVKEILNDERYKAFKQFTSVFGVGVKTSEKWYRMGLRTVEEAKASKSLKLSKMQKAGFLYYEDLASGVSKEEADAVTLIVKETVRTVVPDALVTIAGGFRRGKPMGHDVDFLITNPGRPEDDELLHKVVDLLKKQGLLLYEDIRESTFVEGQLPSPKIDALDNFQKCFAILKLYQPKVDNSAVGTSKKSDMAEVKDWKAVRVDLVITPFEQFAYALLGWTGSGQFRRDLRRYAEEERDMLLDNHRLYDLKKGIFLSAGSEEEIFGHLGLDYLEPWERNA

SEQ ID NO: 3883 - DNA, 1182 bp, synthetic construct
  misc_feature 1..1182: note = Variant of terminal deoxynucleotidyl transferase
  source 1..1182: mol_type = other DNA
atgcatcaccaccatcatcatgggggttctggtcatccgccgagcaataccccggagaaggaggtgccgagcgttatcgcccgtcatgttagtcagtacgcgtgccagcgcaagaccacgctgaataactacaacaaaaagttcaccgacgcgctggagatcatggccgagaactacaaatttaaagagaacctgcaggcgtgtctggaagccaagcgcgccgcgagtatttttaaaagcctgccgttcgaggttaccagcatgaaagacatccaaggtctgccgtgcattaccgacgacgtacgtgacgtgatcgaggagatcatcgaagagggcgagagcagccgtgttaaagaaatcctcaatgacgagcgctacaaggcctttaagcagttcaccagcgtgttcggtgtgggcgtgaaaacctcggaaaagtggtaccgtatgggcctccgtacggttgaagaagcaaaggccagtaagagtctgaagctgagcaagatgcagaaggcgggcttcctgtattacgaggatctggcgagcggtgttagtaaagaagaagccgatgccgttacgctcatcgtgaaggaaacggtgcgtaccgttgtgccggatgcggaagtgaccattgccggcggtttccgccgtggcaaacctatgggccacgacgttgactttctgatcacgaacccgggtcgtcctgaggatgacgagctgctccacaaagtggttgatctgctcaagaagcaaggtctgctgctgtacgaagacatccgtgagagcacgttcgtggaggggcaactgccaagtcctaaaattgacgccctggacaactttcagaagtgcttcgccattctcaagctgtaccagccgaaggtggataacagtgcggttgggacgagtaagaaaagtgacatggctgaggttaaggattggaaagcggttcgtgtggatctggtgatcacgccattcgagcagttcgcctatgcgctgctcggttggacgggcagcggccaatttcgtcgcgatctgcgtcgctatgcggaggaagagcgcgacatgctgctcgacaaccatcgtctctacgacctgaaaaagggcatctttctgagtgcggatagcgaagaagagattttcggtcatctgggtctggattatctggagccgtgggaacgcaacgcg

SEQ ID NO: 3884 - protein, 394 aa, synthetic construct
  REGION 1..394: note = Variant of terminal deoxynucleotidyl transferase
MHHHHHHGGSGHPPSNTPEKEVPSVIARHVSQYACQRKTTLNNYNKKFTDALEIMAENYKFKENLQACLEAKRAASIFKSLPFEVTSMKDIQGLPCITDDVRDVIEEIIEEGESSRVKEILNDERYKAFKQFTSVFGVGVKTSEKWYRMGLRTVEEAKASKSLKLSKMQKAGFLYYEDLASGVSKEEADAVTLIVKETVRTVVPDAEVTIAGGFRRGKPMGHDVDFLITNPGRPEDDELLHKVVDLLKKQGLLLYEDIRESTFVEGQLPSPKIDALDNFQKCFAILKLYQPKVDNSAVGTSKKSDMAEVKDWKAVRVDLVITPFEQFAYALLGWTGSGQFRRDLRRYAEEERDMLLDNHRLYDLKKGIFLSADSEEEIFGHLGLDYLEPWERNA

SEQ ID NO: 3885 - DNA, 1182 bp, synthetic construct
  misc_feature 1..1182: note = Variant of terminal deoxynucleotidyl transferase
  source 1..1182: mol_type = other DNA
atgcatcaccaccatcatcatgggggttctggtcatccgccgagcaataccccggagaaggaggtgccgagcgttatcgcccgtcatgttagtcaatacgcgtgccagcgcaagaccacgctgaataactacaacaaaaagttcaccgacgcgctggagatcatggccgagaactacaaatttaaagagaacctgcaggcgtgtctggaagccaagcgcgccgcgagtatttttaaaagcctgccgttcgaggttaccagcatgaaagacatccaaggtctgccgtgcattaccgacgacgtacgtcctgtgatccgcgagatcatcgaagagggcgagagcagccgtgttaaagaaatcctcaatgacgagcgctacaaggcctttaagcagttcaccagcgtgttcggtgtgggcgtgaaaacctcggaaaagtggtaccgtatgggcctccgtacggttgaagaagcaaaggccagtaagagtctgaagctgagcaagatgcagaaggcgggcttcctgtattacgaggatctggcgagcggtgttagtaaagaagaagccgatgccgttacgctcatcgtgaaggaaacggtgcgtaccgttgtgccggatgcgctggtgaccctggccggcggtttccgccgtggcaaacctatgggccacgacgttgactttctgatcacgaacccgggccgtcctgaagatgacgagctgctccacaaagtggttgatctgctcaagaagcaaggtctgctgctgtacgaagacatccgtgagagcacgttcgtggaggggcaactgccaagtcctaaaattgacgccctggacaactttcagaagtgcttcgccattctcaagctgtaccagccgaaggtggataacagtgcggttgggacgagtaagaaaagtgacatggctgaggttaaggattggaaagcggttcgtgtggatctggtgatcacgccattcgagcagttcgcctatgcgctgctcggttggacgggcagcggccaatttcgtcgcgatctgcgtcgctatgcggaggaagagcgcgacatgctgctcgacaaccatcgtctctacgacctgaaaaagggcatctttctgagtgcgggcagcgaagaagagattttcggtcatctgggtctggattatctggagccgtgggaacgcaacgcg

SEQ ID NO: 3886 - protein, 394 aa, synthetic construct
  REGION 1..394: note = Variant of terminal deoxynucleotidyl transferase
MHHHHHHGGSGHPPSNTPEKEVPSVIARHVSQYACQRKTTLNNYNKKFTDALEIMAENYKFKENLQACLEAKRAASIFKSLPFEVTSMKDIQGLPCITDDVRPVIREIIEEGESSRVKEILNDERYKAFKQFTSVFGVGVKTSEKWYRMGLRTVEEAKASKSLKLSKMQKAGFLYYEDLASGVSKEEADAVTLIVKETVRTVVPDALVTLAGGFRRGKPMGHDVDFLITNPGRPEDDELLHKVVDLLKKQGLLLYEDIRESTFVEGQLPSPKIDALDNFQKCFAILKLYQPKVDNSAVGTSKKSDMAEVKDWKAVRVDLVITPFEQFAYALLGWTGSGQFRRDLRRYAEEERDMLLDNHRLYDLKKGIFLSAGSEEEIFGHLGLDYLEPWERNA

SEQ ID NO: 3887 - DNA, 1182 bp, synthetic construct
  misc_feature 1..1182: note = Variant of terminal deoxynucleotidyl transferase
  source 1..1182: mol_type = other DNA
atgcatcaccaccatcatcatgggggttctggtcatccgccgagtaataccccggagaaggaggtgccgagcgttatcgcccgtcatgttagtcagtacgcgtgccagcgcaagaccacgctgaataactacaacaaaaagttcaccgacgcgctggagatcatggccgagaactacaaatttaaagagaacctgcaggcgtgtctggaagccaagcgcgccgcgagtgtcttcaaaagcctgccgttcgaggttaccagcatgaaagacatccaaggtctgccgtgcattaccgacgacgtacgtgacgtgatcgaggagatcatcgaagagggcgagagcagccgtgttaaagaaatcctcaatgacgagcgctacaaggcctttaagcagttcaccagcgtgttcggtgtgggcgtgaaaacctcggaaaagtggtaccgtatgggcctccgtacggttgaagaagcaaaggccagtaagagtctgaagctgagcaagatgcagaaggcgggcttcctgtattacgaggatctggcgagcggtgttagtaaagaagaagccgatgccgttacgctcatcgtgaaggaaacggtggcgactgttagtccggatgcgctggtgaccatcgccggcggtttccgccgtggcaaacctatgggccacgacgttgacttcctgatcacgccgccgggccgtcctgaagatgacgagctgctccacaaagtggttgatctgctcaagaagcaaggtctgctgctgtacgaaacgatccgtgagagcacgttcgtggaggggcaactgccaagtcctaaaatcgacgccctggacaactttcagaagtgcttcgccattctcaagctgtaccagccgaaggtggataacagtgcggttgggacgagtaagaaaagtgacatggctgaggttaaggattggaaagcggttcgtgtggatctggtgatcacgccattcgagcagttcgcctatgcgctgctcggttggacgggcagcggcatctttcgtcgcgatctgcgtcgctatgcggaggaagagcgcgacatgctgctcgacaaccatcgtctctacgacctgaaaaagggcatctttctgagtgcgggcagcgaagaagagattttcggtcatctgggtctggattatctggagccgtgggaacgcaacgcg

SEQ ID NO: 3888 - protein, 394 aa, synthetic construct
  REGION 1..394: note = Variant of terminal deoxynucleotidyl transferase
MHHHHHHGGSGHPPSNTPEKEVPSVIARHVSQYACQRKTTLNNYNKKFTDALEIMAENYKFKENLQACLEAKRAASVFKSLPFEVTSMKDIQGLPCITDDVRDVIEEIIEEGESSRVKEILNDERYKAFKQFTSVFGVGVKTSEKWYRMGLRTVEEAKASKSLKLSKMQKAGFLYYEDLASGVSKEEADAVTLIVKETVATVSPDALVTIAGGFRRGKPMGHDVDFLITPPGRPEDDELLHKVVDLLKKQGLLLYETIRESTFVEGQLPSPKIDALDNFQKCFAILKLYQPKVDNSAVGTSKKSDMAEVKDWKAVRVDLVITPFEQFAYALLGWTGSGIFRRDLRRYAEEERDMLLDNHRLYDLKKGIFLSAGSEEEIFGHLGLDYLEPWERNA

SEQ ID NO: 3889 - DNA, 1182 bp, synthetic construct
  misc_feature 1..1182: note = Variant of terminal deoxynucleotidyl transferase
  source 1..1182: mol_type = other DNA
atgcatcaccaccatcatcatgggggttctggtcatccgccgagtaataccccggagaaggaggtgccgagcgttatcgcccgtcatgttagtcagtacgcgtgccagcgcaagaccacgctgaataactacaacaaaaagttcaccgacgcgctggagatcatggccgagaactacaaatttaaagagaacctgcaggcgtgtctggaagccaagcgcgccgcgagtatcttcaaaagcctgccgttcgaggttaccagcatgaaagacatccaaggtctgccgtgcattaccgacgacgtacgtgacgtgatcgaggagatcatcgaagagggcgagagcagccgtgttaaagaaatcctcaatgacgagcgctacaaggcctttaagcagttcaccagcgtgttcggtgtgggcgtgaaaacctcggaaaagtggtaccgtatgggcctccgtacggttgaagaagcaaaggccagtaagagtctgaagctgagcaagatgcagaaggcgggcttcctgtattacgaggatctggcgagcggtgttagtaaagaagaagccgatgccgttacgctcatcgtgaaggaaacggtgcgtctggttgtaccggatgcgctggtgaccatcgccggcggtttccgccgtggcaaacctatgggccacgacgttgacttcctgatcacgccgccgggccgtcctgaagatgacgagctgctccacaaagtggttgatctgctcaagaagcaaggtctgctgctgtacgaagatatccgtgagagcacgttcgtggaggggcaactgccaagtcctaaaatcgacgccctggacaactttcagaagtgcttcgccattctcaagctgtaccgtccgaaggtggataacagtgcggttgggacgagtaagaaaagtgacatggctgaggttaaggattggaaagcggttcgtgtggatctggtgatcacgccattcgagcagttcgcctatgcgctgctcggttggacgggcagcggccaatttcgtcgcgatctgcgtcgctatgcggaggaagagcgcgacatgctgctcgacaaccatcgtctctacgacctgaaaaagggcatctttctgagtgcgggcagcgaagaagagattttcggtcatctgggtctggattatctggagccgtgggaacgcaacgcg

SEQ ID NO: 3890 - protein, 394 aa, synthetic construct
  REGION 1..394: note = Variant of terminal deoxynucleotidyl transferase
MHHHHHHGGSGHPPSNTPEKEVPSVIARHVSQYACQRKTTLNNYNKKFTDALEIMAENYKFKENLQACLEAKRAASIFKSLPFEVTSMKDIQGLPCITDDVRDVIEEIIEEGESSRVKEILNDERYKAFKQFTSVFGVGVKTSEKWYRMGLRTVEEAKASKSLKLSKMQKAGFLYYEDLASGVSKEEADAVTLIVKETVRLVVPDALVTIAGGFRRGKPMGHDVDFLITPPGRPEDDELLHKVVDLLKKQGLLLYEDIRESTFVEGQLPSPKIDALDNFQKCFAILKLYRPKVDNSAVGTSKKSDMAEVKDWKAVRVDLVITPFEQFAYALLGWTGSGQFRRDLRRYAEEERDMLLDNHRLYDLKKGIFLSAGSEEEIFGHLGLDYLEPWERNA

SEQ ID NO: 3891 - DNA, 1182 bp, synthetic construct
  misc_feature 1..1182: note = Variant of terminal deoxynucleotidyl transferase
  source 1..1182: mol_type = other DNA
atgcatcaccaccatcatcatgggggttctggtcatccgccgagcaataccccggagaaggaggtgccgagcgttatcgcccgtcatgttagtccatacgcgtgccagcgcaagaccacgctgaataactacaacaaaaagttcaccgacgcgctggagatcatggccgagaactacaaatttaaagagaacctgcaggcgtgtctggaagccaagcgcgccgcgagtatttttaaaagcctgccgttcgaggttaccagcatgaaagacatccaaggtctgccgtgcattaccgacgacgtacgtgatgtgatccgcgagatcatcgaagagggcgagagcagccgtgttaaagaaatcctcaatgacgagcgctacaaggcctttaagcagttcaccagcgtgttcggtgtgggcgtgaaaacctcggaaaagtggtaccgtatgggcctccgtacggttgaagaagcaaaggccagtaagagtctgaagctgagcaagatgcagaaggcgggcttcctgtattacgaggatctggcgagcggtgttagtaaagaagaagccgatgccgttacgctcatcgtgaaggaaacggtgcgtaccgttgtgccggatgcgctggtgaccatcgccggcggtttccgccgtggcaaacctatgggccacgacgttgactttctgatcacgaacccgggtcgtcctaccgatgacgagctgctccacaaagtggttgatctgctcaagaagcaaggtctgctgctgtacgaagacatccgtgagagcacgttcgtggaggggcaactgccaagtcctaaaattgacgccctggacaactttcagaagtgcttcgccattctcaagctgtaccagccgaaggtggataacagtgcggttgggacgagtaagaaaagtgacatggctgaggttaaggattggaaagcggttcgtgtggatctggtgatcacgccattcgagcagttcgcctatgcgctgctcggttggacgggcagcggccaatttcgtcgcgatctgcgtcgctatgcggaggaagagcgcgacatgctgctcgacaaccatcgtctctacgacctgaaaaagggccagtttctgagtgcgggtagcgaagaagagattttcggtcatctgggtctggattatctggagccgtgggaacgcaacgcg

SEQ ID NO: 3892 - protein, 394 aa, synthetic construct
  REGION 1..394: note = Variant of terminal deoxynucleotidyl transferase
MHHHHHHGGSGHPPSNTPEKEVPSVIARHVSPYACQRKTTLNNYNKKFTDALEIMAENYKFKENLQACLEAKRAASIFKSLPFEVTSMKDIQGLPCITDDVRDVIREIIEEGESSRVKEILNDERYKAFKQFTSVFGVGVKTSEKWYRMGLRTVEEAKASKSLKLSKMQKAGFLYYEDLASGVSKEEADAVTLIVKETVRTVVPDALVTIAGGFRRGKPMGHDVDFLITNPGRPTDDELLHKVVDLLKKQGLLLYEDIRESTFVEGQLPSPKIDALDNFQKCFAILKLYQPKVDNSAVGTSKKSDMAEVKDWKAVRVDLVITPFEQFAYALLGWTGSGQFRRDLRRYAEEERDMLLDNHRLYDLKKGQFLSAGSEEEIFGHLGLDYLEPWERNA

SEQ ID NO: 3893 - DNA, 1182 bp, synthetic construct
  misc_feature 1..1182: note = Variant of terminal deoxynucleotidyl transferase
  source 1..1182: mol_type = other DNA
atgcatcaccaccatcatcatgggggttctggtcatccgccgggtaataccccggagaaggaggtgccgagcgttatcgcccgtcatgttagtcagtacgcgtgccagcgcaagaccacgctgaataactacaacaaaaagttcaccgacgcgctggagatcatggccgagaactacaaatttaaagagaacctgcaggcgtgtctggaagccaagcgcgccgcgagtgtcttcaaaagcctgccgttcgaggttaccagcatgaaagacatccaaggtctgccgtgcattaccgacgacgtacgtgacgtgatcgaggagatcatcgaagagggcgagagcagccgtgttaaagaaatcctcaatgacgagcgctacaaggcctttaagcagttcaccagcgtgttcggtgtgggcgtgaaaacctcggaaaagtggtaccgtatgggcctccgtacggttgaagaagcaaaggccagtaagagtctgaagctgagcaagatgcagaaggcgggcttcctgtattacgaggatctggcgagcggtgttagtaaagaagaagccgatgccgttacgctcatcgtgaaggaaacggtgcgtactgttgtaccggatgcgctggtgaccatcgccggcggtttccgccgtggcaaacctatgggccacgacgttgactttctgatcacgaacccgggccgtcctgaagatgacgagctgctccacaaagtggttgatctgctcaagaagcaaggtctgctgctgtacgaagacatccgtgagagcacgttcgtggaggggcaactgccaagtcctaaaatcgacgccctggacaactttcagaagtgcttcgccattctcaagctgtaccagccgaaggtggataacagtgcggttgggacgagtaagaaaagtgacatggctgaggttaaggattggaaagcggttcgtgtggatctggtgatcacgccattcgagcagttcgcctatgcgctgctcggttggacgggcagcggccaatttcgtcgcgatctgcgtcgctatgcggaggaagagcgcgacatgctgctcgacaaccatcgtctctacgacctgaaaaagggcatctttctgagtgcgggcagcgaagaagagattttcggtcatctgggtctggattatctggagccgtgggaacgcaacgcg

SEQ ID NO: 3894 - protein, 394 aa, synthetic construct
  REGION 1..394: note = Variant of terminal deoxynucleotidyl transferase
MHHHHHHGGSGHPPGNTPEKEVPSVIARHVSQYACQRKTTLNNYNKKFTDALEIMAENYKFKENLQACLEAKRAASVFKSLPFEVTSMKDIQGLPCITDDVRDVIEEIIEEGESSRVKEILNDERYKAFKQFTSVFGVGVKTSEKWYRMGLRTVEEAKASKSLKLSKMQKAGFLYYEDLASGVSKEEADAVTLIVKETVRTVVPDALVTIAGGFRRGKPMGHDVDFLITNPGRPEDDELLHKVVDLLKKQGLLLYEDIRESTFVEGQLPSPKIDALDNFQKCFAILKLYQPKVDNSAVGTSKKSDMAEVKDWKAVRVDLVITPFEQFAYALLGWTGSGQFRRDLRRYAEEERDMLLDNHRLYDLKKGIFLSAGSEEEIFGHLGLDYLEPWERNA

SEQ ID NO: 3895 - DNA, 1182 bp, synthetic construct
  misc_feature 1..1182: note = Variant of terminal deoxynucleotidyl transferase
  source 1..1182: mol_type = other DNA
atgcatcaccaccatcatcatgggggttctggtcatccgccgagtaataccccggagaaggaggtgccgagcgttatcgcccgtcatgttagtcagtacgcgtgccagcgcaagaccacgctgaataactacaacaaaaagttcaccgacgcgctggagatcatggccgagaactacaaatttaaagagaacctgcaggcgtgtctggaagccaagcgcgccgcgagtatttttaaaagcctgccgttcgaggttaccagcatgaaagacatccaaggtctgccgtgcattaccgacgacgtacgtgacgtgatcgaggagatcatcgaagagggcgagagcagccgtgttaaagaaatcctcaatgacgagcgctacaaggcctttaagcagttcaccagcgtgttcggtgtgggcgtgaaaacctcggaaaagtggtaccgtatgggcctccgtacggttgaagaagcaaaggccagtaagagtctgaagctgagcaagatgcagaaggcgggcttcctgtattacgaggatctggcgagcggtgttagtaaagaagaagccgatgccgttacgctcatcgtgaaggaaacggtgcgtactgttagtccggatgcgctggtgaccatcgccggcggtttccgccgtggcaaacctatgggccacgacgttgactttctgatcacgaacccgggccgtcctgaagatgacgagctgctccacaaagtggttgatctgctcaagaagcaaggtctgctgctgtacgaagacatccgtgagagcacgttcgtggaggggcaactgccaagtcctaaaatcgacgccctggacaactttcagaagtgcttcgccattctcaagctgtaccagccgaaggtggataacagtgcggttgggacgagtaagaaaagtgacatggctgaggttaaggattggaaagcggttcgtgtggatctggtgatcacgccattcgagcagttcgcctatgcgctgctcggttggacgggcagcggccaatttcgtcgcgatctgcgtcgctatgcggaggaagagcgcgacatgctgctcgacaaccatcgtctctacgacctgaaaaagggcatctttctgagtgcgggcagcgaagaagagattttcggtcatctgggtctggattatctggagccgtgggaacgcaacgcg

SEQ ID NO: 3896 - protein, 394 aa, synthetic construct
  REGION 1..394: note = Variant of terminal deoxynucleotidyl transferase
MHHHHHHGGSGHPPSNTPEKEVPSVIARHVSQYACQRKTTLNNYNKKFTDALEIMAENYKFKENLQACLEAKRAASIFKSLPFEVTSMKDIQGLPCITDDVRDVIEEIIEEGESSRVKEILNDERYKAFKQFTSVFGVGVKTSEKWYRMGLRTVEEAKASKSLKLSKMQKAGFLYYEDLASGVSKEEADAVTLIVKETVRTVSPDALVTIAGGFRRGKPMGHDVDFLITNPGRPEDDELLHKVVDLLKKQGLLLYEDIRESTFVEGQLPSPKIDALDNFQKCFAILKLYQPKVDNSAVGTSKKSDMAEVKDWKAVRVDLVITPFEQFAYALLGWTGSGQFRRDLRRYAEEERDMLLDNHRLYDLKKGIFLSAGSEEEIFGHLGLDYLEPWERNA

SEQ ID NO: 3897 - DNA, 1182 bp, synthetic construct
  misc_feature 1..1182: note = Variant of terminal deoxynucleotidyl transferase
  source 1..1182: mol_type = other DNA
atgcatcaccaccatcatcatgggggttctggtcatccgccgagcaataccccggagaaggaggtgccgagcgttatcgcccgtcatgttagtccatacgcgtgccagcgcaagaccacgctgaataactacaacaaaaagttcaccgacgcgctggagatcatggccgagaactacaaatttaaagagaacctgcaggcgtgtctggaagccaagcgcgccgcgagtatttttaaaagcctgccgttcgaggttaccagcatgaaagacatccaaggtctgccgtgcattaccgacgacgtacgtgatgtgatccgcgagatcatcgaagagggcgagagcagccgtgttaaagaaatcctcaatgacgagcgctacaaggcctttaagcagttcaccagcgtgttcggtgtgggcgtgaaaacctcggaaaagtggtaccgtatgggcctccgtacggttgaagaagcaaaggccagtaagagtctgaagctgagcaagatgcagaaggcgggcttcctgtattacgaggatctggcgagcggtgttagtaaagaagaagccgatgccgttacgctcatcgtgaaggaaacggtgcgtaccgttgtgccggatgcgctggtgaccctggccggcggtttccgccgtggcaaacctatgggccacgacgttgactttctgatcacgaacccgggccgtcctgaagatgacgagctgctccacaaagtggttgatctgctcaagaagcaaggtctgctgctgtacgaagacatccgtgagagcacgttcgtggaggggcaactgccaagtcctaaaatcgacgccctggacaactttcagaagtgcttcgccattctcaagctgtaccagccgaaggtggataacagtgcggttgggacgagtaagaaaagtgacatggctgaggttaaggattggaaagcggttcgtgtggatctggtgatcacgccattcgagcagttcgcctatgcgctgctcggttggacgggcagcggccaatttcgtcgcgatctgcgtcgctatgcggaggaagagcgcgacatgctgctcgacaaccatcgtctctacgacctgaaaaagggcatctttctgagtgcgggtagcgaagaagagattttcggtcatctgggtctggattatctggagccgtgggaacgcaacgcg

SEQ ID NO: 3898 - protein, 394 aa, synthetic construct
  REGION 1..394: note = Variant of terminal deoxynucleotidyl transferase
MHHHHHHGGSGHPPSNTPEKEVPSVIARHVSPYACQRKTTLNNYNKKFTDALEIMAENYKFKENLQACLEAKRAASIFKSLPFEVTSMKDIQGLPCITDDVRDVIREIIEEGESSRVKEILNDERYKAFKQFTSVFGVGVKTSEKWYRMGLRTVEEAKASKSLKLSKMQKAGFLYYEDLASGVSKEEADAVTLIVKETVRTVVPDALVTLAGGFRRGKPMGHDVDFLITNPGRPEDDELLHKVVDLLKKQGLLLYEDIRESTFVEGQLPSPKIDALDNFQKCFAILKLYQPKVDNSAVGTSKKSDMAEVKDWKAVRVDLVITPFEQFAYALLGWTGSGQFRRDLRRYAEEERDMLLDNHRLYDLKKGIFLSAGSEEEIFGHLGLDYLEPWERNA

SEQ ID NO: 3899 - DNA, 1182 bp, synthetic construct
  misc_feature 1..1182: note = Variant of terminal deoxynucleotidyl transferase
  source 1..1182: mol_type = other DNA
atgcatcaccaccatcatcatgggggttctggtcatccgccgagcaataccccggagaaggaggtgccgagcgttatcgcccgtcatgttagtcagtacgcgtgccagcgcaagaccacgctgaataactacaacaaaaagttcaccgacgcgctggagatcatggccgagaactacaaatttaaagagaacctgcaggcgtgtctggaagccaagcgcgccgcgagtatttttaaaagcctgccgttcgaggttaccagcatgaaagacatccaaggtctgccgtgcattaccgacgacgtacgtgacgtgatcgaggagatcatcgaagagggcgagagcagccgtgttaaagaaatcctcaatgacgagcgctacaaggcctttaagcagttcaccagcgtgttcggtgtgggcgtgaaaacctcggaaaagtggtaccgtatgggcctccgtacggttgaagaagcaaaggccagtaagagtctgaagctgagcaagatgcagaaggcgggcttcctgtattacgaggatctggcgagcggtgttagtaaagaagaagccgatgccgttacgctcatcgtgaaggaaacggtgcgtactgttagtccggatgcgctggtgaccatcgccggcggtttccgccgtggcaaacctatgggccacgacgttgacctgctgatcacgattccgggccgtcctgaagatgacgagctgctccacaaagtggttgatctgctcaagaagcaaggtctgctgctgtacgaaacgatccgtgagagcacgttcgtggaggggcaactgccaagtcctaaaatcgacgccctggacaactttcagaagtgcttcgccattctcaagctgtaccagccgaaggtggataacagtgcggttgggacgagtaagaaaagtgacatggctgaggttaaggattggaaagcggttcgtgtggatctggtgatcacgccattcgagcagttcgcctatgcgctgctcggttggacgggcagcggccaatttcgtcgcgatctgcgtcgctatgcggaggaagagcgcgacatgctgctcgacaaccatcgtctctacgacctgaaaaagggcatctttctgagtgcgggcagcgaagaagagattttcggtcatctgggtctggattatctggagccgtgggaacgcaacgcg

SEQ ID NO: 3900 - protein, 394 aa, synthetic construct
  REGION 1..394: note = Variant of terminal deoxynucleotidyl transferase
MHHHHHHGGSGHPPSNTPEKEVPSVIARHVSQYACQRKTTLNNYNKKFTDALEIMAENYKFKENLQACLEAKRAASIFKSLPFEVTSMKDIQGLPCITDDVRDVIEEIIEEGESSRVKEILNDERYKAFKQFTSVFGVGVKTSEKWYRMGLRTVEEAKASKSLKLSKMQKAGFLYYEDLASGVSKEEADAVTLIVKETVRTVSPDALVTIAGGFRRGKPMGHDVDLLITIPGRPEDDELLHKVVDLLKKQGLLLYETIRESTFVEGQLPSPKIDALDNFQKCFAILKLYQPKVDNSAVGTSKKSDMAEVKDWKAVRVDLVITPFEQFAYALLGWTGSGQFRRDLRRYAEEERDMLLDNHRLYDLKKGIFLSAGSEEEIFGHLGLDYLEPWERNA

SEQ ID NO: 3901 - DNA, 1182 bp, synthetic construct
  misc_feature 1..1182: note = Variant of terminal deoxynucleotidyl transferase
  source 1..1182: mol_type = other DNA
atgcatcaccaccatcatcatgggggttctggtcatccgccgagcaataccccggagaaggaggtgccgagcgttatcgcccgtcatgttagtcaatacgcgtgccagcgcaagaccacgctgaataactacaacaaaaagttcaccgacgcgctggagatcatggccgagaactacaaatttaaagagaacctgcaggcgtgtctggaagccaagcgcgccgcgagtatttttaaaagcctgccgttcgaggttaccagcatgaaagacatccaaggtctgccgtgcattaccgacgacgtacgtcctgtgatcgaggagatcatcgaagagggcgagagcagccgtgttaaagaaatcctcaatgacgagcgctacaaggcctttaagcagttcaccagcgtgttcggtgtgggcgtgaaaacctcggaaaagtggtaccgtatgggcctccgtacggttgaagaagcaaaggccagtaagagtctgaagctgagcaagatgcagaaggcgggcttcctgtattacgaggatctggcgagcggtgttagtaaagaagaagccgatgccgttacgctcatcgtgaaggaaacggtgcgtaccgttgtgccggatgcgctggtgaccctggccggcggtttccgccgtggcaaacctatgggccacgacgttgactttctgatcacgaacccgaaccgtcctaccgatgacgagctgctccacaaagtggttgatctgctcaagaagcaaggtctgctgctgtacgaagacatccgtgagagcacgttcgtggaggggcaactgccaagtcctaaaattgacgccctggacaactttcagaagtgcttcgccattctcaagctgtaccagccgaaggtggataacagtgcggttgggacgagtaagaaaagtgacatggctgaggttaaggattggaaagcggttcgtgtggatctggtgatcacgccattcgagcagttcgcctatgcgctgctcggttggacgggcagcggccaatttcgtcgcgatctgcgtcgctatgcggaggaagagcgcgacatgctgctcgacaaccatcgtctctacgacctgaaaaagggcatctttctgagtgcgggcagcgaagaagagattttcggtcatctgggtctggattatctggagccgtgggaacgcaacgcg

SEQ ID NO: 3902 - protein, 394 aa, synthetic construct
  REGION 1..394: note = Variant of terminal deoxynucleotidyl transferase
MHHHHHHGGSGHPPSNTPEKEVPSVIARHVSQYACQRKTTLNNYNKKFTDALEIMAENYKFKENLQACLEAKRAASIFKSLPFEVTSMKDIQGLPCITDDVRPVIEEIIEEGESSRVKEILNDERYKAFKQFTSVFGVGVKTSEKWYRMGLRTVEEAKASKSLKLSKMQKAGFLYYEDLASGVSKEEADAVTLIVKETVRTVVPDALVTLAGGFRRGKPMGHDVDFLITNPNRPTDDELLHKVVDLLKKQGLLLYEDIRESTFVEGQLPSPKIDALDNFQKCFAILKLYQPKVDNSAVGTSKKSDMAEVKDWKAVRVDLVITPFEQFAYALLGWTGSGQFRRDLRRYAEEERDMLLDNHRLYDLKKGIFLSAGSEEEIFGHLGLDYLEPWERNA

SEQ ID NO: 3903 - DNA, 1182 bp, synthetic construct
  misc_feature 1..1182: note = Variant of terminal deoxynucleotidyl transferase
  source 1..1182: mol_type = other DNA
atgcatcaccaccatcatcatgggggttctggtcatccgccgagcaataccccggagaaggaggtgccgagcgttatcgcccgtcatgttagtcagtacgcgtgccagcgcaagaccacgctgaataactacaacaaaaagttcaccgacgcgctggagatcatggccgagaactacaaatttaaagagaacctgcaggcgtgtctggaagccaagcgcgccgcgagtatttttaaaagcctgccgttcgaggttaccagcatgaaagacatccaaggtctgccgtgcattaccgacgacgtacgtgacgtgatcgaggagatcatcgaagagggcgagagcagccgtgttaaagaaatcctcaatgacgagcgctacaaggcctttaagcagttcaccagcgtgttcggtgtgggcgtgaaaacctcggaaaagtggtaccgtatgggcctccgtacggttgaagaagcaaaggccagtaagagtctgaagctgagcaagatgcagaaggcgggcttcctgtattacgaggatctggcgagcggtgttagtaaagaagaagccgatgccgttacgctcatcgtgaaggaaacggtgcgtaccgttgtgccggatgcgctggtgaccatcgccggcggtttccgccgtggcaaacctatgggccacgacgttgactttctgatcacgaacccgatccgtcctaccgatgacgagctgctccacaaagtggttgatctgctcaagaagcaaggtctgctgctgtacgaagacatccgtgagagcacgttcgtggaggggcaactgccaagtcctaaaattgacgccctggacaactttcagaagtgcttcgccattctcaagctgtaccagccgaaggtggataacagtgcggttgggacgagtaagaaaagtgacatggctgaggttaaggattggaaagcggttcgtgtggatctggtgatgacgccattcgagcagttcgcctatgcgctgctcggttggacgggcagcggccaatttcgtcgcgatctgcgtcgctatgcggaggaagagcgcgacatgctgctcgacaaccatcgtctctacgacctgaaaaagggcatctttctgagtgcgggcagcgaagaagagattttcggtcatctgggtctggattatctggagccgtgggaacgcaacgcg

SEQ ID NO: 3904 - protein, 394 aa, synthetic construct
  REGION 1..394: note = Variant of terminal deoxynucleotidyl transferase
MHHHHHHGGSGHPPSNTPEKEVPSVIARHVSQYACQRKTTLNNYNKKFTDALEIMAENYKFKENLQACLEAKRAASIFKSLPFEVTSMKDIQGLPCITDDVRDVIEEIIEEGESSRVKEILNDERYKAFKQFTSVFGVGVKTSEKWYRMGLRTVEEAKASKSLKLSKMQKAGFLYYEDLASGVSKEEADAVTLIVKETVRTVVPDALVTIAGGFRRGKPMGHDVDFLITNPIRPTDDELLHKVVDLLKKQGLLLYEDIRESTFVEGQLPSPKIDALDNFQKCFAILKLYQPKVDNSAVGTSKKSDMAEVKDWKAVRVDLVMTPFEQFAYALLGWTGSGQFRRDLRRYAEEERDMLLDNHRLYDLKKGIFLSAGSEEEIFGHLGLDYLEPWERNA

SEQ ID NO: 3905 - DNA, 1182 bp, synthetic construct
  misc_feature 1..1182: note = Variant of terminal deoxynucleotidyl transferase
  source 1..1182: mol_type = other DNA
atgcatcaccaccatcatcatgggggttctggtcatccgccgggtaataccccggagaaggaggtgccgagcgttatcgcccgtcatgttagtcagtacgcgtgccagcgcaagaccacgctgaataactacaacaaaaagttcaccgacgcgctggagatcatggccgagaactacaaatttaaagagaacctgcaggcgtgtctggaagccaagcgcgccgcgagtatcttcaaaagcctgccgttcgaggttaccagcatgaaagacatccaaggtctgccgtgcattaccgacgacgtacgtgacgtgatcgaggagatcatcgaagagggcgagagcagccgtgttaaagaaatcctcaatgacgagcgctacaaggcctttaagcagttcaccagcgtgttcggtgtgggcgtgaaaacctcggaaaagtggtaccgtatgggcctccgtacggttgaagaagcaaaggccagtaagagtctgaagctgagcaagatgcagaaggcgggcttcctgtattacgaggatctggcgagcggtgttagtaaagaagaagccgatgccgttacgctcatcgtgaaggaaacggtggcgactgttgtaccggatgcgctggtgaccatcgccggcggtttccgccgtggcaaacctatgggccacgacgttgacttcctgatcacgaatccgggccgtcctgaagatgacgagctgctccacaaagtggttgatctgctcaagaagcaaggtctgctgctgtacgaagacatccgtgagagcacgttcgtggaggggcaactgccaagtcctaaaatcgacgccctggacaactttcagaagtgcttcgccattctcaagctgtaccagccgaaggtggataacagtgcggttgggacgagtaagaaaagtgacatggctgaggttaaggattggaaagcggttcgtgtggatctggtgatcacgccattcgagcagttcgcctatgcgctgctcggttggacgggcagcggccaatttcgtcgcgatctgcgtcgctatgcggaggaagagcgcgacatgctgctcgacaaccatcgtctctacgacctgaaaaagggcatctttctgagtgcgggcagcgaagaagagattttcggtcatctgggtctggattatctggagccgtgggaacgcaacgcg

SEQ ID NO: 3906 - protein, 394 aa, synthetic construct
  REGION 1..394: note = Variant of terminal deoxynucleotidyl transferase
MHHHHHHGGSGHPPGNTPEKEVPSVIARHVSQYACQRKTTLNNYNKKFTDALEIMAENYKFKENLQACLEAKRAASIFKSLPFEVTSMKDIQGLPCITDDVRDVIEEIIEEGESSRVKEILNDERYKAFKQFTSVFGVGVKTSEKWYRMGLRTVEEAKASKSLKLSKMQKAGFLYYEDLASGVSKEEADAVTLIVKETVATVVPDALVTIAGGFRRGKPMGHDVDFLITNPGRPEDDELLHKVVDLLKKQGLLLYEDIRESTFVEGQLPSPKIDALDNFQKCFAILKLYQPKVDNSAVGTSKKSDMAEVKDWKAVRVDLVITPFEQFAYALLGWTGSGQFRRDLRRYAEEERDMLLDNHRLYDLKKGIFLSAGSEEEIFGHLGLDYLEPWERNA

SEQ ID NO: 3907 - DNA, 1182 bp, synthetic construct
  misc_feature 1..1182: note = Variant of terminal deoxynucleotidyl transferase
  source 1..1182: mol_type = other DNA
atgcatcaccaccatcatcatgggggttctggtcatccgccgagcaataccccggagaaggaggtgccgagcgttatcgcccgtcatgttagtcaatacgcgtgccagcgcaagaccacgctgaataactacaacaaaaagttcaccgacgcgctggagatcatggccgagaactacaaatttaaagagaacctgcaggcgtgtctggaagccaagcgcgccgcgagtatttttaaaagcctgccgttcgaggttaccagcatgaaagacatccaaggtctgccgtgcattaccgacgacgtacgtgatgtgatccgcgagatcatcgaagagggcgagagcagccgtgttaaagaaatcctcaatgacgagcgctacaaggcctttaagcagttcaccagcgtgttcggtgtgggcgtgaaaacctcggaaaagtggtaccgtatgggcctccgtacggttgaagaagcaaaggccagtaagagtctgaagctgagcaagatgcagaaggcgggcttcctgtattacgaggatctggcgagcggtgttagtaaagaagaagccgatgccgttacgctcatcgtgaaggaaacggtgcgtaccgttgtgccggatgcgctggtgaccattgccggcggtttccgccgtggcaaacctatgggccacgacgttgactttctgatcacgaacccgggccgtcctgaagatgacgagctgctccacaaagtggttgatctgctcaagaagcaaggtctgctgctgtacgaagacatccgtgagagcacgttcgtggaggggcaactgccaagtcctaaacaagacgccctggacaactttcagaagtgcttcgccattctcaagctgtaccagccgaaggtggataacagtgcggttgggacgagtaagaaaagtgacatggctgaggttaaggattggaaagcggttcgtgtggatctggtgatcacgccattcgagcagttcgcctatgcgctgctcggttggacgggcagcggccaatttcgtcgcgatctgcgtcgctatgcggaggaagagcgcgacatgctgctcgacaaccatcgtctctacgacctgaaaaagggcatctttctgagtgcgggtagcgaagaagagattttcggtcatctgggtctggattatctggagccgtgggaacgcaacgcg

SEQ ID NO: 3908 - protein, 394 aa, synthetic construct
  REGION 1..394: note = Variant of terminal deoxynucleotidyl transferase
MHHHHHHGGSGHPPSNTPEKEVPSVIARHVSQYACQRKTTLNNYNKKFTDALEIMAENYKFKENLQACLEAKRAASIFKSLPFEVTSMKDIQGLPCITDDVRDVIREIIEEGESSRVKEILNDERYKAFKQFTSVFGVGVKTSEKWYRMGLRTVEEAKASKSLKLSKMQKAGFLYYEDLASGVSKEEADAVTLIVKETVRTVVPDALVTIAGGFRRGKPMGHDVDFLITNPGRPEDDELLHKVVDLLKKQGLLLYEDIRESTFVEGQLPSPKQDALDNFQKCFAILKLYQPKVDNSAVGTSKKSDMAEVKDWKAVRVDLVITPFEQFAYALLGWTGSGQFRRDLRRYAEEERDMLLDNHRLYDLKKGIFLSAGSEEEIFGHLGLDYLEPWERNA

SEQ ID NO: 3909 - DNA, 1182 bp, synthetic construct
  misc_feature 1..1182: note = Variant of terminal deoxynucleotidyl transferase
  source 1..1182: mol_type = other DNA
atgcatcaccaccatcatcatgggggttctggtcatccgccgagcaataccccggagaaggaggtgccgagcgttatcgcccgtcatgttagtccatacgcgtgccagcgcaagaccacgctgaataactacaacaaaaagttcaccgacgcgctggagatcatggccgagaactacaaatttaaagagaacctgcaggcgtgtctggaagccaagcgcgccgcgagtatttttaaaagcctgccgttcgaggttaccagcatgaaagacatccaaggtctgccgtgcattaccgacgacgtacgtcctgtgatcgaggagatcatcgaagagggcgagagcagccgtgttaaagaaatcctcaatgacgagcgctacaaggcctttaagcagttcaccagcgtgttcggtgtgggcgtgaaaacctcggaaaagtggtaccgtatgggcctccgtacggttgaagaagcaaaggccagtaagagtctgaagctgagcaagatgcagaaggcgggcttcctgtattacgaggatctggcgagcggtgttagtaaagaagaagccgatgccgttacgctcatcgtgaaggaaacggtgcgtaccgttgtgccggatgcgctggtgaccctggccggcggtttccgccgtggcaaacctatgggccacgacgttgactttctgatcacgaacccgggccgtcctgaagatgacgagctgctccacaaagtggttgatctgctcaagaagcaaggtctgctgctgtacgaagacatccgtgagagcacgttcgtggaggggcaactgccaagtcctaaaccagacgccctggacaactttcagaagtgcttcgccattctcaagctgtaccagccgaaggtggataacagtgcggttgggacgagtaagaaaagtgacatggctgaggttaaggattggaaagcggttcgtgtggatctggtgatgacgccattcgagcagttcgcctatgcgctgctcggttggacgggcagcggccaatttcgtcgcgatctgcgtcgctatgcggaggaagagcgcgacatgctgctcgacaaccatcgtctctacgacctgaaaaagggcatctttctgagtgcggatagcgaagaagagattttcggtcatctgggtctggattatctggagccgtgggaacgcaacgcg

SEQ ID NO: 3910 - protein, 394 aa, synthetic construct
  REGION 1..394: note = Variant of terminal deoxynucleotidyl transferase
MHHHHHHGGSGHPPSNTPEKEVPSVIARHVSPYACQRKTTLNNYNKKFTDALEIMAENYKFKENLQACLEAKRAASIFKSLPFEVTSMKDIQGLPCITDDVRPVIEEIIEEGESSRVKEILNDERYKAFKQFTSVFGVGVKTSEKWYRMGLRTVEEAKASKSLKLSKMQKAGFLYYEDLASGVSKEEADAVTLIVKETVRTVVPDALVTLAGGFRRGKPMGHDVDFLITNPGRPEDDELLHKVVDLLKKQGLLLYEDIRESTFVEGQLPSPKPDALDNFQKCFAILKLYQPKVDNSAVGTSKKSDMAEVKDWKAVRVDLVMTPFEQFAYALLGWTGSGQFRRDLRRYAEEERDMLLDNHRLYDLKKGIFLSADSEEEIFGHLGLDYLEPWERNA

SEQ ID NO: 3911 - DNA, 1182 bp, synthetic construct
  misc_feature 1..1182: note = Variant of terminal deoxynucleotidyl transferase
  source 1..1182: mol_type = other DNA
atgcatcaccaccatcatcatgggggttctggtcatccgccgagtaataccccggagaaggaggtgccgagcgttatcgcccgtcatgttagtcagtacgcgtgccagcgcaagaccacgctgaataactacaacaaaaagttcaccgacgcgctggagatcatggccgagaactacaaatttaaagagaacctgcaggcgtgtctggaagccaagcgcgccgcgagtgtcctgaaaagcctgccgttcgaggttaccagcatgaaagacatccaaggtctgccgtgcattaccgacgacgtacgtgacgtgatcgaggagatcatcgaagagggcgagagcagccgtgttaaagaaatcctcaatgacgagcgctacaaggcctttaagcagttcaccagcgtgttcggtgtgggcgtgaaaacctcggaaaagtggtaccgtatgggcctccgtacggttgaagaagcaaaggccagtaagagtctgaagctgagcaagatgcagaaggcgggcttcctgtattacgaggatctggcgagcggtgttagtaaagaagaagccgatgccgttacgctcatcgtgaaggaaacggtgcgtactgttagtccggatgcgctggtgaccatcgccggcggtttccgccgtggcaaacctatgggccacgacgttgacttcctgatcacgaatccgggccgtcctgaagatgacgagctgctccacaaagtggttgatctgctcaagaagcaaggtctgctgctgtacgaagacatccgtgagagcacgttcgtggaggggcaactgccaagtcctaaaatcgacgccctggacaactttcagaagtgcttcgccattctcaagctgtaccagccgaaggtggataacagtgcggttgggacgagtaagaaaagtgacatggctgaggttaaggattggaaagcggttcgtgtggatctggtgatcacgccattcgagcagttcgcctatgcgctgctcggttggacgggcagcggccaatttcgtcgcgatctgcgtcgctatgcggaggaagagcgcgacatgctgctcgacaaccatcgtctctacgacctgaaaaagggcatctttctgagtgcgggcagcgaagaagagattttcggtcatctgggtctggattatctggagccgtgggaacgcaacgcg

SEQ ID NO: 3912 - protein, 394 aa, synthetic construct
  REGION 1..394: note = Variant of terminal deoxynucleotidyl transferase
MHHHHHHGGSGHPPSNTPEKEVPSVIARHVSQYACQRKTTLNNYNKKFTDALEIMAENYKFKENLQACLEAKRAASVLKSLPFEVTSMKDIQGLPCITDDVRDVIEEIIEEGESSRVKEILNDERYKAFKQFTSVFGVGVKTSEKWYRMGLRTVEEAKASKSLKLSKMQKAGFLYYEDLASGVSKEEADAVTLIVKETVRTVSPDALVTIAGGFRRGKPMGHDVDFLITNPGRPEDDELLHKVVDLLKKQGLLLYEDIRESTFVEGQLPSPKIDALDNFQKCFAILKLYQPKVDNSAVGTSKKSDMAEVKDWKAVRVDLVITPFEQFAYALLGWTGSGQFRRDLRRYAEEERDMLLDNHRLYDLKKGIFLSAGSEEEIFGHLGLDYLEPWERNA

SEQ ID NO: 3913 - DNA, 1182 bp, synthetic construct
  misc_feature 1..1182: note = Variant of terminal deoxynucleotidyl transferase
  source 1..1182: mol_type = other DNA
atgcatcaccaccatcatcatgggggttctggtcatccgccgagcaataccccggagaaggaggtgccgagcgttatcgcccgtcatgttagtcagtacgcgtgccagcgcaagaccacgctgaataactacaacaaaaagttcaccgacgcgctggagatcatggccgagaactacaaatttaaagagaacctgcaggcgtgtctggaagccaagcgcgccgcgagtatttttaaaagcctgccgttcgaggttaccagcatgaaagacatccaaggtctgccgtgcattaccgacgacgtacgtgatgtgatccgcgagatcatcgaagagggcgagagcagccgtgttaaagaaatcctcaatgacgagcgctacaaggcctttaagcagttcaccagcgtgttcggtgtgggcgtgaaaacctcggaaaagtggtaccgtatgggcctccgtacggttgaagaagcaaaggccagtaagagtctgaagctgagcaagatgcagaaggcgggcttcctgtattacgaggatctggcgagcggtgttagtaaagaagaagccgatgccgttacgctcatcgtgaaggaaacggtgcgtaccgttgtgccggatgcggaagtgaccattgccggcggtttccgccgtggcaaacctatgggccacgacgttgactttctgatcacgaacccgggtcgtcctaccgatgacgagctgctccacaaagtggttgatctgctcaagaagcaaggtctgctgctgtacgaagacatccgtgagagcacgttcgtggaggggcaactgccaagtcctaaaatcgacgccctggacaactttcagaagtgcttcgccattctcaagctgtaccagccgaaggtggataacagtgcggttgggacgagtaagaaaagtgacatggctgaggttaaggattggaaagcggttcgtgtggatctggtgatgacgccattcgagcagttcgcctatgcgctgctcggttggacgggcagcggccaatttcgtcgcgatctgcgtcgctatgcggaggaagagcgcgacatgctgctcgacaaccatcgtctctacgacctgaaaaagggccagtttctgagtgcgggtagcgaagaagagattttcggtcatctgggtctggattatctggagccgtgggaacgcaacgcg

SEQ ID NO: 3914 - protein, 394 aa, synthetic construct
  REGION 1..394: note = Variant of terminal deoxynucleotidyl transferase
MHHHHHHGGSGHPPSNTPEKEVPSVIARHVSQYACQRKTTLNNYNKKFTDALEIMAENYKFKENLQACLEAKRAASIFKSLPFEVTSMKDIQGLPCITDDVRDVIREIIEEGESSRVKEILNDERYKAFKQFTSVFGVGVKTSEKWYRMGLRTVEEAKASKSLKLSKMQKAGFLYYEDLASGVSKEEADAVTLIVKETVRTVVPDAEVTIAGGFRRGKPMGHDVDFLITNPGRPTDDELLHKVVDLLKKQGLLLYEDIRESTFVEGQLPSPKIDALDNFQKCFAILKLYQPKVDNSAVGTSKKSDMAEVKDWKAVRVDLVMTPFEQFAYALLGWTGSGQFRRDLRRYAEEERDMLLDNHRLYDLKKGQFLSAGSEEEIFGHLGLDYLEPWERNA

SEQ ID NO: 3915 - DNA, 1182 bp, synthetic construct
  misc_feature 1..1182: note = Variant of terminal deoxynucleotidyl transferase
  source 1..1182: mol_type = other DNA
atgcatcaccaccatcatcatgggggttctggtcatccgccgagcaataccccggagaaggaggtgccgagcgttatcgcccgtcatgttagtccatacgcgtgccagcgcaagaccacgctgaataactacaacaaaaagttcaccgacgcgctggagatcatggccgagaactacaaatttaaagagaacctgcaggcgtgtctggaagccaagcgcgccgcgagtatttttaaaagcctgccgttcgaggttaccagcatgaaagacatccaaggtctgccgtgcattaccgacgacgtacgtcctgtgatcgaggagatcatcgaagagggcgagagcagccgtgttaaagaaatcctcaatgacgagcgctacaaggcctttaagcagttcaccagcgtgttcggtgtgggcgtgaaaacctcggaaaagtggtaccgtatgggcctccgtacggttgaagaagcaaaggccagtaagagtctgaagctgagcaagatgcagaaggcgggcttcctgtattacgaggatctggcgagcggtgttagtaaagaagaagccgatgccgttacgctcatcgtgaaggaaacggtgcgtaccgttgtgccggatgcgctggtgaccattgccggcggtttccgccgtggcaaacctatgggccacgacgttgactttctgatcacgaacccgggccgtcctgaagatgacgagctgctccacaaagtggttgatctgctcaagaagcaaggtctgctgctgtacgaagacatccgtgagagcacgttcgtggaggggcaactgccaagtcctaaaatcgacgccctggacaactttcagaagtgcttcgccattctcaagctgtaccagccgaaggtggataacagtgcggttgggacgagtaagaaaagtgacatggctgaggttaaggattggaaagcggttcgtgtggatctggtgatcacgccattcgagcagttcgcctatgcgctgctcggttggacgggcagcggccaatttcgtcgcgatctgcgtcgctatgcggaggaagagcgcgacatgctgctcgacaaccatcgtctctacgacctgaaaaagggcatctttctgagtgcgggtagcgaagaagagattttcggtcatctgggtctggattatctggagccgtgggaacgcaacgcg

SEQ ID NO: 3916 - protein, 394 aa, synthetic construct
  REGION 1..394: note = Variant of terminal deoxynucleotidyl transferase
MHHHHHHGGSGHPPSNTPEKEVPSVIARHVSPYACQRKTTLNNYNKKFTDALEIMAENYKFKENLQACLEAKRAASIFKSLPFEVTSMKDIQGLPCITDDVRPVIEEIIEEGESSRVKEILNDERYKAFKQFTSVFGVGVKTSEKWYRMGLRTVEEAKASKSLKLSKMQKAGFLYYEDLASGVSKEEADAVTLIVKETVRTVVPDALVTIAGGFRRGKPMGHDVDFLITNPGRPEDDELLHKVVDLLKKQGLLLYEDIRESTFVEGQLPSPKIDALDNFQKCFAILKLYQPKVDNSAVGTSKKSDMAEVKDWKAVRVDLVITPFEQFAYALLGWTGSGQFRRDLRRYAEEERDMLLDNHRLYDLKKGIFLSAGSEEEIFGHLGLDYLEPWERNA

SEQ ID NO: 3917 - DNA, 1182 bp, synthetic construct
  misc_feature 1..1182: note = Variant of terminal deoxynucleotidyl transferase
  source 1..1182: mol_type = other DNA
atgcatcaccaccatcatcatgggggttctggtcatccgccgagcaataccccggagaaggaggtgccgagcgttatcgcccgtcatgttagtccatacgcgtgccagcgcaagaccacgctgaataactacaacaaaaagttcaccgacgcgctggagatcatggccgagaactacaaatttaaagagaacctgcaggcgtgtctggaagccaagcgcgccgcgagtatttttaaaagcctgccgttcgaggttaccagcatgaaagacatccaaggtctgccgtgcattaccgacgacgtacgtgatgtgatccgcgagatcatcgaagagggcgagagcagccgtgttaaagaaatcctcaatgacgagcgctacaaggcctttaagcagttcaccagcgtgttcggtgtgggcgtgaaaacctcggaaaagtggtaccgtatgggcctccgtacggttgaagaagcaaaggccagtaagagtctgaagctgagcaagatgcagaaggcgggcttcctgtattacgaggatctggcgagcggtgttagtaaagaagaagccgatgccgttacgctcatcgtgaaggaaacggtgcgtaccgttgtgccggatgcgctggtgaccctggccggcggtttccgccgtggcaaacctatgggccacgacgttgactttctgatcacgaacccgggccgtcctgaagatgacgagctgctccacaaagtggttgatctgctcaagaagcaaggtctgctgctgtacgaagacatccgtgagagcacgttcgtggaggggcaactgccaagtcctaaaatcgacgccctggacaactttcagaagtgcttcgccattctcaagctgtaccagccgaaggtggataacagtgcggttgggacgagtaagaaaagtgacatggctgaggttaaggattggaaagcggttcgtgtggatctggtgatcacgccattcgagcagttcgcctatgcgctgctcggttggacgggcagcggccaatttcgtcgcgatctgcgtcgctatgcggaggaagagcgcgacatgctgctcgacaaccatcgtctctacgacctgaaaaagggcatctttctgagtgcggatagcgaagaagagattttcggtcatctgggtctggattatctggagccgtgggaacgcaacgcg

SEQ ID NO: 3918 - protein, 394 aa, synthetic construct
  REGION 1..394: note = Variant of terminal deoxynucleotidyl transferase
MHHHHHHGGSGHPPSNTPEKEVPSVIARHVSPYACQRKTTLNNYNKKFTDALEIMAENYKFKENLQACLEAKRAASIFKSLPFEVTSMKDIQGLPCITDDVRDVIREIIEEGESSRVKEILNDERYKAFKQFTSVFGVGVKTSEKWYRMGLRTVEEAKASKSLKLSKMQKAGFLYYEDLASGVSKEEADAVTLIVKETVRTVVPDALVTLAGGFRRGKPMGHDVDFLITNPGRPEDDELLHKVVDLLKKQGLLLYEDIRESTFVEGQLPSPKIDALDNFQKCFAILKLYQPKVDNSAVGTSKKSDMAEVKDWKAVRVDLVITPFEQFAYALLGWTGSGQFRRDLRRYAEEERDMLLDNHRLYDLKKGIFLSADSEEEIFGHLGLDYLEPWERNA

SEQ ID NO: 3919 - DNA, 1182 bp, synthetic construct
  misc_feature 1..1182: note = Variant of terminal deoxynucleotidyl transferase
  source 1..1182: mol_type = other DNA
atgcatcaccaccatcatcatgggggttctggtcatccgccgagcaataccccggagaaggaggtgccgagcgttatcgcccgtcatgttagtcaatacgcgtgccagcgcaagaccacgctgaataactacaacaaaaagttcaccgacgcgctggagatcatggccgagaactacaaatttaaagagaacctgcaggcgtgtctggaagccaagcgcgccgcgagtatttttaaaagcctgccgttcgaggttaccagcatgaaagacatccaaggtctgccgtgcattaccgacgacgtacgtgatgtgatccgcgagatcatcgaagagggcgagagcagccgtgttaaagaaatcctcaatgacgagcgctacaaggcctttaagcagttcaccagcgtgttcggtgtgggcgtgaaaacctcggaaaagtggtaccgtatgggcctccgtacggttgaagaagcaaaggccagtaagagtctgaagctgagcaagatgcagaaggcgggcttcctgtattacgaggatctggcgagcggtgttagtaaagaagaagccgatgccgttacgctcatcgtgaaggaaacggtgcgtaccgttgtgccggatgcggaagtgaccctggccggcggtttccgccgtggcaaacctatgggccacgacgttgactttctgatcacgaacccgatccgtcctaccgatgacgagctgctccacaaagtggttgatctgctcaagaagcaaggtctgctgctgtacgaagacatccgtgagagcacgttcgtggaggggcaactgccaagtcctaaaattgacgccctggacaactttcagaagtgcttcgccattctcaagctgtaccagccgaaggtggataacagtgcggttgggacgagtaagaaaagtgacatggctgaggttaaggattggaaagcggttcgtgtggatctggtgatgacgccattcgagcagttcgcctatgcgctgctcggttggacgggcagcggccaatttcgtcgcgatctgcgtcgctatgcggaggaagagcgcgacatgctgctcgacaaccatcgtctctacgacctgaaaaagggccagtttctgagtgcggatagcgaagaagagattttcggtcatctgggtctggattatctggagccgtgggaacgcaacgcg

SEQ ID NO: 3920 - protein, 394 aa, synthetic construct
  REGION 1..394: note = Variant of terminal deoxynucleotidyl transferase
MHHHHHHGGSGHPPSNTPEKEVPSVIARHVSQYACQRKTTLNNYNKKFTDALEIMAENYKFKENLQACLEAKRAASIFKSLPFEVTSMKDIQGLPCITDDVRDVIREIIEEGESSRVKEILNDERYKAFKQFTSVFGVGVKTSEKWYRMGLRTVEEAKASKSLKLSKMQKAGFLYYEDLASGVSKEEADAVTLIVKETVRTVVPDAEVTLAGGFRRGKPMGHDVDFLITNPIRPTDDELLHKVVDLLKKQGLLLYEDIRESTFVEGQLPSPKIDALDNFQKCFAILKLYQPKVDNSAVGTSKKSDMAEVKDWKAVRVDLVMTPFEQFAYALLGWTGSGQFRRDLRRYAEEERDMLLDNHRLYDLKKGQFLSADSEEEIFGHLGLDYLEPWERNA

SEQ ID NO: 3921 - DNA, 1182 bp, synthetic construct
  misc_feature 1..1182: note = Variant of terminal deoxynucleotidyl transferase
  source 1..1182: mol_type = other DNA
atgcatcaccaccatcatcatgggggttctggtcatccgccgagcaataccccggagaaggaggtgccgagcgttatcgcccgtcatgttagtcagtacgcgtgccagcgcaagaccacgctgaataactacaacaaaaagttcaccgacgcgctggagatcatggccgagaactacaaatttaaagagaacctgcaggcgtgtctggaagccaagcgcgccgcgagtatttttaaaagcctgccgttcgaggttaccagcatgaaagacatccaaggtctgccgtgcattaccgacgacgtacgtgatgtgatcgaggagatcatcgaagagggcgagagcagccgtgttaaagaaatcctcaatgacgagcgctacaaggcctttaagcagttcaccagcgtgttcggtgtgggcgtgaaaacctcggaaaagtggtaccgtatgggcctccgtacggttgaagaagcaaaggccagtaagagtctgaagctgagcaagatgcagaaggcgggcttcctgtattacgaggatctggcgagcggtgttagtaaagaagaagccgatgccgttacgctcatcgtgaaggaaacggtgcgtaccgttgtgccggatgcgctggtgaccattgccggcggtttccgccgtggcaaacctatgggccacgacgttgactttctgatcacgaacccgaaccgtcctaccgatgacgagctgctccacaaagtggttgatctgctcaagaagcaaggtctgctgctgtacgaagacatccgtgagagcacgttcgtggaggggcaactgccaagtcctaaaatcgacgccctggacaactttcagaagtgcttcgccattctcaagctgtaccagccgaaggtggataacagtgcggttgggacgagtaagaaaagtgacatggctgaggttaaggattggaaagcggttcgtgtggatctggtgatcacgccattcgagcagttcgcctatgcgctgctcggttggacgggcagcggccaatttcgtcgcgatctgcgtcgctatgcggaggaagagcgcgacatgctgctcgacaaccatcgtctctacgacctgaaaaagggcatctttctgagtgcgggcagcgaagaagagattttcggtcatctgggtctggattatctggagccgtgggaacgcaacgcg

SEQ ID NO: 3922 - protein, 394 aa, synthetic construct
  REGION 1..394: note = Variant of terminal deoxynucleotidyl transferase
MHHHHHHGGSGHPPSNTPEKEVPSVIARHVSQYACQRKTTLNNYNKKFTDALEIMAENYKFKENLQACLEAKRAASIFKSLPFEVTSMKDIQGLPCITDDVRDVIEEIIEEGESSRVKEILNDERYKAFKQFTSVFGVGVKTSEKWYRMGLRTVEEAKASKSLKLSKMQKAGFLYYEDLASGVSKEEADAVTLIVKETVRTVVPDALVTIAGGFRRGKPMGHDVDFLITNPNRPTDDELLHKVVDLLKKQGLLLYEDIRESTFVEGQLPSPKIDALDNFQKCFAILKLYQPKVDNSAVGTSKKSDMAEVKDWKAVRVDLVITPFEQFAYALLGWTGSGQFRRDLRRYAEEERDMLLDNHRLYDLKKGIFLSAGSEEEIFGHLGLDYLEPWERNA

SEQ ID NO: 3923 - DNA, 1182 bp, synthetic construct
  misc_feature 1..1182: note = Variant of terminal deoxynucleotidyl transferase
  source 1..1182: mol_type = other DNA
atgcatcaccaccatcatcatgggggttctggtcatccgccgagcaataccccggagaaggaggtgccgagcgttatcgcccgtcatgttagtcagtacgcgtgccagcgcaagaccacgctgaataactacaacaaaaagttcaccgacgcgctggagatcatggccgagaactacaaatttaaagagaacctgcaggcgtgtctggaagccaagcgcgccgcgagtatttttaaaagcctgccgttcgaggttaccagcatgaaagacatccaaggtctgccgtgcattaccgacgacgtacgtgatgtgatcgaggagatcatcgaagagggcgagagcagccgtgttaaagaaatcctcaatgacgagcgctacaaggcctttaagcagttcaccagcgtgttcggtgtgggcgtgaaaacctcggaaaagtggtaccgtatgggcctccgtacggttgaagaagcaaaggccagtaagagtctgaagctgagcaagatgcagaaggcgggcttcctgtattacgaggatctggcgagcggtgttagtaaagaagaagccgatgccgttacgctcatcgtgaaggaaacggtgcgtaccgttgtgccggatgcgctggtgaccatcgccggcggtttccgccgtggcaaacctatgggccacgacgttgactttctgatcacgaacccgaaccgtcctaccgatgacgagctgctccacaaagtggttgatctgctcaagaagcaaggtctgctgctgtacgaagacatccgtgagagcacgttcgtggaggggcaactgccaagtcctaaacaagacgccctggacaactttcagaagtgcttcgccattctcaagctgtaccagccgaaggtggataacagtgcggttgggacgagtaagaaaagtgacatggctgaggttaaggattggaaagcggttcgtgtggatctggtgatcacgccattcgagcagttcgcctatgcgctgctcggttggacgggcagcggccaatttcgtcgcgatctgcgtcgctatgcggaggaagagcgcgacatgttgctcgacaaccatcgtctctacgacctgaaaaagggccagtttctgagtgcgggtagcgaagaagagattttcggtcatctgggtctggattatctggagccgtgggaacgcaacgcg

SEQ ID NO: 3924 - protein, 394 aa, synthetic construct
  REGION 1..394: note = Variant of terminal deoxynucleotidyl transferase
MHHHHHHGGSGHPPSNTPEKEVPSVIARHVSQYACQRKTTLNNYNKKFTDALEIMAENYKFKENLQACLEAKRAASIFKSLPFEVTSMKDIQGLPCITDDVRDVIEEIIEEGESSRVKEILNDERYKAFKQFTSVFGVGVKTSEKWYRMGLRTVEEAKASKSLKLSKMQKAGFLYYEDLASGVSKEEADAVTLIVKETVRTVVPDALVTIAGGFRRGKPMGHDVDFLITNPNRPTDDELLHKVVDLLKKQGLLLYEDIRESTFVEGQLPSPKQDALDNFQKCFAILKLYQPKVDNSAVGTSKKSDMAEVKDWKAVRVDLVITPFEQFAYALLGWTGSGQFRRDLRRYAEEERDMLLDNHRLYDLKKGQFLSAGSEEEIFGHLGLDYLEPWERNA

SEQ ID NO: 3925 - DNA, 1182 bp, synthetic construct
  misc_feature 1..1182: note = Variant of terminal deoxynucleotidyl transferase
  source 1..1182: mol_type = other DNA
atgcatcaccaccatcatcatgggggttctggtcatccgccgagcaataccccggagaaggaggtgccgagcgttatcgcccgtcatgttagtccatacgcgtgccagcgcaagaccacgctgaataactacaacaaaaagttcaccgacgcgctggagatcatggccgagaactacaaatttaaagagaacctgcaggcgtgtctggaagccaagcgcgccgcgagtatttttaaaagcctgccgttcgaggttaccagcatgaaagacatccaaggtctgccgtgcattaccgacgacgtacgtgacgtgatcgaggagatcatcgaagagggcgagagcagccgtgttaaagaaatcctcaatgacgagcgctacaaggcctttaagcagttcaccagcgtgttcggtgtgggcgtgaaaacctcggaaaagtggtaccgtatgggcctccgtacggttgaagaagcaaaggccagtaagagtctgaagctgagcaagatgcagaaggcgggcttcctgtattacgaggatctggcgagcggtgttagtaaagaagaagccgatgccgttacgctcatcgtgaaggaaacggtgcgtaccgttgtgccggatgcgctggtgaccattgccggcggtttccgccgtggcaaacctatgggccacgacgttgactttctgatcacgaacccgggccgtcctgaagatgacgagctgctccacaaagtggttgatctgctcaagaagcaaggtctgctgctgtacgaagacatccgtgagagcacgttcgtggaggggcaactgccaagtcctaaaattgacgccctggacaactttcagaagtgcttcgccattctcaagctgtaccagccgaaggtggataacagtgcggttgggacgagtaagaaaagtgacatggctgaggttaaggattggaaagcggttcgtgtggatctggtgatcacgccattcgagcagttcgcctatgcgctgctcggttggacgggcagcggccaatttcgtcgcgatctgcgtcgctatgcggaggaagagcgcgacatgctgctcgacaaccatcgtctctacgacctgaaaaagggcatctttctgagtgcgggcagcgaagaagagattttcggtcatctgggtctggattatctggagccgtgggaacgcaacgcg

SEQ ID NO: 3926 - protein, 394 aa, synthetic construct
  REGION 1..394: note = Variant of terminal deoxynucleotidyl transferase
MHHHHHHGGSGHPPSNTPEKEVPSVIARHVSPYACQRKTTLNNYNKKFTDALEIMAENYKFKENLQACLEAKRAASIFKSLPFEVTSMKDIQGLPCITDDVRDVIEEIIEEGESSRVKEILNDERYKAFKQFTSVFGVGVKTSEKWYRMGLRTVEEAKASKSLKLSKMQKAGFLYYEDLASGVSKEEADAVTLIVKETVRTVVPDALVTIAGGFRRGKPMGHDVDFLITNPGRPEDDELLHKVVDLLKKQGLLLYEDIRESTFVEGQLPSPKIDALDNFQKCFAILKLYQPKVDNSAVGTSKKSDMAEVKDWKAVRVDLVITPFEQFAYALLGWTGSGQFRRDLRRYAEEERDMLLDNHRLYDLKKGIFLSAGSEEEIFGHLGLDYLEPWERNA

SEQ ID NO: 3927 - DNA, 1182 bp, synthetic construct
  misc_feature 1..1182: note = Variant of terminal deoxynucleotidyl transferase
  source 1..1182: mol_type = other DNA
atgcatcaccaccatcatcatgggggttctggtcatccgccgagcaataccccggagaaggaggtgccgagcgttatcgcccgtcatgttagtcaatacgcgtgccagcgcaagaccacgctgaataactacaacaaaaagttcaccgacgcgctggagatcatggccgagaactacaaatttaaagagaacctgcaggcgtgtctggaagccaagcgcgccgcgagtatttttaaaagcctgccgttcgaggttaccagcatgaaagacatccaaggtctgccgtgcattaccgacgacgtacgtgatgtgatcgaggagatcatcgaagagggcgagagcagccgtgttaaagaaatcctcaatgacgagcgctacaaggcctttaagcagttcaccagcgtgttcggtgtgggcgtgaaaacctcggaaaagtggtaccgtatgggcctccgtacggttgaagaagcaaaggccagtaagagtctgaagctgagcaagatgcagaaggcgggcttcctgtattacgaggatctggcgagcggtgttagtaaagaagaagccgatgccgttacgctcatcgtgaaggaaacggtgcgtaccgttgtgccggatgcgctggtgaccatcgccggcggtttccgccgtggcaaacctatgggccacgacgttgactttctgatcacgaacccgggccgtcctgaagatgacgagctgctccacaaagtggttgatctgctcaagaagcaaggtctgctgctgtacgaagacatccgtgagagcacgttcgtggaggggcaactgccaagtcctaaaccagacgccctggacaactttcagaagtgcttcgccattctcaagctgtaccagccgaaggtggataacagtgcggttgggacgagtaagaaaagtgacatggctgaggttaaggattggaaagcggttcgtgtggatctggtgatcacgccattcgagcagttcgcctatgcgctgctcggttggacgggcagcggccaatttcgtcgcgatctgcgtcgctatgcggaggaagagcgcgacatgctgctcgacaaccatcgtctctacgacctgaaaaagggcatctttctgagtgcgggcagcgaagaagagattttcggtcatctgggtctggattatctggagccgtgggaacgcaacgcg

SEQ ID NO: 3928 - protein, 394 aa, synthetic construct
  REGION 1..394: note = Variant of terminal deoxynucleotidyl transferase
MHHHHHHGGSGHPPSNTPEKEVPSVIARHVSQYACQRKTTLNNYNKKFTDALEIMAENYKFKENLQACLEAKRAASIFKSLPFEVTSMKDIQGLPCITDDVRDVIEEIIEEGESSRVKEILNDERYKAFKQFTSVFGVGVKTSEKWYRMGLRTVEEAKASKSLKLSKMQKAGFLYYEDLASGVSKEEADAVTLIVKETVRTVVPDALVTIAGGFRRGKPMGHDVDFLITNPGRPEDDELLHKVVDLLKKQGLLLYEDIRESTFVEGQLPSPKPDALDNFQKCFAILKLYQPKVDNSAVGTSKKSDMAEVKDWKAVRVDLVITPFEQFAYALLGWTGSGQFRRDLRRYAEEERDMLLDNHRLYDLKKGIFLSAGSEEEIFGHLGLDYLEPWERNA

SEQ ID NO: 3929 - DNA, 1182 bp, synthetic construct
  misc_feature 1..1182: note = Variant of terminal deoxynucleotidyl transferase
  source 1..1182: mol_type = other DNA
atgcatcaccaccatcatcatgggggttctggtcatccgccgagtaataccccggagaaggaggtgccgagcgttatcgcccgtcatgttagtcagtacgcgtgccagcgcaagaccacgctgaataactacaacaaaaagttcaccgacgcgctggagatcatggccgagaactacaaatttaaagagaacctgcaggcgtgtctggaagccaagcgcgccgcgagtgtcctgaaaagcctgccgttcgaggttaccagcatgaaagacatccaaggtctgccgtgcattaccgacgacgtacgtgacgtgatcgaggagatcatcgaagagggcgagagcagccgtgttaaagaaatcctcaatgacgagcgctacaaggcctttaagcagttcaccagcgtgttcggtgtgggcgtgaaaacctcggaaaagtggtaccgtatgggcctccgtacggttgaagaagcaaaggccagtaagagtctgaagctgagcaagatgcagaaggcgggcttcctgtattacgaggatctggcgagcggtgttagtaaagaagaagccgatgccgttacgctcatcgtgaaggaaacggtgcgtctggttgtaccggatgcgctggtgaccatcgccggcggtttccgccgtggcaaacctatgggccacgacgttgacctgctgatcacgaatccgggccgtcctgaagatgacgagctgctccacaaagtggttgatctgctcaagaagcaaggtctgctgctgtacgaaacgatccgtgagagcacgttcgtggaggggcaactgccaagtcctaaaatcgacgccctggacaactttcagaagtgcttcgccattctcaagctgtaccagccgaaggtggataacagtgcggttgggacgagtaagaaaagtgacatggctgaggttaaggattggaaagcggttcgtgtggatctggtgatcacgccattcgagcagttcgcctatgcgctgctcggttggacgggcagcggcatctttcgtcgcgatctgcgtcgctatgcggaggaagagcgcgacatgctgctcgacaaccatcgtctctacgacctgaaaaagggcatctttctgagtgcgggcagcgaagaagagattttcggtcatctgggtctggattatctggagccgtgggaacgcaacgcg

SEQ ID NO: 3930 - protein, 394 aa, synthetic construct
  REGION 1..394: note = Variant of terminal deoxynucleotidyl transferase
MHHHHHHGGSGHPPSNTPEKEVPSVIARHVSQYACQRKTTLNNYNKKFTDALEIMAENYKFKENLQACLEAKRAASVLKSLPFEVTSMKDIQGLPCITDDVRDVIEEIIEEGESSRVKEILNDERYKAFKQFTSVFGVGVKTSEKWYRMGLRTVEEAKASKSLKLSKMQKAGFLYYEDLASGVSKEEADAVTLIVKETVRLVVPDALVTIAGGFRRGKPMGHDVDLLITNPGRPEDDELLHKVVDLLKKQGLLLYETIRESTFVEGQLPSPKIDALDNFQKCFAILKLYQPKVDNSAVGTSKKSDMAEVKDWKAVRVDLVITPFEQFAYALLGWTGSGIFRRDLRRYAEEERDMLLDNHRLYDLKKGIFLSAGSEEEIFGHLGLDYLEPWERNA

SEQ ID NO: 3931 - DNA, 1182 bp, synthetic construct
  misc_feature 1..1182: note = Variant of terminal deoxynucleotidyl transferase
  source 1..1182: mol_type = other DNA
atgcatcaccaccatcatcatgggggttctggtcatccgccgagcaataccccggagaaggaggtgccgagcgttatcgcccgtcatgttagtcagtacgcgtgccagcgcaagaccacgctgaataactacaacaaaaagttcaccgacgcgctggagatcatggccgagaactacaaatttaaagagaacctgcaggcgtgtctggaagccaagcgcgccgcgagtatttttaaaagcctgccgttcgaggttaccagcatgaaagacatccaaggtctgccgtgcattaccgacgacgtacgtgacgtgatcgaggagatcatcgaagagggcgagagcagccgtgttaaagaaatcctcaatgacgagcgctacaaggcctttaagcagttcaccagcgtgttcggtgtgggcgtgaaaacctcggaaaagtggtaccgtatgggcctccgtacggttgaagaagcaaaggccagtaagagtctgaagctgagcaagatgcagaaggcgggcttcctgtattacgaggatctggcgagcggtgttagtaaagaagaagccgatgccgttacgctcatcgtgaaggaaacggtggcgactgttgtaccggatgcgctggtgaccatcgccggcggtttccgccgtggcaaacctatgggccacgacgttgacttcctgatcacgattccgggccgtcctgaagatgacgagctgctccacaaagtggttgatctgctcaagaagcaaggtctgctgctgtacgaaacgatccgtgagagcacgttcgtggaggggcaactgccaagtcctaaaatcgacgccctggacaactttcagaagtgcttcgccattctcaagctgtaccagccgaaggtggataacagtgcggttgggacgagtaagaaaagtgacatggctgaggttaaggattggaaagcggttcgtgtggatctggtgatcacgccattcgagcagttcgcctatgcgctgctcggttggacgggcagcggccaatttcgtcgcgatctgcgtcgctatgcggaggaagagcgcgacatgctgctcgacaaccatcgtctctacgacctgaaaaagggcatctttctgagtgcgggcagcgaagaagagattttcggtcatctgggtctggattatctggagccgtgggaacgcaacgcg

SEQ ID NO: 3932 - protein, 394 aa, synthetic construct
  REGION 1..394: note = Variant of terminal deoxynucleotidyl transferase
MHHHHHHGGSGHPPSNTPEKEVPSVIARHVSQYACQRKTTLNNYNKKFTDALEIMAENYKFKENLQACLEAKRAASIFKSLPFEVTSMKDIQGLPCITDDVRDVIEEIIEEGESSRVKEILNDERYKAFKQFTSVFGVGVKTSEKWYRMGLRTVEEAKASKSLKLSKMQKAGFLYYEDLASGVSKEEADAVTLIVKETVATVVPDALVTIAGGFRRGKPMGHDVDFLITIPGRPEDDELLHKVVDLLKKQGLLLYETIRESTFVEGQLPSPKIDALDNFQKCFAILKLYQPKVDNSAVGTSKKSDMAEVKDWKAVRVDLVITPFEQFAYALLGWTGSGQFRRDLRRYAEEERDMLLDNHRLYDLKKGIFLSAGSEEEIFGHLGLDYLEPWERNA

SEQ ID NO: 3933 - DNA, 1182 bp, synthetic construct
  misc_feature 1..1182: note = Variant of terminal deoxynucleotidyl transferase
  source 1..1182: mol_type = other DNA
atgcatcaccaccatcatcatgggggttctggtcatccgccgagcaataccccggagaaggaggtgccgagcgttatcgcccgtcatgttagtccatacgcgtgccagcgcaagaccacgctgaataactacaacaaaaagttcaccgacgcgctggagatcatggccgagaactacaaatttaaagagaacctgcaggcgtgtctggaagccaagcgcgccgcgagtatttttaaaagcctgccgttcgaggttaccagcatgaaagacatccaaggtctgccgtgcattaccgacgacgtacgtcctgtgatcgaggagatcatcgaagagggcgagagcagccgtgttaaagaaatcctcaatgacgagcgctacaaggcctttaagcagttcaccagcgtgttcggtgtgggcgtgaaaacctcggaaaagtggtaccgtatgggcctccgtacggttgaagaagcaaaggccagtaagagtctgaagctgagcaagatgcagaaggcgggcttcctgtattacgaggatctggcgagcggtgttagtaaagaagaagccgatgccgttacgctcatcgtgaaggaaacggtgcgtaccgttgtgccggatgcggaagtgaccattgccggcggtttccgccgtggcaaacctatgggccacgacgttgactttctggtcacgaacccgatccgtcctgaggatgacgagctgctccacaaagtggttgatctgctcaagaagcaaggtctgctgctgtacgaagacatccgtgagagcacgttcgtggaggggcaactgccaagtcctaaaatcgacgccctggacaactttcagaagtgcttcgccattctcaagctgtaccagccgaaggtggataacagtgcggttgggacgagtaagaaaagtgacatggctgaggttaaggattggaaagcggttcgtgtggatctggtgatcacgccattcgagcagttcgcctatgcgctgctcggttggacgggcagcggccaatttcgtcgcgatctgcgtcgctatgcggaggaagagcgcgacatgctgctcgacaaccatcgtctctacgacctgaaaaagggcatctttctgagtgcggatagcgaagaagagattttcggtcatctgggtctggattatctggagccgtgggaacgcaacgcg

SEQ ID NO: 3934 - protein, 394 aa, synthetic construct
  REGION 1..394: note = Variant of terminal deoxynucleotidyl transferase
MHHHHHHGGSGHPPSNTPEKEVPSVIARHVSPYACQRKTTLNNYNKKFTDALEIMAENYKFKENLQACLEAKRAASIFKSLPFEVTSMKDIQGLPCITDDVRPVIEEIIEEGESSRVKEILNDERYKAFKQFTSVFGVGVKTSEKWYRMGLRTVEEAKASKSLKLSKMQKAGFLYYEDLASGVSKEEADAVTLIVKETVRTVVPDAEVTIAGGFRRGKPMGHDVDFLVTNPIRPEDDELLHKVVDLLKKQGLLLYEDIRESTFVEGQLPSPKIDALDNFQKCFAILKLYQPKVDNSAVGTSKKSDMAEVKDWKAVRVDLVITPFEQFAYALLGWTGSGQFRRDLRRYAEEERDMLLDNHRLYDLKKGIFLSADSEEEIFGHLGLDYLEPWERNA

SEQ ID NO: 3935 - DNA, 1182 bp, synthetic construct
  misc_feature 1..1182: note = Variant of terminal deoxynucleotidyl transferase
  source 1..1182: mol_type = other DNA
atgcatcaccaccatcatcatgggggttctggtcatccgccgagtaataccccggagaaggaggtgccgagcgttatcgcccgtcatgttagtcagtacgcgtgccagcgcaagaccacgctgaataactacaacaaaaagttcaccgacgcgctggagatcatggccgagaactacaaatttaaagagaacctgcaggcgtgtctggaagccaagcgcgccgcgagtatcttcaaaagcctgccgttcgaggttaccagcatgaaagacatccaaggtctgccgtgcattaccgacgacgtacgtgacgtgatcgaggagatcatcgaagagggcgagagcagccgtgttaaagaaatcctcaatgacgagcgctacaaggcctttaagcagttcaccagcgtgttcggtgtgggcgtgaaaacctcggaaaagtggtaccgtatgggcctccgtacggttgaagaagcaaaggccagtaagagtctgaagctgagcaagatgcagaaggcgggcttcctgtattacgaggatctggcgagcggtgttagtaaagaagaagccgatgccgttacgctcatcgtgaaggaaacggtgcgtctggttgtaccggatgcgctggtgaccatcgccggcggtttccgccgtggcaaacctatgggccacgacgttgacttcctgatcacgccgccgggccgtcctgaagatgacgagctgctccacaaagtggttgatctgctcaagaagcaaggtctgctgctgtacgaaacgatccgtgagagcacgttcgtggaggggcaactgccaagtcctaaaatcgacgccctggacaactttcagaagtgcttcgccattctcaagctgtaccagccgaaggtggataacagtgcggttgggacgagtaagaaaagtgacatggctgaggttaaggattggaaagcggttcgtgtggatctggtgatcacgccattcgagcagttcgcctatgcgctgctcggttggacgggcagcggccaatttcgtcgcgatctgcgtcgctatgcggaggaagagcgcgacatgctgctcgacaaccatcgtctctacgacctgaaaaagggcatctttctgagtgcgggcagcgaagaagagattttcggtcatctgggtctggattatctggagccgtgggaacgcaacgcg

SEQ ID NO: 3936 - protein, 394 aa, synthetic construct
  REGION 1..394: note = Variant of terminal deoxynucleotidyl transferase
MHHHHHHGGSGHPPSNTPEKEVPSVIARHVSQYACQRKTTLNNYNKKFTDALEIMAENYKFKENLQACLEAKRAASIFKSLPFEVTSMKDIQGLPCITDDVRDVIEEIIEEGESSRVKEILNDERYKAFKQFTSVFGVGVKTSEKWYRMGLRTVEEAKASKSLKLSKMQKAGFLYYEDLASGVSKEEADAVTLIVKETVRLVVPDALVTIAGGFRRGKPMGHDVDFLITPPGRPEDDELLHKVVDLLKKQGLLLYETIRESTFVEGQLPSPKIDALDNFQKCFAILKLYQPKVDNSAVGTSKKSDMAEVKDWKAVRVDLVITPFEQFAYALLGWTGSGQFRRDLRRYAEEERDMLLDNHRLYDLKKGIFLSAGSEEEIFGHLGLDYLEPWERNA

SEQ ID NO: 3937 - DNA, 1182 bp, synthetic construct
  misc_feature 1..1182: note = Variant of terminal deoxynucleotidyl transferase
  source 1..1182: mol_type = other DNA
atgcatcaccaccatcatcatgggggttctggtcatccgccgagcaataccccggagaaggaggtgccgagcgttatcgcccgtcatgttagtcaatacgcgtgccagcgcaagaccacgctgaataactacaacaaaaagttcaccgacgcgctggagatcatggccgagaactacaaatttaaagagaacctgcaggcgtgtctggaagccaagcgcgccgcgagtatttttaaaagcctgccgttcgaggttaccagcatgaaagacatccaaggtctgccgtgcattaccgacgacgtacgtgacgtgatcgaggagatcatcgaagagggcgagagcagccgtgttaaagaaatcctcaatgacgagcgctacaaggcctttaagcagttcaccagcgtgttcggtgtgggcgtgaaaacctcggaaaagtggtaccgtatgggcctccgtacggttgaagaagcaaaggccagtaagagtctgaagctgagcaagatgcagaaggcgggcttcctgtattacgaggatctggcgagcggtgttagtaaagaagaagccgatgccgttacgctcatcgtgaaggaaacggtgcgtaccgttgtgccggatgcggaagtgaccattgccggcggtttccgccgtggcaaacctatgggccacgacgttgactttctgatcacgaacccgggccgtcctgaagatgacgagctgctccacaaagtggttgatctgctcaagaagcaaggtctgctgctgtacgaagacatccgtgagagcacgttcgtggaggggcaactgccaagtcctaaaatcgacgccctggacaactttcagaagtgcttcgccattctcaagctgtaccagccgaaggtggataacagtgcggttgggacgagtaagaaaagtgacatggctgaggttaaggattggaaagcggttcgtgtggatctggtgatcacgccattcgagcagttcgcctatgcgctgctcggttggacgggcagcggccaatttcgtcgcgatctgcgtcgctatgcggaggaagagcgcgacatgctgctcgacaaccatcgtctctacgacctgaaaaagggccagtttctgagtgcggatagcgaagaagagattttcggtcatctgggtctggattatctggagccgtgggaacgcaacgcg

SEQ ID NO: 3938 - protein, 394 aa, synthetic construct
  REGION 1..394: note = Variant of terminal deoxynucleotidyl transferase
MHHHHHHGGSGHPPSNTPEKEVPSVIARHVSQYACQRKTTLNNYNKKFTDALEIMAENYKFKENLQACLEAKRAASIFKSLPFEVTSMKDIQGLPCITDDVRDVIEEIIEEGESSRVKEILNDERYKAFKQFTSVFGVGVKTSEKWYRMGLRTVEEAKASKSLKLSKMQKAGFLYYEDLASGVSKEEADAVTLIVKETVRTVVPDAEVTIAGGFRRGKPMGHDVDFLITNPGRPEDDELLHKVVDLLKKQGLLLYEDIRESTFVEGQLPSPKIDALDNFQKCFAILKLYQPKVDNSAVGTSKKSDMAEVKDWKAVRVDLVITPFEQFAYALLGWTGSGQFRRDLRRYAEEERDMLLDNHRLYDLKKGQFLSADSEEEIFGHLGLDYLEPWERNA

SEQ ID NO: 3939 - DNA, 1182 bp, synthetic construct
  misc_feature 1..1182: note = Variant of terminal deoxynucleotidyl transferase
  source 1..1182: mol_type = other DNA
atgcatcaccaccatcatcatgggggttctggtcatccgccgagtaataccccggagaaggaggtgccgagcgttatcgcccgtcatgttagtcagtacgcgtgccagcgcaagaccacgctgaataactacaacaaaaagttcaccgacgcgctggagatcatggccgagaactacaaatttaaagagaacctgcaggcgtgtctggaagccaagcgcgccgcgagtatcttcaaaagcctgccgttcgaggttaccagcatgaaagacatccaaggtctgccgtgcattaccgacgacgtacgtgacgtgatcgaggagatcatcgaagagggcgagagcagccgtgttaaagaaatcctcaatgacgagcgctacaaggcctttaagcagttcaccagcgtgttcggtgtgggcgtgaaaacctcggaaaagtggtaccgtatgggcctccgtacggttgaagaagcaaaggccagtaagagtctgaagctgagcaagatgcagaaggcgggcttcctgtattacgaggatctggcgagcggtgttagtaaagaagaagccgatgccgttacgctcatcgtgaaggaaacggtgcgtctggttagtccggatgcgctggtgaccatcgccggcggtttccgccgtggcaaacctatgggccacgacgttgactttctgatcacgaacccgggccgtcctgaagatgacgagctgctccacaaagtggttgatctgctcaagaagcaaggtctgctgctgtacgaagatatccgtgagagcacgttcgtggaggggcaactgccaagtcctaaaatcgacgccctggacaactttcagaagtgcttcgccattctcaagctgtaccagccgaaggtggataacagtgcggttgggacgagtaagaaaagtgacatggctgaggttaaggattggaaagcggttcgtgtggatctggtgatcacgccattcgagcagttcgcctatgcgctgctcggttggacgggcagcggccaatttcgtcgcgatctgcgtcgctatgcggaggaagagcgcgacatgctgctcgacaaccatcgtctctacgacctgaaaaagggcatctttctgagtgcgggcagcgaagaagagattttcggtcatctgggtctggattatctggagccgtgggaacgcaacgcg

SEQ ID NO: 3940 - protein, 394 aa, synthetic construct
  REGION 1..394: note = Variant of terminal deoxynucleotidyl transferase
MHHHHHHGGSGHPPSNTPEKEVPSVIARHVSQYACQRKTTLNNYNKKFTDALEIMAENYKFKENLQACLEAKRAASIFKSLPFEVTSMKDIQGLPCITDDVRDVIEEIIEEGESSRVKEILNDERYKAFKQFTSVFGVGVKTSEKWYRMGLRTVEEAKASKSLKLSKMQKAGFLYYEDLASGVSKEEADAVTLIVKETVRLVSPDALVTIAGGFRRGKPMGHDVDFLITNPGRPEDDELLHKVVDLLKKQGLLLYEDIRESTFVEGQLPSPKIDALDNFQKCFAILKLYQPKVDNSAVGTSKKSDMAEVKDWKAVRVDLVITPFEQFAYALLGWTGSGQFRRDLRRYAEEERDMLLDNHRLYDLKKGIFLSAGSEEEIFGHLGLDYLEPWERNA

SEQ ID NO: 3941 - DNA, 1182 bp, synthetic construct
  misc_feature 1..1182: note = Variant of terminal deoxynucleotidyl transferase
  source 1..1182: mol_type = other DNA
atgcatcaccaccatcatcatgggggttctggtcatccggaaagtaataccccggagaaggaggtgccgagcgttatcgcccgtcatgttagtcagtacgcgtgccagcgcaagaccacgctgaataactacaacaaaaagttcaccgacgcgctggagatcatggccgagaactacaaatttaaagagaacctgcaggcgtgtctggaagccaagcgcgccgcgagtatcctgaaaagcctgccgttcgaggttaccagcatgaaagacatccaaggtctgccgtgcattaccgacgacgtacgtgacgtgatcgaggagatcatcgaagagggcgagagcagccgtgttaaagaaatcctcaatgacgagcgctacaaggcctttaagcagttcaccagcgtgttcggtgtgggcgtgaaaacctcggaaaagtggtaccgtatgggcctccgtacggttgaagaagcaaaggccagtaagagtctgaagctgagcaagatgcagaaggcgggcttcctgtattacgaggatctggcgagcggtgttagtaaagaagaagccgatgccgttacgctcatcgtgaaggaaacggtggcgctggttgtaccggatgcgctggtgaccatcgccggcggtttccgccgtggcaaacctatgggccacgacgttgactttctgatcacgaacccgggccgtcctgaagatgacgagctgctccacaaagtggttgatctgctcaagaagcaaggtctgctgctgtacgaagacatccgtgagagcacgttcgtggaggggcaactgccaagtcctaaaatcgacgccctggacaactttcagaagtgcttcgccattctcaagctgtaccagccgaaggtggataacagtgcggttgggacgagtaagaaaagtgacatggctgaggttaaggattggaaagcggttcgtgtggatctggtgatcacgccattcgagcagttcgcctatgcgctgctcggttggacgggcagcggcatctttcgtcgcgatctgcgtcgctatgcggaggaagagcgcgacatgctgctcgacaaccatcgtctctacgacctgaaaaagggcatctttctgagtgcgggcagcgaagaagagattttcggtcatctgggtctggattatctggagccgtgggaacgcaacgcg

SEQ ID NO: 3942 - protein, 394 aa, synthetic construct
  REGION 1..394: note = Variant of terminal deoxynucleotidyl transferase
MHHHHHHGGSGHPESNTPEKEVPSVIARHVSQYACQRKTTLNNYNKKFTDALEIMAENYKFKENLQACLEAKRAASILKSLPFEVTSMKDIQGLPCITDDVRDVIEEIIEEGESSRVKEILNDERYKAFKQFTSVFGVGVKTSEKWYRMGLRTVEEAKASKSLKLSKMQKAGFLYYEDLASGVSKEEADAVTLIVKETVALVVPDALVTIAGGFRRGKPMGHDVDFLITNPGRPEDDELLHKVVDLLKKQGLLLYEDIRESTFVEGQLPSPKIDALDNFQKCFAILKLYQPKVDNSAVGTSKKSDMAEVKDWKAVRVDLVITPFEQFAYALLGWTGSGIFRRDLRRYAEEERDMLLDNHRLYDLKKGIFLSAGSEEEIFGHLGLDYLEPWERNA

SEQ ID NO: 3943 - DNA, 1182 bp, synthetic construct
  misc_feature 1..1182: note = Variant of terminal deoxynucleotidyl transferase
  source 1..1182: mol_type = other DNA
atgcatcaccaccatcatcatgggggttctggtcatccgccgagcaataccccggagaaggaggtgccgagcgttatcgcccgtcatgttagtcagtacgcgtgccagcgcaagaccacgctgaataactacaacaaaaagttcaccgacgcgctggagatcatggccgagaactacaaatttaaagagaacctgcaggcgtgtctggaagccaagcgcgccgcgagtatttttaaaagcctgccgttcgaggttaccagcatgaaagacatccaaggtctgccgtgcattaccgacgacgtacgtgacgtgatcgaggagatcatcgaagagggcgagagcagccgtgttaaagaaatcctcaatgacgagcgctacaaggcctttaagcagttcaccagcgtgttcggtgtgggcgtgaaaacctcggaaaagtggtaccgtatgggcctccgtacggttgaagaagcaaaggccagtaagagtctgaagctgagcaagatgcagaaggcgggcttcctgtattacgaggatctggcgagcggtgttagtaaagaagaagccgatgccgttacgctcatcgtgaaggaaacggtgcgtctggttgtaccggatgcgctggtgaccatcgccggcggtttccgccgtggcaaacctatgggccacgacgttgactttctgatcacgaacccgggccgtcctgaagatgacgagctgctccacaaagtggttgatctgctcaagaagcaaggtctgctgctgtacgaagacatccgtgagagcacgttcgtggaggggcaactgccaagtcctaaaatcgacgccctggacaactttcagaagtgcttcgccattctcaagctgtaccagccgaaggtggataacagtgcggttgggacgagtaagaaaagtgacatggctgaggttaaggattggaaagcggttcgtgtggatctggtgatcacgccattcgagcagttcgcctatgcgctgctcggttggacgggcagcggccaatttcgtcgcgatctgcgtcgctatgcggaggaagagcgcgacatgctgctcgacaaccatcgtctctacgacctgaaaaagggcatctttctgagtgcgggcagcgaagaagagattttcggtcatctgggtctggattatctggagccgtgggaacgcaacgcg

SEQ ID NO: 3944 - protein, 394 aa, synthetic construct
  REGION 1..394: note = Variant of terminal deoxynucleotidyl transferase
MHHHHHHGGSGHPPSNTPEKEVPSVIARHVSQYACQRKTTLNNYNKKFTDALEIMAENYKFKENLQACLEAKRAASIFKSLPFEVTSMKDIQGLPCITDDVRDVIEEIIEEGESSRVKEILNDERYKAFKQFTSVFGVGVKTSEKWYRMGLRTVEEAKASKSLKLSKMQKAGFLYYEDLASGVSKEEADAVTLIVKETVRLVVPDALVTIAGGFRRGKPMGHDVDFLITNPGRPEDDELLHKVVDLLKKQGLLLYEDIRESTFVEGQLPSPKIDALDNFQKCFAILKLYQPKVDNSAVGTSKKSDMAEVKDWKAVRVDLVITPFEQFAYALLGWTGSGQFRRDLRRYAEEERDMLLDNHRLYDLKKGIFLSAGSEEEIFGHLGLDYLEPWERNA

SEQ ID NO: 3945 - DNA, 1182 bp, synthetic construct
  misc_feature 1..1182: note = Variant of terminal deoxynucleotidyl transferase
  source 1..1182: mol_type = other DNA
atgcatcaccaccatcatcatgggggttctggtcatccgccgagcaataccccggagaaggaggtgccgagcgttatcgcccgtcatgttagtcagtacgcgtgccagcgcaagaccacgctgaataactacaacaaaaagttcaccgacgcgctggagatcatggccgagaactacaaatttaaagagaacctgcaggcgtgtctggaagccaagcgcgccgcgagtatttttaaaagcctgccgttcgaggttaccagcatgaaagacatccaaggtctgccgtgcattaccgacgacgtacgtgatgtgatccgcgagatcatcgaagagggcgagagcagccgtgttaaagaaatcctcaatgacgagcgctacaaggcctttaagcagttcaccagcgtgttcggtgtgggcgtgaaaacctcggaaaagtggtaccgtatgggcctccgtacggttgaagaagcaaaggccagtaagagtctgaagctgagcaagatgcagaaggcgggcttcctgtattacgaggatctggcgagcggtgttagtaaagaagaagccgatgccgttacgctcatcgtgaaggaaacggtgcgtaccgttgtgccggatgcgctggtgaccatcgccggcggtttccgccgtggcaaacctatgggccacgacgttgactttctgatcacgaacccgggccgtcctgaagatgacgagctgctccacaaagtggttgatctgctcaagaagcaaggtctgctgctgtacgaagacatccgtgagagcacgttcgtggaggggcaactgccaagtcctaaaattgacgccctggacaactttcagaagtgcttcgccattctcaagctgtaccagccgaaggtggataacagtgcggttgggacgagtaagaaaagtgacatggctgaggttaaggattggaaagcggttcgtgtggatctggtgatcacgccattcgagcagttcgcctatgcgctgctcggttggacgggcagcggccaatttcgtcgcgatctgcgtcgctatgcggaggaagagcgcgacatgctgctcgacaaccatcgtctctacgacctgaaaaagggcatctttctgagtgcgggcagcgaagaagagattttcggtcatctgggtctggattatctggagccgtgggaacgcaacgcg

SEQ ID NO: 3946 - protein, 394 aa, synthetic construct
  REGION 1..394: note = Variant of terminal deoxynucleotidyl transferase
MHHHHHHGGSGHPPSNTPEKEVPSVIARHVSQYACQRKTTLNNYNKKFTDALEIMAENYKFKENLQACLEAKRAASIFKSLPFEVTSMKDIQGLPCITDDVRDVIREIIEEGESSRVKEILNDERYKAFKQFTSVFGVGVKTSEKWYRMGLRTVEEAKASKSLKLSKMQKAGFLYYEDLASGVSKEEADAVTLIVKETVRTVVPDALVTIAGGFRRGKPMGHDVDFLITNPGRPEDDELLHKVVDLLKKQGLLLYEDIRESTFVEGQLPSPKIDALDNFQKCFAILKLYQPKVDNSAVGTSKKSDMAEVKDWKAVRVDLVITPFEQFAYALLGWTGSGQFRRDLRRYAEEERDMLLDNHRLYDLKKGIFLSAGSEEEIFGHLGLDYLEPWERNA

SEQ ID NO: 3947 - DNA, 1182 bp, synthetic construct
  misc_feature 1..1182: note = Variant of terminal deoxynucleotidyl transferase
  source 1..1182: mol_type = other DNA
atgcatcaccaccatcatcatgggggttctggtcatccgccgagtaataccccggagaaggaggtgccgagcgttatcgcccgtcatgttagtcagtacgcgtgccagcgcaagaccacgctgaataactacaacaaaaagttcaccgacgcgctggagatcatggccgagaactacaaatttaaagagaacctgcaggcgtgtctggaagccaagcgcgccgcgagtatcttcaaaagcctgccgttcgaggttaccagcatgaaagacatccaaggtctgccgtgcattaccgacgacgtacgtgacgtgatcgaggagatcatcgaagagggcgagagcagccgtgttaaagaaatcctcaatgacgagcgctacaaggcctttaagcagttcaccagcgtgttcggtgtgggcgtgaaaacctcggaaaagtggtaccgtatgggcctccgtacggttgaagaagcaaaggccagtaagagtctgaagctgagcaagatgcagaaggcgggcttcctgtattacgaggatctggcgagcggtgttagtaaagaagaagccgatgccgttacgctcatcgtgaaggaaacggtggcgactgttgtaccggatgcgctggtgaccatcgccggcggtttccgccgtggcaaacctatgggccacgacgttgactttctgatcacgaacccgggccgtcctgaagatgacgagctgctccacaaagtggttgatctgctcaagaagcaaggtctgctgctgtacgaagacatccgtgagagcacgttcgtggaggggcaactgccaagtcctaaaatcgacgccctggacaactttcagaagtgcttcgccattctcaagctgtaccagccgaaggtggataacagtgcggttgggacgagtaagaaaagtgacatggctgaggttaaggattggaaagcggttcgtgtggatctggtgatcacgccattcgagcagttcgcctatgcgctgctcggttggacgggcagcggccaatttcgtcgcgatctgcgtcgctatgcggaggaagagcgcgacatgctgctcgacaaccatcgtctctacgacctgaaaaagggcatctttctgagtgcgggcagcgaagaagagattttcggtcatctgggtctggattatctggagccgtgggaacgcaacgcg

SEQ ID NO: 3948 - protein, 394 aa, synthetic construct
  REGION 1..394: note = Variant of terminal deoxynucleotidyl transferase
MHHHHHHGGSGHPPSNTPEKEVPSVIARHVSQYACQRKTTLNNYNKKFTDALEIMAENYKFKENLQACLEAKRAASIFKSLPFEVTSMKDIQGLPCITDDVRDVIEEIIEEGESSRVKEILNDERYKAFKQFTSVFGVGVKTSEKWYRMGLRTVEEAKASKSLKLSKMQKAGFLYYEDLASGVSKEEADAVTLIVKETVATVVPDALVTIAGGFRRGKPMGHDVDFLITNPGRPEDDELLHKVVDLLKKQGLLLYEDIRESTFVEGQLPSPKIDALDNFQKCFAILKLYQPKVDNSAVGTSKKSDMAEVKDWKAVRVDLVITPFEQFAYALLGWTGSGQFRRDLRRYAEEERDMLLDNHRLYDLKKGIFLSAGSEEEIFGHLGLDYLEPWERNA

SEQ ID NO: 3949 - DNA, 1182 bp, synthetic construct
  misc_feature 1..1182: note = Variant of terminal deoxynucleotidyl transferase
  source 1..1182: mol_type = other DNA
atgcatcaccaccatcatcatgggggttctggtcatccgccgagcaataccccggagaaggaggtgccgagcgttatcgcccgtcatgttagtccatacgcgtgccagcgcaagaccacgctgaataactacaacaaaaagttcaccgacgcgctggagatcatggccgagaactacaaatttaaagagaacctgcaggcgtgtctggaagccaagcgcgccgcgagtatttttaaaagcctgccgttcgaggttaccagcatgaaagacatccaaggtctgccgtgcattaccgacgacgtacgtgacgtgatcgaggagatcatcgaagagggcgagagcagccgtgttaaagaaatcctcaatgacgagcgctacaaggcctttaagcagttcaccagcgtgttcggtgtgggcgtgaaaacctcggaaaagtggtaccgtatgggcctccgtacggttgaagaagcaaaggccagtaagagtctgaagctgagcaagatgcagaaggcgggcttcctgtattacgaggatctggcgagcggtgttagtaaagaagaagccgatgccgttacgctcatcgtgaaggaaacggtgcgtaccgttgtgccggatgcgctggtgaccctggccggcggtttccgccgtggcaaacctatgggccacgacgttgactttctgatcacgaacccgatccgtcctgaggatgacgagctgctccacaaagtggttgatctgctcaagaagcaaggtctgctgctgtacgaagacatccgtgagagcacgttcgtggaggggcaactgccaagtcctaaaccagacgccctggacaactttcagaagtgcttcgccattctcaagctgtaccagccgaaggtggataacagtgcggttgggacgagtaagaaaagtgacatggctgaggttaaggattggaaagcggttcgtgtggatctggtgatgacgccattcgagcagttcgcctatgcgctgctcggttggacgggcagcggccaatttcgtcgcgatctgcgtcgctatgcggaggaagagcgcgacatgctgctcgacaaccatcgtctctacgacctgaaaaagggcatctttctgagtgcgggcagcgaagaagagattttcggtcatctgggtctggattatctggagccgtgggaacgcaacgcg

SEQ ID NO: 3950 - protein, 394 aa, synthetic construct
  REGION 1..394: note = Variant of terminal deoxynucleotidyl transferase
MHHHHHHGGSGHPPSNTPEKEVPSVIARHVSPYACQRKTTLNNYNKKFTDALEIMAENYKFKENLQACLEAKRAASIFKSLPFEVTSMKDIQGLPCITDDVRDVIEEIIEEGESSRVKEILNDERYKAFKQFTSVFGVGVKTSEKWYRMGLRTVEEAKASKSLKLSKMQKAGFLYYEDLASGVSKEEADAVTLIVKETVRTVVPDALVTLAGGFRRGKPMGHDVDFLITNPIRPEDDELLHKVVDLLKKQGLLLYEDIRESTFVEGQLPSPKPDALDNFQKCFAILKLYQPKVDNSAVGTSKKSDMAEVKDWKAVRVDLVMTPFEQFAYALLGWTGSGQFRRDLRRYAEEERDMLLDNHRLYDLKKGIFLSAGSEEEIFGHLGLDYLEPWERNA

SEQ ID NO: 3951 - DNA, 1182 bp, synthetic construct; identical to SEQ ID NO: 3835
  misc_feature 1..1182: note = Variant of terminal deoxynucleotidyl transferase
  source 1..1182: mol_type = other DNA

SEQ ID NO: 3952 - protein, 394 aa, synthetic construct; identical to SEQ ID NO: 3836
  REGION 1..394: note = Variant of terminal deoxynucleotidyl transferase

SEQ ID NO: 3953 - DNA, 1182 bp, synthetic construct
  misc_feature 1..1182: note = Variant of terminal deoxynucleotidyl transferase
  source 1..1182: mol_type = other DNA
atgcatcaccaccatcatcatgggggttctggtcatccgccgagcaataccccggagaaggaggtgccgagcgttatcgcccgtcatgttagtccatacgcgtgccagcgcaagaccacgctgaataactacaacaaaaagttcaccgacgcgctggagatcatggccgagaactacaaatttaaagagaacctgcaggcgtgtctggaagccaagcgcgccgcgagtatttttaaaagcctgccgttcgaggttaccagcatgaaagacatccaaggtctgccgtgcattaccgacgacgtacgtgatgtgatcgaggagatcatcgaagagggcgagagcagccgtgttaaagaaatcctcaatgacgagcgctacaaggcctttaagcagttcaccagcgtgttcggtgtgggcgtgaaaacctcggaaaagtggtaccgtatgggcctccgtacggttgaagaagcaaaggccagtaagagtctgaagctgagcaagatgcagaaggcgggcttcctgtattacgaggatctggcgagcggtgttagtaaagaagaagccgatgccgttacgctcatcgtgaaggaaacggtgcgtaccgttgtgccggatgcgctggtgaccctggccggcggtttccgccgtggcaaacctatgggccacgacgttgactttctgatcacgaacccgaaccgtcctgaggatgacgagctgctccacaaagtggttgatctgctcaagaagcaaggtctgctgctgtacgaagacatccgtgagagcacgttcgtggaggggcaactgccaagtcctaaacaagacgccctggacaactttcagaagtgcttcgccattctcaagctgtaccagccgaaggtggataacagtgcggttgggacgagtaagaaaagtgacatggctgaggttaaggattggaaagcggttcgtgtggatctggtgatcacgccattcgagcagttcgcctatgcgctgctcggttggacgggcagcggccaatttcgtcgcgatctgcgtcgctatgcggaggaagagcgcgacatgctgctcgacaaccatcgtctctacgacctgaaaaagggccagtttctgagtgcggatagcgaagaagagattttcggtcatctgggtctggattatctggagccgtgggaacgcaacgcg

SEQ ID NO: 3954 - protein, 394 aa, synthetic construct
  REGION 1..394: note = Variant of terminal deoxynucleotidyl transferase
MHHHHHHGGSGHPPSNTPEKEVPSVIARHVSPYACQRKTTLNNYNKKFTDALEIMAENYKFKENLQACLEAKRAASIFKSLPFEVTSMKDIQGLPCITDDVRDVIEEIIEEGESSRVKEILNDERYKAFKQFTSVFGVGVKTSEKWYRMGLRTVEEAKASKSLKLSKMQKAGFLYYEDLASGVSKEEADAVTLIVKETVRTVVPDALVTLAGGFRRGKPMGHDVDFLITNPNRPEDDELLHKVVDLLKKQGLLLYEDIRESTFVEGQLPSPKQDALDNFQKCFAILKLYQPKVDNSAVGTSKKSDMAEVKDWKAVRVDLVITPFEQFAYALLGWTGSGQFRRDLRRYAEEERDMLLDNHRLYDLKKGQFLSADSEEEIFGHLGLDYLEPWERNA

SEQ ID NO: 3955 - DNA, 1182 bp, synthetic construct
  misc_feature 1..1182: note = Variant of terminal deoxynucleotidyl transferase
  source 1..1182: mol_type = other DNA
atgcatcaccaccatcatcatgggggttctggtcatccgccgagcaataccccggagaaggaggtgccgagcgttatcgcccgtcatgttagtccatacgcgtgccagcgcaagaccacgctgaataactacaacaaaaagttcaccgacgcgctggagatcatggccgagaactacaaatttaaagagaacctgcaggcgtgtctggaagccaagcgcgccgcgagtatttttaaaagcctgccgttcgaggttaccagcatgaaagacatccaaggtctgccgtgcattaccgacgacgtacgtgatgtgatcgaggagatcatcgaagagggcgagagcagccgtgttaaagaaatcctcaatgacgagcgctacaaggcctttaagcagttcaccagcgtgttcggtgtgggcgtgaaaacctcggaaaagtggtaccgtatgggcctccgtacggttgaagaagcaaaggccagtaagagtctgaagctgagcaagatgcagaaggcgggcttcctgtattacgaggatctggcgagcggtgttagtaaagaagaagccgatgccgttacgctcatcgtgaaggaaacggtgcgtaccgttgtgccggatgcgctggtgaccattgccggcggtttccgccgtggcaaacctatgggccacgacgttgactttctgatcacgaacccgggccgtcctgaagatgacgagctgctccacaaagtggttgatctgctcaagaagcaaggtctgctgctgtacgaagacatccgtgagagcacgttcgtggaggggcaactgccaagtcctaaaatcgacgccctggacaactttcagaagtgcttcgccattctcaagctgtaccagccgaaggtggataacagtgcggttgggacgagtaagaaaagtgacatggctgaggttaaggattggaaagcggttcgtgtggatctggtgatcacgccattcgagcagttcgcctatgcgctgctcggttggacgggcagcggccaatttcgtcgcgatctgcgtcgctatgcggaggaagagcgcgacatgctgctcgacaaccatcgtctctacgacctgaaaaagggcatctttctgagtgcgggcagcgaagaagagattttcggtcatctgggtctggattatctggagccgtgggaacgcaacgcg

SEQ ID NO: 3956 - protein, 394 aa, synthetic construct; identical to SEQ ID NO: 3926
  REGION 1..394: note = Variant of terminal deoxynucleotidyl transferase

SEQ ID NO: 3957 - DNA, 1182 bp, synthetic construct
  misc_feature 1..1182: note = Variant of terminal deoxynucleotidyl transferase
  source 1..1182: mol_type = other DNA
atgcatcaccaccatcatcatgggggttctggtcatccgccgagcaataccccggagaaggaggtgccgagcgttatcgcccgtcatgttagtcagtacgcgtgccagcgcaagaccacgctgaataactacaacaaaaagttcaccgacgcgctggagatcatggccgagaactacaaatttaaagagaacctgcaggcgtgtctggaagccaagcgcgccgcgagtatttttaaaagcctgccgttcgaggttaccagcatgaaagacatccaaggtctgccgtgcattaccgacgacgtacgtgacgtgatcgaggagatcatcgaagagggcgagagcagccgtgttaaagaaatcctcaatgacgagcgctacaaggcctttaagcagttcaccagcgtgttcggtgtgggcgtgaaaacctcggaaaagtggtaccgtatgggcctccgtacggttgaagaagcaaaggccagtaagagtctgaagctgagcaagatgcagaaggcgggcttcctgtattacgaggatctggcgagcggtgttagtaaagaagaagccgatgccgttacgctcatcgtgaaggaaacggtgcgtaccgttgtgccggatgcgctggtgaccatcgccggcggtttccgccgtggcaaacctatgggccacgacgttgactttctgatcacgaacccgggccgtcctgaagatgacgagctgctccacaaagtggttgatctgctcaagaagcaaggtctgctgctgtacgaagacatccgtgagagcacgttcgtggaggggcaactgccaagtcctaaaatcgacgccctggacaaccatcagaagtgcttcgccattctcaagctgtaccagccgaaggtggataacagtgcggttgggacgagtaagaaaagtgacatggctgaggttaaggattggaaagcggttcgtgtggatctggtgatcacgccattcgagcagttcgcctatgcgctgctcggttggacgggcagcggccaatttcgtcgcgatctgcgtcgctatgcggaggaagagcgcgacatgctgctcgacaaccatcgtctctacgacctgaaaaagggcatctttctgagtgcgggcagcgaagaagagattttcggtcatctgggtctggattatctggagccgtgggaacgcaacgcg

SEQ ID NO: 3958 - protein, 394 aa, synthetic construct
  REGION 1..394: note = Variant of terminal deoxynucleotidyl transferase
MHHHHHHGGSGHPPSNTPEKEVPSVIARHVSQYACQRKTTLNNYNKKFTDALEIMAENYKFKENLQACLEAKRAASIFKSLPFEVTSMKDIQGLPCITDDVRDVIEEIIEEGESSRVKEILNDERYKAFKQFTSVFGVGVKTSEKWYRMGLRTVEEAKASKSLKLSKMQKAGFLYYEDLASGVSKEEADAVTLIVKETVRTVVPDALVTIAGGFRRGKPMGHDVDFLITNPGRPEDDELLHKVVDLLKKQGLLLYEDIRESTFVEGQLPSPKIDALDNHQKCFAILKLYQPKVDNSAVGTSKKSDMAEVKDWKAVRVDLVITPFEQFAYALLGWTGSGQFRRDLRRYAEEERDMLLDNHRLYDLKKGIFLSAGSEEEIFGHLGLDYLEPWERNA

SEQ ID NO: 3959 - DNA, 1182 bp, synthetic construct
  misc_feature 1..1182: note = Variant of terminal deoxynucleotidyl transferase
  source 1..1182: mol_type = other DNA
atgcatcaccaccatcatcatgggggttctggtcatccgccgagcaataccccggagaaggaggtgccgagcgttatcgcccgtcatgttagtcagtacgcgtgccagcgcaagaccacgctgaataactacaacaaaaagttcaccgacgcgctggagatcatggccgagaactacaaatttaaagagaacctgcaggcgtgtctggaagccaagcgcgccgcgagtatttttaaaagcctgccgttcgaggttaccagcatgaaagacatccaaggtctgccgtgcattaccgacgacgtacgtgacgtgatcgaggagatcatcgaagagggcgagagcagccgtgttaaagaaatcctcaatgacgagcgctacaaggcctttaagcagttcaccagcgtgttcggtgtgggcgtgaaaacctcggaaaagtggtaccgtatgggcctccgtacggttgaagaagcaaaggccagtaagagtctgaagctgagcaagatgcagaaggcgggcttcctgtattacgaggatctggcgagcggtgttagtaaagaagaagccgatgccgttacgctcatcgtgaaggaaacggtgcgtaccgttgtgccggatgcgctggtgaccatcgccggcggtttccgccgtggcaaacctatgggccacgacgttgactttctgatcacgaacccgggccgtcctgaagatgacgagctgctccacaaagtggttgatctgctcaagaagcaaggtctgctgctgtacgaagacatccgtgagagcacgttcgtggaggggcaactgccaagtcctaaaatcgacgccctggacaaccatcagaagtgcttcgccattctcaagctgtaccagccgaaggtggataacagtgcggttgggacgagtaagaaaagtgacatggctgaggttaaggattggaaagcggttcgtgtggatctggtggttacgccattcgagcagttcgcctatgcgctgctcggttggacgggcagcggccaatttcgtcgcgatctgcgtcgctatgcggaggaagagcgcgacatgctgctcgacaaccatcgtctctacgacctgaaaaagggcatctttctgagtgcgggcagcgaagaagagattttcggtcatctgggtctggattatctggagccgtgggaacgcaacgcg

SEQ ID NO: 3960 - protein, 394 aa, synthetic construct
  REGION 1..394: note = Variant of terminal deoxynucleotidyl transferase
MHHHHHHGGSGHPPSNTPEKEVPSVIARHVSQYACQRKTTLNNYNKKFTDALEIMAENYKFKENLQACLEAKRAASIFKSLPFEVTSMKDIQGLPCITDDVRDVIEEIIEEGESSRVKEILNDERYKAFKQFTSVFGVGVKTSEKWYRMGLRTVEEAKASKSLKLSKMQKAGFLYYEDLASGVSKEEADAVTLIVKETVRTVVPDALVTIAGGFRRGKPMGHDVDFLITNPGRPEDDELLHKVVDLLKKQGLLLYEDIRESTFVEGQLPSPKIDALDNHQKCFAILKLYQPKVDNSAVGTSKKSDMAEVKDWKAVRVDLVVTPFEQFAYALLGWTGSGQFRRDLRRYAEEERDMLLDNHRLYDLKKGIFLSAGSEEEIFGHLGLDYLEPWERNA

SEQ ID NO: 3961 - DNA, 1182 bp, synthetic construct
  misc_feature 1..1182: note = Variant of terminal deoxynucleotidyl transferase
  source 1..1182: mol_type = other DNA
atgcatcaccaccatcatcatgggggttctggtcatccgccgagcaataccccggagaaggaggtgccgagcgttatcgcccgtcatgttagtcagtacgcgtgccagcgcaagaccacgctgaataactacaacaaaaagttcaccgacgcgctggagatcatggccgagaactacaaatttaaagagaacctgcaggcgtgtctggaagccaagcgcgccgcgagtatttttaaaagcctgccgttcgaggttaccagcatgaaagacatccaaggtctgccgtgcattaccgacgacgtacgtgacgtgatcgaggagatcatcgaagagggcgagagcagccgtgttaaagaaatcctcaatgacgagcgctacaaggcctttaagcagttcaccagcgtgttcggtgtgggcgtgaaaacctcggaaaagtggtaccgtatgggcctccgtacggttgaagaagcaaaggccagtaagagtctgaagctgagcaagatgcagaaggcgggcttcctgtattacgaggatctggcgagcggtgttagtaaagaagaagccgatgccgttacgctcatcgtgaaggaaacggtgcgtaccgttgtgccggatgcgctggtgaccatcgccggcggtttccgccgtggcaaacctatgggccacgacgttgactttctgatcacgaacccgggccgtcctgaagatgacgagctgctccacaaagtggttgatctgctcaagaagcaaggtctgctgctgtacgaagacatccgtgagagcacgttcgtggaggggcaactgccaagtcctaaaatcgacgccctggacaaccatcagaagtgcttcgccattctcaagctgtaccagccgaaggtggataacagtgcggttgggacgagtaagaaaagtgacatggctgaggttaaggattggaaagcggttcgtgtggatctggtgatcacgccattcgagcagttcgcctatgcgctgctcggttggacgggcagcggccaatttcgtcgcgatctgcgtcgctatgcggaggaagagcgcgacatgctgctcgacaaccatcgtctctacgacctgaaaaagggcatctttctgagtgcgggcagcgaagaagagattttcggtcatctggttctggattatctggagccgtgggaacgcaacgcg

SEQ ID NO: 3962 - protein, 394 aa, synthetic construct
  REGION 1..394: note = Variant of terminal deoxynucleotidyl transferase
MHHHHHHGGSGHPPSNTPEKEVPSVIARHVSQYACQRKTTLNNYNKKFTDALEIMAENYKFKENLQACLEAKRAASIFKSLPFEVTSMKDIQGLPCITDDVRDVIEEIIEEGESSRVKEILNDERYKAFKQFTSVFGVGVKTSEKWYRMGLRTVEEAKASKSLKLSKMQKAGFLYYEDLASGVSKEEADAVTLIVKETVRTVVPDALVTIAGGFRRGKPMGHDVDFLITNPGRPEDDELLHKVVDLLKKQGLLLYEDIRESTFVEGQLPSPKIDALDNHQKCFAILKLYQPKVDNSAVGTSKKSDMAEVKDWKAVRVDLVITPFEQFAYALLGWTGSGQFRRDLRRYAEEERDMLLDNHRLYDLKKGIFLSAGSEEEIFGHLVLDYLEPWERNA

SEQ ID NO: 3963 - DNA, 1182 bp, synthetic construct
  misc_feature 1..1182: note = Variant of terminal deoxynucleotidyl transferase
  source 1..1182: mol_type = other DNA
atgcatcaccaccatcatcatgggggttctggtcatccgccgagcaataccccggagaaggaggtgccgagcgttatcgcccgtcatgttagtcagtacgcgtgccagcgcaagaccacgctgaataactacaacaaaaagttcaccgacgcgctggagatcatggccgagaactacaaatttaaagagaacctgcaggcgtgtctggaagccaagcgcgccgcgagtatttttaaaagcctgccgttcgaggttaccagcatgaaagacatccaaggtctgccgtgcattaccgacgacgtacgtgacgtgatcgaggagatcatcgaagagggcgagagcagccgtgttaaagaaatcctcaatgacgagcgctacaaggcctttaagcagttcaccagcgtgttcggtgtgggcgtgaaaacctcggaaaagtggtaccgtatgggcctccgtacggttgaagaagcaaaggccagtaagagtctgaagctgagcaagatgcagaaggcgggcttcctgtattacgaggatctggcgagcggtgttagtaaagaagaagccgatgccgttacgctcatcgtgaaggaaacggtgcgtaccgttgtgccggatgcgctggtgaccatcgccggcggtttccgccgtggcaaacctatgggccacgacgttgactttctgatcacgaacccgggccgtcctgaagatgacgagctgctccacaaagtggttgatctgctcaagaagcaaggtctgctgctgtacgaagacatccgtgagagcacgttcgtggaggggcaactgccaagtcctaaaccggacgccctggacaaccatcagaagtgcttcgccattctcaagctgtaccagccgaaggtggataacagtgcggttgggacgagtaagaaaagtgacatggctgaggttaaggattggaaagcggttcgtgtggatctggtgatcacgccattcgagcagttcgcctatgcgctgctcggttggacgggcagcggccaatttcgtcgcgatctgcgtcgctatgcggaggaagagcgcgacatgctgctcgacaaccatcgtctctacgacctgaaaaagggcatctttctgagtgcgggcagcgaagaagagattttcggtcatctgggtctggattatctggagccgtgggaacgcaacgcg

SEQ ID NO: 3964 - protein, 394 aa, synthetic construct
  REGION 1..394: note = Variant of terminal deoxynucleotidyl transferase
MHHHHHHGGSGHPPSNTPEKEVPSVIARHVSQYACQRKTTLNNYNKKFTDALEIMAENYKFKENLQACLEAKRAASIFKSLPFEVTSMKDIQGLPCITDDVRDVIEEIIEEGESSRVKEILNDERYKAFKQFTSVFGVGVKTSEKWYRMGLRTVEEAKASKSLKLSKMQKAGFLYYEDLASGVSKEEADAVTLIVKETVRTVVPDALVTIAGGFRRGKPMGHDVDFLITNPGRPEDDELLHKVVDLLKKQGLLLYEDIRESTFVEGQLPSPKPDALDNHQKCFAILKLYQPKVDNSAVGTSKKSDMAEVKDWKAVRVDLVITPFEQFAYALLGWTGSGQFRRDLRRYAEEERDMLLDNHRLYDLKKGIFLSAGSEEEIFGHLGLDYLEPWERNA

SEQ ID NO: 3965 - DNA, 1182 bp, synthetic construct
  misc_feature 1..1182: note = Variant of terminal deoxynucleotidyl transferase
  source 1..1182: mol_type = other DNA
atgcatcaccaccatcatcatgggggttctggtcatccgccgagcaataccccggagaaggaggtgccgagcgttatcgcccgtcatgttagtcagtacgcgtgccagcgcaagaccacgctgaataactacaacaaaaagttcaccgacgcgctggagatcatggccgagaactacaaatttaaagagaacctgcaggcgtgtctggaagccaagcgcgccgcgagtatttttaaaagcctgccgttcgaggttaccagcatgaaagacatccaaggtctgccgtgcattaccgacgacgtacgtgacgtgatcgaggagatcatcgaagagggcgagagcagccgtgttaaagaaatcctcaatgacgagcgctacaaggcctttaagcagttcaccagcgtgttcggtgtgggcgtgaaaacctcggaaaagtggtaccgtatgggcctccgtacggttgaagaagcaaaggccagtaagagtctgaagctgagcaagatgcagaaggcgggcttcctgtattacgaggatctggcgagcggtgttagtaaagaagaagccgatgccgttacgctcatcgtgaaggaaacggtgcgtaccgttgtgccggatgcgctggtgaccatcgccggcggtttccgccgtggcaaacctatgggccacgacgttgactttctgatcacgaacccgggccgtcctgaagatgacgagctgctccacaaagtggttgatctgctcaagaagcaaggtctgctgctgtacgaagacatccgtgagagcacgttcgtggaggggcaactgccaagtcctaaaatcgacgccctggacaaccatcagaagtgcttcgccattctcaagctgtaccagccgaaggtggataacagtgcggttgggacgagtaagaaaagtgacatggctgaggttaaggattggaaagcggttcgtgtggatctggtgatcacgccattcgagcagttcgcctatgcgctgctcggttggacgggcagcggccaatttcgtcgcgatctgcgtcgctatgcggaggaagagcgcgacatgctgctcgacaaccatcgtctctacgacctgaaaaagggcatctttctgagtgcgggcagcgaagaagagattttcggtcatctgggtctggattatctgcatccgtgggaacgcaacgcg

SEQ ID NO: 3966 - protein, 394 aa, synthetic construct
  REGION 1..394: note = Variant of terminal deoxynucleotidyl transferase
MHHHHHHGGSGHPPSNTPEKEVPSVIARHVSQYACQRKTTLNNYNKKFTDALEIMAENYKFKENLQACLEAKRAASIFKSLPFEVTSMKDIQGLPCITDDVRDVIEEIIEEGESSRVKEILNDERYKAFKQFTSVFGVGVKTSEKWYRMGLRTVEEAKASKSLKLSKMQKAGFLYYEDLASGVSKEEADAVTLIVKETVRTVVPDALVTIAGGFRRGKPMGHDVDFLITNPGRPEDDELLHKVVDLLKKQGLLLYEDIRESTFVEGQLPSPKIDALDNHQKCFAILKLYQPKVDNSAVGTSKKSDMAEVKDWKAVRVDLVITPFEQFAYALLGWTGSGQFRRDLRRYAEEERDMLLDNHRLYDLKKGIFLSAGSEEEIFGHLGLDYLHPWERNA

SEQ ID NO: 3967 - DNA, 1182 bp, synthetic construct
  misc_feature 1..1182: note = Variant of terminal deoxynucleotidyl transferase
  source 1..1182: mol_type = other DNA
atgcatcaccaccatcatcatgggggttctggtcatccgccgagcaataccccggagaaggaggtgccgagcgttatcgcccgtcatgttagtcagtacgcgtgccagcgcaagaccacgctgaataactacaacaaaaagttcaccgacgcgctggagatcatggccgagaactacaaatttaaagagaacctgcaggcgtgtctggaagccaagcgcgccgcgagtatttttaaaagcctgccgttcgaggttaccagcatgaaagacatccaaggtctgccgtgcattaccgacgacgtacgtgacgtgatcgaggagatcatcgaagagggcgagagcagccgtgttaaagaaatcctcaatgacgagcgctacaaggcctttaagcagttcaccagcgtgttcggtgtgggcgtgaaaacctcggaaaagtggtaccgtatgggcctccgtacggttgaagaagcaaaggccagtaagagtctgaagctgagcaagatgcagaaggcgggcttcctgtattacgaggatctggcgagcggtgttagtaaagaagaagccgatgccgttacgctcatcgtgaaggaaacggtgcgtaccgttgtgccggatgcgctggtgaccatcgccggcggtttccgccgtggcaaacctatgggccacgacgttgactttctgatcacgaacccgggccgtcctgaagatgacgagctgctccacaaagtggttgatctgctcaagaagcaaggtctgctgctgtacgaagacatccgtgagagcacgttcgtggaggggcaactgccaagtcctaaaatcgacgccctggacaaccatcagaagtgcttcgccattctcaagctgtaccagccgaaggtggataacagtgcggttgggacgagtaagaaaagtgacatggctgaggttaaggattggaaagcggttcgtgtggatctggtgatcacgccattcgagcagttcgcctatgcgctgctcggttggacgggcagcggccaatttcgtcgcgatctgcgtcgctatgcggagtgggagcgcgacatgctgctcgacaaccatcgtctctacgacctgaaaaagggcatctttctgagtgcgggcagcgaagaagagattttcggtcatctgggtctggattatctggagccgtgggaacgcaacgcg

SEQ ID NO: 3968 - protein, 394 aa, synthetic construct
  REGION 1..394: note = Variant of terminal deoxynucleotidyl transferase
MHHHHHHGGSGHPPSNTPEKEVPSVIARHVSQYACQRKTTLNNYNKKFTDALEIMAENYKFKENLQACLEAKRAASIFKSLPFEVTSMKDIQGLPCITDDVRDVIEEIIEEGESSRVKEILNDERYKAFKQFTSVFGVGVKTSEKWYRMGLRTVEEAKASKSLKLSKMQKAGFLYYEDLASGVSKEEADAVTLIVKETVRTVVPDALVTIAGGFRRGKPMGHDVDFLITNPGRPEDDELLHKVVDLLKKQGLLLYEDIRESTFVEGQLPSPKIDALDNHQKCFAILKLYQPKVDNSAVGTSKKSDMAEVKDWKAVRVDLVITPFEQFAYALLGWTGSGQFRRDLRRYAEWERDMLLDNHRLYDLKKGIFLSAGSEEEIFGHLGLDYLEPWERNA

SEQ ID NO: 3969 - DNA, 1182 bp, synthetic construct
  misc_feature 1..1182: note = Variant of terminal deoxynucleotidyl transferase
  source 1..1182: mol_type = other DNA
atgcatcaccaccatcatcatgggggttctggtcatccgccgagcaataccccggagaaggaggtgccgagcgttatcgcccgtcatgttagtcagtacgcgtgccagcgcaagaccacgctgaataactacaacaaaaagttcaccgacgcgctggagatcatggccgagaactacaaatttaaagagaacctgcaggcgtgtctggaagccaagcgcgccgcgagtatttttaaaagcctgccgttcgaggttaccagcatgaaagacatccaaggtctgccgtgcattaccgacgacgtacgtgacgtgatcgaggagatcatcgaagagggcgagagcagccgtgttaaagaaatcctcaatgacgagcgctacaaggcctttaagcagttcaccagcgtgttcggtgtgggcgtgaaaacctcggaaaagtggtaccgtatgggcctccgtacggttgaagaagcaaaggccagtaagagtctgaagctgagcaagatgcagaaggcgggcttcctgtattacgaggatctggcgagcggtgttagtaaagaagaagccgatgccgttacgctcatcgtgaaggaaacggtgcgtaccgttgtgccggatgcgctggtgaccatcgccggcggtttccgccgtggcaaacctatgggccacgacgttgactttctgatcacgaacccgggccgtcctgaagatgacgagctgctccacaaagtggttgatctgctcaagaagcaaggtctgctgctgtacgaagacatccgtgagagcacgttcgtggaggggcaactgccaagtcctaaaatcgacgccctggacaaccatcagaagtgcttcgccattctcaagctgtaccagccgaaggtggataacagtgcggttgggacgagtaagaaaagtgacatggctgaggttaaggattggaaagcggttcgtgtggatctggtgatcacgccattcgagcagttcgcctatgcgctgctcggttggacgggcagcggccaatttcgtcgcgatctgcgtcgctatgcggaggaagagcgcgacatgctgctcgacaaccatcgtctctacgacctgaaaaagggcatctttctgggggcgggcagcgaagaagagattttcggtcatctgggtctggattatctggagccgtgggaacgcaacgcg

SEQ ID NO: 3970 - protein, 394 aa, synthetic construct
  REGION 1..394: note = Variant of terminal deoxynucleotidyl transferase
MHHHHHHGGSGHPPSNTPEKEVPSVIARHVSQYACQRKTTLNNYNKKFTDALEIMAENYKFKENLQACLEAKRAASIFKSLPFEVTSMKDIQGLPCITDDVRDVIEEIIEEGESSRVKEILNDERYKAFKQFTSVFGVGVKTSEKWYRMGLRTVEEAKASKSLKLSKMQKAGFLYYEDLASGVSKEEADAVTLIVKETVRTVVPDALVTIAGGFRRGKPMGHDVDFLITNPGRPEDDELLHKVVDLLKKQGLLLYEDIRESTFVEGQLPSPKIDALDNHQKCFAILKLYQPKVDNSAVGTSKKSDMAEVKDWKAVRVDLVITPFEQFAYALLGWTGSGQFRRDLRRYAEEERDMLLDNHRLYDLKKGIFLGAGSEEEIFGHLGLDYLEPWERNA

SEQ ID NO: 3971 - DNA, 1182 bp, synthetic construct
  misc_feature 1..1182: note = Variant of terminal deoxynucleotidyl transferase
  source 1..1182: mol_type = other DNA
atgcatcaccaccatcatcatgggggttctggtcatccgccgagcaataccccggagaaggaggtgccgagcgttatcgcccgtcatgttagtcagtacgcgtgccagcgcaagaccacgctgaataactacaacaaaaagttcaccgacgcgctggagatcatggccgagaactacaaatttaaagagaacctgcaggcgtgtctggaagccaagcgcgccgcgagtatttttaaaagcctgccgttcgaggttaccagcatgaaagacatccaaggtctgccgtgcattaccgacgacgtacgtgacgtgatcgaggagatcatcgaagagggcgagagcagccgtgttaaagaaatcctcaatgacgagcgctacaaggcctttaagcagttcaccagcgtgttcggtgtgggcgtgaaaacctcggaaaagtggtaccgtatgggcctccgtacggttgaagaagcaaaggccagtaagagtctgaagctgagcaagatgcagaaggcgggcttcctgtattacgaggatctggcgagcggtgttagtaaagaagaagccgatgccgttacgctcatcgtgaaggaaacggtgcgtaccgttgtgccggatgcgctggtgaccatcgccggcggtttccgccgtggcaaacctatgggccacgacgttgactttctgatcacgaacccgggccgtcctgaagatgacgagctgctccacaaagtggttgatctgctcaagaagcaaggtctgctgctgtacgaagacatccgtgagagcacgttcgtggaggggcaactgccaagtcctaaaatcgacaggctggacaaccatcagaagtgcttcgccattctcaagctgtaccagccgaaggtggataacagtgcggttgggacgagtaagaaaagtgacatggctgaggttaaggattggaaagcggttcgtgtggatctggtgatcacgccattcgagcagttcgcctatgcgctgctcggttggacgggcagcggccaatttcgtcgcgatctgcgtcgctatgcggaggaagagcgcgacatgctgctcgacaaccatcgtctctacgacctgaaaaagggcatctttctgagtgcgggcagcgaagaagagattttcggtcatctgggtctggattatctggagccgtgggaacgcaacgcg

SEQ ID NO: 3972 - protein, 394 aa, synthetic construct
  REGION 1..394: note = Variant of terminal deoxynucleotidyl transferase
MHHHHHHGGSGHPPSNTPEKEVPSVIARHVSQYACQRKTTLNNYNKKFTDALEIMAENYKFKENLQACLEAKRAASIFKSLPFEVTSMKDIQGLPCITDDVRDVIEEIIEEGESSRVKEILNDERYKAFKQFTSVFGVGVKTSEKWYRMGLRTVEEAKASKSLKLSKMQKAGFLYYEDLASGVSKEEADAVTLIVKETVRTVVPDALVTIAGGFRRGKPMGHDVDFLITNPGRPEDDELLHKVVDLLKKQGLLLYEDIRESTFVEGQLPSPKIDRLDNHQKCFAILKLYQPKVDNSAVGTSKKSDMAEVKDWKAVRVDLVITPFEQFAYALLGWTGSGQFRRDLRRYAEEERDMLLDNHRLYDLKKGIFLSAGSEEEIFGHLGLDYLEPWERNA

SEQ ID NO: 3973 - DNA, 1182 bp, synthetic construct
  misc_feature 1..1182: note = Variant of terminal deoxynucleotidyl transferase
  source 1..1182: mol_type = other DNA
atgcatcaccaccatcatcatgggggttctggtcatccgccgagcaataccccggagaaggaggtgccgagcgttatcgcccgtcatgttagtcagtacgcgtgccagcgcaagaccacgctgaataactacaacaaaaagttcaccgacgcgctggagatcatggccgagaactacaaatttaaagagaacctgcaggcgtgtctggaagccaagcgcgccgcgagtatttttaaaagcctgccgttcgaggttaccagcatgaaagacatccaaggtctgccgtgcattaccgacgacgtacgtgacgtgatcgaggagatcatcgaagagggcgagagcagccgtgttaaagaaatcctcaatgacgagcgctacaaggcctttaagcagttcaccagcgtgttcggtgtgggcgtgaaaacctcggaaaagtggtaccgtatgggcctccgtacggttgaagaagcaaaggccagtaagagtctgaagctgagcaagatgcagaaggcgggcttcctgtattacgaggatctggcgagcggtgttagtaaagaagaagccgatgccgttacgctcatcgtgaaggaaacggtgcgtaccgttgtgccggatgcgctggtgaccatcgccggcggtttccgccgtggcaaacctatgggccacgacgttgactttctgatcacgaacccgggccgtcctgaagatgacgagctgctccacaaagtggttgatctgctcaagaagcaaggtctgctgctgtacgaagacatccgtgagagcacgttcgtggaggggcaactgccaagtcctaggatcgacgccctggacaaccatcagaagtgcttcgccattctcaagctgtaccagccgaaggtggataacagtgcggttgggacgagtaagaaaagtgacatggctgaggttaaggattggaaagcggttcgtgtggatctggtgatcacgccattcgagcagttcgcctatgcgctgctcggttggacgggcagcggccaatttcgtcgcgatctgcgtcgctatgcggaggaagagcgcgacatgctgctcgacaaccatcgtctctacgacctgaaaaagggcatctttctgagtgcgggcagcgaagaagagattttcggtcatctgggtctggattatctggagccgtgggaacgcaacgcg

SEQ ID NO: 3974 - protein, 394 aa, synthetic construct
  REGION 1..394: note = Variant of terminal deoxynucleotidyl transferase
MHHHHHHGGSGHPPSNTPEKEVPSVIARHVSQYACQRKTTLNNYNKKFTDALEIMAENYKFKENLQACLEAKRAASIFKSLPFEVTSMKDIQGLPCITDDVRDVIEEIIEEGESSRVKEILNDERYKAFKQFTSVFGVGVKTSEKWYRMGLRTVEEAKASKSLKLSKMQKAGFLYYEDLASGVSKEEADAVTLIVKETVRTVVPDALVTIAGGFRRGKPMGHDVDFLITNPGRPEDDELLHKVVDLLKKQGLLLYEDIRESTFVEGQLPSPRIDALDNHQKCFAILKLYQPKVDNSAVGTSKKSDMAEVKDWKAVRVDLVITPFEQFAYALLGWTGSGQFRRDLRRYAEEERDMLLDNHRLYDLKKGIFLSAGSEEEIFGHLGLDYLEPWERNA

SEQ ID NO: 3975 - DNA, 1182 bp, synthetic construct
  misc_feature 1..1182: note = Variant of terminal deoxynucleotidyl transferase
  source 1..1182: mol_type = other DNA
atgcatcaccaccatcatcatgggggttctggtcatccgccgagcaataccccggagaaggaggtgccgagcgttatcgcccgtcatgttagtcagtacgcgtgccagcgcaagaccacgctgaataactacaacaaaaagttcaccgacgcgctggagatcatggccgagaactacaaatttaaagagaacctgcaggcgtgtctggaagccaagcgcgccgcgagtatttttaaaagcctgccgttcgaggttaccagcatgaaagacatccaaggtctgccgtgcattaccgacgacgtacgtgacgtgatcgaggagatcatcgaagagggcgagagcagccgtgttaaagaaatcctcaatgacgagcgctacaaggcctttaagcagttcaccagcgtgttcggtgtgggcgtgaaaacctcggaaaagtggtaccgtatgggcctccgtacggttgaagaagcaaaggccagtaagagtctgaagctgagcaagatgcagaaggcgggcttcctgtattacgaggatctggcgagcggtgttagtaaagaagaagccgatgccgttacgctcatcgtgaaggaaacggtgcgtaccgttgtgccggatgcgctggtgaccatcgccggcggtttccgccgtggcaaacctatgggccacgacgttgactttctgatcacgaacccgggccgtcctgaagatgacgagctgctccacaaagtggttgatctgctcaagaagcaaggtctgctgctgtacgaagacatccgtgagagcacgttcgtggaggggcaactgccaagtcctaaaatcgacgccctggacaaccatcagaagtgcttcgccattctcaagctgtaccagccgaaggtggataacagtgcggttgggacgagtaagaaaagtgacatggctgaggttaaggattggaaagcggttcgtgtggatctggtgatcacgccaagggagcagttcgcctatgcgctgctcggttggacgggcagcggccaatttcgtcgcgatctgcgtcgctatgcggaggaagagcgcgacatgctgctcgacaaccatcgtctctacgacctgaaaaagggcatctttctgagtgcgggcagcgaagaagagattttcggtcatctgggtctggattatctggagccgtgggaacgcaacgcg

SEQ ID NO: 3976 - protein, 394 aa, synthetic construct
  REGION 1..394: note = Variant of terminal deoxynucleotidyl transferase
MHHHHHHGGSGHPPSNTPEKEVPSVIARHVSQYACQRKTTLNNYNKKFTDALEIMAENYKFKENLQACLEAKRAASIFKSLPFEVTSMKDIQGLPCITDDVRDVIEEIIEEGESSRVKEILNDERYKAFKQFTSVFGVGVKTSEKWYRMGLRTVEEAKASKSLKLSKMQKAGFLYYEDLASGVSKEEADAVTLIVKETVRTVVPDALVTIAGGFRRGKPMGHDVDFLITNPGRPEDDELLHKVVDLLKKQGLLLYEDIRESTFVEGQLPSPKIDALDNHQKCFAILKLYQPKVDNSAVGTSKKSDMAEVKDWKAVRVDLVITPREQFAYALLGWTGSGQFRRDLRRYAEEERDMLLDNHRLYDLKKGIFLSAGSEEEIFGHLGLDYLEPWERNA

SEQ ID NO: 3977 - DNA, 1182 bp, synthetic construct
  misc_feature 1..1182: note = Variant of terminal deoxynucleotidyl transferase
  source 1..1182: mol_type = other DNA
atgcatcaccaccatcatcatgggggttctggtcatccgccgagcaataccccggagaaggaggtgccgagcgttatcgcccgtcatgttagtcagtacgcgtgccagcgcaagaccacgctgaataactacaacaaaaagttcaccgacgcgctggagatcatggccgagaactacaaatttaaagagaacctgcaggcgtgtctggaagccaagcgcgccgcgagtatttttaaaagcctgccgttcgaggttaccagcatgaaagacatccaaggtctgccgtgcattaccgacgacgtacgtgacgtgatcgaggagatcatcgaagagggcgagagcagccgtgttaaagaaatcctcaatgacgagcgctacaaggcctttaagcagttcaccagcgtgttcggtgtgggcgtgaaaacctcggaaaagtggtaccgtatgggcctccgtacggttgaagaagcaaaggccagtaagagtctgaagctgagcaagatgcagaaggcgggcttcctgtattacgaggatctggcgagcggtgttagtaaagaagaagccgatgccgttacgctcatcgtgaaggaaacggtgcgtaccgttgtgccggatgcgctggtgaccatcgccggcggtttccgccgtggcaaacctatgggccacgacgttgactttctgatcacgaacccgggccgtcctgaagatgacgagctgctccacaaagtggttgatctgctcaagaagcaaggtctgctgctgtacgaagacatccgtgagagcacgttcgtggaggggcaactgccaagtcctaaaatcgacgccctggacaaccatcagaagtgcttcgccattctcaagctgtaccagccgaaggtggataacagtgcggttgggacgagtaagaaaagtgacatggctgaggttaaggattggaaagcggttcgtgtggatctggtgatcacgccattcacgcagttcgcctatgcgctgctcggttggacgggcagcggccaatttcgtcgcgatctgcgtcgctatgcggaggaagagcgcgacatgctgctcgacaaccatcgtctctacgacctgaaaaagggcatctttctgagtgcgggcagcgaagaagagattttcggtcatctgggtctggattatctggagccgtgggaacgcaacgcg

SEQ ID NO: 3978 - protein, 394 aa, synthetic construct
  REGION 1..394: note = Variant of terminal deoxynucleotidyl transferase
MHHHHHHGGSGHPPSNTPEKEVPSVIARHVSQYACQRKTTLNNYNKKFTDALEIMAENYKFKENLQACLEAKRAASIFKSLPFEVTSMKDIQGLPCITDDVRDVIEEIIEEGESSRVKEILNDERYKAFKQFTSVFGVGVKTSEKWYRMGLRTVEEAKASKSLKLSKMQKAGFLYYEDLASGVSKEEADAVTLIVKETVRTVVPDALVTIAGGFRRGKPMGHDVDFLITNPGRPEDDELLHKVVDLLKKQGLLLYEDIRESTFVEGQLPSPKIDALDNHQKCFAILKLYQPKVDNSAVGTSKKSDMAEVKDWKAVRVDLVITPFTQFAYALLGWTGSGQFRRDLRRYAEEERDMLLDNHRLYDLKKGIFLSAGSEEEIFGHLGLDYLEPWERNA

SEQ ID NO: 3979 - DNA, 1182 bp, synthetic construct
  misc_feature 1..1182: note = Variant of terminal deoxynucleotidyl transferase
  source 1..1182: mol_type = other DNA
atgcatcaccaccatcatcatgggggttctggtcatccgccgagcaataccccggagaaggaggtgccgagcgttatcgcccgtcatgttagtcagtacgcgtgccagcgcaagaccacgctgaataactacaacaaaaagttcaccgacgcgctggagatcatggccgagaactacaaatttaaagagaacctgcaggcgtgtctggaagccaagcgcgccgcgagtatttttaaaagcctgccgttcgaggttaccagcatgaaagacatccaaggtctgccgtgcattaccgacgacgtacgtgacgtgatcgaggagatcatcgaagagggcgagagcagccgtgttaaagaaatcctcaatgacgagcgctacaaggcctttaagcagttcaccagcgtgttcggtgtgggcgtgaaaacctcggaaaagtggtaccgtatgggcctccgtacggttgaagaagcaaaggccagtaagagtctgaagctgagcaagatgcagaaggcgggcttcctgtattacgaggatctggcgagcggtgttagtaaagaagaagccgatgccgttacgctcatcgtgaaggaaacggtgcgtaccgttgtgccggatgcgctggtgaccatcgccggcggtttccgccgtggcaaacctatgggccacgacgttgactttctgatcacgaacccgggccgtcctgaagatgacgagctgctccacaaagtggttgatctgctcaagaagcaaggtctgctgctgtacgaagacatccgtgagagcacgttcgtggaggggcaactgccaagtcctaaaatcgacgccctggacaaccatcagaagtgcttcgccattctcaagctgtaccagccgaaggtggataacagtgcggttgggacgagtaagaaaagtgacatggctgaggttaaggattggaaagcggttcgtgtggatctggtgatcacgccattcgagcagttcgcctatgcgctgctcggttggacgggcagcggccaatttcgtcgcgatctgcgtcgctatgcggaggaagagcgcgacatgctgctcgacaaccatcgtctctacgacctgaaaaagggcatctttctgagtgcgggcagcgaagaagagattttctcgcatctgggtctggattatctggagccgtgggaacgcaacgcg

SEQ ID NO: 3980 - protein, 394 aa, synthetic construct
  REGION 1..394: note = Variant of terminal deoxynucleotidyl transferase
MHHHHHHGGSGHPPSNTPEKEVPSVIARHVSQYACQRKTTLNNYNKKFTDALEIMAENYKFKENLQACLEAKRAASIFKSLPFEVTSMKDIQGLPCITDDVRDVIEEIIEEGESSRVKEILNDERYKAFKQFTSVFGVGVKTSEKWYRMGLRTVEEAKASKSLKLSKMQKAGFLYYEDLASGVSKEEADAVTLIVKETVRTVVPDALVTIAGGFRRGKPMGHDVDFLITNPGRPEDDELLHKVVDLLKKQGLLLYEDIRESTFVEGQLPSPKIDALDNHQKCFAILKLYQPKVDNSAVGTSKKSDMAEVKDWKAVRVDLVITPFEQFAYALLGWTGSGQFRRDLRRYAEEERDMLLDNHRLYDLKKGIFLSAGSEEEIFSHLGLDYLEPWERNA

SEQ ID NO: 3981 - DNA, 1182 bp, synthetic construct
  misc_feature 1..1182: note = Variant of terminal deoxynucleotidyl transferase
  source 1..1182: mol_type = other DNA
atgcatcaccaccatcatcatgggggttctggtcatccgccgagcaataccccggagaaggaggtgccgagcgttatcgcccgtcatgttagtcagtacgcgtgccagcgcaagaccacgctgaataactacaacaaaaagttcaccgacgcgctggagatcatggccgagaactacaaatttaaagagaacctgcaggcgtgtctggaagccaagcgcgccgcgagtatttttaaaagcctgccgttcgaggttaccagcatgaaagacatccaaggtctgccgtgcattaccgacgacgtacgtgacgtgatcgaggagatcatcgaagagggcgagagcagccgtgttaaagaaatcctcaatgacgagcgctacaaggcctttaagcagttcaccagcgtgttcggtgtgggcgtgaaaacctcggaaaagtggtaccgtatgggcctccgtacggttgaagaagcaaaggccagtaagagtctgaagctgagcaagatgcagaaggcgggcttcctgtattacgaggatctggcgagcggtgttagtaaagaagaagccgatgccgttacgctcatcgtgaaggaaacggtgcgtaccgttgtgccggatgcgctggtgaccatcgccggcggtttccgccgtggcaaacctatgggccacgacgttgactttctgatcacgaacccgggccgtcctgaagatgacgagctgctccacaaagtggttgatctgctcaagaagcaaggtctgctgctgtacgaagacatccgtgagagcacgttcgtggaggggcaactgccaagtcctaaaatcgacgccctggacaaccatcagaagtgcttcgccattctcaagctgtaccagccgaaggtggataacagtgcggttgggacgagtaagaaaagtgacatggctgaggttaaggattggaaagcggttcgtgtggatctggtgtgtacgccattcgagcagttcgcctatgcgctgctcggttggacgggcagcggccaatttcgtcgcgatctgcgtcgctatgcggaggaagagcgcgacatgctgctcgacaaccatcgtctctacgacctgaaaaagggcatctttctgagtgcgggcagcgaagaagagattttcggtcatctgggtctggattatctggagccgtgggaacgcaacgcg

SEQ ID NO: 3982 - protein, 394 aa, synthetic construct
  REGION 1..394: note = Variant of terminal deoxynucleotidyl transferase
MHHHHHHGGSGHPPSNTPEKEVPSVIARHVSQYACQRKTTLNNYNKKFTDALEIMAENYKFKENLQACLEAKRAASIFKSLPFEVTSMKDIQGLPCITDDVRDVIEEIIEEGESSRVKEILNDERYKAFKQFTSVFGVGVKTSEKWYRMGLRTVEEAKASKSLKLSKMQKAGFLYYEDLASGVSKEEADAVTLIVKETVRTVVPDALVTIAGGFRRGKPMGHDVDFLITNPGRPEDDELLHKVVDLLKKQGLLLYEDIRESTFVEGQLPSPKIDALDNHQKCFAILKLYQPKVDNSAVGTSKKSDMAEVKDWKAVRVDLVCTPFEQFAYALLGWTGSGQFRRDLRRYAEEERDMLLDNHRLYDLKKGIFLSAGSEEEIFGHLGLDYLEPWERNA

SEQ ID NO: 3983 - DNA, 1182 bp, synthetic construct
  misc_feature 1..1182: note = Variant of terminal deoxynucleotidyl transferase
  source 1..1182: mol_type = other DNA
atgcatcaccaccatcatcatgggggttctggtcatccgccgagcaataccccggagaaggaggtgccgagcgttatcgcccgtcatgttagtcagtacgcgtgccagcgcaagaccacgctgaataactacaacaaaaagttcaccgacgcgctggagatcatggccgagaactacaaatttaaagagaacctgcaggcgtgtctggaagccaagcgcgccgcgagtatttttaaaagcctgccgttcgaggttaccagcatgaaagacatccaaggtctgccgtgcattaccgacgacgtacgtgacgtgatcgaggagatcatcgaagagggcgagagcagccgtgttaaagaaatcctcaatgacgagcgctacaaggcctttaagcagttcaccagcgtgttcggtgtgggcgtgaaaacctcggaaaagtggtaccgtatgggcctccgtacggttgaagaagcaaaggccagtaagagtctgaagctgagcaagatgcagaaggcgggcttcctgtattacgaggatctggcgagcggtgttagtaaagaagaagccgatgccgttacgctcatcgtgaaggaaacggtgcgtaccgttgtgccggatgcgctggtgaccatcgccggcggtttccgccgtggcaaacctatgggccacgacgttgactttctgatcacgaacccgggccgtcctgaagatgacgagctgctccacaaagtggttgatctgctcaagaagcaaggtctgctgctgtacgaagacatccgtgagagcacgttcgtggaggggcaactgccaagtcctaaaatcgacgccctggacaaccatcagaagtgcttcgccattctcaagctgtaccagccgaaggtggataacagtgcggttgggacgagtaagaaaagtgacatggctgaggttaaggattggaaagcggttcgtgtggatctggtgatcacgccattcgagcagttcgcctatgcgctgctcggttggacgggcagcggccaatttcgtcgcgatctgcgtcgctatgcggaggaagagcgcgacatgctgctcgacaaccatcgtctctacgacctgaaaaagggcatctttctgagtgcgggcagcgaagaagagattttcggtcatctgggtctggattggctggagccgtgggaacgcaacgcg

SEQ ID NO: 3984 - protein, 394 aa, synthetic construct
  REGION 1..394: note = Variant of terminal deoxynucleotidyl transferase
MHHHHHHGGSGHPPSNTPEKEVPSVIARHVSQYACQRKTTLNNYNKKFTDALEIMAENYKFKENLQACLEAKRAASIFKSLPFEVTSMKDIQGLPCITDDVRDVIEEIIEEGESSRVKEILNDERYKAFKQFTSVFGVGVKTSEKWYRMGLRTVEEAKASKSLKLSKMQKAGFLYYEDLASGVSKEEADAVTLIVKETVRTVVPDALVTIAGGFRRGKPMGHDVDFLITNPGRPEDDELLHKVVDLLKKQGLLLYEDIRESTFVEGQLPSPKIDALDNHQKCFAILKLYQPKVDNSAVGTSKKSDMAEVKDWKAVRVDLVITPFEQFAYALLGWTGSGQFRRDLRRYAEEERDMLLDNHRLYDLKKGIFLSAGSEEEIFGHLGLDWLEPWERNA

SEQ ID NO: 3985 - DNA, 1182 bp, synthetic construct
  misc_feature 1..1182: note = Variant of terminal deoxynucleotidyl transferase
  source 1..1182: mol_type = other DNA
atgcatcaccaccatcatcatgggggttctggtcatccgccgagcaataccccggagaaggaggtgccgagcgttatcgcccgtcatgttagtcagtacgcgtgccagcgcaagaccacgctgaataactacaacaaaaagttcaccgacgcgctggagatcatggccgagaactacaaatttaaagagaacctgcaggcgtgtctggaagccaagcgcgccgcgagtatttttaaaagcctgccgttcgaggttaccagcatgaaagacatccaaggtctgccgtgcattaccgacgacgtacgtgacgtgatcgaggagatcatcgaagagggcgagagcagccgtgttaaagaaatcctcaatgacgagcgctacaaggcctttaagcagttcaccagcgtgttcggtgtgggcgtgaaaacctcggaaaagtggtaccgtatgggcctccgtacggttgaagaagcaaaggccagtaagagtctgaagctgagcaagatgcagaaggcgggcttcctgtattacgaggatctggcgagcggtgttagtaaagaagaagccgatgccgttacgctcatcgtgaaggaaacggtgcgtaccgttgtgccggatgcgctggtgaccatcgccggcggtttccgccgtggcaaacctatgggccacgacgttgactttctgatcacgaacccgggccgtcctgaagatgacgagctgctccacaaagtggttgatctgctcaagaagcaaggtctgctgctgtacgaagacatccgtgagagcacgttcgtggaggggcaactgccaagtcctaaaatcgacgccctggacaaccatcagaagtgcttcgccattctcaagctgtaccagccgaaggtggataacagtgcggttgggacgagtaagaaaagtgacatggctgaggttaaggattggaaagcggttcgtgtggatctggtgatcgctccattcgagcagttcgcctatgcgctgctcggttggacgggcagcggccaatttcgtcgcgatctgcgtcgctatgcggaggaagagcgcgacatgctgctcgacaaccatcgtctctacgacctgaaaaagggcatctttctgagtgcgggcagcgaagaagagattttcggtcatctgggtctggattatctggagccgtgggaacgcaacgcg

SEQ ID NO: 3986 - protein, 394 aa, synthetic construct
  REGION 1..394: note = Variant of terminal deoxynucleotidyl transferase
MHHHHHHGGSGHPPSNTPEKEVPSVIARHVSQYACQRKTTLNNYNKKFTDALEIMAENYKFKENLQACLEAKRAASIFKSLPFEVTSMKDIQGLPCITDDVRDVIEEIIEEGESSRVKEILNDERYKAFKQFTSVFGVGVKTSEKWYRMGLRTVEEAKASKSLKLSKMQKAGFLYYEDLASGVSKEEADAVTLIVKETVRTVVPDALVTIAGGFRRGKPMGHDVDFLITNPGRPEDDELLHKVVDLLKKQGLLLYEDIRESTFVEGQLPSPKIDALDNHQKCFAILKLYQPKVDNSAVGTSKKSDMAEVKDWKAVRVDLVIAPFEQFAYALLGWTGSGQFRRDLRRYAEEERDMLLDNHRLYDLKKGIFLSAGSEEEIFGHLGLDYLEPWERNA

SEQ ID NO: 3987 - DNA, 1182 bp, synthetic construct
  misc_feature 1..1182: note = Variant of terminal deoxynucleotidyl transferase
  source 1..1182: mol_type = other DNA
atgcatcaccaccatcatcatgggggttctggtcatccgccgagcaataccccggagaaggaggtgccgagcgttatcgcccgtcatgttagtcagtacgcgtgccagcgcaagaccacgctgaataactacaacaaaaagttcaccgacgcgctggagatcatggccgagaactacaaatttaaagagaacctgcaggcgtgtctggaagccaagcgcgccgcgagtatttttaaaagcctgccgttcgaggttaccagcatgaaagacatccaaggtctgccgtgcattaccgacgacgtacgtgacgtgatcgaggagatcatcgaagagggcgagagcagccgtgttaaagaaatcctcaatgacgagcgctacaaggcctttaagcagttcaccagcgtgttcggtgtgggcgtgaaaacctcggaaaagtggtaccgtatgggcctccgtacggttgaagaagcaaaggccagtaagagtctgaagctgagcaagatgcagaaggcgggcttcctgtattacgaggatctggcgagcggtgttagtaaagaagaagccgatgccgttacgctcatcgtgaaggaaacggtgcgtaccgttgtgccggatgcgctggtgaccatcgccggcggtttccgccgtggcaaacctatgggccacgacgttgactttctgatcacgaacccgggccgtcctgaagatgacgagctgctccacaaagtggttgatctgctcaagaagcaaggtctgctgctgtacgaagacatccgtgagagcacgttcgtggaggggcaactgccaagtcctaaaatcgacgccctggacaaccatcagaagtgcttcgccattctcaagctgtaccagccgaaggtggataacagtgcggttgggacgagtaagaaaagtgacatggctgaggttaaggattggaaagcggttcgtgtggatctggtgatcacgccattcgagcagttcgcctatgcgctgctcggttggacgggcagcggccaatttcgtcgcgatctgcgtcgctatgcggaggaagagcgcgacatgctgctcgacaaccatcgtctctacgacctgaaaaagggcatctttctgagtgcgggcagcgaagaagagattttcacgcatctgggtctggattatctggagccgtgggaacgcaacgcg

SEQ ID NO: 3988 - protein, 394 aa, synthetic construct
  REGION 1..394: note = Variant of terminal deoxynucleotidyl transferase
MHHHHHHGGSGHPPSNTPEKEVPSVIARHVSQYACQRKTTLNNYNKKFTDALEIMAENYKFKENLQACLEAKRAASIFKSLPFEVTSMKDIQGLPCITDDVRDVIEEIIEEGESSRVKEILNDERYKAFKQFTSVFGVGVKTSEKWYRMGLRTVEEAKASKSLKLSKMQKAGFLYYEDLASGVSKEEADAVTLIVKETVRTVVPDALVTIAGGFRRGKPMGHDVDFLITNPGRPEDDELLHKVVDLLKKQGLLLYEDIRESTFVEGQLPSPKIDALDNHQKCFAILKLYQPKVDNSAVGTSKKSDMAEVKDWKAVRVDLVITPFEQFAYALLGWTGSGQFRRDLRRYAEEERDMLLDNHRLYDLKKGIFLSAGSEEEIFTHLGLDYLEPWERNA

SEQ ID NO: 3989 - DNA, 1182 bp, synthetic construct
  misc_feature 1..1182: note = Variant of terminal deoxynucleotidyl transferase
  source 1..1182: mol_type = other DNA
atgcatcaccaccatcatcatgggggttctggtcatccgccgagcaataccccggagaaggaggtgccgagcgttatcgcccgtcatgttagtcagtacgcgtgccagcgcaagaccacgctgaataactacaacaaaaagttcaccgacgcgctggagatcatggccgagaactacaaatttaaagagaacctgcaggcgtgtctggaagccaagcgcgccgcgagtatttttaaaagcctgccgttcgaggttaccagcatgaaagacatccaaggtctgccgtgcattaccgacgacgtacgtgacgtgatcgaggagatcatcgaagagggcgagagcagccgtgttaaagaaatcctcaatgacgagcgctacaaggcctttaagcagttcaccagcgtgttcggtgtgggcgtgaaaacctcggaaaagtggtaccgtatgggcctccgtacggttgaagaagcaaaggccagtaagagtctgaagctgagcaagatgcagaaggcgggcttcctgtattacgaggatctggcgagcggtgttagtaaagaagaagccgatgccgttacgctcatcgtgaaggaaacggtgcgtaccgttgtgccggatgcgctggtgaccatcgccggcggtttccgccgtggcaaacctatgggccacgacgttgactttctgatcacgaacccgggccgtcctgaagatgacgagctgctccacaaagtggttgatctgctcaagaagcaaggtctgctgctgtacgaagacatccgtgagagcacgttcgtggaggggcaactgccaagtcctaaaatcgacgccctggacaaccatcagaagtgcttcgccattctcaagctgtaccagccgaaggtggataacagtgcggttgggacgagtaagaaaagtgacatggctgaggttaaggattggaaagcggttcgtgtggatctggtgatcacgccattcgagcagttcgcctatgcgctgctcggttggacgggcagcggccaatttcgtcgcgatctgcgtcgctttgcggaggaagagcgcgacatgctgctcgacaaccatcgtctctacgacctgaaaaagggcatctttctgagtgcgggcagcgaagaagagattttcggtcatctgggtctggattatctggagccgtgggaacgcaacgcg

SEQ ID NO: 3990 - protein, 394 aa, synthetic construct
  REGION 1..394: note = Variant of terminal deoxynucleotidyl transferase
MHHHHHHGGSGHPPSNTPEKEVPSVIARHVSQYACQRKTTLNNYNKKFTDALEIMAENYKFKENLQACLEAKRAASIFKSLPFEVTSMKDIQGLPCITDDVRDVIEEIIEEGESSRVKEILNDERYKAFKQFTSVFGVGVKTSEKWYRMGLRTVEEAKASKSLKLSKMQKAGFLYYEDLASGVSKEEADAVTLIVKETVRTVVPDALVTIAGGFRRGKPMGHDVDFLITNPGRPEDDELLHKVVDLLKKQGLLLYEDIRESTFVEGQLPSPKIDALDNHQKCFAILKLYQPKVDNSAVGTSKKSDMAEVKDWKAVRVDLVITPFEQFAYALLGWTGSGQFRRDLRRFAEEERDMLLDNHRLYDLKKGIFLSAGSEEEIFGHLGLDYLEPWERNA

SEQ ID NO: 3991 - DNA, 1182 bp, synthetic construct
  misc_feature 1..1182: note = Variant of terminal deoxynucleotidyl transferase
  source 1..1182: mol_type = other DNA
atgcatcaccaccatcatcatgggggttctggtcatccgccgagcaataccccggagaaggaggtgccgagcgttatcgcccgtcatgttagtcagtacgcgtgccagcgcaagaccacgctgaataactacaacaaaaagttcaccgacgcgctggagatcatggccgagaactacaaatttaaagagaacctgcaggcgtgtctggaagccaagcgcgccgcgagtatttttaaaagcctgccgttcgaggttaccagcatgaaagacatccaaggtctgccgtgcattaccgacgacgtacgtgacgtgatcgaggagatcatcgaagagggcgagagcagccgtgttaaagaaatcctcaatgacgagcgctacaaggcctttaagcagttcaccagcgtgttcggtgtgggcgtgaaaacctcggaaaagtggtaccgtatgggcctccgtacggttgaagaagcaaaggccagtaagagtctgaagctgagcaagatgcagaaggcgggcttcctgtattacgaggatctggcgagcggtgttagtaaagaagaagccgatgccgttacgctcatcgtgaaggaaacggtgcgtaccgttgtgccggatgcgctggtgaccatcgccggcggtttccgccgtggcaaacctatgggccacgacgttgactttctgatcacgaacccgggccgtcctgaagatgacgagctgctccacaaagtggttgatctgctcaagaagcaaggtctgctgctgtacgaagacatccgtgagagcacgttcgtggaggggcaactgccaagtcctaaaatcgacgccctggacaaccatcagaagtgcttcgccattctcaagctgtaccagccgaaggtggataacagtgcggttgggacgagtaagaaaagtgacatggctgaggttaaggattggaaagcggttcgtgtggatctggtgatcacgccattcgagcagttcgcctatgcgctgctcggttggacgggcagcggccaatttcgtcgcgatctgcgtcgctgggcggaggaagagcgcgacatgctgctcgacaaccatcgtctctacgacctgaaaaagggcatctttctgagtgcgggcagcgaagaagagattttcggtcatctgggtctggattatctggagccgtgggaacgcaacgcg

SEQ ID NO: 3992 - protein, 394 aa, synthetic construct
  REGION 1..394: note = Variant of terminal deoxynucleotidyl transferase
MHHHHHHGGSGHPPSNTPEKEVPSVIARHVSQYACQRKTTLNNYNKKFTDALEIMAENYKFKENLQACLEAKRAASIFKSLPFEVTSMKDIQGLPCITDDVRDVIEEIIEEGESSRVKEILNDERYKAFKQFTSVFGVGVKTSEKWYRMGLRTVEEAKASKSLKLSKMQKAGFLYYEDLASGVSKEEADAVTLIVKETVRTVVPDALVTIAGGFRRGKPMGHDVDFLITNPGRPEDDELLHKVVDLLKKQGLLLYEDIRESTFVEGQLPSPKIDALDNHQKCFAILKLYQPKVDNSAVGTSKKSDMAEVKDWKAVRVDLVITPFEQFAYALLGWTGSGQFRRDLRRWAEEERDMLLDNHRLYDLKKGIFLSAGSEEEIFGHLGLDYLEPWERNA

SEQ ID NO: 3993 - DNA, 1182 bp, synthetic construct
  misc_feature 1..1182: note = Variant of terminal deoxynucleotidyl transferase
  source 1..1182: mol_type = other DNA
atgcatcaccaccatcatcatgggggttctggtcatccgccgagcaataccccggagaaggaggtgccgagcgttatcgcccgtcatgttagtcagtacgcgtgccagcgcaagaccacgctgaataactacaacaaaaagttcaccgacgcgctgacgatcatggccgagaactacaaatttaaagagaacctgcaggcgtgtctggaagccaagcgcgccgcgagtatttttaaaagcctgccgttcgaggttaccagcatgaaagacatccaaggtctgccgtgcattaccgacgacgtacgtgacgtgatcgaggagatcatcgaagagggcgagagcagccgtgttaaagaaatcctcaatgacgagcgctacaaggcctttaagcagttcaccagcgtgttcggtgtgggcgtgaaaacctcggaaaagtggtaccgtatgggcctccgtacggttgaagaagcaaaggccagtaagagtctgaagctgagcaagatgcagaaggcgggcttcctgtattacgaggatctggcgagcggtgttagtaaagaagaagccgatgccgttacgctcatcgtgaaggaaacggtgcgtaccgttgtgccggatgcgctggtgaccatcgccggcggtttccgccgtggcaaacctatgggccacgacgttgactttctgatcacgaacccgggccgtcctgaagatgacgagctgctccacaaagtggttgatctgctcaagaagcaaggtctgctgctgtacgaagacatccgtgagagcacgttcgtggaggggcaactgccaagtcctaaaatcgacgccctggacaaccatcagaagtgcttcgccattctcaagctgtaccagccgaaggtggataacagtgcggttgggacgagtaagaaaagtgacatggctgaggttaaggattggaaagcggttcgtgtggatctggtgatcacgccattcgagcagttcgcctatgcgctgctcggttggacgggcagcggccaatttcgtcgcgatctgcgtcgctatgcggaggaagagcgcgacatgctgctcgacaaccatcgtctctacgacctgaaaaagggcatctttctgagtgcgggcagcgaagaagagattttcggtcatctgggtctggattatctggagccgtgggaacgcaacgcg

SEQ ID NO: 3994 - protein, 394 aa, synthetic construct
  REGION 1..394: note = Variant of terminal deoxynucleotidyl transferase
MHHHHHHGGSGHPPSNTPEKEVPSVIARHVSQYACQRKTTLNNYNKKFTDALTIMAENYKFKENLQACLEAKRAASIFKSLPFEVTSMKDIQGLPCITDDVRDVIEEIIEEGESSRVKEILNDERYKAFKQFTSVFGVGVKTSEKWYRMGLRTVEEAKASKSLKLSKMQKAGFLYYEDLASGVSKEEADAVTLIVKETVRTVVPDALVTIAGGFRRGKPMGHDVDFLITNPGRPEDDELLHKVVDLLKKQGLLLYEDIRESTFVEGQLPSPKIDALDNHQKCFAILKLYQPKVDNSAVGTSKKSDMAEVKDWKAVRVDLVITPFEQFAYALLGWTGSGQFRRDLRRYAEEERDMLLDNHRLYDLKKGIFLSAGSEEEIFGHLGLDYLEPWERNA

SEQ ID NO: 3995 - DNA, 1182 bp, synthetic construct
  misc_feature 1..1182: note = Variant of terminal deoxynucleotidyl transferase
  source 1..1182: mol_type = other DNA
atgcatcaccaccatcatcatgggggttctggtcatccgccgagcaataccccggagaaggaggtgccgagcgttatcgcccgtcatgttagtcagtacgcgtgccagcgcaagaccacgctgaataactacaacaaaaagttcaccgacgcgctggagatcatggccgagaactacaaatttaaagagaacctgcaggcgtgtctggaagccaagcgcgccgcgagtatttttaaaagcctgccgttcgaggttaccagcatgaaagacatccaaggtctgccgtgcattaccgacgacgtacgtgacgtgatcgaggagatcatcgaagagggcgagagcagccgtgttaaagaaatcctcaatgacgagcgctacaaggcctttaagcagttcaccagcgtgttcggtgtgggcgtgaaaacctcggaaaagtggtaccgtatgggcctccgtacggttgaagaagcaaaggccagtaagagtctgaagctgagcaagatgcagaaggcgggcttcctgtattacgaggatctggcgagcggtgttagtaaagaagaagccgatgccgttacgctcatcgtgaaggaaacggtgcgtaccgttgtgccggatgcgctggtgaccatcgccggcggtttccgccgtggcaaacctatgggccacgacgttgactttctgatcacgaacccgggccgtcctgaagatgacgagctgctccacaaagtggttgatctgctcaagaagcaaggtctgctgctgtacgaagacatccgtgagagcacgttcgtggaggggcaactgccaagtcctaaaatcgacgccctggacaaccatcagaagtgcttcgccattctcaagctgtaccagccgaaggtggataacagtgcggttgggacgagtaagaaaagtgacatggctgaggttaaggattggaaagcggttcgtgtggatctggtgatcacgccattcgagcagttcgcctatgcgctgctcggttggacgggcagcggccaatttcgtcgcgatctgcgtcgctatgcggaggaagagcgcgacatgctgctcgacaaccatcgtctctacgacctgaaaaagggcatcttttatagtgcgggcagcgaagaagagattttcggtcatctgggtctggattatctggagccgtgggaacgcaacgcg

SEQ ID NO: 3996 - protein, 394 aa, synthetic construct
  REGION 1..394: note = Variant of terminal deoxynucleotidyl transferase
MHHHHHHGGSGHPPSNTPEKEVPSVIARHVSQYACQRKTTLNNYNKKFTDALEIMAENYKFKENLQACLEAKRAASIFKSLPFEVTSMKDIQGLPCITDDVRDVIEEIIEEGESSRVKEILNDERYKAFKQFTSVFGVGVKTSEKWYRMGLRTVEEAKASKSLKLSKMQKAGFLYYEDLASGVSKEEADAVTLIVKETVRTVVPDALVTIAGGFRRGKPMGHDVDFLITNPGRPEDDELLHKVVDLLKKQGLLLYEDIRESTFVEGQLPSPKIDALDNHQKCFAILKLYQPKVDNSAVGTSKKSDMAEVKDWKAVRVDLVITPFEQFAYALLGWTGSGQFRRDLRRYAEEERDMLLDNHRLYDLKKGIFYSAGSEEEIFGHLGLDYLEPWERNA

SEQ ID NO: 3997 - DNA, 1182 bp, synthetic construct
  misc_feature 1..1182: note = Variant of terminal deoxynucleotidyl transferase
  source 1..1182: mol_type = other DNA
atgcatcaccaccatcatcatgggggttctggtcatccgccgagcaataccccggagaaggaggtgccgagcgttatcgcccgtcatgttagtcagtacgcgtgccagcgcaagaccacgctgaataactacaacaaaaagttcaccgacgcgctggagatcatggccgagaactacaaatttaaagagaacctgcaggcgtgtctggaagccaagcgcgccgcgagtatttttaaaagcctgccgttcgaggttaccagcatgaaagacatccaaggtctgccgtgcattaccgacgacgtacgtgacgtgatcgaggagatcatcgaagagggcgagagcagccgtgttaaagaaatcctcaatgacgagcgctacaaggcctttaagcagttcaccagcgtgttcggtgtgggcgtgaaaacctcggaaaagtggtaccgtatgggcctccgtacggttgaagaagcaaaggccagtaagagtctgaagctgagcaagatgcagaaggcgggcttcctgtattacgaggatctggcgagcggtgttagtaaagaagaagccgatgccgttacgctcatcgtgaaggaaacggtgcgtaccgttgtgccggatgcgctggtgaccatcgccggcggtttccgccgtggcaaacctatgggccacgacgttgactttctgatcacgaacccgggccgtcctgaagatgacgagctgctccacaaagtggttgatctgctcaagaagcaaggtctgctgctgtacgaagacatccgtgagagcacgttcgtggaggggcaactgccaagtcctaaaatcgacgccctggacaaccatcagaagtgcttcgccattctcaagctgtaccagccgaaggtggataacagtgcggttgggacgagtaagaaaagtgacatggctgaggttaaggattggaaagcggttcgtgtggatctggtgtctacgccattcgagcagttcgcctatgcgctgctcggttggacgggcagcggccaatttcgtcgcgatctgcgtcgctatgcggaggaagagcgcgacatgctgctcgacaaccatcgtctctacgacctgaaaaagggcatctttctgagtgcgggcagcgaagaagagattttcggtcatctgggtctggattatctggagccgtgggaacgcaacgcg

SEQ ID NO: 3998 - protein, 394 aa, synthetic construct
  REGION 1..394: note = Variant of terminal deoxynucleotidyl transferase
MHHHHHHGGSGHPPSNTPEKEVPSVIARHVSQYACQRKTTLNNYNKKFTDALEIMAENYKFKENLQACLEAKRAASIFKSLPFEVTSMKDIQGLPCITDDVRDVIEEIIEEGESSRVKEILNDERYKAFKQFTSVFGVGVKTSEKWYRMGLRTVEEAKASKSLKLSKMQKAGFLYYEDLASGVSKEEADAVTLIVKETVRTVVPDALVTIAGGFRRGKPMGHDVDFLITNPGRPEDDELLHKVVDLLKKQGLLLYEDIRESTFVEGQLPSPKIDALDNHQKCFAILKLYQPKVDNSAVGTSKKSDMAEVKDWKAVRVDLVSTPFEQFAYALLGWTGSGQFRRDLRRYAEEERDMLLDNHRLYDLKKGIFLSAGSEEEIFGHLGLDYLEPWERNA

SEQ ID NO: 3999 - DNA, 1182 bp, synthetic construct
  misc_feature 1..1182: note = Variant of terminal deoxynucleotidyl transferase
  source 1..1182: mol_type = other DNA
atgcatcaccaccatcatcatgggggttctggtcatccgccgagcaataccccggagaaggaggtgccgagcgttatcgcccgtcatgttagtcagtacgcgtgccagcgcaagaccacgctgaataactacaacaaaaagttcaccgacgcgctggagatcatggccgagaactacaaatttaaagagaacctgcaggcgtgtctggaagccaagcgcgccgcgagtatttttaaaagcctgccgttcgaggttaccagcatgaaagacatccaaggtctgccgtgcattaccgacgacgtacgtgacgtgatcgaggagatcatcgaagagggcgagagcagccgtgttaaagaaatcctcaatgacgagcgctacaaggcctttaagcagttcaccagcgtgttcggtgtgggcgtgaaaacctcggaaaagtggtaccgtatgggcctccgtacggttgaagaagcaaaggccagtaagagtctgaagctgagcaagatgcagaaggcgggcttcctgtattacgaggatctggcgagcggtgttagtaaagaagaagccgatgccgttacgctcatcgtgaaggaaacggtgcgtaccgttgtgccggatgcgctggtgaccatcgccggcggtttccgccgtggcaaacctatgggccacgacgttgactttctgatcacgaacccgggccgtcctgaagatgacgagctgctccacaaagtggttgatctgctcaagaagcaaggtctgctgctgtacgaagacatccgtgagagcacgttcgtggagggggggctgccaagtcctaaaatcgacgccctggacaaccatcagaagtgcttcgccattctcaagctgtaccagccgaaggtggataacagtgcggttgggacgagtaagaaaagtgacatggctgaggttaaggattggaaagcggttcgtgtggatctggtgatcacgccattcgagcagttcgcctatgcgctgctcggttggacgggcagcggccaatttcgtcgcgatctgcgtcgctatgcggaggaagagcgcgacatgctgctcgacaaccatcgtctctacgacctgaaaaagggcatctttctgagtgcgggcagcgaagaagagattttcggtcatctgggtctggattatctggagccgtgggaacgcaacgcg

SEQ ID NO: 4000 - protein, 394 aa, synthetic construct
  REGION 1..394: note = Variant of terminal deoxynucleotidyl transferase
MHHHHHHGGSGHPPSNTPEKEVPSVIARHVSQYACQRKTTLNNYNKKFTDALEIMAENYKFKENLQACLEAKRAASIFKSLPFEVTSMKDIQGLPCITDDVRDVIEEIIEEGESSRVKEILNDERYKAFKQFTSVFGVGVKTSEKWYRMGLRTVEEAKASKSLKLSKMQKAGFLYYEDLASGVSKEEADAVTLIVKETVRTVVPDALVTIAGGFRRGKPMGHDVDFLITNPGRPEDDELLHKVVDLLKKQGLLLYEDIRESTFVEGGLPSPKIDALDNHQKCFAILKLYQPKVDNSAVGTSKKSDMAEVKDWKAVRVDLVITPFEQFAYALLGWTGSGQFRRDLRRYAEEERDMLLDNHRLYDLKKGIFLSAGSEEEIFGHLGLDYLEPWERNA

SEQ ID NO: 4001 - DNA, 1182 bp, synthetic construct
  misc_feature 1..1182: note = Variant of terminal deoxynucleotidyl transferase
  source 1..1182: mol_type = other DNA
atgcatcaccaccatcatcatgggggttctggtcatccgccgagcaataccccggagaaggaggtgccgagcgttatcgcccgtcatgttagtcagtacgcgtgccagcgcaagaccacgctgaataactacaacaaaaagttcaccgacgcgctggagatcatggccgagaactacaaatttaaagagaacctgcaggcgtgtctggaagccaagcgcgccgcgagtatttttaaaagcctgccgttcgaggttaccagcatgaaagacatccaaggtctgccgtgcattaccgacgacgtacgtgacgtgatcgaggagatcatcgaagagggcgagagcagccgtgttaaagaaatcctcaatgacgagcgctacaaggcctttaagcagttcaccagcgtgttcggtgtgggcgtgaaaacctcggaaaagtggtaccgtatgggcctccgtacggttgaagaagcaaaggccagtaagagtctgaagctgagcaagatgcagaaggcgggcttcctgtattacgaggatctggcgagcggtgttagtaaagaagaagccgatgccgttacgctcatcgtgaaggaaacggtgcgtaccgttgtgccggatgcgctggtgaccatcgccggcggtttccgccgtggcaaacctatgggccacgacgttgactttctgatcacgaacccgggccgtcctgaagatgacgagctgctccacaaagtggttgatctgctcaagaagcaaggtctgctgctgtacgaagacatccgtgagagcacgttcgtggaggggcaactgccaagtcctaaaatcgacgccctggacaaccatcagaagtgcttcgccattctcaagctgtaccagccgaaggtggataacagtgcggttgggacgagtaagaaaagtgacatggctgaggttaaggattggaaagcggttcgtgtggatctggtgatcacgccattcgagcagttcgcctatgcgctgctcggttggacgggcagcggcatgtttcgtcgcgatctgcgtcgctatgcggaggaagagcgcgacatgctgctcgacaaccatcgtctctacgacctgaaaaagggcatctttctgagtgcgggcagcgaagaagagattttcggtcatctgggtctggattatctggagccgtgggaacgcaacgcg

SEQ ID NO: 4002 - protein, 394 aa, synthetic construct
  REGION 1..394: note = Variant of terminal deoxynucleotidyl transferase
MHHHHHHGGSGHPPSNTPEKEVPSVIARHVSQYACQRKTTLNNYNKKFTDALEIMAENYKFKENLQACLEAKRAASIFKSLPFEVTSMKDIQGLPCITDDVRDVIEEIIEEGESSRVKEILNDERYKAFKQFTSVFGVGVKTSEKWYRMGLRTVEEAKASKSLKLSKMQKAGFLYYEDLASGVSKEEADAVTLIVKETVRTVVPDALVTIAGGFRRGKPMGHDVDFLITNPGRPEDDELLHKVVDLLKKQGLLLYEDIRESTFVEGQLPSPKIDALDNHQKCFAILKLYQPKVDNSAVGTSKKSDMAEVKDWKAVRVDLVITPFEQFAYALLGWTGSGMFRRDLRRYAEEERDMLLDNHRLYDLKKGIFLSAGSEEEIFGHLGLDYLEPWERNA

SEQ ID NO: 4003 - DNA, 1182 bp, synthetic construct
  misc_feature 1..1182: note = Variant of terminal deoxynucleotidyl transferase
  source 1..1182: mol_type = other DNA
atgcatcaccaccatcatcatgggggttctggtcatccgccgagcaataccccggagaaggaggtgccgagcgttatcgcccgtcatgttagtcagtacgcgtgccagcgcaagaccacgctgaataactacaacaaaaagttcaccgacgcgctggagatcatggccgagaactacaaatttaaagagaacctgcaggcgtgtctggaagccaagcgcgccgcgagtatttttaaaagcctgccgttcgaggttaccagcatgaaagacatccaaggtctgccgtgcattaccgacgacgtacgtgacgtgatcgaggagatcatcgaagagggcgagagcagccgtgttaaagaaatcctcaatgacgagcgctacaaggcctttaagcagttcaccagcgtgttcggtgtgggcgtgaaaacctcggaaaagtggtaccgtatgggcctccgtacggttgaagaagcaaaggccagtaagagtctgaagctgagcaagatgcagaaggcgggcttcctgtattacgaggatctggcgagcggtgttagtaaagaagaagccgatgccgttacgctcatcgtgaaggaaacggtgcgtaccgttgtgccggatgcgctggtgaccatcgccggcggtttccgccgtggcaaacctatgggccacgacgttgactttctgatcacgaacccgggccgtcctgaagatgacgagctgctccacaaagtggttgatctgctcaagaagcaaggtctgctgctgtacgaagacatccgtgagagcacgttcgtggaggggcaactgccaagtcctaaaatcgacgccctggacaaccatcagaagtgcttcgccattctcaagctgtaccagccgaaggtggataacagtgcggttgggacgagtaagaaaagtgacatggctgaggttaaggattggaaagcggttcgtgtggatctggtgatcacgccattcgagcagttcgcctatgcgctgctcggttggacgggcagcggccaatttcgtcgcgatctgcgtcgctatgcggaggaagagcgcgacatgctgctcgacaaccatcgtctctacgacctgaaaaagggcatctttctgagtgcgggcagcgaagaagagattttcggtcatctggatctggattatctggagccgtgggaacgcaacgcg

SEQ ID NO: 4004 - protein, 394 aa, synthetic construct
  REGION 1..394: note = Variant of terminal deoxynucleotidyl transferase
MHHHHHHGGSGHPPSNTPEKEVPSVIARHVSQYACQRKTTLNNYNKKFTDALEIMAENYKFKENLQACLEAKRAASIFKSLPFEVTSMKDIQGLPCITDDVRDVIEEIIEEGESSRVKEILNDERYKAFKQFTSVFGVGVKTSEKWYRMGLRTVEEAKASKSLKLSKMQKAGFLYYEDLASGVSKEEADAVTLIVKETVRTVVPDALVTIAGGFRRGKPMGHDVDFLITNPGRPEDDELLHKVVDLLKKQGLLLYEDIRESTFVEGQLPSPKIDALDNHQKCFAILKLYQPKVDNSAVGTSKKSDMAEVKDWKAVRVDLVITPFEQFAYALLGWTGSGQFRRDLRRYAEEERDMLLDNHRLYDLKKGIFLSAGSEEEIFGHLDLDYLEPWERNA

SEQ ID NO: 4005 - DNA, 1182 bp, synthetic construct
  misc_feature 1..1182: note = Variant of terminal deoxynucleotidyl transferase
  source 1..1182: mol_type = other DNA
atgcatcaccaccatcatcatgggggttctggtcatccgccgagcaataccccggagaaggaggtgccgagcgttatcgcccgtcatgttagtcagtacgcgtgccagcgcaagaccacgctgaataactacaacaaaaagttcaccgacgcgctggagatcatggccgagaactacaaatttaaagagaacctgcaggcgtgtctggaagccaagcgcgccgcgagtatttttaaaagcctgccgttcgaggttaccagcatgaaagacatccaaggtctgccgtgcattaccgacgacgtacgtgacgtgatcgaggagatcatcgaagagggcgagagcagccgtgttaaagaaatcctcaatgacgagcgctacaaggcctttaagcagttcaccagcgtgttcggtgtgggcgtgaaaacctcggaaaagtggtaccgtatgggcctccgtacggttgaagaagcaaaggccagtaagagtctgaagctgagcaagatgcagaaggcgggcttcctgtattacgaggatctggcgagcggtgttagtaaagaagaagccgatgccgttacgctcatcgtgaaggaaacggtgcgtaccgttgtgccggatgcgctggtgaccatcgccggcggtttccgccgtggcaaacctatgggccacgacgttgactttctgatcacgaacccgggccgtcctgaagatgacgagctgctccacaaagtggttgatctgctcaagaagcaaggtctgctgctgtacgaagacatccgtgagagcacgttcgtggaggggcaactgccaagtcctaaaatcgacgccctggacaaccatcagaagtgcttcgccattctcaagctgtaccagccgaaggtggataacagtgcggttgggacgagtaagaaaagtgacatggctgaggttaaggattggaaagcggttcgtgtggatctggtgatcacgccattccatcagttcgcctatgcgctgctcggttggacgggcagcggccaatttcgtcgcgatctgcgtcgctatgcggaggaagagcgcgacatgctgctcgacaaccatcgtctctacgacctgaaaaagggcatctttctgagtgcgggcagcgaagaagagattttcggtcatctgggtctggattatctggagccgtgggaacgcaacgcg

SEQ ID NO: 4006 - protein, 394 aa, synthetic construct
  REGION 1..394: note = Variant of terminal deoxynucleotidyl transferase
MHHHHHHGGSGHPPSNTPEKEVPSVIARHVSQYACQRKTTLNNYNKKFTDALEIMAENYKFKENLQACLEAKRAASIFKSLPFEVTSMKDIQGLPCITDDVRDVIEEIIEEGESSRVKEILNDERYKAFKQFTSVFGVGVKTSEKWYRMGLRTVEEAKASKSLKLSKMQKAGFLYYEDLASGVSKEEADAVTLIVKETVRTVVPDALVTIAGGFRRGKPMGHDVDFLITNPGRPEDDELLHKVVDLLKKQGLLLYEDIRESTFVEGQLPSPKIDALDNHQKCFAILKLYQPKVDNSAVGTSKKSDMAEVKDWKAVRVDLVITPFHQFAYALLGWTGSGQFRRDLRRYAEEERDMLLDNHRLYDLKKGIFLSAGSEEEIFGHLGLDYLEPWERNA

SEQ ID NO: 4007 - DNA, 1182 bp, synthetic construct
  misc_feature 1..1182: note = Variant of terminal deoxynucleotidyl transferase
  source 1..1182: mol_type = other DNA
atgcatcaccaccatcatcatgggggttctggtcatccgccgagcaataccccggagaaggaggtgccgagcgttatcgcccgtcatgttagtcagtacgcgtgccagcgcaagaccacgctgaataactacaacaaaaagttcaccgacgcgctggagatcatggccgagaactacaaatttaaagagaacctgcaggcgtgtctggaagccaagcgcgccgcgagtatttttaaaagcctgccgttcgaggttaccagcatgaaagacatccaaggtctgccgtgcattaccgacgacgtacgtgacgtgatcgaggagatcatcgaagagggcgagagcagccgtgttaaagaaatcctcaatgacgagcgctacaaggcctttaagcagttcaccagcgtgttcggtgtgggcgtgaaaacctcggaaaagtggtaccgtatgggcctccgtacggttgaagaagcaaaggccagtaagagtctgaagctgagcaagatgcagaaggcgggcttcctgtattacgaggatctggcgagcggtgttagtaaagaagaagccgatgccgttacgctcatcgtgaaggaaacggtgcgtaccgttgtgccggatgcgctggtgaccatcgccggcggtttccgccgtggcaaacctatgggccacgacgttgactttctgatcacgaacccgggccgtcctgaagatgacgagctgctccacaaagtggttgatctgctcaagaagcaaggtctgctgctgtacgaagacatccgtgagagcacgttcgtggaggggcaactgccaagtcctaaaatcgacgccctggacaaccatcagaagtgcttcgccattctcaagctgtaccagccgaaggtggataacagtgcggttgggacgagtaagaaaagtgacatggctgaggttaaggattggaaagcggttcgtgtggatctggtgatcacgccattcgagcagttcgcctatgcgctgctcggttggacgggcagcggccaatttcgtcgcgatctgcgtcgctatgcggaggaagagcgcgacatgctgctcgacaaccatcgtctctacgacctgaaaaagggcatctttctgagtgcgggcagcgaagaagagattttcggtcatctggagctggattatctggagccgtgggaacgcaacgcg

SEQ ID NO: 4008 - protein, 394 aa, synthetic construct
  REGION 1..394: note = Variant of terminal deoxynucleotidyl transferase
MHHHHHHGGSGHPPSNTPEKEVPSVIARHVSQYACQRKTTLNNYNKKFTDALEIMAENYKFKENLQACLEAKRAASIFKSLPFEVTSMKDIQGLPCITDDVRDVIEEIIEEGESSRVKEILNDERYKAFKQFTSVFGVGVKTSEKWYRMGLRTVEEAKASKSLKLSKMQKAGFLYYEDLASGVSKEEADAVTLIVKETVRTVVPDALVTIAGGFRRGKPMGHDVDFLITNPGRPEDDELLHKVVDLLKKQGLLLYEDIRESTFVEGQLPSPKIDALDNHQKCFAILKLYQPKVDNSAVGTSKKSDMAEVKDWKAVRVDLVITPFEQFAYALLGWTGSGQFRRDLRRYAEEERDMLLDNHRLYDLKKGIFLSAGSEEEIFGHLELDYLEPWERNA

SEQ ID NO: 4009 - DNA, 1182 bp, synthetic construct
  misc_feature 1..1182: note = Variant of terminal deoxynucleotidyl transferase
  source 1..1182: mol_type = other DNA
atgcatcaccaccatcatcatgggggttctggtcatccgccgagcaataccccggagaaggaggtgccgagcgttatcgcccgtcatgttagtcagtacgcgtgccagcgcaagaccacgctgaataactacaacaaaaagttcaccgacgcgctggagatcatggccgagaactacaaatttaaagagaacctgcaggcgtgtctggaagccaagcgcgccgcgagtatttttaaaagcctgccgttcgaggttaccagcatgaaagacatccaaggtctgccgtgcattaccgacgacgtacgtgacgtgatcgaggagatcatcgaagagggcgagagcagccgtgttaaagaaatcctcaatgacgagcgctacaaggcctttaagcagttcaccagcgtgttcggtgtgggcgtgaaaacctcggaaaagtggtaccgtatgggcctccgtacggttgaagaagcaaaggccagtaagagtctgaagctgagcaagatgcagaaggcgggcttcctgtattacgaggatctggcgagcggtgttagtaaagaagaagccgatgccgttacgctcatcgtgaaggaaacggtgcgtaccgttgtgccggatgcgctggtgaccatcgccggcggtttccgccgtggcaaacctatgggccacgacgttgactttctgatcacgaacccgggccgtcctgaagatgacgagctgctccacaaagtggttgatctgctcaagaagcaaggtctgctgctgtacgaagacatccgtgagagcacgttcgtggaggggcaactgccaagtcctaaaatcgacgccctggacaaccatcagaagtgcttcgccattctcaagctgtaccagccgaaggtggataacagtgcggttgggacgagtaagaaaagtgacatggctgaggttaaggattggaaagcggttcgtgtggatctggtgatcacgccattcgagcagttcgcctatgcgctgctcggttggacgggcagcggccaatttcgtcgcgatctgcgtcgctatgcggaggaagagcgcgacatgccgctcgacaaccatcgtctctacgacctgaaaaagggcatctttctgagtgcgggcagcgaagaagagattttcggtcatctgggtctggattatctggagccgtgggaacgcaacgcg

SEQ ID NO: 4010 - protein, 394 aa, synthetic construct
  REGION 1..394: note = Variant of terminal deoxynucleotidyl transferase
MHHHHHHGGSGHPPSNTPEKEVPSVIARHVSQYACQRKTTLNNYNKKFTDALEIMAENYKFKENLQACLEAKRAASIFKSLPFEVTSMKDIQGLPCITDDVRDVIEEIIEEGESSRVKEILNDERYKAFKQFTSVFGVGVKTSEKWYRMGLRTVEEAKASKSLKLSKMQKAGFLYYEDLASGVSKEEADAVTLIVKETVRTVVPDALVTIAGGFRRGKPMGHDVDFLITNPGRPEDDELLHKVVDLLKKQGLLLYEDIRESTFVEGQLPSPKIDALDNHQKCFAILKLYQPKVDNSAVGTSKKSDMAEVKDWKAVRVDLVITPFEQFAYALLGWTGSGQFRRDLRRYAEEERDMPLDNHRLYDLKKGIFLSAGSEEEIFGHLGLDYLEPWERNA

SEQ ID NO: 4011 - DNA, 1182 bp, synthetic construct
  misc_feature 1..1182: note = Variant of terminal deoxynucleotidyl transferase
  source 1..1182: mol_type = other DNA
atgcatcaccaccatcatcatgggggttctggtcatccgccgagcaataccccggagaaggaggtgccgagcgttatcgcccgtcatgttagtcagtacgcgtgccagcgcaagaccacgctgaataactacaacaaaaagttcaccgacgcgctggagatcatggccgagaactacaaatttaaagagaacctgcaggcgtgtctggaagccaagcgcgccgcgagtatttttaaaagcctgccgttcgaggttaccagcatgaaagacatccaaggtctgccgtgcattaccgacgacgtacgtgacgtgatcgaggagatcatcgaagagggcgagagcagccgtgttaaagaaatcctcaatgacgagcgctacaaggcctttaagcagttcaccagcgtgttcggtgtgggcgtgaaaacctcggaaaagtggtaccgtatgggcctccgtacggttgaagaagcaaaggccagtaagagtctgaagctgagcaagatgcagaaggcgggcttcctgtattacgaggatctggcgagcggtgttagtaaagaagaagccgatgccgttacgctcatcgtgaaggaaacggtgcgtaccgttgtgccggatgcgctggtgaccatcgccggcggtttccgccgtggcaaacctatgggccacgacgttgactttctgatcacgaacccgggccgtcctgaagatgacgagctgctccacaaagtggttgatctgctcaagaagcaaggtctgctgctgtacgaagacatccgtgagagcacgttcgtggaggggcaactgccaagtcctaaaatcgaccagctggacaaccatcagaagtgcttcgccattctcaagctgtaccagccgaaggtggataacagtgcggttgggacgagtaagaaaagtgacatggctgaggttaaggattggaaagcggttcgtgtggatctggtgatcacgccattcgagcagttcgcctatgcgctgctcggttggacgggcagcggccaatttcgtcgcgatctgcgtcgctatgcggaggaagagcgcgacatgctgctcgacaaccatcgtctctacgacctgaaaaagggcatctttctgagtgcgggcagcgaagaagagattttcggtcatctgggtctggattatctggagccgtgggaacgcaacgcg

SEQ ID NO: 4012 - protein, 394 aa, synthetic construct
  REGION 1..394: note = Variant of terminal deoxynucleotidyl transferase
MHHHHHHGGSGHPPSNTPEKEVPSVIARHVSQYACQRKTTLNNYNKKFTDALEIMAENYKFKENLQACLEAKRAASIFKSLPFEVTSMKDIQGLPCITDDVRDVIEEIIEEGESSRVKEILNDERYKAFKQFTSVFGVGVKTSEKWYRMGLRTVEEAKASKSLKLSKMQKAGFLYYEDLASGVSKEEADAVTLIVKETVRTVVPDALVTIAGGFRRGKPMGHDVDFLITNPGRPEDDELLHKVVDLLKKQGLLLYEDIRESTFVEGQLPSPKIDQLDNHQKCFAILKLYQPKVDNSAVGTSKKSDMAEVKDWKAVRVDLVITPFEQFAYALLGWTGSGQFRRDLRRYAEEERDMLLDNHRLYDLKKGIFLSAGSEEEIFGHLGLDYLEPWERNA

SEQ ID NO: 4013 - DNA, 1182 bp, synthetic construct
  misc_feature 1..1182: note = Variant of terminal deoxynucleotidyl transferase
  source 1..1182: mol_type = other DNA
atgcatcaccaccatcatcatgggggttctggtcatccgccgagcaataccccggagaaggaggtgccgagcgttatcgcccgtcatgttagtcagtacgcgtgccagcgcaagaccacgctgaataactacaacaaaaagttcaccgacgcgctggagatcatggccgagaactacaaatttaaagagaacctgcaggcgtgtctggaagccaagcgcgccgcgagtatttttaaaagcctgccgttcgaggttaccagcatgaaagacatccaaggtctgccgtgcattaccgacgacgtacgtgacgtgatcgaggagatcatcgaagagggcgagagcagccgtgttaaagaaatcctcaatgacgagcgctacaaggcctttaagcagttcaccagcgtgttcggtgtgggcgtgaaaacctcggaaaagtggtaccgtatgggcctccgtacggttgaagaagcaaaggccagtaagagtctgaagctgagcaagatgcagaaggcgggcttcctgtattacgaggatctggcgagcggtgttagtaaagaagaagccgatgccgttacgctcatcgtgaaggaaacggtgcgtaccgttgtgccggatgcgctggtgaccatcgccggcggtttccgccgtggcaaacctatgggccacgacgttgactttctgatcacgaacccgggccgtcctgaagatgacgagctgctccacaaagtggttgatctgctcaagaagcaaggtctgctgctgtacgaagacatccgtgagagcacgttcgtggaggggcaactgccaagtcctaaaatcgacgccctggacaaccatcagaagtgcttcgccattctcaagctgtaccagccgaaggtggataacagtgcggttgggacgagtaagaaaagtgacatggctgaggttaaggattggaaagcggttcgtgtggatctggtgatcacgccagaggagcagttcgcctatgcgctgctcggttggacgggcagcggccaatttcgtcgcgatctgcgtcgctatgcggaggaagagcgcgacatgctgctcgacaaccatcgtctctacgacctgaaaaagggcatctttctgagtgcgggcagcgaagaagagattttcggtcatctgggtctggattatctggagccgtgggaacgcaacgcg

SEQ ID NO: 4014 - protein, 394 aa, synthetic construct
  REGION 1..394: note = Variant of terminal deoxynucleotidyl transferase
MHHHHHHGGSGHPPSNTPEKEVPSVIARHVSQYACQRKTTLNNYNKKFTDALEIMAENYKFKENLQACLEAKRAASIFKSLPFEVTSMKDIQGLPCITDDVRDVIEEIIEEGESSRVKEILNDERYKAFKQFTSVFGVGVKTSEKWYRMGLRTVEEAKASKSLKLSKMQKAGFLYYEDLASGVSKEEADAVTLIVKETVRTVVPDALVTIAGGFRRGKPMGHDVDFLITNPGRPEDDELLHKVVDLLKKQGLLLYEDIRESTFVEGQLPSPKIDALDNHQKCFAILKLYQPKVDNSAVGTSKKSDMAEVKDWKAVRVDLVITPEEQFAYALLGWTGSGQFRRDLRRYAEEERDMLLDNHRLYDLKKGIFLSAGSEEEIFGHLGLDYLEPWERNA

SEQ ID NO: 4015 - DNA, 1182 bp, synthetic construct
  misc_feature 1..1182: note = Variant of terminal deoxynucleotidyl transferase
  source 1..1182: mol_type = other DNA
atgcatcaccaccatcatcatgggggttctggtcatccgccgagcaataccccggagaaggaggtgccgagcgttatcgcccgtcatgttagtcagtacgcgtgccagcgcaagaccacgctgaataactacaacaaaaagttcaccgacgcgctggagatcatggccgagaactacaaatttaaagagaacctgcaggcgtgtctggaagccaagcgcgccgcgagtatttttaaaagcctgccgttcgaggttaccagcatgaaagacatccaaggtctgccgtgcattaccgacgacgtacgtgacgtgatcgaggagatcatcgaagagggcgagagcagccgtgttaaagaaatcctcaatgacgagcgctacaaggcctttaagcagttcaccagcgtgttcggtgtgggcgtgaaaacctcggaaaagtggtaccgtatgggcctccgtacggttgaagaagcaaaggccagtaagagtctgaagctgagcaagatgcagaaggcgggcttcctgtattacgaggatctggcgagcggtgttagtaaagaagaagccgatgccgttacgctcatcgtgaaggaaacggtgcgtaccgttgtgccggatgcgctggtgaccatcgccggcggtttccgccgtggcaaacctatgggccacgacgttgactttctgatcacgaacccgggccgtcctgaagatgacgagctgctccacaaagtggttgatctgctcaagaagcaaggtctgctgctgtacgaagacatccgtgagagcacgttcgtggaggggcaactgccaagtcctaaaatcgacgccctgagtaaccatcagaagtgcttcgccattctcaagctgtaccagccgaaggtggataacagtgcggttgggacgagtaagaaaagtgacatggctgaggttaaggattggaaagcggttcgtgtggatctggtgatcacgccattcgagcagttcgcctatgcgctgctcggttggacgggcagcggccaatttcgtcgcgatctgcgtcgctatgcggaggaagagcgcgacatgctgctcgacaaccatcgtctctacgacctgaaaaagggcatctttctgagtgcgggcagcgaagaagagattttcggtcatctgggtctggattatctggagccgtgggaacgcaacgcg

SEQ ID NO: 4016 - protein, 394 aa, synthetic construct
  REGION 1..394: note = Variant of terminal deoxynucleotidyl transferase
MHHHHHHGGSGHPPSNTPEKEVPSVIARHVSQYACQRKTTLNNYNKKFTDALEIMAENYKFKENLQACLEAKRAASIFKSLPFEVTSMKDIQGLPCITDDVRDVIEEIIEEGESSRVKEILNDERYKAFKQFTSVFGVGVKTSEKWYRMGLRTVEEAKASKSLKLSKMQKAGFLYYEDLASGVSKEEADAVTLIVKETVRTVVPDALVTIAGGFRRGKPMGHDVDFLITNPGRPEDDELLHKVVDLLKKQGLLLYEDIRESTFVEGQLPSPKIDALSNHQKCFAILKLYQPKVDNSAVGTSKKSDMAEVKDWKAVRVDLVITPFEQFAYALLGWTGSGQFRRDLRRYAEEERDMLLDNHRLYDLKKGIFLSAGSEEEIFGHLGLDYLEPWERNA

SEQ ID NO: 4017 - DNA, 1182 bp, synthetic construct
  misc_feature 1..1182: note = Variant of terminal deoxynucleotidyl transferase
  source 1..1182: mol_type = other DNA
atgcatcaccaccatcatcatgggggttctggtcatccgccgagcaataccccggagaaggaggtgccgagcgttatcgcccgtcatgttagtcagtacgcgtgccagcgcaagaccacgctgaataactacaacaaaaagttcaccgacgcgctggagatcatggccgagaactacaaatttaaagagaacctgcaggcgtgtctggaagccaagcgcgccgcgagtatttttaaaagcctgccgttcgaggttaccagcatgaaagacatccaaggtctgccgtgcattaccgacgacgtacgtgacgtgatcgaggagatcatcgaagagggcgagagcagccgtgttaaagaaatcctcaatgacgagcgctacaaggcctttaagcagttcaccagcgtgttcggtgtgggcgtgaaaacctcggaaaagtggtaccgtatgggcctccgtacggttgaagaagcaaaggccagtaagagtctgaagctgagcaagatgcagaaggcgggcttcctgtattacgaggatctggcgagcggtgttagtaaagaagaagccgatgccgttacgctcatcgtgaaggaaacggtgcgtaccgttgtgccggatgcgctggtgaccatcgccggcggtttccgccgtggcaaacctatgggccacgacgttgactttctgatcacgaacccgggccgtcctgaagatgacgagctgctccacaaagtggttgatctgctcaagaagcaaggtctgctgctgtacgaagacatccgtgagagcacgttcgtggaggggcaactgccaagtcctaaaatcgacgccctggacaaccatcagaagtgcttcgccattctcaagctgtaccagccgaaggtggataacagtgcggttgggacgagtaagaaaagtgacatggctgaggttaaggattggaaagcggttcgtgtggatctggtgatcacgccattcgcgcagttcgcctatgcgctgctcggttggacgggcagcggccaatttcgtcgcgatctgcgtcgctatgcggaggaagagcgcgacatgctgctcgacaaccatcgtctctacgacctgaaaaagggcatctttctgagtgcgggcagcgaagaagagattttcggtcatctgggtctggattatctggagccgtgggaacgcaacgcg

SEQ ID NO: 4018 - protein, 394 aa, synthetic construct
  REGION 1..394: note = Variant of terminal deoxynucleotidyl transferase
MHHHHHHGGSGHPPSNTPEKEVPSVIARHVSQYACQRKTTLNNYNKKFTDALEIMAENYKFKENLQACLEAKRAASIFKSLPFEVTSMKDIQGLPCITDDVRDVIEEIIEEGESSRVKEILNDERYKAFKQFTSVFGVGVKTSEKWYRMGLRTVEEAKASKSLKLSKMQKAGFLYYEDLASGVSKEEADAVTLIVKETVRTVVPDALVTIAGGFRRGKPMGHDVDFLITNPGRPEDDELLHKVVDLLKKQGLLLYEDIRESTFVEGQLPSPKIDALDNHQKCFAILKLYQPKVDNSAVGTSKKSDMAEVKDWKAVRVDLVITPFAQFAYALLGWTGSGQFRRDLRRYAEEERDMLLDNHRLYDLKKGIFLSAGSEEEIFGHLGLDYLEPWERNA

SEQ ID NO: 4019 - DNA, 1182 bp, synthetic construct
  misc_feature 1..1182: note = Variant of terminal deoxynucleotidyl transferase
  source 1..1182: mol_type = other DNA
atgcatcaccaccatcatcatgggggttctggtcatccgccgagcaataccccggagaaggaggtgccgagcgttatcgcccgtcatgttagtcagtacgcgtgccagcgcaagaccacgctgaataactacaacaaaaagttcaccgacgcgctggagatcatggccgagaactacaaatttaaagagaacctgcaggcgtgtctggaagccaagcgcgccgcgagtatttttaaaagcctgccgttcgaggttaccagcatgaaagacatccaaggtctgccgtgcattaccgacgacgtacgtgacgtgatcgaggagatcatcgaagagggcgagagcagccgtgttaaagaaatcctcaatgacgagcgctacaaggcctttaagcagttcaccagcgtgttcggtgtgggcgtgaaaacctcggaaaagtggtaccgtatgggcctccgtacggttgaagaagcaaaggccagtaagagtctgaagctgagcaagatgcagaaggcgggcttcctgtattacgaggatctggcgagcggtgttagtaaagaagaagccgatgccgttacgctcatcgtgaaggaaacggtgcgtaccgttgtgccggatgcgctggtgaccatcgccggcggtttccgccgtggcaaacctatgggccacgacgttgactttctgatcacgaacccgggccgtcctgaagatgacgagctgctccacaaagtggttgatctgctcaagaagcaaggtctgctgctgtacgaagacatccgtgagagcacgttcgaggaggggcaactgccaagtcctaaaatcgacgccctggacaaccatcagaagtgcttcgccattctcaagctgtaccagccgaaggtggataacagtgcggttgggacgagtaagaaaagtgacatggctgaggttaaggattggaaagcggttcgtgtggatctggtgatcacgccattcgagcagttcgcctatgcgctgctcggttggacgggcagcggccaatttcgtcgcgatctgcgtcgctatgcggaggaagagcgcgacatgctgctcgacaaccatcgtctctacgacctgaaaaagggcatctttctgagtgcgggcagcgaagaagagattttcggtcatctgggtctggattatctggagccgtgggaacgcaacgcg

SEQ ID NO: 4020 - protein, 394 aa, synthetic construct
  REGION 1..394: note = Variant of terminal deoxynucleotidyl transferase
MHHHHHHGGSGHPPSNTPEKEVPSVIARHVSQYACQRKTTLNNYNKKFTDALEIMAENYKFKENLQACLEAKRAASIFKSLPFEVTSMKDIQGLPCITDDVRDVIEEIIEEGESSRVKEILNDERYKAFKQFTSVFGVGVKTSEKWYRMGLRTVEEAKASKSLKLSKMQKAGFLYYEDLASGVSKEEADAVTLIVKETVRTVVPDALVTIAGGFRRGKPMGHDVDFLITNPGRPEDDELLHKVVDLLKKQGLLLYEDIRESTFEEGQLPSPKIDALDNHQKCFAILKLYQPKVDNSAVGTSKKSDMAEVKDWKAVRVDLVITPFEQFAYALLGWTGSGQFRRDLRRYAEEERDMLLDNHRLYDLKKGIFLSAGSEEEIFGHLGLDYLEPWERNA

SEQ ID NO: 4021 - DNA, 1182 bp, synthetic construct
  misc_feature 1..1182: note = Variant of terminal deoxynucleotidyl transferase
  source 1..1182: mol_type = other DNA
atgcatcaccaccatcatcatgggggttctggtcatccgccgagcaataccccggagaaggaggtgccgagcgttatcgcccgtcatgttagtcagtacgcgtgccagcgcaagaccacgctgaataactacaacaaaaagttcaccgacgcgctggagatcatggccgagaactacaaatttaaagagaacctgcaggcgtgtctggaagccaagcgcgccgcgagtatttttaaaagcctgccgttcgaggttaccagcatgaaagacatccaaggtctgccgtgcattaccgacgacgtacgtgacgtgatcgaggagatcatcgaagagggcgagagcagccgtgttaaagaaatcctcaatgacgagcgctacaaggcctttaagcagttcaccagcgtgttcggtgtgggcgtgaaaacctcggaaaagtggtaccgtatgggcctccgtacggttgaagaagcaaaggccagtaagagtctgaagctgagcaagatgcagaaggcgggcttcctgtattacgaggatctggcgagcggtgttagtaaagaagaagccgatgccgttacgctcatcgtgaaggaaacggtgcgtaccgttgtgccggatgcgctggtgaccatcgccggcggtttccgccgtggcaaacctatgggccacgacgttgactttctgatcacgaacccgggccgtcctgaagatgacgagctgctccacaaagtggttgatctgctcaagaagcaaggtctgctgctgtacgaagacatccgtgagagcacgttcgtgcctgggcaactgccaagtcctaaaatcgacgccctggacaaccatcagaagtgcttcgccattctcaagctgtaccagccgaaggtggataacagtgcggttgggacgagtaagaaaagtgacatggctgaggttaaggattggaaagcggttcgtgtggatctggtgatcacgccattcgagcagttcgcctatgcgctgctcggttggacgggcagcggccaatttcgtcgcgatctgcgtcgctatgcggaggaagagcgcgacatgctgctcgacaaccatcgtctctacgacctgaaaaagggcatctttctgagtgcgggcagcgaagaagagattttcggtcatctgggtctggattatctggagccgtgggaacgcaacgcg

SEQ ID NO: 4022 - protein, 394 aa, synthetic construct
  REGION 1..394: note = Variant of terminal deoxynucleotidyl transferase
MHHHHHHGGSGHPPSNTPEKEVPSVIARHVSQYACQRKTTLNNYNKKFTDALEIMAENYKFKENLQACLEAKRAASIFKSLPFEVTSMKDIQGLPCITDDVRDVIEEIIEEGESSRVKEILNDERYKAFKQFTSVFGVGVKTSEKWYRMGLRTVEEAKASKSLKLSKMQKAGFLYYEDLASGVSKEEADAVTLIVKETVRTVVPDALVTIAGGFRRGKPMGHDVDFLITNPGRPEDDELLHKVVDLLKKQGLLLYEDIRESTFVPGQLPSPKIDALDNHQKCFAILKLYQPKVDNSAVGTSKKSDMAEVKDWKAVRVDLVITPFEQFAYALLGWTGSGQFRRDLRRYAEEERDMLLDNHRLYDLKKGIFLSAGSEEEIFGHLGLDYLEPWERNA

SEQ ID NO: 4023 - DNA, 1182 bp, synthetic construct
  misc_feature 1..1182: note = Variant of terminal deoxynucleotidyl transferase
  source 1..1182: mol_type = other DNA
atgcatcaccaccatcatcatgggggttctggtcatccgccgagcaataccccggagaaggaggtgccgagcgttatcgcccgtcatgttagtcagtacgcgtgccagcgcaagaccacgctgaataactacaacaaaaagttcaccgacgcgctggagatcatggccgagaactacaaatttaaagagaacctgcaggcgtgtctggaagccaagcgcgccgcgagtatttttaaaagcctgccgttcgaggttaccagcatgaaagacatccaaggtctgccgtgcattaccgacgacgtacgtgacgtgatcgaggagatcatcgaagagggcgagagcagccgtgttaaagaaatcctcaatgacgagcgctacaaggcctttaagcagttcaccagcgtgttcggtgtgggcgtgaaaacctcggaaaagtggtaccgtatgggcctccgtacggttgaagaagcaaaggccagtaagagtctgaagctgagcaagatgcagaaggcgggcttcctgtattacgaggatctggcgagcggtgttagtaaagaagaagccgatgccgttacgctcatcgtgaaggaaacggtgcgtaccgttgtgccggatgcgctggtgaccatcgccggcggtttccgccgtggcaaacctatgggccacgacgttgactttctgatcacgaacccgggccgtcctgaagatgacgagctgctccacaaagtggttgatctgctcaagaagcaaggtctgctgctgtacgaagacatccgtgagagcacgttcgtggaggggcaactgccaagtcctaaaatcgacgccctggacaaccatcagaagtgcttcgccattctcaagctgtaccagccgaaggtggataacagtgcggttgggacgagtaagaaaagtgacatggctgaggttaaggattggaaagcggttcgtgtggatctggtgatcacgccattggagcagttcgcctatgcgctgctcggttggacgggcagcggccaatttcgtcgcgatctgcgtcgctatgcggaggaagagcgcgacatgctgctcgacaaccatcgtctctacgacctgaaaaagggcatctttctgagtgcgggcagcgaagaagagattttcggtcatctgggtctggattatctggagccgtgggaacgcaacgcg

SEQ ID NO: 4024 - protein, 394 aa, synthetic construct
  REGION 1..394: note = Variant of terminal deoxynucleotidyl transferase
MHHHHHHGGSGHPPSNTPEKEVPSVIARHVSQYACQRKTTLNNYNKKFTDALEIMAENYKFKENLQACLEAKRAASIFKSLPFEVTSMKDIQGLPCITDDVRDVIEEIIEEGESSRVKEILNDERYKAFKQFTSVFGVGVKTSEKWYRMGLRTVEEAKASKSLKLSKMQKAGFLYYEDLASGVSKEEADAVTLIVKETVRTVVPDALVTIAGGFRRGKPMGHDVDFLITNPGRPEDDELLHKVVDLLKKQGLLLYEDIRESTFVEGQLPSPKIDALDNHQKCFAILKLYQPKVDNSAVGTSKKSDMAEVKDWKAVRVDLVITPLEQFAYALLGWTGSGQFRRDLRRYAEEERDMLLDNHRLYDLKKGIFLSAGSEEEIFGHLGLDYLEPWERNA

SEQ ID NO: 4025 - DNA, 1182 bp, synthetic construct
  misc_feature 1..1182: note = Variant of terminal deoxynucleotidyl transferase
  source 1..1182: mol_type = other DNA
atgcatcaccaccatcatcatgggggttctggtcatccgccgagcaataccccggagaaggaggtgccgagcgttatcgcccgtcatgttagtcagtacgcgtgccagcgcaagaccacgctgaataactacaacaaaaagttcaccgacgcgctggagatcatggccgagaactacaaatttaaagagaacctgcaggcgtgtctggaagccaagcgcgccgcgagtatttttaaaagcctgccgttcgaggttaccagcatgaaagacatccaaggtctgccgtgcattaccgacgacgtacgtgacgtgatcgaggagatcatcgaagagggcgagagcagccgtgttaaagaaatcctcaatgacgagcgctacaaggcctttaagcagttcaccagcgtgttcggtgtgggcgtgaaaacctcggaaaagtggtaccgtatgggcctccgtacggttgaagaagcaaaggccagtaagagtctgaagctgagcaagatgcagaaggcgggcttcctgtattacgaggatctggcgagcggtgttagtaaagaagaagccgatgccgttacgctcatcgtgaaggaaacggtgcgtaccgttgtgccggatgcgctggtgaccatcgccggcggtttccgccgtggcaaacctatgggccacgacgttgactttctgatcacgaacccgggccgtcctgaagatgacgagctgctccacaaagtggttgatctgctcaagaagcaaggtctgctgctgtacgaagacatccgtgagagccggttcgtggaggggcaactgccaagtcctaaaatcgacgccctggacaaccatcagaagtgcttcgccattctcaagctgtaccagccgaaggtggataacagtgcggttgggacgagtaagaaaagtgacatggctgaggttaaggattggaaagcggttcgtgtggatctggtgatcacgccattcgagcagttcgcctatgcgctgctcggttggacgggcagcggccaatttcgtcgcgatctgcgtcgctatgcggaggaagagcgcgacatgctgctcgacaaccatcgtctctacgacctgaaaaagggcatctttctgagtgcgggcagcgaagaagagattttcggtcatctgggtctggattatctggagccgtgggaacgcaacgcg

SEQ ID NO: 4026 - protein, 394 aa, synthetic construct
  REGION 1..394: note = Variant of terminal deoxynucleotidyl transferase
MHHHHHHGGSGHPPSNTPEKEVPSVIARHVSQYACQRKTTLNNYNKKFTDALEIMAENYKFKENLQACLEAKRAASIFKSLPFEVTSMKDIQGLPCITDDVRDVIEEIIEEGESSRVKEILNDERYKAFKQFTSVFGVGVKTSEKWYRMGLRTVEEAKASKSLKLSKMQKAGFLYYEDLASGVSKEEADAVTLIVKETVRTVVPDALVTIAGGFRRGKPMGHDVDFLITNPGRPEDDELLHKVVDLLKKQGLLLYEDIRESRFVEGQLPSPKIDALDNHQKCFAILKLYQPKVDNSAVGTSKKSDMAEVKDWKAVRVDLVITPFEQFAYALLGWTGSGQFRRDLRRYAEEERDMLLDNHRLYDLKKGIFLSAGSEEEIFGHLGLDYLEPWERNA

SEQ ID NO: 4027 - DNA, 1182 bp, synthetic construct
  misc_feature 1..1182: note = Variant of terminal deoxynucleotidyl transferase
  source 1..1182: mol_type = other DNA
atgcatcaccaccatcatcatgggggttctggtcatccgccgagcaataccccggagaaggaggtgccgagcgttatcgcccgtcatgttagtcagtacgcgtgccagcgcaagaccacgctgaataactacaacaaaaagttcaccgacgcgctggagatcatggccgagaactacaaatttaaagagaacctgcaggcgtgtctggaagccaagcgcgccgcgagtatttttaaaagcctgccgttcgaggttaccagcatgaaagacatccaaggtctgccgtgcattaccgacgacgtacgtgacgtgatcgaggagatcatcgaagagggcgagagcagccgtgttaaagaaatcctcaatgacgagcgctacaaggcctttaagcagttcaccagcgtgttcggtgtgggcgtgaaaacctcggaaaagtggtaccgtatgggcctccgtacggttgaagaagcaaaggccagtaagagtctgaagctgagcaagatgcagaaggcgggcttcctgtattacgaggatctggcgagcggtgttagtaaagaagaagccgatgccgttacgctcatcgtgaaggaaacggtgcgtaccgttgtgccggatgcgctggtgaccatcgccggcggtttccgccgtggcaaacctatgggccacgacgttgactttctgatcacgaacccgggccgtcctgaagatgacgagctgctccacaaagtggttgatctgctcaagaagcaaggtctgctgctgtacgaagacatccgtgagagcacgttcgtggaggggcaactgccaagtcctaaagttgacgccctggacaaccatcagaagtgcttcgccattctcaagctgtaccagccgaaggtggataacagtgcggttgggacgagtaagaaaagtgacatggctgaggttaaggattggaaagcggttcgtgtggatctggtgatcacgccattcgagcagttcgcctatgcgctgctcggttggacgggcagcggccaatttcgtcgcgatctgcgtcgctatgcggaggaagagcgcgacatgctgctcgacaaccatcgtctctacgacctgaaaaagggcatctttctgagtgcgggcagcgaagaagagattttcggtcatctgggtctggattatctggagccgtgggaacgcaacgcg

SEQ ID NO: 4028 - protein, 394 aa, synthetic construct
  REGION 1..394: note = Variant of terminal deoxynucleotidyl transferase
MHHHHHHGGSGHPPSNTPEKEVPSVIARHVSQYACQRKTTLNNYNKKFTDALEIMAENYKFKENLQACLEAKRAASIFKSLPFEVTSMKDIQGLPCITDDVRDVIEEIIEEGESSRVKEILNDERYKAFKQFTSVFGVGVKTSEKWYRMGLRTVEEAKASKSLKLSKMQKAGFLYYEDLASGVSKEEADAVTLIVKETVRTVVPDALVTIAGGFRRGKPMGHDVDFLITNPGRPEDDELLHKVVDLLKKQGLLLYEDIRESTFVEGQLPSPKVDALDNHQKCFAILKLYQPKVDNSAVGTSKKSDMAEVKDWKAVRVDLVITPFEQFAYALLGWTGSGQFRRDLRRYAEEERDMLLDNHRLYDLKKGIFLSAGSEEEIFGHLGLDYLEPWERNA

SEQ ID NO: 4029 - DNA, 1182 bp, synthetic construct
  misc_feature 1..1182: note = Variant of terminal deoxynucleotidyl transferase
  source 1..1182: mol_type = other DNA
atgcatcaccaccatcatcatgggggttctggtcatccgccgagcaataccccggagaaggaggtgccgagcgttatcgcccgtcatgttagtcagtacgcgtgccagcgcaagaccacgctgaataactacaacaaaaagttcaccgacgcgctggagatcatggccgagaactacaaatttaaagagaacctgcaggcgtgtctggaagccaagcgcgccgcgagtatttttaaaagcctgccgttcgaggttaccagcatgaaagacatccaaggtctgccgtgcattaccgacgacgtacgtgacgtgatcgaggagatcatcgaagagggcgagagcagccgtgttaaagaaatcctcaatgacgagcgctacaaggcctttaagcagttcaccagcgtgttcggtgtgggcgtgaaaacctcggaaaagtggtaccgtatgggcctccgtacggttgaagaagcaaaggccagtaagagtctgaagctgagcaagatgcagaaggcgggcttcctgtattacgaggatctggcgagcggtgttagtaaagaagaagccgatgccgttacgctcatcgtgaaggaaacggtgcgtaccgttgtgccggatgcgctggtgaccatcgccggcggtttccgccgtggcaaacctatgggccacgacgttgactttctgatcacgaacccgggccgtcctgaagatgacgagctgctccacaaagtggttgatctgctcaagaagcaaggtctgctgctgtacgaagacatccgtgagagcacgttcgtggaggggcaactgccaagtcctaaaatcgacgccctggacaaccatcagaagtgcttcgccattctcaagctgtaccagccgaaggtggataacagtgcggttgggacgagtaagaaaagtgacatggctgaggttaaggattggaaagcggttcgtgtggatctggtgatcacgccaccggagcagttcgcctatgcgctgctcggttggacgggcagcggccaatttcgtcgcgatctgcgtcgctatgcggaggaagagcgcgacatgctgctcgacaaccatcgtctctacgacctgaaaaagggcatctttctgagtgcgggcagcgaagaagagattttcggtcatctgggtctggattatctggagccgtgggaacgcaacgcg

SEQ ID NO: 4030 - protein, 394 aa, synthetic construct
  REGION 1..394: note = Variant of terminal deoxynucleotidyl transferase
MHHHHHHGGSGHPPSNTPEKEVPSVIARHVSQYACQRKTTLNNYNKKFTDALEIMAENYKFKENLQACLEAKRAASIFKSLPFEVTSMKDIQGLPCITDDVRDVIEEIIEEGESSRVKEILNDERYKAFKQFTSVFGVGVKTSEKWYRMGLRTVEEAKASKSLKLSKMQKAGFLYYEDLASGVSKEEADAVTLIVKETVRTVVPDALVTIAGGFRRGKPMGHDVDFLITNPGRPEDDELLHKVVDLLKKQGLLLYEDIRESTFVEGQLPSPKIDALDNHQKCFAILKLYQPKVDNSAVGTSKKSDMAEVKDWKAVRVDLVITPPEQFAYALLGWTGSGQFRRDLRRYAEEERDMLLDNHRLYDLKKGIFLSAGSEEEIFGHLGLDYLEPWERNA

SEQ ID NO: 4031 - DNA, 1182 bp, synthetic construct
  misc_feature 1..1182: note = Variant of terminal deoxynucleotidyl transferase
  source 1..1182: mol_type = other DNA
atgcatcaccaccatcatcatgggggttctggtcatccgccgagcaataccccggagaaggaggtgccgagcgttatcgcccgtcatgttagtcagtacgcgtgccagcgcaagaccacgctgaataactacaacaaaaagttcaccgacgcgctggagatcatggccgagaactacaaatttaaagagaacctgcaggcgtgtctggaagccaagcgcgccgcgagtatttttaaaagcctgccgttcgaggttaccagcatgaaagacatccaaggtctgccgtgcattaccgacgacgtacgtgacgtgatcgaggagatcatcgaagagggcgagagcagccgtgttaaagaaatcctcaatgacgagcgctacaaggcctttaagcagttcaccagcgtgttcggtgtgggcgtgaaaacctcggaaaagtggtaccgtatgggcctccgtacggttgaagaagcaaaggccagtaagagtctgaagctgagcaagatgcagaaggcgggcttcctgtattacgaggatctggcgagcggtgttagtaaagaagaagccgatgccgttacgctcatcgtgaaggaaacggtgcgtaccgttgtgccggatgcgctggtgaccatcgccggcggtttccgccgtggcaaacctatgggccacgacgttgactttctgatcacgaacccgggccgtcctgaagatgacgagctgctccacaaagtggttgatctgctcaagaagcaaggtctgctgctgtacgaagacatccgtgagagcacgttcgtggaggggcaactgccaaatcctaaaatcgacgccctggacaaccatcagaagtgcttcgccattctcaagctgtaccagccgaaggtggataacagtgcggttgggacgagtaagaaaagtgacatggctgaggttaaggattggaaagcggttcgtgtggatctggtgatcacgccattcgagcagttcgcctatgcgctgctcggttggacgggcagcggccaatttcgtcgcgatctgcgtcgctatgcggaggaagagcgcgacatgctgctcgacaaccatcgtctctacgacctgaaaaagggcatctttctgagtgcgggcagcgaagaagagattttcggtcatctgggtctggattatctggagccgtgggaacgcaacgcg

SEQ ID NO: 4032 - protein, 394 aa, synthetic construct
  REGION 1..394: note = Variant of terminal deoxynucleotidyl transferase
MHHHHHHGGSGHPPSNTPEKEVPSVIARHVSQYACQRKTTLNNYNKKFTDALEIMAENYKFKENLQACLEAKRAASIFKSLPFEVTSMKDIQGLPCITDDVRDVIEEIIEEGESSRVKEILNDERYKAFKQFTSVFGVGVKTSEKWYRMGLRTVEEAKASKSLKLSKMQKAGFLYYEDLASGVSKEEADAVTLIVKETVRTVVPDALVTIAGGFRRGKPMGHDVDFLITNPGRPEDDELLHKVVDLLKKQGLLLYEDIRESTFVEGQLPNPKIDALDNHQKCFAILKLYQPKVDNSAVGTSKKSDMAEVKDWKAVRVDLVITPFEQFAYALLGWTGSGQFRRDLRRYAEEERDMLLDNHRLYDLKKGIFLSAGSEEEIFGHLGLDYLEPWERNA

SEQ ID NO: 4033 - DNA, 1182 bp, synthetic construct
  misc_feature 1..1182: note = Variant of terminal deoxynucleotidyl transferase
  source 1..1182: mol_type = other DNA
atgcatcaccaccatcatcatgggggttctggtcatccgccgagcaataccccggagaaggaggtgccgagcgttatcgcccgtcatgttagtcagtacgcgtgccagcgcaagaccacgctgaataactacaacaaaaagttcaccgacgcgctggagatcatggccgagaactacaaatttaaagagaacctgcaggcgtgtctggaagccaagcgcgccgcgagtatttttaaaagcctgccgttcgaggttaccagcatgaaagacatccaaggtctgccgtgcattaccgacgacgtacgtgacgtgatcgaggagatcatcgaagagggcgagagcagccgtgttaaagaaatcctcaatgacgagcgctacaaggcctttaagcagttcaccagcgtgttcggtgtgggcgtgaaaacctcggaaaagtggtaccgtatgggcctccgtacggttgaagaagcaaaggccagtaagagtctgaagctgagcaagatgcagaaggcgggcttcctgtattacgaggatctggcgagcggtgttagtaaagaagaagccgatgccgttacgctcatcgtgaaggaaacggtgcgtaccgttgtgccggatgcgctggtgaccatcgccggcggtttccgccgtggcaaacctatgggccacgacgttgactttctgatcacgaacccgggccgtcctgaagatgacgagctgctccacaaagtggttgatctgctcaagaagcaaggtctgctgctgtacgaagacatccgtgagagcacgttctcggaggggcaactgccaagtcctaaaatcgacgccctggacaaccatcagaagtgcttcgccattctcaagctgtaccagccgaaggtggataacagtgcggttgggacgagtaagaaaagtgacatggctgaggttaaggattggaaagcggttcgtgtggatctggtgatcacgccattcgagcagttcgcctatgcgctgctcggttggacgggcagcggccaatttcgtcgcgatctgcgtcgctatgcggaggaagagcgcgacatgctgctcgacaaccatcgtctctacgacctgaaaaagggcatctttctgagtgcgggcagcgaagaagagattttcggtcatctgggtctggattatctggagccgtgggaacgcaacgcg

SEQ ID NO: 4034 - protein, 394 aa, synthetic construct
  REGION 1..394: note = Variant of terminal deoxynucleotidyl transferase
MHHHHHHGGSGHPPSNTPEKEVPSVIARHVSQYACQRKTTLNNYNKKFTDALEIMAENYKFKENLQACLEAKRAASIFKSLPFEVTSMKDIQGLPCITDDVRDVIEEIIEEGESSRVKEILNDERYKAFKQFTSVFGVGVKTSEKWYRMGLRTVEEAKASKSLKLSKMQKAGFLYYEDLASGVSKEEADAVTLIVKETVRTVVPDALVTIAGGFRRGKPMGHDVDFLITNPGRPEDDELLHKVVDLLKKQGLLLYEDIRESTFSEGQLPSPKIDALDNHQKCFAILKLYQPKVDNSAVGTSKKSDMAEVKDWKAVRVDLVITPFEQFAYALLGWTGSGQFRRDLRRYAEEERDMLLDNHRLYDLKKGIFLSAGSEEEIFGHLGLDYLEPWERNA

SEQ ID NO: 4035 - DNA, 1182 bp, synthetic construct
  misc_feature 1..1182: note = Variant of terminal deoxynucleotidyl transferase
  source 1..1182: mol_type = other DNA
atgcatcaccaccatcatcatgggggttctggtcatccgccgagcaataccccggagaaggaggtgccgagcgttatcgcccgtcatgttagtcagtacgcgtgccagcgcaagaccacgctgaataactacaacaaaaagttcaccgacgcgctggagatcatggccgagaactacaaatttaaagagaacctgcaggcgtgtctggaagccaagcgcgccgcgagtatttttaaaagcctgccgttcgaggttaccagcatgaaagacatccaaggtctgccgtgcattaccgacgacgtacgtgacgtgatcgaggagatcatcgaagagggcgagagcagccgtgttaaagaaatcctcaatgacgagcgctacaaggcctttaagcagttcaccagcgtgttcggtgtgggcgtgaaaacctcggaaaagtggtaccgtatgggcctccgtacggttgaagaagcaaaggccagtaagagtctgaagctgagcaagatgcagaaggcgggcttcctgtattacgaggatctggcgagcggtgttagtaaagaagaagccgatgccgttacgctcatcgtgaaggaaacggtgcgtaccgttgtgccggatgcgctggtgaccatcgccggcggtttccgccgtggcaaacctatgggccacgacgttgactttctgatcacgaacccgggccgtcctgaagatgacgagctgctccacaaagtggttgatctgctcaagaagcaaggtctgctgctgtacgaagacatccgtgagagcacgttcgtggaggggcaactgccaagtcctaaaatcgacgccctggacaaccatcagaagtgcttcgccattctcaagctgtaccagccgaaggtggataacagtgcggttgggacgagtaagaaaagtgacatggctgaggttaaggattggaaagcggttcgtgtggatctggtgatcacgccattcgagcagttcgcctatgcgctgctcggttggacgggcagcggccaatttcgtcgcgatctgcgtcgctatgcggaggaagagcgcgacatgctgctcgacaaccatcgtctctacgacctgaaaaagggcatctttctggaggcgggcagcgaagaagagattttcggtcatctgggtctggattatctggagccgtgggaacgcaacgcg

SEQ ID NO: 4036 - protein, 394 aa, synthetic construct
  REGION 1..394: note = Variant of terminal deoxynucleotidyl transferase
MHHHHHHGGSGHPPSNTPEKEVPSVIARHVSQYACQRKTTLNNYNKKFTDALEIMAENYKFKENLQACLEAKRAASIFKSLPFEVTSMKDIQGLPCITDDVRDVIEEIIEEGESSRVKEILNDERYKAFKQFTSVFGVGVKTSEKWYRMGLRTVEEAKASKSLKLSKMQKAGFLYYEDLASGVSKEEADAVTLIVKETVRTVVPDALVTIAGGFRRGKPMGHDVDFLITNPGRPEDDELLHKVVDLLKKQGLLLYEDIRESTFVEGQLPSPKIDALDNHQKCFAILKLYQPKVDNSAVGTSKKSDMAEVKDWKAVRVDLVITPFEQFAYALLGWTGSGQFRRDLRRYAEEERDMLLDNHRLYDLKKGIFLEAGSEEEIFGHLGLDYLEPWERNA

SEQ ID NO: 4037 - DNA, 1182 bp, synthetic construct
  misc_feature 1..1182: note = Variant of terminal deoxynucleotidyl transferase
  source 1..1182: mol_type = other DNA
atgcatcaccaccatcatcatgggggttctggtcatccgccgagcaataccccggagaaggaggtgccgagcgttatcgcccgtcatgttagtcagtacgcgtgccagcgcaagaccacgctgaataactacaacaaaaagttcaccgacgcgctggagatcatggccgagaactacaaatttaaagagaacctgcaggcgtgtctggaagccaagcgcgccgcgagtatttttaaaagcctgccgttcgaggttaccagcatgaaagacatccaaggtctgccgtgcattaccgacgacgtacgtgacgtgatcgaggagatcatcgaagagggcgagagcagccgtgttaaagaaatcctcaatgacgagcgctacaaggcctttaagcagttcaccagcgtgttcggtgtgggcgtgaaaacctcggaaaagtggtaccgtatgggcctccgtacggttgaagaagcaaaggccagtaagagtctgaagctgagcaagatgcagaaggcgggcttcctgtattacgaggatctggcgagcggtgttagtaaagaagaagccgatgccgttacgctcatcgtgaaggaaacggtgcgtaccgttgtgccggatgcgctggtgaccatcgccggcggtttccgccgtggcaaacctatgggccacgacgttgactttctgatcacgaacccgggccgtcctgaagatgacgagctgctccacaaagtggttgatctgctcaagaagcaaggtctgctgctgtacgaagacatccgtgagagcacgttcgtggaggggcaactgccaagtcctaaaatcgacgggctggacaaccatcagaagtgcttcgccattctcaagctgtaccagccgaaggtggataacagtgcggttgggacgagtaagaaaagtgacatggctgaggttaaggattggaaagcggttcgtgtggatctggtgatcacgccattcgagcagttcgcctatgcgctgctcggttggacgggcagcggccaatttcgtcgcgatctgcgtcgctatgcggaggaagagcgcgacatgctgctcgacaaccatcgtctctacgacctgaaaaagggcatctttctgagtgcgggcagcgaagaagagattttcggtcatctgggtctggattatctggagccgtgggaacgcaacgcg

SEQ ID NO: 4038 - protein, 394 aa, synthetic construct
  REGION 1..394: note = Variant of terminal deoxynucleotidyl transferase
MHHHHHHGGSGHPPSNTPEKEVPSVIARHVSQYACQRKTTLNNYNKKFTDALEIMAENYKFKENLQACLEAKRAASIFKSLPFEVTSMKDIQGLPCITDDVRDVIEEIIEEGESSRVKEILNDERYKAFKQFTSVFGVGVKTSEKWYRMGLRTVEEAKASKSLKLSKMQKAGFLYYEDLASGVSKEEADAVTLIVKETVRTVVPDALVTIAGGFRRGKPMGHDVDFLITNPGRPEDDELLHKVVDLLKKQGLLLYEDIRESTFVEGQLPSPKIDGLDNHQKCFAILKLYQPKVDNSAVGTSKKSDMAEVKDWKAVRVDLVITPFEQFAYALLGWTGSGQFRRDLRRYAEEERDMLLDNHRLYDLKKGIFLSAGSEEEIFGHLGLDYLEPWERNA

SEQ ID NO: 4039 - DNA, 1182 bp, synthetic construct
  misc_feature 1..1182: note = Variant of terminal deoxynucleotidyl transferase
  source 1..1182: mol_type = other DNA
atgcatcaccaccatcatcatgggggttctggtcatccgccgagcaataccccggagaaggaggtgccgagcgttatcgcccgtcatgttagtcagtacgcgtgccagcgcaagaccacgctgaataactacaacaaaaagttcaccgacgcgctggagatcatggccgagaactacaaatttaaagagaacctgcaggcgtgtctggaagccaagcgcgccgcgagtatttttaaaagcctgccgttcgaggttaccagcatgaaagacatccaaggtctgccgtgcattaccgacgacgtacgtgacgtgatcgaggagatcatcgaagagggcgagagcagccgtgttaaagaaatcctcaatgacgagcgctacaaggcctttaagcagttcaccagcgtgttcggtgtgggcgtgaaaacctcggaaaagtggtaccgtatgggcctccgtacggttgaagaagcaaaggccagtaagagtctgaagctgagcaagatgcagaaggcgggcttcctgtattacgaggatctggcgagcggtgttagtaaagaagaagccgatgccgttacgctcatcgtgaaggaaacggtgcgtaccgttgtgccggatgcgctggtgaccatcgccggcggtttccgccgtggcaaacctatgggccacgacgttgactttctgatcacgaacccgggccgtcctgaagatgacgagctgctccacaaagtggttgatctgctcaagaagcaaggtctgctgctgtacgaagacatccgtgagagcacgttcgtggaggggcaactgccaagtcctaaaatcgacgccctggacaaccatcagaagtgcttcgccattctcaagctgtaccagccgaaggtggataacagtgcggttgggacgagtaagaaaagtgacatggctgaggttaaggattggaaagcggttcgtgtggatctggtgatcacgccattcgagcagttcgcctatgcgctgctcggttggacgggcagcggccaatttcgtcgcgatctgcgtctgtatgcggaggaagagcgcgacatgctgctcgacaaccatcgtctctacgacctgaaaaagggcatctttctgagtgcgggcagcgaagaagagattttcggtcatctgggtctggattatctggagccgtgggaacgcaacgcg

SEQ ID NO: 4040 - protein, 394 aa, synthetic construct
  REGION 1..394: note = Variant of terminal deoxynucleotidyl transferase
MHHHHHHGGSGHPPSNTPEKEVPSVIARHVSQYACQRKTTLNNYNKKFTDALEIMAENYKFKENLQACLEAKRAASIFKSLPFEVTSMKDIQGLPCITDDVRDVIEEIIEEGESSRVKEILNDERYKAFKQFTSVFGVGVKTSEKWYRMGLRTVEEAKASKSLKLSKMQKAGFLYYEDLASGVSKEEADAVTLIVKETVRTVVPDALVTIAGGFRRGKPMGHDVDFLITNPGRPEDDELLHKVVDLLKKQGLLLYEDIRESTFVEGQLPSPKIDALDNHQKCFAILKLYQPKVDNSAVGTSKKSDMAEVKDWKAVRVDLVITPFEQFAYALLGWTGSGQFRRDLRLYAEEERDMLLDNHRLYDLKKGIFLSAGSEEEIFGHLGLDYLEPWERNA

SEQ ID NO: 4041 - DNA, 1182 bp, synthetic construct
  misc_feature 1..1182: note = Variant of terminal deoxynucleotidyl transferase
  source 1..1182: mol_type = other DNA
atgcatcaccaccatcatcatgggggttctggtcatccgccgagcaataccccggagaaggaggtgccgagcgttatcgcccgtcatgttagtcagtacgcgtgccagcgcaagaccacgctgaataactacaacaaaaagttcaccgacgcgctggagatcatggccgagaactacaaatttaaagagaacctgcaggcgtgtctggaagccaagcgcgccgcgagtatttttaaaagcctgccgttcgaggttaccagcatgaaagacatccaaggtctgccgtgcattaccgacgacgtacgtgacgtgatcgaggagatcatcgaagagggcgagagcagccgtgttaaagaaatcctcaatgacgagcgctacaaggcctttaagcagttcaccagcgtgttcggtgtgggcgtgaaaacctcggaaaagtggtaccgtatgggcctccgtacggttgaagaagcaaaggccagtaagagtctgaagctgagcaagatgcagaaggcgggcttcctgtattacgaggatctggcgagcggtgttagtaaagaagaagccgatgccgttacgctcatcgtgaaggaaacggtgcgtaccgttgtgccggatgcgctggtgaccatcgccggcggtttccgccgtggcaaacctatgggccacgacgttgactttctgatcacgaacccgggccgtcctgaagatgacgagctgctccacaaagtggttgatctgctcaagaagcaaggtctgctgctgtacgaagacatccgtgagagcacgttcgtggaggatcaactgccaagtcctaaaatcgacgccctggacaaccatcagaagtgcttcgccattctcaagctgtaccagccgaaggtggataacagtgcggttgggacgagtaagaaaagtgacatggctgaggttaaggattggaaagcggttcgtgtggatctggtgatcacgccattcgagcagttcgcctatgcgctgctcggttggacgggcagcggccaatttcgtcgcgatctgcgtcgctatgcggaggaagagcgcgacatgctgctcgacaaccatcgtctctacgacctgaaaaagggcatctttctgagtgcgggcagcgaagaagagattttcggtcatctgggtctggattatctggagccgtgggaacgcaacgcg

SEQ ID NO: 4042 - protein, 394 aa, synthetic construct
  REGION 1..394: note = Variant of terminal deoxynucleotidyl transferase
MHHHHHHGGSGHPPSNTPEKEVPSVIARHVSQYACQRKTTLNNYNKKFTDALEIMAENYKFKENLQACLEAKRAASIFKSLPFEVTSMKDIQGLPCITDDVRDVIEEIIEEGESSRVKEILNDERYKAFKQFTSVFGVGVKTSEKWYRMGLRTVEEAKASKSLKLSKMQKAGFLYYEDLASGVSKEEADAVTLIVKETVRTVVPDALVTIAGGFRRGKPMGHDVDFLITNPGRPEDDELLHKVVDLLKKQGLLLYEDIRESTFVEDQLPSPKIDALDNHQKCFAILKLYQPKVDNSAVGTSKKSDMAEVKDWKAVRVDLVITPFEQFAYALLGWTGSGQFRRDLRRYAEEERDMLLDNHRLYDLKKGIFLSAGSEEEIFGHLGLDYLEPWERNA

SEQ ID NO: 4043 - DNA, 1182 bp, synthetic construct
  misc_feature 1..1182: note = Variant of terminal deoxynucleotidyl transferase
  source 1..1182: mol_type = other DNA
atgcatcaccaccatcatcatgggggttctggtcatccgccgagcaataccccggagaaggaggtgccgagcgttatcgcccgtcatgttagtcagtacgcgtgccagcgcaagaccacgctgaataactacaacaaaaagttcaccgacgcgctggagatcatggccgagaactacaaatttaaagagaacctgcaggcgtgtctggaagccaagcgcgccgcgagtatttttaaaagcctgccgttcgaggttaccagcatgaaagacatccaaggtctgccgtgcattaccgacgacgtacgtgacgtgatcgaggagatcatcgaagagggcgagagcagccgtgttaaagaaatcctcaatgacgagcgctacaaggcctttaagcagttcaccagcgtgttcggtgtgggcgtgaaaacctcggaaaagtggtaccgtatgggcctccgtacggttgaagaagcaaaggccagtaagagtctgaagctgagcaagatgcagaaggcgggcttcctgtattacgaggatctggcgagcggtgttagtaaagaagaagccgatgccgttacgctcatcgtgaaggaaacggtgcgtaccgttgtgccggatgcgctggtgaccatcgccggcggtttccgccgtggcaaacctatgggccacgacgttgactttctgatcacgaacccgggccgtcctgaagatgacgagctgctccacaaagtggttgatctgctcaagaagcaaggtctgctgctgtacgaagacatccgtgagagcacgttcgtggaggggcaactgccaagtcctaaaatcgacgccctggacaaccatcagaagtgcttcgccattctcaagctgtaccagccgaaggtggataacagtgcggttgggacgagtaagaaaagtgacatggctgaggttaaggattggaaagcggttcgtgtggatctggtgatcacgccattcgagcagttcgcctatgcgctgctcggttggacgggcagcggccaatttcgtcgcgatctgcgtcgctatgcggaggaagagcgcgacatgctgctcgacaaccatagtctctacgacctgaaaaagggcatctttctgagtgcgggcagcgaagaagagattttcggtcatctgggtctggattatctggagccgtgggaacgcaacgcg

SEQ ID NO: 4044 - protein, 394 aa, synthetic construct
  REGION 1..394: note = Variant of terminal deoxynucleotidyl transferase
MHHHHHHGGSGHPPSNTPEKEVPSVIARHVSQYACQRKTTLNNYNKKFTDALEIMAENYKFKENLQACLEAKRAASIFKSLPFEVTSMKDIQGLPCITDDVRDVIEEIIEEGESSRVKEILNDERYKAFKQFTSVFGVGVKTSEKWYRMGLRTVEEAKASKSLKLSKMQKAGFLYYEDLASGVSKEEADAVTLIVKETVRTVVPDALVTIAGGFRRGKPMGHDVDFLITNPGRPEDDELLHKVVDLLKKQGLLLYEDIRESTFVEGQLPSPKIDALDNHQKCFAILKLYQPKVDNSAVGTSKKSDMAEVKDWKAVRVDLVITPFEQFAYALLGWTGSGQFRRDLRRYAEEERDMLLDNHSLYDLKKGIFLSAGSEEEIFGHLGLDYLEPWERNA

SEQ ID NO: 4045 - DNA, 1182 bp, synthetic construct
  misc_feature 1..1182: note = Variant of terminal deoxynucleotidyl transferase
  source 1..1182: mol_type = other DNA
atgcatcaccaccatcatcatgggggttctggtcatccgccgagcaataccccggagaaggaggtgccgagcgttatcgcccgtcatgttagtcagtacgcgtgccagcgcaagaccacgctgaataactacaacaaaaagttcaccgacgcgctggagatcatggccgagaactacaaatttaaagagaacctgcaggcgtgtctggaagccaagcgcgccgcgagtatttttaaaagcctgccgttcgaggttaccagcatgaaagacatccaaggtctgccgtgcattaccgacgacgtacgtgacgtgatcgaggagatcatcgaagagggcgagagcagccgtgttaaagaaatcctcaatgacgagcgctacaaggcctttaagcagttcaccagcgtgttcggtgtgggcgtgaaaacctcggaaaagtggtaccgtatgggcctccgtacggttgaagaagcaaaggccagtaagagtctgaagctgagcaagatgcagaaggcgggcttcctgtattacgaggatctggcgagcggtgttagtaaagaagaagccgatgccgttacgctcatcgtgaaggaaacggtgcgtaccgttgtgccggatgcgctggtgaccatcgccggcggtttccgccgtggcaaacctatgggccacgacgttgactttctgatcacgaacccgggccgtcctgaagatgacgagctgctccacaaagtggttgatctgctcaagaagcaaggtctgctgctgtacgaagacatccgtgagagcacgttcgtggaggggcaactgccaagtcctaaaatcgacgccctggacaaccatcagaagtgcttcgccattctcaagctgtaccagccgaaggtggataacagtgcggttgggacgagtaagaaaagtgacatggctgaggttaaggattggaaagcggttcgtgtggatctggtgatcacgccattcaagcagttcgcctatgcgctgctcggttggacgggcagcggccaatttcgtcgcgatctgcgtcgctatgcggaggaagagcgcgacatgctgctcgacaaccatcgtctctacgacctgaaaaagggcatctttctgagtgcgggcagcgaagaagagattttcggtcatctgggtctggattatctggagccgtgggaacgcaacgcg

SEQ ID NO: 4046 - protein, 394 aa, synthetic construct
  REGION 1..394: note = Variant of terminal deoxynucleotidyl transferase
MHHHHHHGGSGHPPSNTPEKEVPSVIARHVSQYACQRKTTLNNYNKKFTDALEIMAENYKFKENLQACLEAKRAASIFKSLPFEVTSMKDIQGLPCITDDVRDVIEEIIEEGESSRVKEILNDERYKAFKQFTSVFGVGVKTSEKWYRMGLRTVEEAKASKSLKLSKMQKAGFLYYEDLASGVSKEEADAVTLIVKETVRTVVPDALVTIAGGFRRGKPMGHDVDFLITNPGRPEDDELLHKVVDLLKKQGLLLYEDIRESTFVEGQLPSPKIDALDNHQKCFAILKLYQPKVDNSAVGTSKKSDMAEVKDWKAVRVDLVITPFKQFAYALLGWTGSGQFRRDLRRYAEEERDMLLDNHRLYDLKKGIFLSAGSEEEIFGHLGLDYLEPWERNA

SEQ ID NO: 4047 - DNA, 1182 bp, synthetic construct
  misc_feature 1..1182: note = Variant of terminal deoxynucleotidyl transferase
  source 1..1182: mol_type = other DNA
atgcatcaccaccatcatcatgggggttctggtcatccgccgagcaataccccggagaaggaggtgccgagcgttatcgcccgtcatgttagtcagtacgcgtgccagcgcaagaccacgctgaataactacaacaaaaagttcaccgacgcgctggagatcatggccgagaactacaaatttaaagagaacctgcaggcgtgtctggaagccaagcgcgccgcgagtatttttaaaagcctgccgttcgaggttaccagcatgaaagacatccaaggtctgccgtgcattaccgacgacgtacgtgacgtgatcgaggagatcatcgaagagggcgagagcagccgtgttaaagaaatcctcaatgacgagcgctacaaggcctttaagcagttcaccagcgtgttcggtgtgggcgtgaaaacctcggaaaagtggtaccgtatgggcctccgtacggttgaagaagcaaaggccagtaagagtctgaagctgagcaagatgcagaaggcgggcttcctgtattacgaggatctggcgagcggtgttagtaaagaagaagccgatgccgttacgctcatcgtgaaggaaacggtgcgtaccgttgtgccggatgcgctggtgaccatcgccggcggtttccgccgtggcaaacctatgggccacgacgttgactttctgatcacgaacccgggccgtcctgaagatgacgagctgctccacaaagtggttgatctgctcaagaagcaaggtctgctgctgtacgaagacatccgtgagagcacgttcgtggaggggcaactgccaagtcctaaaatcgacgccctggacaaccatcagaagtgcttcgccattctcaagctgtaccagccgaaggtggataacagtgcggttgggacgagtaagaaaagtgacatggctgaggttaaggattggaaagcggttcgtgtggatctggtgatcacgccagcggagcagttcgcctatgcgctgctcggttggacgggcagcggccaatttcgtcgcgatctgcgtcgctatgcggaggaagagcgcgacatgctgctcgacaaccatcgtctctacgacctgaaaaagggcatctttctgagtgcgggcagcgaagaagagattttcggtcatctgggtctggattatctggagccgtgggaacgcaacgcg

SEQ ID NO: 4048 - protein, 394 aa, synthetic construct
  REGION 1..394: note = Variant of terminal deoxynucleotidyl transferase
MHHHHHHGGSGHPPSNTPEKEVPSVIARHVSQYACQRKTTLNNYNKKFTDALEIMAENYKFKENLQACLEAKRAASIFKSLPFEVTSMKDIQGLPCITDDVRDVIEEIIEEGESSRVKEILNDERYKAFKQFTSVFGVGVKTSEKWYRMGLRTVEEAKASKSLKLSKMQKAGFLYYEDLASGVSKEEADAVTLIVKETVRTVVPDALVTIAGGFRRGKPMGHDVDFLITNPGRPEDDELLHKVVDLLKKQGLLLYEDIRESTFVEGQLPSPKIDALDNHQKCFAILKLYQPKVDNSAVGTSKKSDMAEVKDWKAVRVDLVITPAEQFAYALLGWTGSGQFRRDLRRYAEEERDMLLDNHRLYDLKKGIFLSAGSEEEIFGHLGLDYLEPWERNA

SEQ ID NO: 4049 - DNA, 1182 bp, synthetic construct
  misc_feature 1..1182: note = Variant of terminal deoxynucleotidyl transferase
  source 1..1182: mol_type = other DNA
atgcatcaccaccatcatcatgggggttctggtcatccgccgagcaataccccggagaaggaggtgccgagcgttatcgcccgtcatgttagtcagtacgcgtgccagcgcaagaccacgctgaataactacaacaaaaagttcaccgacgcgctggagatcatggccgagaactacaaatttaaagagaacctgcaggcgtgtctggaagccaagcgcgccgcgagtatttttaaaagcctgccgttcgaggttaccagcatgaaagacatccaaggtctgccgtgcattaccgacgacgtacgtgacgtgatcgaggagatcatcgaagagggcgagagcagccgtgttaaagaaatcctcaatgacgagcgctacaaggcctttaagcagttcaccagcgtgttcggtgtgggcgtgaaaacctcggaaaagtggtaccgtatgggcctccgtacggttgaagaagcaaaggccagtaagagtctgaagctgagcaagatgcagaaggcgggcttcctgtattacgaggatctggcgagcggtgttagtaaagaagaagccgatgccgttacgctcatcgtgaaggaaacggtgcgtaccgttgtgccggatgcgctggtgaccatcgccggcggtttccgccgtggcaaacctatgggccacgacgttgactttctgatcacgaacccgggccgtcctgaagatgacgagctgctccacaaagtggttgatctgctcaagaagcaaggtctgctgctgtacgaagacatccgtgagagcacgttcgtggaggggcaactgccaagtcctaaaatcgacgccctggacaaccatcagaagtgcttcgccattctcaagctgtaccagccgaaggtggataacagtgcggttgggacgagtaagaaaagtgacatggctgaggttaaggattggaaagcggttcgtgtggatctggtgatcacgccattcgagcagttcgcctatgcgctgctcggttggacgggcagcggccaatttcgtcgcgatctgcgtcgctatgcggaggaagagcgcgacatgctgctcgacaaccataatctctacgacctgaaaaagggcatctttctgagtgcgggcagcgaagaagagattttcggtcatctgggtctggattatctggagccgtgggaacgcaacgcg

SEQ ID NO: 4050 - protein, 394 aa, synthetic construct
  REGION 1..394: note = Variant of terminal deoxynucleotidyl transferase
MHHHHHHGGSGHPPSNTPEKEVPSVIARHVSQYACQRKTTLNNYNKKFTDALEIMAENYKFKENLQACLEAKRAASIFKSLPFEVTSMKDIQGLPCITDDVRDVIEEIIEEGESSRVKEILNDERYKAFKQFTSVFGVGVKTSEKWYRMGLRTVEEAKASKSLKLSKMQKAGFLYYEDLASGVSKEEADAVTLIVKETVRTVVPDALVTIAGGFRRGKPMGHDVDFLITNPGRPEDDELLHKVVDLLKKQGLLLYEDIRESTFVEGQLPSPKIDALDNHQKCFAILKLYQPKVDNSAVGTSKKSDMAEVKDWKAVRVDLVITPFEQFAYALLGWTGSGQFRRDLRRYAEEERDMLLDNHNLYDLKKGIFLSAGSEEEIFGHLGLDYLEPWERNA

SEQ ID NO: 4051 - DNA, 1182 bp, synthetic construct
  misc_feature 1..1182: note = Variant of terminal deoxynucleotidyl transferase
  source 1..1182: mol_type = other DNA
atgcatcaccaccatcatcatgggggttctggtcatccgccgagcaataccccggagaaggaggtgccgagcgttatcgcccgtcatgttagtcagtacgcgtgccagcgcaagaccacgctgaataactacaacaaaaagttcaccgacgcgctggagatcatggccgagaactacaaatttaaagagaacctgcaggcgtgtctggaagccaagcgcgccgcgagtatttttaaaagcctgccgttcgaggttaccagcatgaaagacatccaaggtctgccgtgcattaccgacgacgtacgtgacgtgatcgaggagatcatcgaagagggcgagagcagccgtgttaaagaaatcctcaatgacgagcgctacaaggcctttaagcagttcaccagcgtgttcggtgtgggcgtgaaaacctcggaaaagtggtaccgtatgggcctccgtacggttgaagaagcaaaggccagtaagagtctgaagctgagcaagatgcagaaggcgggcttcctgtattacgaggatctggcgagcggtgttagtaaagaagaagccgatgccgttacgctcatcgtgaaggaaacggtgcgtaccgttgtgccggatgcgctggtgaccatcgccggcggtttccgccgtggcaaacctatgggccacgacgttgactttctgatcacgaacccgggccgtcctgaagatgacgagctgctccacaaagtggttgatctgctcaagaagcaaggtctgctgctgtacgaagacatccgtgagagcacgttcgtggagactcaactgccaagtcctaaaatcgacgccctggacaaccatcagaagtgcttcgccattctcaagctgtaccagccgaaggtggataacagtgcggttgggacgagtaagaaaagtgacatggctgaggttaaggattggaaagcggttcgtgtggatctggtgatcacgccattcgagcagttcgcctatgcgctgctcggttggacgggcagcggccaatttcgtcgcgatctgcgtcgctatgcggaggaagagcgcgacatgctgctcgacaaccatcgtctctacgacctgaaaaagggcatctttctgagtgcgggcagcgaagaagagattttcggtcatctgggtctggattatctggagccgtgggaacgcaacgcg

SEQ ID NO: 4052 - protein, 394 aa, synthetic construct
  REGION 1..394: note = Variant of terminal deoxynucleotidyl transferase
MHHHHHHGGSGHPPSNTPEKEVPSVIARHVSQYACQRKTTLNNYNKKFTDALEIMAENYKFKENLQACLEAKRAASIFKSLPFEVTSMKDIQGLPCITDDVRDVIEEIIEEGESSRVKEILNDERYKAFKQFTSVFGVGVKTSEKWYRMGLRTVEEAKASKSLKLSKMQKAGFLYYEDLASGVSKEEADAVTLIVKETVRTVVPDALVTIAGGFRRGKPMGHDVDFLITNPGRPEDDELLHKVVDLLKKQGLLLYEDIRESTFVETQLPSPKIDALDNHQKCFAILKLYQPKVDNSAVGTSKKSDMAEVKDWKAVRVDLVITPFEQFAYALLGWTGSGQFRRDLRRYAEEERDMLLDNHRLYDLKKGIFLSAGSEEEIFGHLGLDYLEPWERNA

SEQ ID NO: 4053 - DNA, 1182 bp, synthetic construct
  misc_feature 1..1182: note = Variant of terminal deoxynucleotidyl transferase
  source 1..1182: mol_type = other DNA
atgcatcaccaccatcatcatgggggttctggtcatccgccgagcaataccccggagaaggaggtgccgagcgttatcgcccgtcatgttagtcagtacgcgtgccagcgcaagaccacgctgaataactacaacaaaaagttcaccgacgcgctggagatcatggccgagaactacaaatttaaagagaacctgcaggcgtgtctggaagccaagcgcgccgcgagtatttttaaaagcctgccgttcgaggttaccagcatgaaagacatccaaggtctgccgtgcattaccgacgacgtacgtgacgtgatcgaggagatcatcgaagagggcgagagcagccgtgttaaagaaatcctcaatgacgagcgctacaaggcctttaagcagttcaccagcgtgttcggtgtgggcgtgaaaacctcggaaaagtggtaccgtatgggcctccgtacggttgaagaagcaaaggccagtaagagtctgaagctgagcaagatgcagaaggcgggcttcctgtattacgaggatctggcgagcggtgttagtaaagaagaagccgatgccgttacgctcatcgtgaaggaaacggtgcgtaccgttgtgccggatgcgctggtgaccatcgccggcggtttccgccgtggcaaacctatgggccacgacgttgactttctgatcacgaacccgggccgtcctgaagatgacgagctgctccacaaagtggttgatctgctcaagaagcaaggtctgctgctgtacgaagacatccgtgagagcacgttcgtggaggggcaactgccaagtcctaaaatcgacgccctggacaaccatcagaagtgcttcgccattctcaagctgtaccagccgaaggtggataacagtgcggttgggacgagtaagaaaagtgacatggctgaggttaaggattggaaagcggttcgtgtggatctggtgatcacgccattcgagcagttcgcctatgcgctgctcggttggacgggcagcggccaatttcgtcgcgatctgcgtcgctatgcggaggaagagcgcgacatgctgctcgacaaccatcgtctctacgacctgaaaaagggcatctttctgagtgcgggcagcgaagcggagattttcggtcatctgggtctggattatctggagccgtgggaacgcaacgcg

SEQ ID NO: 4054 - protein, 394 aa, synthetic construct
  REGION 1..394: note = Variant of terminal deoxynucleotidyl transferase
MHHHHHHGGSGHPPSNTPEKEVPSVIARHVSQYACQRKTTLNNYNKKFTDALEIMAENYKFKENLQACLEAKRAASIFKSLPFEVTSMKDIQGLPCITDDVRDVIEEIIEEGESSRVKEILNDERYKAFKQFTSVFGVGVKTSEKWYRMGLRTVEEAKASKSLKLSKMQKAGFLYYEDLASGVSKEEADAVTLIVKETVRTVVPDALVTIAGGFRRGKPMGHDVDFLITNPGRPEDDELLHKVVDLLKKQGLLLYEDIRESTFVEGQLPSPKIDALDNHQKCFAILKLYQPKVDNSAVGTSKKSDMAEVKDWKAVRVDLVITPFEQFAYALLGWTGSGQFRRDLRRYAEEERDMLLDNHRLYDLKKGIFLSAGSEAEIFGHLGLDYLEPWERNA

SEQ ID NO: 4055 - DNA, 1182 bp, synthetic construct
  misc_feature 1..1182: note = Variant of terminal deoxynucleotidyl transferase
  source 1..1182: mol_type = other DNA
atgcatcaccaccatcatcatgggggttctggtcatccgccgagcaataccccggagaaggaggtgccgagcgttatcgcccgtcatgttagtcagtacgcgtgccagcgcaagaccacgctgaataactacaacaaaaagttcaccgacgcgctggagatcatggccgagaactacaaatttaaagagaacctgcaggcgtgtctggaagccaagcgcgccgcgagtatttttaaaagcctgccgttcgaggttaccagcatgaaagacatccaaggtctgccgtgcattaccgacgacgtacgtgacgtgatcgaggagatcatcgaagagggcgagagcagccgtgttaaagaaatcctcaatgacgagcgctacaaggcctttaagcagttcaccagcgtgttcggtgtgggcgtgaaaacctcggaaaagtggtaccgtatgggcctccgtacggttgaagaagcaaaggccagtaagagtctgaagctgagcaagatgcagaaggcgggcttcctgtattacgaggatctggcgagcggtgttagtaaagaagaagccgatgccgttacgctcatcgtgaaggaaacggtgcgtaccgttgtgccggatgcgctggtgaccatcgccggcggtttccgccgtggcaaacctatgggccacgacgttgactttctgatcacgaacccgggccgtcctgaagatgacgagctgctccacaaagtggttgatctgctcaagaagcaaggtctgctgctgtacgaagacatccgtgagagcacgttcgtggaggggcaactgccaagtgggaaaatcgacgccctggacaaccatcagaagtgcttcgccattctcaagctgtaccagccgaaggtggataacagtgcggttgggacgagtaagaaaagtgacatggctgaggttaaggattggaaagcggttcgtgtggatctggtgatcacgccattcgagcagttcgcctatgcgctgctcggttggacgggcagcggccaatttcgtcgcgatctgcgtcgctatgcggaggaagagcgcgacatgctgctcgacaaccatcgtctctacgacctgaaaaagggcatctttctgagtgcgggcagcgaagaagagattttcggtcatctgggtctggattatctggagccgtgggaacgcaacgcg

SEQ ID NO: 4056 - protein, 394 aa, synthetic construct
  REGION 1..394: note = Variant of terminal deoxynucleotidyl transferase
MHHHHHHGGSGHPPSNTPEKEVPSVIARHVSQYACQRKTTLNNYNKKFTDALEIMAENYKFKENLQACLEAKRAASIFKSLPFEVTSMKDIQGLPCITDDVRDVIEEIIEEGESSRVKEILNDERYKAFKQFTSVFGVGVKTSEKWYRMGLRTVEEAKASKSLKLSKMQKAGFLYYEDLASGVSKEEADAVTLIVKETVRTVVPDALVTIAGGFRRGKPMGHDVDFLITNPGRPEDDELLHKVVDLLKKQGLLLYEDIRESTFVEGQLPSGKIDALDNHQKCFAILKLYQPKVDNSAVGTSKKSDMAEVKDWKAVRVDLVITPFEQFAYALLGWTGSGQFRRDLRRYAEEERDMLLDNHRLYDLKKGIFLSAGSEEEIFGHLGLDYLEPWERNA

SEQ ID NO: 4057 - DNA, 1182 bp, synthetic construct
  misc_feature 1..1182: note = Variant of terminal deoxynucleotidyl transferase
  source 1..1182: mol_type = other DNA
atgcatcaccaccatcatcatgggggttctggtcatccgccgagcaataccccggagaaggaggtgccgagcgttatcgcccgtcatgttagtcagtacgcgtgccagcgcaagaccacgctgaataactacaacaaaaagttcaccgacgcgctggagatcatggccgagaactacaaatttaaagagaacctgcaggcgtgtctggaagccaagcgcgccgcgagtatttttaaaagcctgccgttcgaggttaccagcatgaaagacatccaaggtctgccgtgcattaccgacgacgtacgtgacgtgatcgaggagatcatcgaagagggcgagagcagccgtgttaaagaaatcctcaatgacgagcgctacaaggcctttaagcagttcaccagcgtgttcggtgtgggcgtgaaaacctcggaaaagtggtaccgtatgggcctccgtacggttgaagaagcaaaggccagtaagagtctgaagctgagcaagatgcagaaggcgggcttcctgtattacgaggatctggcgagcggtgttagtaaagaagaagccgatgccgttacgctcatcgtgaaggaaacggtgcgtaccgttgtgccggatgcgctggtgaccatcgccggcggtttccgccgtggcaaacctatgggccacgacgttgactttctgatcacgaacccgggccgtcctgaagatgacgagctgctccacaaagtggttgatctgctcaagaagcaaggtctgctgctgtacgaagacatccgtgagagcacgttcgtggaggggcaactgccaagtcctaaaatcgacaagctggacaaccatcagaagtgcttcgccattctcaagctgtaccagccgaaggtggataacagtgcggttgggacgagtaagaaaagtgacatggctgaggttaaggattggaaagcggttcgtgtggatctggtgatcacgccattcgagcagttcgcctatgcgctgctcggttggacgggcagcggccaatttcgtcgcgatctgcgtcgctatgcggaggaagagcgcgacatgctgctcgacaaccatcgtctctacgacctgaaaaagggcatctttctgagtgcgggcagcgaagaagagattttcggtcatctgggtctggattatctggagccgtgggaacgcaacgcg

SEQ ID NO: 4058 - protein, 394 aa, synthetic construct
  REGION 1..394: note = Variant of terminal deoxynucleotidyl transferase
MHHHHHHGGSGHPPSNTPEKEVPSVIARHVSQYACQRKTTLNNYNKKFTDALEIMAENYKFKENLQACLEAKRAASIFKSLPFEVTSMKDIQGLPCITDDVRDVIEEIIEEGESSRVKEILNDERYKAFKQFTSVFGVGVKTSEKWYRMGLRTVEEAKASKSLKLSKMQKAGFLYYEDLASGVSKEEADAVTLIVKETVRTVVPDALVTIAGGFRRGKPMGHDVDFLITNPGRPEDDELLHKVVDLLKKQGLLLYEDIRESTFVEGQLPSPKIDKLDNHQKCFAILKLYQPKVDNSAVGTSKKSDMAEVKDWKAVRVDLVITPFEQFAYALLGWTGSGQFRRDLRRYAEEERDMLLDNHRLYDLKKGIFLSAGSEEEIFGHLGLDYLEPWERNA

SEQ ID NO: 4059 - DNA, 1182 bp, synthetic construct
  misc_feature 1..1182: note = Variant of terminal deoxynucleotidyl transferase
  source 1..1182: mol_type = other DNA
atgcatcaccaccatcatcatgggggttctggtcatccgccgagcaataccccggagaaggaggtgccgagcgttatcgcccgtcatgttagtcagtacgcgtgccagcgcaagaccacgctgaataactacaacaaaaagttcaccgacgcgctggagatcatggccgagaactacaaatttaaagagaacctgcaggcgtgtctggaagccaagcgcgccgcgagtatttttaaaagcctgccgttcgaggttaccagcatgaaagacatccaaggtctgccgtgcattaccgacgacgtacgtgacgtgatcgaggagatcatcgaagagggcgagagcagccgtgttaaagaaatcctcaatgacgagcgctacaaggcctttaagcagttcaccagcgtgttcggtgtgggcgtgaaaacctcggaaaagtggtaccgtatgggcctccgtacggttgaagaagcaaaggccagtaagagtctgaagctgagcaagatgcagaaggcgggcttcctgtattacgaggatctggcgagcggtgttagtaaagaagaagccgatgccgttacgctcatcgtgaaggaaacggtgcgtaccgttgtgccggatgcgctggtgaccatcgccggcggtttccgccgtggcaaacctatgggccacgacgttgactttctgatcacgaacccgggccgtcctgaagatgacgagctgctccacaaagtggttgatctgctcaagaagcaaggtctgctgctgtacgaagacatccgtgagagcacgttcgtggaggggcaactgccaagtcctaaaatcgacgccctggacaaccatcagaagtgcttcgccattctcaagctgtaccagccgaaggtggataacagtgcggttgggacgagtaagaaaagtgacatggctgaggttaaggattggaaagcggttcgtgtggatctggtgatcacgccattcgtgcagttcgcctatgcgctgctcggttggacgggcagcggccaatttcgtcgcgatctgcgtcgctatgcggaggaagagcgcgacatgctgctcgacaaccatcgtctctacgacctgaaaaagggcatctttctgagtgcgggcagcgaagaagagattttcggtcatctgggtctggattatctggagccgtgggaacgcaacgcg

SEQ ID NO: 4060 - protein, 394 aa, synthetic construct
  REGION 1..394: note = Variant of terminal deoxynucleotidyl transferase
MHHHHHHGGSGHPPSNTPEKEVPSVIARHVSQYACQRKTTLNNYNKKFTDALEIMAENYKFKENLQACLEAKRAASIFKSLPFEVTSMKDIQGLPCITDDVRDVIEEIIEEGESSRVKEILNDERYKAFKQFTSVFGVGVKTSEKWYRMGLRTVEEAKASKSLKLSKMQKAGFLYYEDLASGVSKEEADAVTLIVKETVRTVVPDALVTIAGGFRRGKPMGHDVDFLITNPGRPEDDELLHKVVDLLKKQGLLLYEDIRESTFVEGQLPSPKIDALDNHQKCFAILKLYQPKVDNSAVGTSKKSDMAEVKDWKAVRVDLVITPFVQFAYALLGWTGSGQFRRDLRRYAEEERDMLLDNHRLYDLKKGIFLSAGSEEEIFGHLGLDYLEPWERNA

SEQ ID NO: 4061 - DNA, 1182 bp, synthetic construct
  misc_feature 1..1182: note = Variant of terminal deoxynucleotidyl transferase
  source 1..1182: mol_type = other DNA
atgcatcaccaccatcatcatgggggttctggtcatccgccgagcaataccccggagaaggaggtgccgagcgttatcgcccgtcatgttagtcagtacgcgtgccagcgcaagaccacgctgaataactacaacaaaaagttcaccgacgcgctggagatcatggccgagaactacaaatttaaagagaacctgcaggcgtgtctggaagccaagcgcgccgcgagtatttttaaaagcctgccgttcgaggttaccagcatgaaagacatccaaggtctgccgtgcattaccgacgacgtacgtgacgtgatcgaggagatcatcgaagagggcgagagcagccgtgttaaagaaatcctcaatgacgagcgctacaaggcctttaagcagttcaccagcgtgttcggtgtgggcgtgaaaacctcggaaaagtggtaccgtatgggcctccgtacggttgaagaagcaaaggccagtaagagtctgaagctgagcaagatgcagaaggcgggcttcctgtattacgaggatctggcgagcggtgttagtaaagaagaagccgatgccgttacgctcatcgtgaaggaaacggtgcgtaccgttgtgccggatgcgctggtgaccatcgccggcggtttccgccgtggcaaacctatgggccacgacgttgactttctgatcacgaacccgggccgtcctgaagatgacgagctgctccacaaagtggttgatctgctcaagaagcaaggtctgctgctgtacgaagacatccgtgagagcacgttcgtggaggggtcgctgccaagtcctaaaatcgacgccctggacaaccatcagaagtgcttcgccattctcaagctgtaccagccgaaggtggataacagtgcggttgggacgagtaagaaaagtgacatggctgaggttaaggattggaaagcggttcgtgtggatctggtgatcacgccattcgagcagttcgcctatgcgctgctcggttggacgggcagcggccaatttcgtcgcgatctgcgtcgctatgcggaggaagagcgcgacatgctgctcgacaaccatcgtctctacgacctgaaaaagggcatctttctgagtgcgggcagcgaagaagagattttcggtcatctgggtctggattatctggagccgtgggaacgcaacgcg

SEQ ID NO: 4062 - protein, 394 aa, synthetic construct
  REGION 1..394: note = Variant of terminal deoxynucleotidyl transferase
MHHHHHHGGSGHPPSNTPEKEVPSVIARHVSQYACQRKTTLNNYNKKFTDALEIMAENYKFKENLQACLEAKRAASIFKSLPFEVTSMKDIQGLPCITDDVRDVIEEIIEEGESSRVKEILNDERYKAFKQFTSVFGVGVKTSEKWYRMGLRTVEEAKASKSLKLSKMQKAGFLYYEDLASGVSKEEADAVTLIVKETVRTVVPDALVTIAGGFRRGKPMGHDVDFLITNPGRPEDDELLHKVVDLLKKQGLLLYEDIRESTFVEGSLPSPKIDALDNHQKCFAILKLYQPKVDNSAVGTSKKSDMAEVKDWKAVRVDLVITPFEQFAYALLGWTGSGQFRRDLRRYAEEERDMLLDNHRLYDLKKGIFLSAGSEEEIFGHLGLDYLEPWERNA

SEQ ID NO: 4063 - DNA, 1182 bp, synthetic construct
  misc_feature 1..1182: note = Variant of terminal deoxynucleotidyl transferase
  source 1..1182: mol_type = other DNA
atgcatcaccaccatcatcatgggggttctggtcatccgccgagcaataccccggagaaggaggtgccgagcgttatcgcccgtcatgttagtcagtacgcgtgccagcgcaagaccacgctgaataactacaacaaaaagttcaccgacgcgctggagatcatggccgagaactacaaatttaaagagaacctgcaggcgtgtctggaagccaagcgcgccgcgagtatttttaaaagcctgccgttcgaggttaccagcatgaaagacatccaaggtctgccgtgcattaccgacgacgtacgtgacgtgatcgaggagatcatcgaagagggcgagagcagccgtgttaaagaaatcctcaatgacgagcgctacaaggcctttaagcagttcaccagcgtgttcggtgtgggcgtgaaaacctcggaaaagtggtaccgtatgggcctccgtacggttgaagaagcaaaggccagtaagagtctgaagctgagcaagatgcagaaggcgggcttcctgtattacgaggatctggcgagcggtgttagtaaagaagaagccgatgccgttacgctcatcgtgaaggaaacggtgcgtaccgttgtgccggatgcgctggtgaccatcgccggcggtttccgccgtggcaaacctatgggccacgacgttgactttctgatcacgaacccgggccgtcctgaagatgacgagctgctccacaaagtggttgatctgctcaagaagcaaggtctgctgctgtacgaagacatccgtgagagcacgttcgtggaggggcaactgccaagtcctaaaatcgacgccctggacaaccatcagaagtgcttcgccattctcaagctgtaccagccgaaggtggataacagtgcggttgggacgagtaagaaaagtgacatggctgaggttaaggattggaaagcggttcgtgtggatctggtgatcacgccattccggcagttcgcctatgcgctgctcggttggacgggcagcggccaatttcgtcgcgatctgcgtcgctatgcggaggaagagcgcgacatgctgctcgacaaccatcgtctctacgacctgaaaaagggcatctttctgagtgcgggcagcgaagaagagattttcggtcatctgggtctggattatctggagccgtgggaacgcaacgcg

SEQ ID NO: 4064 - protein, 394 aa, synthetic construct
  REGION 1..394: note = Variant of terminal deoxynucleotidyl transferase
MHHHHHHGGSGHPPSNTPEKEVPSVIARHVSQYACQRKTTLNNYNKKFTDALEIMAENYKFKENLQACLEAKRAASIFKSLPFEVTSMKDIQGLPCITDDVRDVIEEIIEEGESSRVKEILNDERYKAFKQFTSVFGVGVKTSEKWYRMGLRTVEEAKASKSLKLSKMQKAGFLYYEDLASGVSKEEADAVTLIVKETVRTVVPDALVTIAGGFRRGKPMGHDVDFLITNPGRPEDDELLHKVVDLLKKQGLLLYEDIRESTFVEGQLPSPKIDALDNHQKCFAILKLYQPKVDNSAVGTSKKSDMAEVKDWKAVRVDLVITPFRQFAYALLGWTGSGQFRRDLRRYAEEERDMLLDNHRLYDLKKGIFLSAGSEEEIFGHLGLDYLEPWERNA

SEQ ID NO: 4065 - DNA, 1182 bp, synthetic construct
  misc_feature 1..1182: note = Variant of terminal deoxynucleotidyl transferase
  source 1..1182: mol_type = other DNA
atgcatcaccaccatcatcatgggggttctggtcatccgccgagcaataccccggagaaggaggtgccgagcgttatcgcccgtcatgttagtcagtacgcgtgccagcgcaagaccacgctgaataactacaacaaaaagttcaccgacgcgctggagatcatggccgagaactacaaatttaaagagaacctgcaggcgtgtctggaagccaagcgcgccgcgagtatttttaaaagcctgccgttcgaggttaccagcatgaaagacatccaaggtctgccgtgcattaccgacgacgtacgtgacgtgatcgaggagatcatcgaagagggcgagagcagccgtgttaaagaaatcctcaatgacgagcgctacaaggcctttaagcagttcaccagcgtgttcggtgtgggcgtgaaaacctcggaaaagtggtaccgtatgggcctccgtacggttgaagaagcaaaggccagtaagagtctgaagctgagcaagatgcagaaggcgggcttcctgtattacgaggatctggcgagcggtgttagtaaagaagaagccgatgccgttacgctcatcgtgaaggaaacggtgcgtaccgttgtgccggatgcgctggtgaccatcgccggcggtttccgccgtggcaaacctatgggccacgacgttgactttctgatcacgaacccgggccgtcctgaagatgacgagctgctccacaaagtggttgatctgctcaagaagcaaggtctgctgctgtacgaagacatccgtgagagcacgttcgtggaggggcaactgccaagtcctaaaatcgacgccctggacaaccatcagaagtgcttcgccattctcaagctgtaccagccgaaggtggataacagtgcggttgggacgagtaagaaaagtgacatggctgaggttaaggattggaaagcggttcgtgtggatctggtgatcacgccattcgagcagttcgcctatgcgctgctcggttggacgggcagcggccaatttcgtcgcgatctgcgtcgctatgcggaggaagagcgcgacatgctgctcgacaaccatcgtctctacgacctgaaaaagggcatctttctgagtgcgggcagcgaagaagagattttcggtcatctgacgctggattatctggagccgtgggaacgcaacgcg

SEQ ID NO: 4066 - protein, 394 aa, synthetic construct
  REGION 1..394: note = Variant of terminal deoxynucleotidyl transferase
MHHHHHHGGSGHPPSNTPEKEVPSVIARHVSQYACQRKTTLNNYNKKFTDALEIMAENYKFKENLQACLEAKRAASIFKSLPFEVTSMKDIQGLPCITDDVRDVIEEIIEEGESSRVKEILNDERYKAFKQFTSVFGVGVKTSEKWYRMGLRTVEEAKASKSLKLSKMQKAGFLYYEDLASGVSKEEADAVTLIVKETVRTVVPDALVTIAGGFRRGKPMGHDVDFLITNPGRPEDDELLHKVVDLLKKQGLLLYEDIRESTFVEGQLPSPKIDALDNHQKCFAILKLYQPKVDNSAVGTSKKSDMAEVKDWKAVRVDLVITPFEQFAYALLGWTGSGQFRRDLRRYAEEERDMLLDNHRLYDLKKGIFLSAGSEEEIFGHLTLDYLEPWERNA

SEQ ID NO: 4067 - DNA, 1182 bp, synthetic construct
  misc_feature 1..1182: note = Variant of terminal deoxynucleotidyl transferase
  source 1..1182: mol_type = other DNA
atgcatcaccaccatcatcatgggggttctggtcatccgccgagcaataccccggagaaggaggtgccgagcgttatcgcccgtcatgttagtcagtacgcgtgccagcgcaagaccacgctgaataactacaacaaaaagttcaccgacgcgctggagatcatggccgagaactacaaatttaaagagaacctgcaggcgtgtctggaagccaagcgcgccgcgagtatttttaaaagcctgccgttcgaggttaccagcatgaaagacatccaaggtctgccgtgcattaccgacgacgtacgtgacgtgatcgaggagatcatcgaagagggcgagagcagccgtgttaaagaaatcctcaatgacgagcgctacaaggcctttaagcagttcaccagcgtgttcggtgtgggcgtgaaaacctcggaaaagtggtaccgtatgggcctccgtacggttgaagaagcaaaggccagtaagagtctgaagctgagcaagatgcagaaggcgggcttcctgtattacgaggatctggcgagcggtgttagtaaagaagaagccgatgccgttacgctcatcgtgaaggaaacggtgcgtaccgttgtgccggatgcgctggtgaccatcgccggcggtttccgccgtggcaaacctatgggccacgacgttgactttctgatcacgaacccgggccgtcctgaagatgacgagctgctccacaaagtggttgatctgctcaagaagcaaggtctgctgctgtacgaagacatccgtgagagcacgttcgtggaggggcaactgccaagtcctaaaatcgacgccctggacaaccatcagaagtgcttcgccattctcaagctgtaccagccgaaggtggataacagtgcggttgggacgagtaagaaaagtgacatggctgaggttaaggattggaaagcggttcgtgtggatctggtgatcacgccattccctcagttcgcctatgcgctgctcggttggacgggcagcggccaatttcgtcgcgatctgcgtcgctatgcggaggaagagcgcgacatgctgctcgacaaccatcgtctctacgacctgaaaaagggcatctttctgagtgcgggcagcgaagaagagattttcggtcatctgggtctggattatctggagccgtgggaacgcaacgcg

SEQ ID NO: 4068 - protein, 394 aa, synthetic construct
  REGION 1..394: note = Variant of terminal deoxynucleotidyl transferase
MHHHHHHGGSGHPPSNTPEKEVPSVIARHVSQYACQRKTTLNNYNKKFTDALEIMAENYKFKENLQACLEAKRAASIFKSLPFEVTSMKDIQGLPCITDDVRDVIEEIIEEGESSRVKEILNDERYKAFKQFTSVFGVGVKTSEKWYRMGLRTVEEAKASKSLKLSKMQKAGFLYYEDLASGVSKEEADAVTLIVKETVRTVVPDALVTIAGGFRRGKPMGHDVDFLITNPGRPEDDELLHKVVDLLKKQGLLLYEDIRESTFVEGQLPSPKIDALDNHQKCFAILKLYQPKVDNSAVGTSKKSDMAEVKDWKAVRVDLVITPFPQFAYALLGWTGSGQFRRDLRRYAEEERDMLLDNHRLYDLKKGIFLSAGSEEEIFGHLGLDYLEPWERNA

SEQ ID NO: 4069 - DNA, 1182 bp, synthetic construct
  misc_feature 1..1182: note = Variant of terminal deoxynucleotidyl transferase
  source 1..1182: mol_type = other DNA
atgcatcaccaccatcatcatgggggttctggtcatccgccgagcaataccccggagaaggaggtgccgagcgttatcgcccgtcatgttagtcagtacgcgtgccagcgcaagaccacgctgaataactacaacaaaaagttcaccgacgcgctggagatcatggccgagaactacaaatttaaagagaacctgcaggcgtgtctggaagccaagcgcgccgcgagtatttttaaaagcctgccgttcgaggttaccagcatgaaagacatccaaggtctgccgtgcattaccgacgacgtacgtgacgtgatcgaggagatcatcgaagagggcgagagcagccgtgttaaagaaatcctcaatgacgagcgctacaaggcctttaagcagttcaccagcgtgttcggtgtgggcgtgaaaacctcggaaaagtggtaccgtatgggcctccgtacggttgaagaagcaaaggccagtaagagtctgaagctgagcaagatgcagaaggcgggcttcctgtattacgaggatctggcgagcggtgttagtaaagaagaagccgatgccgttacgctcatcgtgaaggaaacggtgcgtaccgttgtgccggatgcgctggtgaccatcgccggcggtttccgccgtggcaaacctatgggccacgacgttgactttctgatcacgaacccgggccgtcctgaagatgacgagctgctccacaaagtggttgatctgctcaagaagcaaggtctgctgctgtacgaagacatccgtgagagcacgttcgtggaggggcaactgccaagtcctaaaatcgacgccctggacaaccatcagaagtgcttcgccattctcaagctgtaccagccgaaggtggataacagtgcggttgggacgagtaagaaaagtgacatggctgaggttaaggattggaaagcggttcgtgtggatctggtgatcacgccattcgggcagttcgcctatgcgctgctcggttggacgggcagcggccaatttcgtcgcgatctgcgtcgctatgcggaggaagagcgcgacatgctgctcgacaaccatcgtctctacgacctgaaaaagggcatctttctgagtgcgggcagcgaagaagagattttcggtcatctgggtctggattatctggagccgtgggaacgcaacgcg

SEQ ID NO: 4070 - protein, 394 aa, synthetic construct
  REGION 1..394: note = Variant of terminal deoxynucleotidyl transferase
MHHHHHHGGSGHPPSNTPEKEVPSVIARHVSQYACQRKTTLNNYNKKFTDALEIMAENYKFKENLQACLEAKRAASIFKSLPFEVTSMKDIQGLPCITDDVRDVIEEIIEEGESSRVKEILNDERYKAFKQFTSVFGVGVKTSEKWYRMGLRTVEEAKASKSLKLSKMQKAGFLYYEDLASGVSKEEADAVTLIVKETVRTVVPDALVTIAGGFRRGKPMGHDVDFLITNPGRPEDDELLHKVVDLLKKQGLLLYEDIRESTFVEGQLPSPKIDALDNHQKCFAILKLYQPKVDNSAVGTSKKSDMAEVKDWKAVRVDLVITPFGQFAYALLGWTGSGQFRRDLRRYAEEERDMLLDNHRLYDLKKGIFLSAGSEEEIFGHLGLDYLEPWERNA

SEQ ID NO: 4071 - DNA, 1182 bp, synthetic construct
  misc_feature 1..1182: note = Variant of terminal deoxynucleotidyl transferase
  source 1..1182: mol_type = other DNA
atgcatcaccaccatcatcatgggggttctggtcatccgccgagcaataccccggagaaggaggtgccgagcgttatcgcccgtcatgttagtcagtacgcgtgccagcgcaagaccacgctgaataactacaacaaaaagttcaccgacgcgctggagatcatggccgagaactacaaatttaaagagaacctgcaggcgtgtctggaagccaagcgcgccgcgagtatttttaaaagcctgccgttcgaggttaccagcatgaaagacatccaaggtctgccgtgcattaccgacgacgtacgtgacgtgatcgaggagatcatcgaagagggcgagagcagccgtgttaaagaaatcctcaatgacgagcgctacaaggcctttaagcagttcaccagcgtgttcggtgtgggcgtgaaaacctcggaaaagtggtaccgtatgggcctccgtacggttgaagaagcaaaggccagtaagagtctgaagctgagcaagatgcagaaggcgggcttcctgtattacgaggatctggcgagcggtgttagtaaagaagaagccgatgccgttacgctcatcgtgaaggaaacggtgcgtaccgttgtgccggatgcgctggtgaccatcgccggcggtttccgccgtggcaaacctatgggccacgacgttgactttctgatcacgaacccgggccgtcctgaagatgacgagctgctccacaaagtggttgatctgctcaagaagcaaggtctgctgctgtacgaagacatccgtgagagcacgttcgtggaggggcaactgccaagtacgaaaatcgacgccctggacaaccatcagaagtgcttcgccattctcaagctgtaccagccgaaggtggataacagtgcggttgggacgagtaagaaaagtgacatggctgaggttaaggattggaaagcggttcgtgtggatctggtgatcacgccattcgagcagttcgcctatgcgctgctcggttggacgggcagcggccaatttcgtcgcgatctgcgtcgctatgcggaggaagagcgcgacatgctgctcgacaaccatcgtctctacgacctgaaaaagggcatctttctgagtgcgggcagcgaagaagagattttcggtcatctgggtctggattatctggagccgtgggaacgcaacgcg

SEQ ID NO: 4072 - protein, 394 aa, synthetic construct
  REGION 1..394: note = Variant of terminal deoxynucleotidyl transferase
MHHHHHHGGSGHPPSNTPEKEVPSVIARHVSQYACQRKTTLNNYNKKFTDALEIMAENYKFKENLQACLEAKRAASIFKSLPFEVTSMKDIQGLPCITDDVRDVIEEIIEEGESSRVKEILNDERYKAFKQFTSVFGVGVKTSEKWYRMGLRTVEEAKASKSLKLSKMQKAGFLYYEDLASGVSKEEADAVTLIVKETVRTVVPDALVTIAGGFRRGKPMGHDVDFLITNPGRPEDDELLHKVVDLLKKQGLLLYEDIRESTFVEGQLPSTKIDALDNHQKCFAILKLYQPKVDNSAVGTSKKSDMAEVKDWKAVRVDLVITPFEQFAYALLGWTGSGQFRRDLRRYAEEERDMLLDNHRLYDLKKGIFLSAGSEEEIFGHLGLDYLEPWERNA

SEQ ID NO: 4073 - DNA, 1182 bp, synthetic construct
  misc_feature 1..1182: note = Variant of terminal deoxynucleotidyl transferase
  source 1..1182: mol_type = other DNA
atgcatcaccaccatcatcatgggggttctggtcatccgccgagcaataccccggagaaggaggtgccgagcgttatcgcccgtcatgttagtcagtacgcgtgccagcgcaagaccacgctgaataactacaacaaaaagttcaccgacgcgctggagatcatggccgagaactacaaatttaaagagaacctgcaggcgtgtctggaagccaagcgcgccgcgagtatttttaaaagcctgccgttcgaggttaccagcatgaaagacatccaaggtctgccgtgcattaccgacgacgtacgtgacgtgatcgaggagatcatcgaagagggcgagagcagccgtgttaaagaaatcctcaatgacgagcgctacaaggcctttaagcagttcaccagcgtgttcggtgtgggcgtgaaaacctcggaaaagtggtaccgtatgggcctccgtacggttgaagaagcaaaggccagtaagagtctgaagctgagcaagatgcagaaggcgggcttcctgtattacgaggatctggcgagcggtgttagtaaagaagaagccgatgccgttacgctcatcgtgaaggaaacggtgcgtaccgttgtgccggatgcgctggtgaccatcgccggcggtttccgccgtggcaaacctatgggccacgacgttgactttctgatcacgaacccgggccgtcctgaagatgacgagctgctccacaaagtggttgatctgctcaagaagcaaggtctgctgctgtacgaagacatccgtgagagcacgttcgtggaggggcaactgccaagtcctaaaatcgacgccctggacaaccatcagaagtgcttcgccattctcaagctgtaccagccgaaggtggataacagtgcggttgggacgagtaagaaaagtgacatggctgaggttaaggattggaaagcggttcgtgtggatctggtgatcacgccagatgagcagttcgcctatgcgctgctcggttggacgggcagcggccaatttcgtcgcgatctgcgtcgctatgcggaggaagagcgcgacatgctgctcgacaaccatcgtctctacgacctgaaaaagggcatctttctgagtgcgggcagcgaagaagagattttcggtcatctgggtctggattatctggagccgtgggaacgcaacgcg

SEQ ID NO: 4074 - protein, 394 aa, synthetic construct
  REGION 1..394: note = Variant of terminal deoxynucleotidyl transferase
MHHHHHHGGSGHPPSNTPEKEVPSVIARHVSQYACQRKTTLNNYNKKFTDALEIMAENYKFKENLQACLEAKRAASIFKSLPFEVTSMKDIQGLPCITDDVRDVIEEIIEEGESSRVKEILNDERYKAFKQFTSVFGVGVKTSEKWYRMGLRTVEEAKASKSLKLSKMQKAGFLYYEDLASGVSKEEADAVTLIVKETVRTVVPDALVTIAGGFRRGKPMGHDVDFLITNPGRPEDDELLHKVVDLLKKQGLLLYEDIRESTFVEGQLPSPKIDALDNHQKCFAILKLYQPKVDNSAVGTSKKSDMAEVKDWKAVRVDLVITPDEQFAYALLGWTGSGQFRRDLRRYAEEERDMLLDNHRLYDLKKGIFLSAGSEEEIFGHLGLDYLEPWERNA

SEQ ID NO: 4075 - DNA, 1182 bp, synthetic construct
  misc_feature 1..1182: note = Variant of terminal deoxynucleotidyl transferase
  source 1..1182: mol_type = other DNA
atgcatcaccaccatcatcatgggggttctggtcatccgccgagcaataccccggagaaggaggtgccgagcgttatcgcccgtcatgttagtcagtacgcgtgccagcgcaagaccacgctgaataactacaacaaaaagttcaccgacgcgctggagatcatggccgagaactacaaatttaaagagaacctgcaggcgtgtctggaagccaagcgcgccgcgagtatttttaaaagcctgccgttcgaggttaccagcatgaaagacatccaaggtctgccgtgcattaccgacgacgtacgtgacgtgatcgaggagatcatcgaagagggcgagagcagccgtgttaaagaaatcctcaatgacgagcgctacaaggcctttaagcagttcaccagcgtgttcggtgtgggcgtgaaaacctcggaaaagtggtaccgtatgggcctccgtacggttgaagaagcaaaggccagtaagagtctgaagctgagcaagatgcagaaggcgggcttcctgtattacgaggatctggcgagcggtgttagtaaagaagaagccgatgccgttacgctcatcgtgaaggaaacggtgcgtaccgttgtgccggatgcgctggtgaccatcgccggcggtttccgccgtggcaaacctatgggccacgacgttgactttctgatcgttaacccgggccgtcctgaagatgacgagctgctccacaaagtggttgatctgctcaagaagcaaggtctgctgctgtacgaagacatccgtgagagcacgttcgtggaggggcaactgccaagtcctaaaatcgacgccctggacaaccatcagaagtgcttcgccattctcaagctgtaccagccgaaggtggataacagtgcggttgggacgagtaagaaaagtgacatggctgaggttaaggattggaaagcggttcgtgtggatctggtgatcacgccattcgagcagttcgcctatgcgctgctcggttggacgggcagcggccaatttcgtcgcgatctgcgtcgctatgcggaggaagagcgcgacatgctgctcgacaaccatcgtctctacgacctgaaaaagggcatctttctgagtgcgggcagcgaagaagagattttcggtcatctgggtctggattatctggagccgtgggaacgcaacgcg

SEQ ID NO: 4076 - protein, 394 aa, synthetic construct
  REGION 1..394: note = Variant of terminal deoxynucleotidyl transferase
MHHHHHHGGSGHPPSNTPEKEVPSVIARHVSQYACQRKTTLNNYNKKFTDALEIMAENYKFKENLQACLEAKRAASIFKSLPFEVTSMKDIQGLPCITDDVRDVIEEIIEEGESSRVKEILNDERYKAFKQFTSVFGVGVKTSEKWYRMGLRTVEEAKASKSLKLSKMQKAGFLYYEDLASGVSKEEADAVTLIVKETVRTVVPDALVTIAGGFRRGKPMGHDVDFLIVNPGRPEDDELLHKVVDLLKKQGLLLYEDIRESTFVEGQLPSPKIDALDNHQKCFAILKLYQPKVDNSAVGTSKKSDMAEVKDWKAVRVDLVITPFEQFAYALLGWTGSGQFRRDLRRYAEEERDMLLDNHRLYDLKKGIFLSAGSEEEIFGHLGLDYLEPWERNA

SEQ ID NO: 4077 - DNA, 1182 bp, synthetic construct
  misc_feature 1..1182: note = Variant of terminal deoxynucleotidyl transferase
  source 1..1182: mol_type = other DNA
atgcatcaccaccatcatcatgggggttctggtcatccgccgagcaataccccggagaaggaggtgccgagcgttatcgcccgtcatgttagtcagtacgcgtgccagcgcaagaccacgctgaataactacaacaaaaagttcaccgacgcgctggagatcatggccgagaactacaaatttaaagagaacctgcaggcgtgtctggaagccaagcgcgccgcgagtatttttaaaagcctgccgttcgaggttaccagcatgaaagacatccaaggtctgccgtgcattaccgacgacgtacgtgacgtgatcgaggagatcatcgaagagggcgagagcagccgtgttaaagaaatcctcaatgacgagcgctacaaggcctttaagcagttcaccagcgtgttcggtgtgggcgtgaaaacctcggaaaagtggtaccgtatgggcctccgtacggttgaagaagcaaaggccagtaagagtctgaagctgagcaagatgcagaaggcgggcttcctgtattacgaggatctggcgagcggtgttagtaaagaagaagccgatgccgttacgctcatcgtgaaggaaacggtgcgtaccgttgtgccggatgcgctggtgaccatcgccggcggtttccgccgtggcaaacctatgggccacgacgttgactttctgatcacgaacccgggccgtcctgaagatgacgagctgctccacaaagtggttgatctgctcaagaagcaaggtctgctgctgtacgaagacatccgtgagagcacgttcgtggaggggcaactgccaagtcctaaaatcgacgccctggacaaccatcagaagtgcttcgccattctcaagctgtaccagccgaaggtggataacagtgcggttgggacgagtaagaaaagtgacatggctgaggttaaggattggaaagcggttcgtgtggatctggtgatcacgccattcgagcagttcgcctatgcgctgctcggttggacgggcagcggccaatttcgtcgcgatctgcgtcagtatgcggaggaagagcgcgacatgctgctcgacaaccatcgtctctacgacctgaaaaagggcatctttctgagtgcgggcagcgaagaagagattttcggtcatctgggtctggattatctggagccgtgggaacgcaacgcg

SEQ ID NO: 4078 - protein, 394 aa, synthetic construct
  REGION 1..394: note = Variant of terminal deoxynucleotidyl transferase
MHHHHHHGGSGHPPSNTPEKEVPSVIARHVSQYACQRKTTLNNYNKKFTDALEIMAENYKFKENLQACLEAKRAASIFKSLPFEVTSMKDIQGLPCITDDVRDVIEEIIEEGESSRVKEILNDERYKAFKQFTSVFGVGVKTSEKWYRMGLRTVEEAKASKSLKLSKMQKAGFLYYEDLASGVSKEEADAVTLIVKETVRTVVPDALVTIAGGFRRGKPMGHDVDFLITNPGRPEDDELLHKVVDLLKKQGLLLYEDIRESTFVEGQLPSPKIDALDNHQKCFAILKLYQPKVDNSAVGTSKKSDMAEVKDWKAVRVDLVITPFEQFAYALLGWTGSGQFRRDLRQYAEEERDMLLDNHRLYDLKKGIFLSAGSEEEIFGHLGLDYLEPWERNA

SEQ ID NO: 4079 - DNA, 1182 bp, synthetic construct
  misc_feature 1..1182: note = Variant of terminal deoxynucleotidyl transferase
  source 1..1182: mol_type = other DNA
atgcatcaccaccatcatcatgggggttctggtcatccgccgagcaataccccggagaaggaggtgccgagcgttatcgcccgtcatgttagtcagtacgcgtgccagcgcaagaccacgctgaataactacaacaaaaagttcaccgacgcgctggagatcatggccgagaactacaaatttaaagagaacctgcaggcgtgtctggaagccaagcgcgccgcgagtatttttaaaagcctgccgttcgaggttaccagcatgaaagacatccaaggtctgccgtgcattaccgacgacgtacgtgacgtgatcgaggagatcatcgaagagggcgagagcagccgtgttaaagaaatcctcaatgacgagcgctacaaggcctttaagcagttcaccagcgtgttcggtgtgggcgtgaaaacctcggaaaagtggtaccgtatgggcctccgtacggttgaagaagcaaaggccagtaagagtctgaagctgagcaagatgcagaaggcgggcttcctgtattacgaggatctggcgagcggtgttagtaaagaagaagccgatgccgttacgctcatcgtgaaggaaacggtgcgtaccgttgtgccggatgcgctggtgaccatcgccggcggtttccgccgtggcaaacctatgggccacgacgttgactttctgatcacgaacccgggccgtcctgaagatgacgagctgctccacaaagtggttgatctgctcaagaagcaaggtctgctgctgtacgaagacatccgtgagagcacgttcgtggaggggcaactgccaagtcctaaaatcgacgccctggacggtcatcagaagtgcttcgccattctcaagctgtaccagccgaaggtggataacagtgcggttgggacgagtaagaaaagtgacatggctgaggttaaggattggaaagcggttcgtgtggatctggtgatcacgccattcgagcagttcgcctatgcgctgctcggttggacgggcagcggccaatttcgtcgcgatctgcgtcgctatgcggaggaagagcgcgacatgctgctcgacaaccatcgtctctacgacctgaaaaagggcatctttctgagtgcgggcagcgaagaagagattttcggtcatctgggtctggattatctggagccgtgggaacgcaacgcg

SEQ ID NO: 4080 - protein, 394 aa, synthetic construct
  REGION 1..394: note = Variant of terminal deoxynucleotidyl transferase
MHHHHHHGGSGHPPSNTPEKEVPSVIARHVSQYACQRKTTLNNYNKKFTDALEIMAENYKFKENLQACLEAKRAASIFKSLPFEVTSMKDIQGLPCITDDVRDVIEEIIEEGESSRVKEILNDERYKAFKQFTSVFGVGVKTSEKWYRMGLRTVEEAKASKSLKLSKMQKAGFLYYEDLASGVSKEEADAVTLIVKETVRTVVPDALVTIAGGFRRGKPMGHDVDFLITNPGRPEDDELLHKVVDLLKKQGLLLYEDIRESTFVEGQLPSPKIDALDGHQKCFAILKLYQPKVDNSAVGTSKKSDMAEVKDWKAVRVDLVITPFEQFAYALLGWTGSGQFRRDLRRYAEEERDMLLDNHRLYDLKKGIFLSAGSEEEIFGHLGLDYLEPWERNA

SEQ ID NO: 4081 - DNA, 1182 bp, synthetic construct
  misc_feature 1..1182: note = Variant of terminal deoxynucleotidyl transferase
  source 1..1182: mol_type = other DNA
atgcatcaccaccatcatcatgggggttctggtcatccgccgagcaataccccggagaaggaggtgccgagcgttatcgcccgtcatgttagtcagtacgcgtgccagcgcaagaccacgctgaataactacaacaaaaagttcaccgacgcgctggagatcatggccgagaactacaaatttaaagagaacctgcaggcgtgtctggaagccaagcgcgccgcgagtatttttaaaagcctgccgttcgaggttaccagcatgaaagacatccaaggtctgccgtgcattaccgacgacgtacgtgacgtgatcgaggagatcatcgaagagggcgagagcagccgtgttaaagaaatcctcaatgacgagcgctacaaggcctttaagcagttcaccagcgtgttcggtgtgggcgtgaaaacctcggaaaagtggtaccgtatgggcctccgtacggttgaagaagcaaaggccagtaagagtctgaagctgagcaagatgcagaaggcgggcttcctgtattacgaggatctggcgagcggtgttagtaaagaagaagccgatgccgttacgctcatcgtgaaggaaacggtgcgtaccgttgtgccggatgcgctggtgaccatcgccggcggtttccgccgtggcaaacctatgggccacgacgttgactttctgatcacgaacccgggccgtcctgaagatgacgagctgctccacaaagtggttgatctgctcaagaagcaaggtctgctgctgtacgaagacatccgtgagagcacgttcgtggaggggcaactgccaagtcctaaaatcgacgccctggaccctcatcagaagtgcttcgccattctcaagctgtaccagccgaaggtggataacagtgcggttgggacgagtaagaaaagtgacatggctgaggttaaggattggaaagcggttcgtgtggatctggtgatcacgccattcgagcagttcgcctatgcgctgctcggttggacgggcagcggccaatttcgtcgcgatctgcgtcgctatgcggaggaagagcgcgacatgctgctcgacaaccatcgtctctacgacctgaaaaagggcatctttctgagtgcgggcagcgaagaagagattttcggtcatctgggtctggattatctggagccgtgggaacgcaacgcg

SEQ ID NO: 4082 - protein, 394 aa, synthetic construct
  REGION 1..394: note = Variant of terminal deoxynucleotidyl transferase
MHHHHHHGGSGHPPSNTPEKEVPSVIARHVSQYACQRKTTLNNYNKKFTDALEIMAENYKFKENLQACLEAKRAASIFKSLPFEVTSMKDIQGLPCITDDVRDVIEEIIEEGESSRVKEILNDERYKAFKQFTSVFGVGVKTSEKWYRMGLRTVEEAKASKSLKLSKMQKAGFLYYEDLASGVSKEEADAVTLIVKETVRTVVPDALVTIAGGFRRGKPMGHDVDFLITNPGRPEDDELLHKVVDLLKKQGLLLYEDIRESTFVEGQLPSPKIDALDPHQKCFAILKLYQPKVDNSAVGTSKKSDMAEVKDWKAVRVDLVITPFEQFAYALLGWTGSGQFRRDLRRYAEEERDMLLDNHRLYDLKKGIFLSAGSEEEIFGHLGLDYLEPWERNA

SEQ ID NO: 4083 - DNA, 1182 bp, synthetic construct
  misc_feature 1..1182: note = Variant of terminal deoxynucleotidyl transferase
  source 1..1182: mol_type = other DNA
atgcatcaccaccatcatcatgggggttctggtcatccgccgagcaataccccggagaaggaggtgccgagcgttatcgcccgtcatgttagtcagtacgcgtgccagcgcaagaccacgctgaataactacaacaaaaagttcaccgacgcgctggagatcatggccgagaactacaaatttaaagagaacctgcaggcgtgtctggaagccaagcgcgccgcgagtatttttaaaagcctgccgttcgaggttaccagcatgaaagacatccaaggtctgccgtgcattaccgacgacgtacgtgacgtgatcgaggagatcatcgaagagggcgagagcagccgtgttaaagaaatcctcaatgacgagcgctacaaggcctttaagcagttcaccagcgtgttcggtgtgggcgtgaaaacctcggaaaagtggtaccgtatgggcctccgtacggttgaagaagcaaaggccagtaagagtctgaagctgagcaagatgcagaaggcgggcttcctgtattacgaggatctggcgagcggtgttagtaaagaagaagccgatgccgttacgctcatcgtgaaggaaacggtgcgtaccgttgtgccggatgcgctggtgaccatcgccggcggtttccgccgtggcaaacctatgggccacgacgttgactttctgatcacgaacccgggccgtcctgaagatgacgagctgctccacaaagtggttgatctgctcaagaagcaaggtctgctgctgtacgaagacatccgtgagagcacgttcgtggaggggcaactgccaagtcctaaaatcgacgccctggacaaccatcagaagtgcttcgccattctcaagctgtaccagccgaaggtggataacagtgcggttgggacgagtaagaaaagtgacatggctgaggttaaggattggaaagcggttcgtgtggatctggtgatcacgccagtggagcagttcgcctatgcgctgctcggttggacgggcagcggccaatttcgtcgcgatctgcgtcgctatgcggaggaagagcgcgacatgctgctcgacaaccatcgtctctacgacctgaaaaagggcatctttctgagtgcgggcagcgaagaagagattttcggtcatctgggtctggattatctggagccgtgggaacgcaacgcg

SEQ ID NO: 4084 - protein, 394 aa, synthetic construct
  REGION 1..394: note = Variant of terminal deoxynucleotidyl transferase
MHHHHHHGGSGHPPSNTPEKEVPSVIARHVSQYACQRKTTLNNYNKKFTDALEIMAENYKFKENLQACLEAKRAASIFKSLPFEVTSMKDIQGLPCITDDVRDVIEEIIEEGESSRVKEILNDERYKAFKQFTSVFGVGVKTSEKWYRMGLRTVEEAKASKSLKLSKMQKAGFLYYEDLASGVSKEEADAVTLIVKETVRTVVPDALVTIAGGFRRGKPMGHDVDFLITNPGRPEDDELLHKVVDLLKKQGLLLYEDIRESTFVEGQLPSPKIDALDNHQKCFAILKLYQPKVDNSAVGTSKKSDMAEVKDWKAVRVDLVITPVEQFAYALLGWTGSGQFRRDLRRYAEEERDMLLDNHRLYDLKKGIFLSAGSEEEIFGHLGLDYLEPWERNA

SEQ ID NO: 4085 - DNA, 1182 bp, synthetic construct
  misc_feature 1..1182: note = Variant of terminal deoxynucleotidyl transferase
  source 1..1182: mol_type = other DNA
atgcatcaccaccatcatcatgggggttctggtcatccgccgagcaataccccggagaaggaggtgccgagcgttatcgcccgtcatgttagtcagtacgcgtgccagcgcaagaccacgctgaataactacaacaaaaagttcaccgacgcgctggagatcatggccgagaactacaaatttaaagagaacctgcaggcgtgtctggaagccaagcgcgccgcgagtatttttaaaagcctgccgttcgaggttaccagcatgaaagacatccaaggtctgccgtgcattaccgacgacgtacgtgacgtgatcgaggagatcatcgaagagggcgagagcagccgtgttaaagaaatcctcaatgacgagcgctacaaggcctttaagcagttcaccagcgtgttcggtgtgggcgtgaaaacctcggaaaagtggtaccgtatgggcctccgtacggttgaagaagcaaaggccagtaagagtctgaagctgagcaagatgcagaaggcgggcttcctgtattacgaggatctggcgagcggtgttagtaaagaagaagccgatgccgttacgctcatcgtgaaggaaacggtgcgtaccgttgtgccggatgcgctggtgaccatcgccggcggtttccgccgtggcaaacctatgggccacgacgttgactttctgatcacgaacccgggccgtcctgaagatgacgagctgctccacaaagtggttgatctgctcaagaagcaaggtctgctgctgtacgaagacatccgtgagagcacgttcgtggaggggcaactgccaagtcctaaaatcgacgccctggacaaccattctaagtgcttcgccattctcaagctgtaccagccgaaggtggataacagtgcggttgggacgagtaagaaaagtgacatggctgaggttaaggattggaaagcggttcgtgtggatctggtgatcacgccattcgagcagttcgcctatgcgctgctcggttggacgggcagcggccaatttcgtcgcgatctgcgtcgctatgcggaggaagagcgcgacatgctgctcgacaaccatcgtctctacgacctgaaaaagggcatctttctgagtgcgggcagcgaagaagagattttcggtcatctgggtctggattatctggagccgtgggaacgcaacgcg

SEQ ID NO: 4086 - protein, 394 aa, synthetic construct
  REGION 1..394: note = Variant of terminal deoxynucleotidyl transferase
MHHHHHHGGSGHPPSNTPEKEVPSVIARHVSQYACQRKTTLNNYNKKFTDALEIMAENYKFKENLQACLEAKRAASIFKSLPFEVTSMKDIQGLPCITDDVRDVIEEIIEEGESSRVKEILNDERYKAFKQFTSVFGVGVKTSEKWYRMGLRTVEEAKASKSLKLSKMQKAGFLYYEDLASGVSKEEADAVTLIVKETVRTVVPDALVTIAGGFRRGKPMGHDVDFLITNPGRPEDDELLHKVVDLLKKQGLLLYEDIRESTFVEGQLPSPKIDALDNHSKCFAILKLYQPKVDNSAVGTSKKSDMAEVKDWKAVRVDLVITPFEQFAYALLGWTGSGQFRRDLRRYAEEERDMLLDNHRLYDLKKGIFLSAGSEEEIFGHLGLDYLEPWERNA

SEQ ID NO: 4087 - DNA, 1182 bp, synthetic construct
  misc_feature 1..1182: note = Variant of terminal deoxynucleotidyl transferase
  source 1..1182: mol_type = other DNA
atgcatcaccaccatcatcatgggggttctggtcatccgccgagcaataccccggagaaggaggtgccgagcgttatcgcccgtcatgttagtcagtacgcgtgccagcgcaagaccacgctgaataactacaacaaaaagttcaccgacgcgctggagatcatggccgagaactacaaatttaaagagaacctgcaggcgtgtctggaagccaagcgcgccgcgagtatttttaaaagcctgccgttcgaggttaccagcatgaaagacatccaaggtctgccgtgcattaccgacgacgtacgtgacgtgatcgaggagatcatcgaagagggcgagagcagccgtgttaaagaaatcctcaatgacgagcgctacaaggcctttaagcagttcaccagcgtgttcggtgtgggcgtgaaaacctcggaaaagtggtaccgtatgggcctccgtacggttgaagaagcaaaggccagtaagagtctgaagctgagcaagatgcagaaggcgggcttcctgtattacgaggatctggcgagcggtgttagtaaagaagaagccgatgccgttacgctcatcgtgaaggaaacggtgcgtaccgttgtgccggatgcgctggtgaccatcgccggcggtttccgccgtggcaaacctatgggccacgacgttgactttctgatcacgaacccgggccgtcctgaagatgacgagctgctccacaaagtggttgatctgctcaagaagcaaggtctgctgctgtacgaagacatccgtgagagcacgttcgtggaggggcaactgccaagtcctaaaatcgactcgctggacaaccatcagaagtgcttcgccattctcaagctgtaccagccgaaggtggataacagtgcggttgggacgagtaagaaaagtgacatggctgaggttaaggattggaaagcggttcgtgtggatctggtgatcacgccattcgagcagttcgcctatgcgctgctcggttggacgggcagcggccaatttcgtcgcgatctgcgtcgctatgcggaggaagagcgcgacatgctgctcgacaaccatcgtctctacgacctgaaaaagggcatctttctgagtgcgggcagcgaagaagagattttcggtcatctgggtctggattatctggagccgtgggaacgcaacgcg

SEQ ID NO: 4088 - protein, 394 aa, synthetic construct
  REGION 1..394: note = Variant of terminal deoxynucleotidyl transferase
MHHHHHHGGSGHPPSNTPEKEVPSVIARHVSQYACQRKTTLNNYNKKFTDALEIMAENYKFKENLQACLEAKRAASIFKSLPFEVTSMKDIQGLPCITDDVRDVIEEIIEEGESSRVKEILNDERYKAFKQFTSVFGVGVKTSEKWYRMGLRTVEEAKASKSLKLSKMQKAGFLYYEDLASGVSKEEADAVTLIVKETVRTVVPDALVTIAGGFRRGKPMGHDVDFLITNPGRPEDDELLHKVVDLLKKQGLLLYEDIRESTFVEGQLPSPKIDSLDNHQKCFAILKLYQPKVDNSAVGTSKKSDMAEVKDWKAVRVDLVITPFEQFAYALLGWTGSGQFRRDLRRYAEEERDMLLDNHRLYDLKKGIFLSAGSEEEIFGHLGLDYLEPWERNA

SEQ ID NO: 4089 - DNA, 1182 bp, synthetic construct
  misc_feature 1..1182: note = Variant of terminal deoxynucleotidyl transferase
  source 1..1182: mol_type = other DNA
atgcatcaccaccatcatcatgggggttctggtcatccgccgagcaataccccggagaaggaggtgccgagcgttatcgcccgtcatgttagtcagtacgcgtgccagcgcaagaccacgctgaataactacaacaaaaagttcaccgacgcgctggagatcatggccgagaactacaaatttaaagagaacctgcaggcgtgtctggaagccaagcgcgccgcgagtatttttaaaagcctgccgttcgaggttaccagcatgaaagacatccaaggtctgccgtgcattaccgacgacgtacgtgacgtgatcgaggagatcatcgaagagggcgagagcagccgtgttaaagaaatcctcaatgacgagcgctacaaggcctttaagcagttcaccagcgtgttcggtgtgggcgtgaaaacctcggaaaagtggtaccgtatgggcctccgtacggttgaagaagcaaaggccagtaagagtctgaagctgagcaagatgcagaaggcgggcttcctgtattacgaggatctggcgagcggtgttagtaaagaagaagccgatgccgttacgctcatcgtgaaggaaacggtgcgtaccgttgtgccggatgcgctggtgaccatcgccggcggtttccgccgtggcaaacctatgggccacgacgttgactttctgatcacgaacccgggccgtcctgaagatgacgagctgctccacaaagtggttgatctgctcaagaagcaaggtctgctgctgtacgaagacatccgtgagagcacgttcgtggaggggcaactgccaagtcctaaaatcgacgccctggacaaccatcagaagtgcttcgccattctcaagctgtaccagccgaaggtggataacagtgcggttgggacgagtaagaaaagtgacatggctgaggttaaggattggaaagcggttcgtgtggatctggtgatcacgccattcgagcagttcgcctatgcgctgctcggttggacgggcagcggccaatttcgtcgcgatctgcgtcgctatgcggaggaagagcgcgacatgctgctcgacaaccatcgtctctacgacctgaaaaagggcatctttctgagtgcgggcagcgaagaagagattttcggtcatctgggtctggattatattgagccgtgggaacgcaacgcg

SEQ ID NO: 4090 - protein, 394 aa, synthetic construct
  REGION 1..394: note = Variant of terminal deoxynucleotidyl transferase
MHHHHHHGGSGHPPSNTPEKEVPSVIARHVSQYACQRKTTLNNYNKKFTDALEIMAENYKFKENLQACLEAKRAASIFKSLPFEVTSMKDIQGLPCITDDVRDVIEEIIEEGESSRVKEILNDERYKAFKQFTSVFGVGVKTSEKWYRMGLRTVEEAKASKSLKLSKMQKAGFLYYEDLASGVSKEEADAVTLIVKETVRTVVPDALVTIAGGFRRGKPMGHDVDFLITNPGRPEDDELLHKVVDLLKKQGLLLYEDIRESTFVEGQLPSPKIDALDNHQKCFAILKLYQPKVDNSAVGTSKKSDMAEVKDWKAVRVDLVITPFEQFAYALLGWTGSGQFRRDLRRYAEEERDMLLDNHRLYDLKKGIFLSAGSEEEIFGHLGLDYIEPWERNA

SEQ ID NO: 4091 - DNA, 1182 bp, synthetic construct
  misc_feature 1..1182: note = Variant of terminal deoxynucleotidyl transferase
  source 1..1182: mol_type = other DNA
atgcatcaccaccatcatcatgggggttctggtcatccgccgagcaataccccggagaaggaggtgccgagcgttatcgcccgtcatgttagtcagtacgcgtgccagcgcaagaccacgctgaataactacaacaaaaagttcaccgacgcgctggagatcatggccgagaactacaaatttaaagagaacctgcaggcgtgtctggaagccaagcgcgccgcgagtatttttaaaagcctgccgttcgaggttaccagcatgaaagacatccaaggtctgccgtgcattaccgacgacgtacgtgacgtgatcgaggagatcatcgaagagggcgagagcagccgtgttaaagaaatcctcaatgacgagcgctacaaggcctttaagcagttcaccagcgtgttcggtgtgggcgtgaaaacctcggaaaagtggtaccgtatgggcctccgtacggttgaagaagcaaaggccagtaagagtctgaagctgagcaagatgcagaaggcgggcttcctgtattacgaggatctggcgagcggtgttagtaaagaagaagccgatgccgttacgctcatcgtgaaggaaacggtgcgtaccgttgtgccggatgcgctggtgaccatcgccggcggtttccgccgtggcaaacctatgggccacgacgttgactttctgatcacgaacccgggccgtcctgaagatgacgagctgctccacaaagtggttgatctgctcaagaagcaaggtctgctgctgtacgaagacatccgtgagagcacgttcgtggaggggcaactgccaagtcctaaaatcgacgccctggacaaccatcagaagtgcttcgccattctcaagctgtaccagccgaaggtggataacagtgcggttgggacgagtaagaaaagtgacatggctgaggttaaggattggaaagcggttcgtgtggatctggtgatcacgccattcgagcagttcgcctatgcgctgctcggttggacgggcagcggccaatttcgtcgcgatctgcgtcgctatgcggaggaagagcgcgacatgctgctcgacaaccatcgtctctacgacctgaaaaagggcatctttctgagtgcgggcagcgaaacggagattttcggtcatctgggtctggattatctggagccgtgggaacgcaacgcg

SEQ ID NO: 4092 - protein, 394 aa, synthetic construct
  REGION 1..394: note = Variant of terminal deoxynucleotidyl transferase
MHHHHHHGGSGHPPSNTPEKEVPSVIARHVSQYACQRKTTLNNYNKKFTDALEIMAENYKFKENLQACLEAKRAASIFKSLPFEVTSMKDIQGLPCITDDVRDVIEEIIEEGESSRVKEILNDERYKAFKQFTSVFGVGVKTSEKWYRMGLRTVEEAKASKSLKLSKMQKAGFLYYEDLASGVSKEEADAVTLIVKETVRTVVPDALVTIAGGFRRGKPMGHDVDFLITNPGRPEDDELLHKVVDLLKKQGLLLYEDIRESTFVEGQLPSPKIDALDNHQKCFAILKLYQPKVDNSAVGTSKKSDMAEVKDWKAVRVDLVITPFEQFAYALLGWTGSGQFRRDLRRYAEEERDMLLDNHRLYDLKKGIFLSAGSETEIFGHLGLDYLEPWERNA

SEQ ID NO: 4093 - DNA, 1182 bp, synthetic construct
  misc_feature 1..1182: note = Variant of terminal deoxynucleotidyl transferase
  source 1..1182: mol_type = other DNA
atgcatcaccaccatcatcatgggggttctggtcatccgccgagcaataccccggagaaggaggtgccgagcgttatcgcccgtcatgttagtcagtacgcgtgccagcgcaagaccacgctgaataactacaacaaaaagttcaccgacgcgctggagatcatggccgagaactacaaatttaaagagaacctgcaggcgtgtctggaagccaagcgcgccgcgagtatttttaaaagcctgccgttcgaggttaccagcatgaaagacatccaaggtctgccgtgcattaccgacgacgtacgtgacgtgatcgaggagatcatcgaagagggcgagagcagccgtgttaaagaaatcctcaatgacgagcgctacaaggcctttaagcagttcaccagcgtgttcggtgtgggcgtgaaaacctcggaaaagtggtaccgtatgggcctccgtacggttgaagaagcaaaggccagtaagagtctgaagctgagcaagatgcagaaggcgggcttcctgtattacgaggatctggcgagcggtgttagtaaagaagaagccgatgccgttacgctcatcgtgaaggaaacggtgcgtaccgttgtgccggatgcgctggtgaccatcgccggcggtttccgccgtggcaaaacgatgggccacgacgttgactttctgatcacgaacccgggccgtcctgaagatgacgagctgctccacaaagtggttgatctgctcaagaagcaaggtctgctgctgtacgaagacatccgtgagagcacgttcgtggaggggcaactgccaagtcctaaaatcgacgccctggacaaccatcagaagtgcttcgccattctcaagctgtaccagccgaaggtggataacagtgcggttgggacgagtaagaaaagtgacatggctgaggttaaggattggaaagcggttcgtgtggatctggtgatcacgccattcgagcagttcgcctatgcgctgctcggttggacgggcagcggccaatttcgtcgcgatctgcgtcgctatgcggaggaagagcgcgacatgctgctcgacaaccatcgtctctacgacctgaaaaagggcatctttctgagtgcgggcagcgaagaagagattttcggtcatctgggtctggattatctggagccgtgggaacgcaacgcg

SEQ ID NO: 4094 - protein, 394 aa, synthetic construct
  REGION 1..394: note = Variant of terminal deoxynucleotidyl transferase
MHHHHHHGGSGHPPSNTPEKEVPSVIARHVSQYACQRKTTLNNYNKKFTDALEIMAENYKFKENLQACLEAKRAASIFKSLPFEVTSMKDIQGLPCITDDVRDVIEEIIEEGESSRVKEILNDERYKAFKQFTSVFGVGVKTSEKWYRMGLRTVEEAKASKSLKLSKMQKAGFLYYEDLASGVSKEEADAVTLIVKETVRTVVPDALVTIAGGFRRGKTMGHDVDFLITNPGRPEDDELLHKVVDLLKKQGLLLYEDIRESTFVEGQLPSPKIDALDNHQKCFAILKLYQPKVDNSAVGTSKKSDMAEVKDWKAVRVDLVITPFEQFAYALLGWTGSGQFRRDLRRYAEEERDMLLDNHRLYDLKKGIFLSAGSEEEIFGHLGLDYLEPWERNA

SEQ ID NO: 4095 - DNA, 1182 bp, synthetic construct
  misc_feature 1..1182: note = Variant of terminal deoxynucleotidyl transferase
  source 1..1182: mol_type = other DNA
atgcatcaccaccatcatcatgggggttctggtcatccgccgagcaataccccggagaaggaggtgccgagcgttatcgcccgtcatgttagtcagtacgcgtgccagcgcaagaccacgctgaataactacaacaaaaagttcaccgacgcgctggagatcatggccgagaactacaaatttaaagagaacctgcaggcgtgtctggaagccaagcgcgccgcgagtatttttaaaagcctgccgttcgaggttaccagcatgaaagacatccaaggtctgccgtgcattaccgacgacgtacgtgacgtgatcgaggagatcatcgaagagggcgagagcagccgtgttaaagaaatcctcaatgacgagcgctacaaggcctttaagcagttcaccagcgtgttcggtgtgggcgtgaaaacctcggaaaagtggtaccgtatgggcctccgtacggttgaagaagcaaaggccagtaagagtctgaagctgagcaagatgcagaaggcgggcttcctgtattacgaggatctggcgagcggtgttagtaaagaagaagccgatgccgttacgctcatcgtgaaggaaacggtgcgtaccgttgtgccggatgcgctggtgaccatcgccggcggtttccgccgtggcaaacctatgggccacgacgttgactttctgatcacgaacccgggccgtcctgaagatgacgagctgctccacaaagtggttgatctgctcaagaagcaaggtctgctgctgtacgaagacatccgtgagagcacgttcgtggaggggcaactgccaagtcctaaaatcgacgccctggacaaccatcagaagtgcttcgccattctcaagctgtaccagccgaaggtggataacagtgcggttgggacgagtaagaaaagtgacatggctgaggttaaggattggaaagcggttcgtgtggatctggtgatcacgccattcgagcagttcgcctatgcgctgctcggttggacgggcagcggccaatttcgtcgcgatctgcgtcgctatgcggaggaagagcgcgacatgctgctcgacaaccatcgtctctacgacctgaaaaagggcatctttctgagtgcgggcagcgaaagggagattttcggtcatctgggtctggattatctggagccgtgggaacgcaacgcg

SEQ ID NO: 4096 - protein, 394 aa, synthetic construct
  REGION 1..394: note = Variant of terminal deoxynucleotidyl transferase
MHHHHHHGGSGHPPSNTPEKEVPSVIARHVSQYACQRKTTLNNYNKKFTDALEIMAENYKFKENLQACLEAKRAASIFKSLPFEVTSMKDIQGLPCITDDVRDVIEEIIEEGESSRVKEILNDERYKAFKQFTSVFGVGVKTSEKWYRMGLRTVEEAKASKSLKLSKMQKAGFLYYEDLASGVSKEEADAVTLIVKETVRTVVPDALVTIAGGFRRGKPMGHDVDFLITNPGRPEDDELLHKVVDLLKKQGLLLYEDIRESTFVEGQLPSPKIDALDNHQKCFAILKLYQPKVDNSAVGTSKKSDMAEVKDWKAVRVDLVITPFEQFAYALLGWTGSGQFRRDLRRYAEEERDMLLDNHRLYDLKKGIFLSAGSEREIFGHLGLDYLEPWERNA

SEQ ID NO: 4097 - DNA, 1182 bp, synthetic construct
  misc_feature 1..1182: note = Variant of terminal deoxynucleotidyl transferase
  source 1..1182: mol_type = other DNA
atgcatcaccaccatcatcatgggggttctggtcatccgccgagcaataccccggagaaggaggtgccgagcgttatcgcccgtcatgttagtcagtacgcgtgccagcgcaagaccacgctgaataactacaacaaaaagttcaccgacgcgctggagatcatggccgagaactacaaatttaaagagaacctgcaggcgtgtctggaagccaagcgcgccgcgagtatttttaaaagcctgccgttcgaggttaccagcatgaaagacatccaaggtctgccgtgcattaccgacgacgtacgtgacgtgatcgaggagatcatcgaagagggcgagagcagccgtgttaaagaaatcctcaatgacgagcgctacaaggcctttaagcagttcaccagcgtgttcggtgtgggcgtgaaaacctcggaaaagtggtaccgtatgggcctccgtacggttgaagaagcaaaggccagtaagagtctgaagctgagcaagatgcagaaggcgggcttcctgtattacgaggatctggcgagcggtgttagtaaagaagaagccgatgccgttacgctcatcgtgaaggaaacggtgcgtaccgttgtgccggatgcgctggtgaccatcgccggcggtttccgccgtggcaaacctatgggccacgacgttgactttctgatcacgaacccgggccgtcctgaagatgacgagctgctccacaaagtggttgatctgctcaagaagcaaggtctgctgctgtacgaagacatccgtgagagcacgttcgtggaggggcaactgccaagtcctaaaatcgacgccctggacaaccatcagaagtgcttcgccattctcaagctgtaccagccgaaggtggataacagtgcggttgggacgagtaagaaaagtgacatggctgaggttaaggattggaaagcggttcgtgtggatctggtgatcacgccattcgagcagttcgcctatgcgctgctcggttggacgggcagcggccaatttcgtcgcgatctgcgtcgctatgcggaggaagagcgcgacatgctgctcgacaaccatcgtctctacgacctgaaaaagggcatctttctgagtgcgggcagcgaagaagagattttcggtcatctgggtctggattatctggagccggcggaacgcaacgcg

SEQ ID NO: 4098 - protein, 394 aa, synthetic construct
  REGION 1..394: note = Variant of terminal deoxynucleotidyl transferase
MHHHHHHGGSGHPPSNTPEKEVPSVIARHVSQYACQRKTTLNNYNKKFTDALEIMAENYKFKENLQACLEAKRAASIFKSLPFEVTSMKDIQGLPCITDDVRDVIEEIIEEGESSRVKEILNDERYKAFKQFTSVFGVGVKTSEKWYRMGLRTVEEAKASKSLKLSKMQKAGFLYYEDLASGVSKEEADAVTLIVKETVRTVVPDALVTIAGGFRRGKPMGHDVDFLITNPGRPEDDELLHKVVDLLKKQGLLLYEDIRESTFVEGQLPSPKIDALDNHQKCFAILKLYQPKVDNSAVGTSKKSDMAEVKDWKAVRVDLVITPFEQFAYALLGWTGSGQFRRDLRRYAEEERDMLLDNHRLYDLKKGIFLSAGSEEEIFGHLGLDYLEPAERNA

SEQ ID NO: 4099 - DNA, 1182 bp, synthetic construct
  misc_feature 1..1182: note = Variant of terminal deoxynucleotidyl transferase
  source 1..1182: mol_type = other DNA
atgcatcaccaccatcatcatgggggttctggtcatccgccgagcaataccccggagaaggaggtgccgagcgttatcgcccgtcatgttagtcagtacgcgtgccagcgcaagaccacgctgaataactacaacaaaaagttcaccgacgcgctggagatcatggccgagaactacaaatttaaagagaacctgcaggcgtgtctggaagccaagcgcgccgcgagtatttttaaaagcctgccgttcgaggttaccagcatgaaagacatccaaggtctgccgtgcattaccgacgacgtacgtgacgtgatcgaggagatcatcgaagagggcgagagcagccgtgttaaagaaatcctcaatgacgagcgctacaaggcctttaagcagttcaccagcgtgttcggtgtgggcgtgaaaacctcggaaaagtggtaccgtatgggcctccgtacggttgaagaagcaaaggccagtaagagtctgaagctgagcaagatgcagaaggcgggcttcctgtattacgaggatctggcgagcggtgttagtaaagaagaagccgatgccgttacgctcatcgtgaaggaaacggtgcgtaccgttgtgccggatgcgctggtgaccatcgccggcggtttccgccgtggcaaacctatgggccacgacgttgactttctgatcacgaacccgggccgtcctgaagatgacgagctgctccacaaagtggttgatctgctcaagaagcaaggtctgctgctgtacgaagacatccgtgagagcacgttcgtggagggggagctgccaagtcctaaaatcgacgccctggacaaccatcagaagtgcttcgccattctcaagctgtaccagccgaaggtggataacagtgcggttgggacgagtaagaaaagtgacatggctgaggttaaggattggaaagcggttcgtgtggatctggtgatcacgccattcgagcagttcgcctatgcgctgctcggttggacgggcagcggccaatttcgtcgcgatctgcgtcgctatgcggaggaagagcgcgacatgctgctcgacaaccatcgtctctacgacctgaaaaagggcatctttctgagtgcgggcagcgaagaagagattttcggtcatctgggtctggattatctggagccgtgggaacgcaacgcg

SEQ ID NO: 4100 - protein, 394 aa, synthetic construct
  REGION 1..394: note = Variant of terminal deoxynucleotidyl transferase
MHHHHHHGGSGHPPSNTPEKEVPSVIARHVSQYACQRKTTLNNYNKKFTDALEIMAENYKFKENLQACLEAKRAASIFKSLPFEVTSMKDIQGLPCITDDVRDVIEEIIEEGESSRVKEILNDERYKAFKQFTSVFGVGVKTSEKWYRMGLRTVEEAKASKSLKLSKMQKAGFLYYEDLASGVSKEEADAVTLIVKETVRTVVPDALVTIAGGFRRGKPMGHDVDFLITNPGRPEDDELLHKVVDLLKKQGLLLYEDIRESTFVEGELPSPKIDALDNHQKCFAILKLYQPKVDNSAVGTSKKSDMAEVKDWKAVRVDLVITPFEQFAYALLGWTGSGQFRRDLRRYAEEERDMLLDNHRLYDLKKGIFLSAGSEEEIFGHLGLDYLEPWERNA

SEQ ID NO: 4101 - DNA, 1182 bp, synthetic construct
  misc_feature 1..1182: note = Variant of terminal deoxynucleotidyl transferase
  source 1..1182: mol_type = other DNA
atgcatcaccaccatcatcatgggggttctggtcatccgccgagcaataccccggagaaggaggtgccgagcgttatcgcccgtcatgttagtcagtacgcgtgccagcgcaagaccacgctgaataactacaacaaaaagttcaccgacgcgctggagatcatggccgagaactacaaatttaaagagaacctgcaggcgtgtctggaagccaagcgcgccgcgagtatttttaaaagcctgccgttcgaggttaccagcatgaaagacatccaaggtctgccgtgcattaccgacgacgtacgtgacgtgatcgaggagatcatcgaagagggcgagagcagccgtgttaaagaaatcctcaatgacgagcgctacaaggcctttaagcagttcaccagcgtgttcggtgtgggcgtgaaaacctcggaaaagtggtaccgtatgggcctccgtacggttgaagaagcaaaggccagtaagagtctgaagctgagcaagatgcagaaggcgggcttcctgtattacgaggatctggcgagcggtgttagtaaagaagaagccgatgccgttacgctcatcgtgaaggaaacggtgcgtaccgttgtgccggatgcgctggtgaccatcgccggcggtttccgccgtggcaaacctatgggccacgacgttgactttctgatcacgaacccgggccgtcctgaagatgacgagctgctccacaaagtggttgatctgctcaagaagcaaggtctgctgctgtacgaagacatccgtgagagcacgttcgtggaggggcaactgccaagtcctaaaatcgacgccctggacaaccatcagaagtgcttcgccattctcaagctgtaccagccgaaggtggataacagtgcggttgggacgagtaagaaaagtgacatggctgaggttaaggattggaaagcggttcgtgtggatctggtgatcacgccattcgagcagttcgcctatgcgctgctcggttggacgggcagcggccaatttcgtcgcgatctgcgtcgctatgcggtggaagagcgcgacatgctgctcgacaaccatcgtctctacgacctgaaaaagggcatctttctgagtgcgggcagcgaagaagagattttcggtcatctgggtctggattatctggagccgtgggaacgcaacgcg

SEQ ID NO: 4102 - protein, 394 aa, synthetic construct
  REGION 1..394: note = Variant of terminal deoxynucleotidyl transferase
MHHHHHHGGSGHPPSNTPEKEVPSVIARHVSQYACQRKTTLNNYNKKFTDALEIMAENYKFKENLQACLEAKRAASIFKSLPFEVTSMKDIQGLPCITDDVRDVIEEIIEEGESSRVKEILNDERYKAFKQFTSVFGVGVKTSEKWYRMGLRTVEEAKASKSLKLSKMQKAGFLYYEDLASGVSKEEADAVTLIVKETVRTVVPDALVTIAGGFRRGKPMGHDVDFLITNPGRPEDDELLHKVVDLLKKQGLLLYEDIRESTFVEGQLPSPKIDALDNHQKCFAILKLYQPKVDNSAVGTSKKSDMAEVKDWKAVRVDLVITPFEQFAYALLGWTGSGQFRRDLRRYAVEERDMLLDNHRLYDLKKGIFLSAGSEEEIFGHLGLDYLEPWERNA

SEQ ID NO: 4103 - DNA, 1182 bp, synthetic construct
  misc_feature 1..1182: note = Variant of terminal deoxynucleotidyl transferase
  source 1..1182: mol_type = other DNA
atgcatcaccaccatcatcatgggggttctggtcatccgccgagcaataccccggagaaggaggtgccgagcgttatcgcccgtcatgttagtcagtacgcgtgccagcgcaagaccacgctgaataactacaacaaaaagttcaccgacgcgctggagatcatggccgagaactacaaatttaaagagaacctgcaggcgtgtctggaagccaggcgcgccgcgagtatttttaaaagcctgccgttcgaggttaccagcatgaaagacatccaaggtctgccgtgcattaccgacgacgtacgtgacgtgatcgaggagatcatcgaagagggcgagagcagccgtgttaaagaaatcctcaatgacgagcgctacaaggcctttaagcagttcaccagcgtgttcggtgtgggcgtgaaaacctcggaaaagtggtaccgtatgggcctccgtacggttgaagaagcaaaggccagtaagagtctgaagctgagcaagatgcagaaggcgggcttcctgtattacgaggatctggcgagcggtgttagtaaagaagaagccgatgccgttacgctcatcgtgaaggaaacggtgcgtaccgttgtgccggatgcgctggtgaccatcgccggcggtttccgccgtggcaaacctatgggccacgacgttgactttctgatcacgaacccgggccgtcctgaagatgacgagctgctccacaaagtggttgatctgctcaagaagcaaggtctgctgctgtacgaagacatccgtgagagcacgttcgtggaggggcaactgccaagtcctaaaatcgacgccctggacaaccatcagaagtgcttcgccattctcaagctgtaccagccgaaggtggataacagtgcggttgggacgagtaagaaaagtgacatggctgaggttaaggattggaaagcggttcgtgtggatctggtgatcacgccattcgagcagttcgcctatgcgctgctcggttggacgggcagcggccaatttcgtcgcgatctgcgtcgctatgcggaggaagagcgcgacatgctgctcgacaaccatcgtctctacgacctgaaaaagggcatctttctgagtgcgggcagcgaagaagagattttcggtcatctgggtctggattatctggagccgtgggaacgcaacgcg

SEQ ID NO: 4104 - protein, 394 aa, synthetic construct
  REGION 1..394: note = Variant of terminal deoxynucleotidyl transferase
MHHHHHHGGSGHPPSNTPEKEVPSVIARHVSQYACQRKTTLNNYNKKFTDALEIMAENYKFKENLQACLEARRAASIFKSLPFEVTSMKDIQGLPCITDDVRDVIEEIIEEGESSRVKEILNDERYKAFKQFTSVFGVGVKTSEKWYRMGLRTVEEAKASKSLKLSKMQKAGFLYYEDLASGVSKEEADAVTLIVKETVRTVVPDALVTIAGGFRRGKPMGHDVDFLITNPGRPEDDELLHKVVDLLKKQGLLLYEDIRESTFVEGQLPSPKIDALDNHQKCFAILKLYQPKVDNSAVGTSKKSDMAEVKDWKAVRVDLVITPFEQFAYALLGWTGSGQFRRDLRRYAEEERDMLLDNHRLYDLKKGIFLSAGSEEEIFGHLGLDYLEPWERNA

SEQ ID NO: 4105 - DNA, 1182 bp, synthetic construct
  misc_feature 1..1182: note = Variant of terminal deoxynucleotidyl transferase
  source 1..1182: mol_type = other DNA
atgcatcaccaccatcatcatgggggttctggtcatccgccgagcaataccccggagaaggaggtgccgagcgttatcgcccgtcatgttagtcagtacgcgtgccagcgcaagaccacgctgaataactacaacaaaaagttcaccgacgcgctggagatcatggccgagaactacaaatttaaagagaacctgcaggcgtgtctggaagccaagcgcgccgcgagtatttttaaaagcctgccgttcgaggttaccagcatgaaagacatccaaggtctgccgtgcattaccgacgacgtacgtgacgtgatcgaggagatcatcgaagagggcgagagcagccgtgttaaagaaatcctcaatgacgagcgctacaaggcctttaagcagttcaccagcgtgttcggtgtgggcgtgaaaacctcggaaaagtggtaccgtatgggcctccgtacggttgaagaagcaaaggccagtaagagtctgaagctgagcaagatgcagaaggcgggcttcctgtattacgaggatctggcgagcggtgttagtaaagaagaagccgatgccgttacgctcatcgtgaaggaaacggtgcgtaccgttgtgccggatgcgctggtgaccatcgccggcggtttccgccgtggcaaacctatgggccacgacgttgactttctgatcacgaacccgggccgtcctgaagatgacgagctgctccacaaagtggttgatctgctcaagaagcaaggtctgctgctgtacgaagacatccgtgagagcacgttcgtggaggggcaactgccaagtcctaaaatcgacgccctggacaaccatcagaagtgcttcgccattctcaagctgtaccagccgaaggtggataacagtgcggttgggacgagtaagaaaagtgacatggctgaggttaaggattggaaagcggttcgtgtggatctggtgatcacgccattcgagcagttcgcctatgcgctgctcggttggacgggcagcggccaatttcgtcgcgatctgcgtcgctatgcgtcggaagagcgcgacatgctgctcgacaaccatcgtctctacgacctgaaaaagggcatctttctgagtgcgggcagcgaagaagagattttcggtcatctgggtctggattatctggagccgtgggaacgcaacgcg

SEQ ID NO: 4106 - protein, 394 aa, synthetic construct
  REGION 1..394: note = Variant of terminal deoxynucleotidyl transferase
MHHHHHHGGSGHPPSNTPEKEVPSVIARHVSQYACQRKTTLNNYNKKFTDALEIMAENYKFKENLQACLEAKRAASIFKSLPFEVTSMKDIQGLPCITDDVRDVIEEIIEEGESSRVKEILNDERYKAFKQFTSVFGVGVKTSEKWYRMGLRTVEEAKASKSLKLSKMQKAGFLYYEDLASGVSKEEADAVTLIVKETVRTVVPDALVTIAGGFRRGKPMGHDVDFLITNPGRPEDDELLHKVVDLLKKQGLLLYEDIRESTFVEGQLPSPKIDALDNHQKCFAILKLYQPKVDNSAVGTSKKSDMAEVKDWKAVRVDLVITPFEQFAYALLGWTGSGQFRRDLRRYASEERDMLLDNHRLYDLKKGIFLSAGSEEEIFGHLGLDYLEPWERNA

SEQ ID NO: 4107 - DNA, 1182 bp, synthetic construct
  misc_feature 1..1182: note = Variant of terminal deoxynucleotidyl transferase
  source 1..1182: mol_type = other DNA
atgcatcaccaccatcatcatgggggttctggtcatccgccgagcaataccccggagaaggaggtgccgagcgttatcgcccgtcatgttagtcagtacgcgtgccagcgcaagaccacgctgaataactacaacaaaaagttcaccgacgcgctggagatcatggccgagaactacaaatttaaagagaacctgcaggcgtgtctggaagccaagcgcgccgcgagtatttttaaaagcctgccgttcgaggttaccagcatgaaagacatccaaggtctgccgtgcattaccgacgacgtacgtgacgtgatcgaggagatcatcgaagagggcgagagcagccgtgttaaagaaatcctcaatgacgagcgctacaaggcctttaagcagttcaccagcgtgttcggtgtgggcgtgaaaacctcggaaaagtggtaccgtatgggcctccgtacggttgaagaagcaaaggccagtaagagtctgaagctgagcaagatgcagaaggcgggcttcctgtattacgaggatctggcgagcggtgttagtaaagaagaagccgatgccgttacgctcatcgtgaaggaaacggtgcgtaccgttgtgccggatgcgctggtgaccatcgccggcggtttccgccgtggcaaacctatgggccacgacgttgactttctgatcacgaacccgggccgtcctgaagatgacgagctgctccacaaagtggttgatctgctcaagaagcaaggtctgctgctgtacgaagacatccgtgagagcacgttcgtggaggggcaactgccaagtcctaaaatcgacgccctggacaaccatcagaagtgcttcgccattctcaagctgtaccagccgaaggtggataacagtgcggttgggacgagtaagaaaagtgacatggctgaggttaaggattggaaagcggttcgtgtggatctggtgatcacgccattcgagcagttcgcctatgcgctgctcggttggacgggcagcggccaatttcgtcgcgatctgcgtcgctatgcggctgaagagcgcgacatgctgctcgacaaccatcgtctctacgacctgaaaaagggcatctttctgagtgcgggcagcgaagaagagattttcggtcatctgggtctggattatctggagccgtgggaacgcaacgcg

SEQ ID NO: 4108 - protein, 394 aa, synthetic construct
  REGION 1..394: note = Variant of terminal deoxynucleotidyl transferase
MHHHHHHGGSGHPPSNTPEKEVPSVIARHVSQYACQRKTTLNNYNKKFTDALEIMAENYKFKENLQACLEAKRAASIFKSLPFEVTSMKDIQGLPCITDDVRDVIEEIIEEGESSRVKEILNDERYKAFKQFTSVFGVGVKTSEKWYRMGLRTVEEAKASKSLKLSKMQKAGFLYYEDLASGVSKEEADAVTLIVKETVRTVVPDALVTIAGGFRRGKPMGHDVDFLITNPGRPEDDELLHKVVDLLKKQGLLLYEDIRESTFVEGQLPSPKIDALDNHQKCFAILKLYQPKVDNSAVGTSKKSDMAEVKDWKAVRVDLVITPFEQFAYALLGWTGSGQFRRDLRRYAAEERDMLLDNHRLYDLKKGIFLSAGSEEEIFGHLGLDYLEPWERNA

SEQ ID NO: 4109 - DNA, 1182 bp, synthetic construct
  misc_feature 1..1182: note = Variant of terminal deoxynucleotidyl transferase
  source 1..1182: mol_type = other DNA
atgcatcaccaccatcatcatgggggttctggtcatccgccgagcaataccccggagaaggaggtgccgagcgttatcgcccgtcatgttagtcagtacgcgtgccagcgcaagaccacgctgaataactacaacaaaaagttcaccgacgcgctggagatcatggccgagaactacaaatttaaagagaacctgcaggcgtgtctggaagccaagcgcgccgcgagtatttttaaaagcctgccgttcgaggttaccagcatgaaagacatccaaggtctgccgtgcattaccgacgacgtacgtgacgtgatcgaggagatcatcgaagagggcgagagcagccgtgttaaagaaatcctcaatgacgagcgctacaaggcctttaagcagttcaccagcgtgttcggtgtgggcgtgaaaacctcggaaaagtggtaccgtatgggcctccgtacggttgaagaagcaaaggccagtaagagtctgaagctgagcaagatgcagaaggcgggcttcctgtattacgaggatctggcgagcggtgttagtaaagaagaagccgatgccgttacgctcatcgtgaaggaaacggtgcgtaccgttgtgccggatgcgctggtgaccatcgccggcggtttccgccgtggcaaacctatgggccacgacgttgactttctgatcacgaacccgggccgtcctgaagatgacgagctgctccacaaagtggttgatctgctcaagaagcaaggtctgctgctgtacgaagacatccgtgagagcacgttccaggaggggcaactgccaagtcctaaaatcgacgccctggacaaccatcagaagtgcttcgccattctcaagctgtaccagccgaaggtggataacagtgcggttgggacgagtaagaaaagtgacatggctgaggttaaggattggaaagcggttcgtgtggatctggtgatcacgccattcgagcagttcgcctatgcgctgctcggttggacgggcagcggccaatttcgtcgcgatctgcgtcgctatgcggaggaagagcgcgacatgctgctcgacaaccatcgtctctacgacctgaaaaagggcatctttctgagtgcgggcagcgaagaagagattttcggtcatctgggtctggattatctggagccgtgggaacgcaacgcg

SEQ ID NO: 4110 - protein, 394 aa, synthetic construct
  REGION 1..394: note = Variant of terminal deoxynucleotidyl transferase
MHHHHHHGGSGHPPSNTPEKEVPSVIARHVSQYACQRKTTLNNYNKKFTDALEIMAENYKFKENLQACLEAKRAASIFKSLPFEVTSMKDIQGLPCITDDVRDVIEEIIEEGESSRVKEILNDERYKAFKQFTSVFGVGVKTSEKWYRMGLRTVEEAKASKSLKLSKMQKAGFLYYEDLASGVSKEEADAVTLIVKETVRTVVPDALVTIAGGFRRGKPMGHDVDFLITNPGRPEDDELLHKVVDLLKKQGLLLYEDIRESTFQEGQLPSPKIDALDNHQKCFAILKLYQPKVDNSAVGTSKKSDMAEVKDWKAVRVDLVITPFEQFAYALLGWTGSGQFRRDLRRYAEEERDMLLDNHRLYDLKKGIFLSAGSEEEIFGHLGLDYLEPWERNA

SEQ ID NO: 4111 - DNA, 1182 bp, synthetic construct
  misc_feature 1..1182: note = Variant of terminal deoxynucleotidyl transferase
  source 1..1182: mol_type = other DNA
atgcatcaccaccatcatcatgggggttctggtcatccgccgagcaataccccggagaaggaggtgccgagcgttatcgcccgtcatgttagtcagtacgcgtgccagcgcaagaccacgctgaataactacaacaaaaagttcaccgacgcgctggagatcatggccgagaactacaaatttaaagagaacctgcaggcgtgtctggaagccaagcgcgccgcgagtatttttaaaagcctgccgttcgaggttaccagcatgaaagacatccaaggtctgccgtgcattaccgacgacgtacgtgacgtgatcgaggagatcatcgaagagggcgagagcagccgtgttaaagaaatcctcaatgacgagcgctacaaggcctttaagcagttcaccagcgtgttcggtgtgggcgtgaaaacctcggaaaagtggtaccgtatgggcctccgtacggttgaagaagcaaaggccagtaagagtctgaagctgagcaagatgcagaaggcgggcttcctgtattacgaggatctggcgagcggtgttagtaaagaagaagccgatgccgttacgctcatcgtgaaggaaacggtgcgtaccgttgtgccggatgcgctggtgaccatcgccggcggtttccgccgtggcaaacctatgggccacgacgttgactttctgatcacgaacccgggccgtcctgaagatgacgagctgctccacaaagtggttgatctgctcaagaagcaaggtctgctgctgtacgaagacatccgtgagagcacgttcgtggaggggcaactgccaagtcctaaaatcgacgccctggacaaccatcagaagtgcttcgccattctcaagctgtaccagccgaaggtggataacagtgcggttgggacgagtaagaaaagtgacatggctgaggttaaggattggaaagcggttcgtgtggatctggtgatcacgccattcgagcagttcgcctatgcgctgctcggttggacgggcagcggccaatttcgtcgcgatctgcgtcgctatgcggaggaagagcgcgacatgctgctcgacaaccatacgctctacgacctgaaaaagggcatctttctgagtgcgggcagcgaagaagagattttcggtcatctgggtctggattatctggagccgtgggaacgcaacgcg

SEQ ID NO: 4112 - protein, 394 aa, synthetic construct
  REGION 1..394: note = Variant of terminal deoxynucleotidyl transferase
MHHHHHHGGSGHPPSNTPEKEVPSVIARHVSQYACQRKTTLNNYNKKFTDALEIMAENYKFKENLQACLEAKRAASIFKSLPFEVTSMKDIQGLPCITDDVRDVIEEIIEEGESSRVKEILNDERYKAFKQFTSVFGVGVKTSEKWYRMGLRTVEEAKASKSLKLSKMQKAGFLYYEDLASGVSKEEADAVTLIVKETVRTVVPDALVTIAGGFRRGKPMGHDVDFLITNPGRPEDDELLHKVVDLLKKQGLLLYEDIRESTFVEGQLPSPKIDALDNHQKCFAILKLYQPKVDNSAVGTSKKSDMAEVKDWKAVRVDLVITPFEQFAYALLGWTGSGQFRRDLRRYAEEERDMLLDNHTLYDLKKGIFLSAGSEEEIFGHLGLDYLEPWERNA

SEQ ID NO: 4113 - DNA, 1182 bp, synthetic construct
  misc_feature 1..1182: note = Variant of terminal deoxynucleotidyl transferase
  source 1..1182: mol_type = other DNA
atgcatcaccaccatcatcatgggggttctggtcatccgccgagcaataccccggagaaggaggtgccgagcgttatcgcccgtcatgttagtcagtacgcgtgccagcgcaagaccacgctgaataactacaacaaaaagttcaccgacgcgctggagatcatggccgagaactacaaatttaaagagaacctgcaggcgtgtctggaagccaagcgcgccgcgagtatttttaaaagcctgccgttcgaggttaccagcatgaaagacatccaaggtctgccgtgcattaccgacgacgtacgtgacgtgatcgaggagatcatcgaagagggcgagagcagccgtgttaaagaaatcctcaatgacgagcgctacaaggcctttaagcagttcaccagcgtgttcggtgtgggcgtgaaaacctcggaaaagtggtaccgtatgggcctccgtacggttgaagaagcaaaggccagtaagagtctgaagctgagcaagatgcagaaggcgggcttcctgtattacgaggatctggcgagcggtgttagtaaagaagaagccgatgccgttacgctcatcgtgaaggaaacggtgcgtaccgttgtgccggatgcgctggtgaccatcgccggcggtttccgccgtggcaaacctatgggccacgacgttgactttctgatcacgaacccgggccgtcctgaagatgacgagctgctccacaaagtggttgatctgctcaagaagcaaggtctgctgctgtacgaagacatccgtgagagcacgttcgtggaggggatgctgccaagtcctaaaatcgacgccctggacaaccatcagaagtgcttcgccattctcaagctgtaccagccgaaggtggataacagtgcggttgggacgagtaagaaaagtgacatggctgaggttaaggattggaaagcggttcgtgtggatctggtgatcacgccattcgagcagttcgcctatgcgctgctcggttggacgggcagcggccaatttcgtcgcgatctgcgtcgctatgcggaggaagagcgcgacatgctgctcgacaaccatcgtctctacgacctgaaaaagggcatctttctgagtgcgggcagcgaagaagagattttcggtcatctgggtctggattatctggagccgtgggaacgcaacgcg

SEQ ID NO: 4114 - protein, 394 aa, synthetic construct
  REGION 1..394: note = Variant of terminal deoxynucleotidyl transferase
MHHHHHHGGSGHPPSNTPEKEVPSVIARHVSQYACQRKTTLNNYNKKFTDALEIMAENYKFKENLQACLEAKRAASIFKSLPFEVTSMKDIQGLPCITDDVRDVIEEIIEEGESSRVKEILNDERYKAFKQFTSVFGVGVKTSEKWYRMGLRTVEEAKASKSLKLSKMQKAGFLYYEDLASGVSKEEADAVTLIVKETVRTVVPDALVTIAGGFRRGKPMGHDVDFLITNPGRPEDDELLHKVVDLLKKQGLLLYEDIRESTFVEGMLPSPKIDALDNHQKCFAILKLYQPKVDNSAVGTSKKSDMAEVKDWKAVRVDLVITPFEQFAYALLGWTGSGQFRRDLRRYAEEERDMLLDNHRLYDLKKGIFLSAGSEEEIFGHLGLDYLEPWERNA

SEQ ID NO: 4115 - DNA, 1182 bp, synthetic construct
  misc_feature 1..1182: note = Variant of terminal deoxynucleotidyl transferase
  source 1..1182: mol_type = other DNA
atgcatcaccaccatcatcatgggggttctggtcatccgccgagcaataccccggagaaggaggtgccgagcgttatcgcccgtcatgttagtcagtacgcgtgccagcgcaagaccacgctgaataactacaacaaaaagttcaccgacgcgctggagatcatggccgagaactacaaatttaaagagaacctgcaggcgtgtctggaagccaagcgcgccgcgagtatttttaaaagcctgccgttcgaggttaccagcatgaaagacatccaaggtctgccgtgcattaccgacgacgtacgtgacgtgatcgaggagatcatcgaagagggcgagagcagccgtgttaaagaaatcctcaatgacgagcgctacaaggcctttaagcagttcaccagcgtgttcggtgtgggcgtgaaaacctcggaaaagtggtaccgtatgggcctccgtacggttgaagaagcaaaggccagtaagagtctgaagctgagcaagatgcagaaggcgggcttcctgtattacgaggatctggcgagcggtgttagtaaagaagaagccgatgccgttacgctcatcgtgaaggaaacggtgcgtaccgttgtgccggatgcgctggtgaccatcgccggcggtttccgccgtggcaaacctatgggccacgacgttgactttctgatcacgaacccgggccgtcctgaagatgacgagctgctccacaaagtggttgatctgctcaagaagcaaggtctgctgctgtacgaagacatccgtgagagcacgttcgtggaggggcaactgccaagtcctaaaatcgacgccctggacaaccatcagaagtgcttcgccattctcaagctgtaccagccgaaggtggataacagtgcggttgggacgagtaagaaaagtgacatggctgaggttaaggattggaaagcggttcgtgtggatctggtgatcacgccattcgagcagttcgcctatgcgctgctcggttggacgggcagcggccaatttcgtcgcgatctgcgtagttatgcggaggaagagcgcgacatgctgctcgacaaccatcgtctctacgacctgaaaaagggcatctttctgagtgcgggcagcgaagaagagattttcggtcatctgggtctggattatctggagccgtgggaacgcaacgcg

SEQ ID NO: 4116 - protein, 394 aa, synthetic construct
  REGION 1..394: note = Variant of terminal deoxynucleotidyl transferase
MHHHHHHGGSGHPPSNTPEKEVPSVIARHVSQYACQRKTTLNNYNKKFTDALEIMAENYKFKENLQACLEAKRAASIFKSLPFEVTSMKDIQGLPCITDDVRDVIEEIIEEGESSRVKEILNDERYKAFKQFTSVFGVGVKTSEKWYRMGLRTVEEAKASKSLKLSKMQKAGFLYYEDLASGVSKEEADAVTLIVKETVRTVVPDALVTIAGGFRRGKPMGHDVDFLITNPGRPEDDELLHKVVDLLKKQGLLLYEDIRESTFVEGQLPSPKIDALDNHQKCFAILKLYQPKVDNSAVGTSKKSDMAEVKDWKAVRVDLVITPFEQFAYALLGWTGSGQFRRDLRSYAEEERDMLLDNHRLYDLKKGIFLSAGSEEEIFGHLGLDYLEPWERNA

SEQ ID NO: 4117 - DNA, 1182 bp, synthetic construct
  misc_feature 1..1182: note = Variant of terminal deoxynucleotidyl transferase
  source 1..1182: mol_type = other DNA
atgcatcaccaccatcatcatgggggttctggtcatccgccgagcaataccccggagaaggaggtgccgagcgttatcgcccgtcatgttagtcagtacgcgtgccagcgcaagaccacgctgaataactacaacaaaaagttcaccgacgcgctggagatcatggccgagaactacaaatttaaagagaacctgcaggcgtgtctggaagccaagcgcgccgcgagtatttttaaaagcctgccgttcgaggttaccagcatgaaagacatccaaggtctgccgtgcattaccgacgacgtacgtgacgtgatcgaggagatcatcgaagagggcgagagcagccgtgttaaagaaatcctcaatgacgagcgctacaaggcctttaagcagttcaccagcgtgttcggtgtgggcgtgaaaacctcggaaaagtggtaccgtatgggcctccgtacggttgaagaagcaaaggccagtaagagtctgaagctgagcaagatgcagaaggcgggcttcctgtattacgaggatctggcgagcggtgttagtaaagaagaagccgatgccgttacgctcatcgtgaaggaaacggtgcgtaccgttgtgccggatgcgctggtgaccatcgccggcggtttccgccgtggcaaacctatgggccacgacgttgactttctgatcacgaacccgggccgtcctgaagatgacgagctgctccacaaagtggttgatctgctcaagaagcaaggtctgctgctgtacgaagacatccgtgagagcacgttcgtggaggggcaactgccaagtcctaaaatcgacgccctggacaaccatcagaagtgcttcgccattctcaagctgtaccagccgaaggtggataacagtgcggttgggacgagtaagaaaagtgacatggctgaggttaaggattggaaagcggttcgtgtggatctggtgatcacgccattcgagcagttcgcctatgcgctgctcggttggacgggcagcggccaatttcgtcgcgatctgcgtcgctatgcggaggaagagcgcgacatgctgctcgacaaccatgggctctacgacctgaaaaagggcatctttctgagtgcgggcagcgaagaagagattttcggtcatctgggtctggattatctggagccgtgggaacgcaacgcg

SEQ ID NO: 4118 - protein, 394 aa, synthetic construct
  REGION 1..394: note = Variant of terminal deoxynucleotidyl transferase
MHHHHHHGGSGHPPSNTPEKEVPSVIARHVSQYACQRKTTLNNYNKKFTDALEIMAENYKFKENLQACLEAKRAASIFKSLPFEVTSMKDIQGLPCITDDVRDVIEEIIEEGESSRVKEILNDERYKAFKQFTSVFGVGVKTSEKWYRMGLRTVEEAKASKSLKLSKMQKAGFLYYEDLASGVSKEEADAVTLIVKETVRTVVPDALVTIAGGFRRGKPMGHDVDFLITNPGRPEDDELLHKVVDLLKKQGLLLYEDIRESTFVEGQLPSPKIDALDNHQKCFAILKLYQPKVDNSAVGTSKKSDMAEVKDWKAVRVDLVITPFEQFAYALLGWTGSGQFRRDLRRYAEEERDMLLDNHGLYDLKKGIFLSAGSEEEIFGHLGLDYLEPWERNA

SEQ ID NO: 4119 - DNA, 1182 bp, synthetic construct
  misc_feature 1..1182: note = Variant of terminal deoxynucleotidyl transferase
  source 1..1182: mol_type = other DNA
atgcatcaccaccatcatcatgggggttctggtcatccgccgagcaataccccggagaaggaggtgccgagcgttatcgcccgtcatgttagtcagtacgcgtgccagcgcaagaccacgctgaataactacaacaaaaagttcaccgacgcgctggagatcatggccgagaactacaaatttaaagagaacctgcaggcgtgtctggaagccaagcgcgccgcgagtatttttaaaagcctgccgttcgaggttaccagcatgaaagacatccaaggtctgccgtgcattaccgacgacgtacgtgacgtgatcgaggagatcatcgaagagggcgagagcagccgtgttaaagaaatcctcaatgacgagcgctacaaggcctttaagcagttcaccagcgtgttcggtgtgggcgtgaaaacctcggaaaagtggtaccgtatgggcctccgtacggttgaagaagcaaaggccagtaagagtctgaagctgagcaagatgcagaaggcgggcttcctgtattacgaggatctggcgagcggtgttagtaaagaagaagccgatgccgttacgctcatcgtgaaggaaacggtgcgtaccgttgtgccggatgcgctggtgaccatcgccggcggtttccgccgtggcaaacctatgggccacgacgttgactttctgatcacgaacccgggccgtcctgaagatgacgagctgctccacaaagtggttgatctgctcaagaagcaaggtctgctgctgtacgaagacatccgtgagagcacgttcgtggaggggcaactgccaagtcctaaaatcgacgccctggacaaccatcagaagtgcttcgccattctcaagctgtaccagccgaaggtggataacagtgcggttgggacgagtaagaaaagtgacatggctgaggttaaggattggaaagcggttcgtgtggatctggtgatcacgccattcgagcagttcgcctatgcgctgctcggttggacgggcagcggccaatttcgtcgcgatctgcgtcgctatgcggaggaagagcgcgacatgctgctcgacaaccatcgtctctacgacctgaaaaagggcatctttctgagggcgggcagcgaagaagagattttcggtcatctgggtctggattatctggagccgtgggaacgcaacgcg

SEQ ID NO: 4120 - protein, 394 aa, synthetic construct
  REGION 1..394: note = Variant of terminal deoxynucleotidyl transferase
MHHHHHHGGSGHPPSNTPEKEVPSVIARHVSQYACQRKTTLNNYNKKFTDALEIMAENYKFKENLQACLEAKRAASIFKSLPFEVTSMKDIQGLPCITDDVRDVIEEIIEEGESSRVKEILNDERYKAFKQFTSVFGVGVKTSEKWYRMGLRTVEEAKASKSLKLSKMQKAGFLYYEDLASGVSKEEADAVTLIVKETVRTVVPDALVTIAGGFRRGKPMGHDVDFLITNPGRPEDDELLHKVVDLLKKQGLLLYEDIRESTFVEGQLPSPKIDALDNHQKCFAILKLYQPKVDNSAVGTSKKSDMAEVKDWKAVRVDLVITPFEQFAYALLGWTGSGQFRRDLRRYAEEERDMLLDNHRLYDLKKGIFLRAGSEEEIFGHLGLDYLEPWERNA

SEQ ID NO: 4121 - DNA, 1182 bp, synthetic construct
  misc_feature 1..1182: note = Variant of terminal deoxynucleotidyl transferase
  source 1..1182: mol_type = other DNA
atgcatcaccaccatcatcatgggggttctggtcatccggaaggtaataccccggagaaggaggtgccgagcgttatcgcccgtcatgttagtccatacgcgtgccagcgcaagaccacgctgaataactacaacaaaaagttcaccgacgcgctggagatcatggccgagaactacaaatttaaagagaacctgcaggcgtgtctggaagccaagcgcgccgcgagtgtcctgaaaagcctgccgttcgaggttaccagcatgaaagacatccaaggtctgccgtgcattaccgacgacgtacgtccggtgatcgaggagatcatcgaagagggcgagagcagccgtgttaaagaaatcctcaatgacgagcgctacaaggcctttaagcagttcaccagcgtgttcggtgtgggcgtgaaaacctcggaaaagtggtaccgtatgggcctccgtacggttgaagaagcaaaggccagtaagagtctgaagctgagcaagatgcagaaggcgggcttcctgtattacgaggatctggcgagcggtgttagtaaagaagaagccgatgccgttacgctcatcgtgaaggaaacggtgcgtactgttagtccggatgcggaggtgaccattgccggcggtttccgccgtggcaaacctatgggccacgacgttgacctgctgatcacgattccgggccgtcctgaagatgacgagctgctccacaaagtggttgatctgctcaagaagcaaggtctgctgctgtacgaagacatccgtgagagcacgttcgtggaggggcaactgccaagtcctaaaatcgacgccctggacaactttcagaagtgcttcgccattctcaagctgtaccgtccgaaggtggataacagtgcggttgggacgagtaagaaaagtgacatggctgaggttaaggattggaaagcggttcgtgtggatctggtgatgacgccattcgagcagttcgcctatgcgctgctcggttggacgggcagcggccaatttcgtcgcgatacgcgtcgctatgcggaggaagagcgcgacatgctgctcgacaaccatcgtctctacgacctgaaaaagggcatctttctgagtgcgggcagcgaagaagagattttcggtcatctgggtctggattatctggagccgtgggaacgcaacgcg

SEQ ID NO: 4122 - protein, 394 aa, synthetic construct
  REGION 1..394: note = Variant of terminal deoxynucleotidyl transferase
MHHHHHHGGSGHPEGNTPEKEVPSVIARHVSPYACQRKTTLNNYNKKFTDALEIMAENYKFKENLQACLEAKRAASVLKSLPFEVTSMKDIQGLPCITDDVRPVIEEIIEEGESSRVKEILNDERYKAFKQFTSVFGVGVKTSEKWYRMGLRTVEEAKASKSLKLSKMQKAGFLYYEDLASGVSKEEADAVTLIVKETVRTVSPDAEVTIAGGFRRGKPMGHDVDLLITIPGRPEDDELLHKVVDLLKKQGLLLYEDIRESTFVEGQLPSPKIDALDNFQKCFAILKLYRPKVDNSAVGTSKKSDMAEVKDWKAVRVDLVMTPFEQFAYALLGWTGSGQFRRDTRRYAEEERDMLLDNHRLYDLKKGIFLSAGSEEEIFGHLGLDYLEPWERNA

SEQ ID NO: 4123 - DNA, 1182 bp, synthetic construct
  misc_feature 1..1182: note = Variant of terminal deoxynucleotidyl transferase
  source 1..1182: mol_type = other DNA
atgcatcaccaccatcatcatgggggttctggtcatccggaaggtaataccccggagaaggaggtgccgagcgttatcgcccgtcatgttagtcagtacgcgtgccagcgcaagaccacgctgaataactacaacaaaaagttcaccgacgcgctggagatcatggccgagaactacaaatttaaagagaacctgcaggcgtgtctggaagccaagcgcgccgcgagtgtcctgaaaagcctgccgttcgaggttaccagcatgaaagacatccaaggtctgccgtgcattaccgacgacgtacgtgacgtgatcgaggagatcatcgaagagggcgagagcagccgtgttaaagaaatcctcaatgacgagcgctacaaggcctttaagcagttcaccagcgtgttcggtgtgggcgtgaaaacctcggaaaagtggtaccgtatgggcctccgtacggttgaagaagcaaaggccagtaagagtctgaagctgagcaagatgcagaaggcgggcttcctgtattacgaggatctggcgagcggtgttagtaaagaagaagccgatgccgttacgctcatcgtgaaggaaacggtgcgtactgttagtccggatgcgctggtgaccatcgccggcggtttccgccgtggcaaacctatgggccacgacgttgacctgctgatcacgattccgggccgtcctgaagatgacgagctgctccacaaagtggttgatctgctcaagaagcaaggtctgctgctgtacgaagacatccgtgagagcacgttcgtggaggggcaactgccaagtcctaaacctgacgccctggacaaccatcagaagtgcttcgccattctcaagctgtaccgtccgaaggtggataacagtgcggttgggacgagtaagaaaagtgacatggctgaggttaaggattggaaagcggttcgtgtggatctggtgatcacgccattcgagcagttcgcctatgcgctgctcggttggacgggcagcggccaatttcgtcgcgatctgcgtcgctatgcggaggaagagcgcgacatgctgctcgacaaccatcgtctctacgacctgaaaaagggcatctttctgagtgcggacagcgaagaagagattttcggtcatctgggtctggattatctggagccgtgggaacgcaacgcg

SEQ ID NO: 4124 - protein, 394 aa, synthetic construct
  REGION 1..394: note = Variant of terminal deoxynucleotidyl transferase
MHHHHHHGGSGHPEGNTPEKEVPSVIARHVSQYACQRKTTLNNYNKKFTDALEIMAENYKFKENLQACLEAKRAASVLKSLPFEVTSMKDIQGLPCITDDVRDVIEEIIEEGESSRVKEILNDERYKAFKQFTSVFGVGVKTSEKWYRMGLRTVEEAKASKSLKLSKMQKAGFLYYEDLASGVSKEEADAVTLIVKETVRTVSPDALVTIAGGFRRGKPMGHDVDLLITIPGRPEDDELLHKVVDLLKKQGLLLYEDIRESTFVEGQLPSPKPDALDNHQKCFAILKLYRPKVDNSAVGTSKKSDMAEVKDWKAVRVDLVITPFEQFAYALLGWTGSGQFRRDLRRYAEEERDMLLDNHRLYDLKKGIFLSADSEEEIFGHLGLDYLEPWERNA

SEQ ID NO: 4125 - DNA, 1182 bp, synthetic construct
  misc_feature 1..1182: note = Variant of terminal deoxynucleotidyl transferase
  source 1..1182: mol_type = other DNA
atgcatcaccaccatcatcatgggggttctggtcatccggaaggtaataccccggagaaggaggtgccgagcgttatcgcccgtcatgttagtcaatacgcgtgccagcgcaagaccacgctgaataactacaacaaaaagttcaccgacgcgctggagatcatggccgagaactacaaatttaaagagaacctgcaggcgtgtctggaagccaagcgcgccgcgagtgtcctgaaaagcctgccgttcgaggttaccagcatgaaagacatccaaggtctgccgtgcattaccgacgacgtacgtgatgtgatcgaggagatcatcgaagagggcgagagcagccgtgttaaagaaatcctcaatgacgagcgctacaaggcctttaagcagttcaccagcgtgttcggtgtgggcgtgaaaacctcggaaaagtggtaccgtatgggcctccgtacggttgaagaagcaaaggccagtaagagtctgaagctgagcaagatgcagaaggcgggcttcctgtattacgaggatctggcgagcggtgttagtaaagaagaagccgatgccgttacgctcatcgtgaaggaaacggtgcgtactgttagtccggatgcggaggtgaccctggccggcggtttccgccgtggcaaacctatgggccacgacgttgacctgctgatcacgattccgggccgtcctgaagatgacgagctgctccacaaagtggttgatctgctcaagaagcaaggtctgctgctgtacgaagacatccgtgagagcacgttcgtggaggggcaactgccaagtcctaaacctgacgccctggacaaccatcagaagtgcttcgccattctcaagctgtaccgtccgaaggtggataacagtgcggttgggacgagtaagaaaagtgacatggctgaggttaaggattggaaagcggttcgtgtggatctggtgatcacgccattcgagcagttcgcctatgcgctgctcggttggacgggcagcggccaatttcgtcgcgatacgcgtcgctatgcggaagaagagcgcgacatgctgctcgacaaccatcgtctctacgacctgaaaaagggcatctttctgagtgcgggcagcgaagaagagattttcggtcatctgggtctggattatctggagccgtgggaacgcaacgcg

SEQ ID NO: 4126 - protein, 394 aa, synthetic construct
  REGION 1..394: note = Variant of terminal deoxynucleotidyl transferase
MHHHHHHGGSGHPEGNTPEKEVPSVIARHVSQYACQRKTTLNNYNKKFTDALEIMAENYKFKENLQACLEAKRAASVLKSLPFEVTSMKDIQGLPCITDDVRDVIEEIIEEGESSRVKEILNDERYKAFKQFTSVFGVGVKTSEKWYRMGLRTVEEAKASKSLKLSKMQKAGFLYYEDLASGVSKEEADAVTLIVKETVRTVSPDAEVTLAGGFRRGKPMGHDVDLLITIPGRPEDDELLHKVVDLLKKQGLLLYEDIRESTFVEGQLPSPKPDALDNHQKCFAILKLYRPKVDNSAVGTSKKSDMAEVKDWKAVRVDLVITPFEQFAYALLGWTGSGQFRRDTRRYAEEERDMLLDNHRLYDLKKGIFLSAGSEEEIFGHLGLDYLEPWERNA

SEQ ID NO: 4127 - DNA, 1182 bp, synthetic construct
  misc_feature 1..1182: note = Variant of terminal deoxynucleotidyl transferase
  source 1..1182: mol_type = other DNA
atgcatcaccaccatcatcatgggggttctggtcatccggaaggtaataccccggagaaggaggtgccgagcgttatcgcccgtcatgttagtccatacgcgtgccagcgcaagaccacgctgaataactacaacaaaaagttcaccgacgcgctggagatcatggccgagaactacaaatttaaagagaacctgcaggcgtgtctggaagccaagcgcgccgcgagtgtcctgaaaagcctgccgttcgaggttaccagcatgaaagacatccaaggtctgccgtgcattaccgacgacgtacgtgatgtgatcgaggagatcatcgaagagggcgagagcagccgtgttaaagaaatcctcaatgacgagcgctacaaggcctttaagcagttcaccagcgtgttcggtgtgggcgtgaaaacctcggaaaagtggtaccgtatgggcctccgtacggttgaagaagcaaaggccagtaagagtctgaagctgagcaagatgcagaaggcgggcttcctgtattacgaggatctggcgagcggtgttagtaaagaagaagccgatgccgttacgctcatcgtgaaggaaacggtgcgtactgttagtccggatgcgctggtgaccattgccggcggtttccgccgtggcaaacctatgggccacgacgttgacctgctgatcacgattccgggccgtcctgaagatgacgagctgctccacaaagtggttgatctgctcaagaagcaaggtctgctgctgtacgaagacatccgtgagagcacgttcgtggaggggcaactgccaagtcctaaacctgacgccctggacaacttccagaagtgcttcgccattctcaagctgtaccgtccgaaggtggataacagtgcggttgggacgagtaagaaaagtgacatggctgaggttaaggattggaaagcggttcgtgtggatctggtgatcacgccattcgagcagttcgcctatgcgctgctcggttggacgggcagcggccaatttcgtcgcgatacgcgtcgctatgcggaggaagagcgcgacatgctgctcgacaaccatcgtctctacgacctgaaaaagggcatctttctgagtgcggacagcgaagaagagattttcggtcatctgggtctggattatctggagccgtgggaacgcaacgcg

SEQ ID NO: 4128 - protein, 394 aa, synthetic construct
  REGION 1..394: note = Variant of terminal deoxynucleotidyl transferase
MHHHHHHGGSGHPEGNTPEKEVPSVIARHVSPYACQRKTTLNNYNKKFTDALEIMAENYKFKENLQACLEAKRAASVLKSLPFEVTSMKDIQGLPCITDDVRDVIEEIIEEGESSRVKEILNDERYKAFKQFTSVFGVGVKTSEKWYRMGLRTVEEAKASKSLKLSKMQKAGFLYYEDLASGVSKEEADAVTLIVKETVRTVSPDALVTIAGGFRRGKPMGHDVDLLITIPGRPEDDELLHKVVDLLKKQGLLLYEDIRESTFVEGQLPSPKPDALDNFQKCFAILKLYRPKVDNSAVGTSKKSDMAEVKDWKAVRVDLVITPFEQFAYALLGWTGSGQFRRDTRRYAEEERDMLLDNHRLYDLKKGIFLSADSEEEIFGHLGLDYLEPWERNA

SEQ ID NO: 4129 - DNA, 1182 bp, synthetic construct
  misc_feature 1..1182: note = Variant of terminal deoxynucleotidyl transferase
  source 1..1182: mol_type = other DNA
atgcatcaccaccatcatcatgggggttctggtcatccggaaggtaataccccggagaaggaggtgccgagcgttatcgcccgtcatgttagtcaatacgcgtgccagcgcaagaccacgctgaataactacaacaaaaagttcaccgacgcgctggagatcatggccgagaactacaaatttaaagagaacctgcaggcgtgtctggaagccaagcgcgccgcgagtgtcctgaaaagcctgccgttcgaggttaccagcatgaaagacatccaaggtctgccgtgcattaccgacgacgtacgtgacgtgatcgaggagatcatcgaagagggcgagagcagccgtgttaaagaaatcctcaatgacgagcgctacaaggcctttaagcagttcaccagcgtgttcggtgtgggcgtgaaaacctcggaaaagtggtaccgtatgggcctccgtacggttgaagaagcaaaggccagtaagagtctgaagctgagcaagatgcagaaggcgggcttcctgtattacgaggatctggcgagcggtgttagtaaagaagaagccgatgccgttacgctcatcgtgaaggaaacggtgcgtactgttagtccggatgcggaggtgaccattgccggcggtttccgccgtggcaaacctatgggccacgacgttgacctgctgatcacgattccgggccgtcctgaagatgacgagctgctccacaaagtggttgatctgctcaagaagcaaggtctgctgctgtacgaagacatccgtgagagcacgttcgtggaggggcaactgccaagtcctaaacctgacgccctggacaacttccagaagtgcttcgccattctcaagctgtaccgtccgaaggtggataacagtgcggttgggacgagtaagaaaagtgacatggctgaggttaaggattggaaagcggttcgtgtggatctggtgatcacgccattcgagcagttcgcctatgcgctgctcggttggacgggcagcggccaatttcgtcgcgatctgcgtcgctatgcggaggaagagcgcgacatgctgctcgacaaccatcgtctctacgacctgaaaaagggcatctttctgagtgcgggcagcgaagaagagattttcggtcatctgggtctggattatctggagccgtgggaacgcaacgcg

SEQ ID NO: 4130 - protein, 394 aa, synthetic construct
  REGION 1..394: note = Variant of terminal deoxynucleotidyl transferase
MHHHHHHGGSGHPEGNTPEKEVPSVIARHVSQYACQRKTTLNNYNKKFTDALEIMAENYKFKENLQACLEAKRAASVLKSLPFEVTSMKDIQGLPCITDDVRDVIEEIIEEGESSRVKEILNDERYKAFKQFTSVFGVGVKTSEKWYRMGLRTVEEAKASKSLKLSKMQKAGFLYYEDLASGVSKEEADAVTLIVKETVRTVSPDAEVTIAGGFRRGKPMGHDVDLLITIPGRPEDDELLHKVVDLLKKQGLLLYEDIRESTFVEGQLPSPKPDALDNFQKCFAILKLYRPKVDNSAVGTSKKSDMAEVKDWKAVRVDLVITPFEQFAYALLGWTGSGQFRRDLRRYAEEERDMLLDNHRLYDLKKGIFLSAGSEEEIFGHLGLDYLEPWERNA

SEQ ID NO: 4131 - DNA, 1182 bp, synthetic construct
  misc_feature 1..1182: note = Variant of terminal deoxynucleotidyl transferase
  source 1..1182: mol_type = other DNA
atgcatcaccaccatcatcatgggggttctggtcatccggaaggtaataccccggagaaggaggtgccgagcgttatcgcccgtcatgttagtcagtacgcgtgccagcgcaagaccacgctgaataactacaacaaaaagttcaccgacgcgctggagatcatggccgagaactacaaatttaaagagaacctgcaggcgtgtctggaagccaagcgcgccgcgagtgtcctgaaaagcctgccgttcgaggttaccagcatgaaagacatccaaggtctgccgtgcattaccgacgacgtacgtgatgtgatcgaggagatcatcgaagagggcgagagcagccgtgttaaagaaatcctcaatgacgagcgctacaaggcctttaagcagttcaccagcgtgttcggtgtgggcgtgaaaacctcggaaaagtggtaccgtatgggcctccgtacggttgaagaagcaaaggccagtaagagtctgaagctgagcaagatgcagaaggcgggcttcctgtattacgaggatctggcgagcggtgttagtaaagaagaagccgatgccgttacgctcatcgtgaaggaaacggtgcgtactgttagtccggatgcgctggtgaccctggccggcggtttccgccgtggcaaacctatgggccacgacgttgacctgctgatcacgattccgggccgtcctgaagatgacgagctgctccacaaagtggttgatctgctcaagaagcaaggtctgctgctgtacgaagacatccgtgagagcacgttcgtggaggggcaactgccaagtcctaaaatcgacgccctggacaactttcagaagtgcttcgccattctcaagctgtaccgtccgaaggtggataacagtgcggttgggacgagtaagaaaagtgacatggctgaggttaaggattggaaagcggttcgtgtggatctggtgatcacgccattcgagcagttcgcctatgcgctgctcggttggacgggcagcggccaatttcgtcgcgatctgcgtcgctatgcggaggaagagcgcgacatgctgctcgacaaccatcgtctctacgacctgaaaaagggcatctttctgagtgcgggcagcgaagaagagattttcggtcatctgggtctggattatctggagccgtgggaacgcaacgcg

SEQ ID NO: 4132 - protein, 394 aa, synthetic construct
  REGION 1..394: note = Variant of terminal deoxynucleotidyl transferase
MHHHHHHGGSGHPEGNTPEKEVPSVIARHVSQYACQRKTTLNNYNKKFTDALEIMAENYKFKENLQACLEAKRAASVLKSLPFEVTSMKDIQGLPCITDDVRDVIEEIIEEGESSRVKEILNDERYKAFKQFTSVFGVGVKTSEKWYRMGLRTVEEAKASKSLKLSKMQKAGFLYYEDLASGVSKEEADAVTLIVKETVRTVSPDALVTLAGGFRRGKPMGHDVDLLITIPGRPEDDELLHKVVDLLKKQGLLLYEDIRESTFVEGQLPSPKIDALDNFQKCFAILKLYRPKVDNSAVGTSKKSDMAEVKDWKAVRVDLVITPFEQFAYALLGWTGSGQFRRDLRRYAEEERDMLLDNHRLYDLKKGIFLSAGSEEEIFGHLGLDYLEPWERNA

SEQ ID NO: 4133 - DNA, 1182 bp, synthetic construct
  misc_feature 1..1182: note = Variant of terminal deoxynucleotidyl transferase
  source 1..1182: mol_type = other DNA
atgcatcaccaccatcatcatgggggttctggtcatccggaaggtaataccccggagaaggaggtgccgagcgttatcgcccgtcatgttagtcagtacgcgtgccagcgcaagaccacgctgaataactacaacaaaaagttcaccgacgcgctggagatcatggccgagaactacaaatttaaagagaacctgcaggcgtgtctggaagccaagcgcgccgcgagtgtcctgaaaagcctgccgttcgaggttaccagcatgaaagacatccaaggtctgccgtgcattaccgacgacgtacgtgacgtgatccgtgagatcatcgaagtaggcgagagcagccgtgttaaagaaatcctcaatgacgagcgctacaaggcctttaagcagttcaccagcgtgttcggtgtgggcgtgaaaacctcggaaaagtggtaccgtatgggcctccgtacggttgaagaagcaaaggccagtaagagtctgaagctgagcaagatgcagaaggcgggcttcctgtattacgaggatctggcgagcggtgttagtaaagaagaagccgatgccgttacgctcatcgtgaaggaaacggtggctaccgttagtccggatgcgctggtgaccatcgccggcggtttccgccgtggcaaacctatgggccacgacgttgacctgctgatcacgattccgggccgtcctaccgatgacgagctgctccacaaagtggttgatctgctcaagaagcaaggtctgctgctgtacgaagacatccgtgagagcacgttcgtggaggggcaactgccaagtcctaaaatcgacgccctggacaactttcagaagtgcttcgccattctcaagctgtaccgtccgaaggtggataacagtgcggttgggacgagtaagaaaagtgacatggctgaggttaaggattggaaagcggttcgtgtggatctggtgatcacgccattcgagcagttcgcctatgcgctgctcggttggacgggcagcggccaatttcgtcgcgatctgcgtcgctatgcggaggaagagcgcgacatgctgctcgacaaccatcgtctctacgacctgaaaaagggccaatttctgagtgcgggcagcgaagaagagattttcggtcatctgggtctggattatctggagccgtgggaacgcaacgcg

SEQ ID NO: 4134 - protein, 394 aa, synthetic construct
  REGION 1..394: note = Variant of terminal deoxynucleotidyl transferase
MHHHHHHGGSGHPEGNTPEKEVPSVIARHVSQYACQRKTTLNNYNKKFTDALEIMAENYKFKENLQACLEAKRAASVLKSLPFEVTSMKDIQGLPCITDDVRDVIREIIEVGESSRVKEILNDERYKAFKQFTSVFGVGVKTSEKWYRMGLRTVEEAKASKSLKLSKMQKAGFLYYEDLASGVSKEEADAVTLIVKETVATVSPDALVTIAGGFRRGKPMGHDVDLLITIPGRPTDDELLHKVVDLLKKQGLLLYEDIRESTFVEGQLPSPKIDALDNFQKCFAILKLYRPKVDNSAVGTSKKSDMAEVKDWKAVRVDLVITPFEQFAYALLGWTGSGQFRRDLRRYAEEERDMLLDNHRLYDLKKGQFLSAGSEEEIFGHLGLDYLEPWERNA

SEQ ID NO: 4135 - DNA, 1182 bp, synthetic construct
  misc_feature 1..1182: note = Variant of terminal deoxynucleotidyl transferase
  source 1..1182: mol_type = other DNA
atgcatcaccaccatcatcatgggggttctggtcatccggaaggtaataccccggagaaggaggtgccgagcgttatcgcccgtcatgttagtccatacgcgtgccagcgcaagaccacgctgaataactacaacaaaaagttcaccgacgcgctggagatcatggccgagaactacaaatttaaagagaacctgcaggcgtgtctggaagccaagcgcgccgcgagtgtcctgaaaagcctgccgttcgaggttaccagcatgaaagacatccaaggtctgccgtgcattaccgacgacgtacgtgatgtgatcgaggagatcatcgaagagggcgagagcagccgtgttaaagaaatcctcaatgacgagcgctacaaggcctttaagcagttcaccagcgtgttcggtgtgggcgtgaaaacctcggaaaagtggtaccgtatgggcctccgtacggttgaagaagcaaaggccagtaagagtctgaagctgagcaagatgcagaaggcgggcttcctgtattacgaggatctggcgagcggtgttagtaaagaagaagccgatgccgttacgctcatcgtgaaggaaacggtgcgtactgttagtccggatgcgctggtgaccattgccggcggtttccgccgtggcaaacctatgggccacgacgttgacctgctgatcacgattccgggccgtcctgaagatgacgagctgctccacaaagtggttgatctgctcaagaagcaaggtctgctgctgtacgaagacatccgtgagagcacgttcgtggaggggcaactgccaagtcctaaaattgacgccctggacaaccatcagaagtgcttcgccattctcaagctgtaccgtccgaaggtggataacagtgcggttgggacgagtaagaaaagtgacatggctgaggttaaggattggaaagcggttcgtgtggatctggtgatgacgccattcgagcagttcgcctatgcgctgctcggttggacgggcagcggccaatttcgtcgcgatctgcgtcgctatgcggaggaagagcgcgacatgctgctcgacaaccatcgtctctacgacctgaaaaagggcatctttctgagtgcgggcagcgaagaagagattttcggtcatctgggtctggattatctggagccgtgggaacgcaacgcg

SEQ ID NO: 4136 - protein, 394 aa, synthetic construct
  REGION 1..394: note = Variant of terminal deoxynucleotidyl transferase
MHHHHHHGGSGHPEGNTPEKEVPSVIARHVSPYACQRKTTLNNYNKKFTDALEIMAENYKFKENLQACLEAKRAASVLKSLPFEVTSMKDIQGLPCITDDVRDVIEEIIEEGESSRVKEILNDERYKAFKQFTSVFGVGVKTSEKWYRMGLRTVEEAKASKSLKLSKMQKAGFLYYEDLASGVSKEEADAVTLIVKETVRTVSPDALVTIAGGFRRGKPMGHDVDLLITIPGRPEDDELLHKVVDLLKKQGLLLYEDIRESTFVEGQLPSPKIDALDNHQKCFAILKLYRPKVDNSAVGTSKKSDMAEVKDWKAVRVDLVMTPFEQFAYALLGWTGSGQFRRDLRRYAEEERDMLLDNHRLYDLKKGIFLSAGSEEEIFGHLGLDYLEPWERNA

SEQ ID NO: 4137 - DNA, 1182 bp, synthetic construct
  misc_feature 1..1182: note = Variant of terminal deoxynucleotidyl transferase
  source 1..1182: mol_type = other DNA
atgcatcaccaccatcatcatgggggttctggtcatccggaaggtaataccccggagaaggaggtgccgagcgttatcgcccgtcatgttagtcagtacgcgtgccagcgcaagaccacgctgaataactacaacaaaaagttcaccgacgcgctggagatcatggccgagaactacaaatttaaagagaacctgcaggcgtgtctggaagccaagcgcgccgcgagtgtcctgaaaagcctgccgttcgaggttaccagcatgaaagacatccaaggtctgccgtgcattaccgacgacgtacgtgacgtgatcgaggagatcatcgaagagggcgagagcagccgtgttaaagaaatcctcaatgacgagcgctacaaggcctttaagcagttcaccagcgtgttcggtgtgggcgtgaaaacctcggaaaagtggtaccgtatgggcctccgtacggttgaagaagcaaaggccagtaagagtctgaagctgagcaagatgcagaaggcgggcttcctgtattacgaggatctggcgagcggtgttagtaaagaagaagccgatgccgttacgctcatcgtgaaggaaacggtgcgtactgttagtccggatgcgctggtgaccatcgccggcggtttccgccgtggcaaacctatgggccacgacgttgacctgctgatcacgattccgggccgtcctgaagatgacgagctgctccacaaagtggttgatctgctcaagaagcaaggtctgctgctgtacgaagacatccgtgagagcacgttcgtggaggggcaactgccaagtcctaaacctgacgccctggacaaccatcagaagtgcttcgccattctcaagctgtaccgtccgaaggtggataacagtgcggttgggacgagtaagaaaagtgacatggctgaggttaaggattggaaagcggttcgtgtggatctggtgatcacgccattcgagcagttcgcctatgcgctgctcggttggacgggcagcggccaatttcgtcgcgatctgcgtcgctatgcggaggaagagcgcgacatgctgctcgacaaccatcgtctctacgacctgaaaaagggcatctttctgagtgcgggcagcgaagaagagattttcggtcatctgggtctggattatctggagccgtgggaacgcaacgcg

SEQ ID NO: 4138 - protein, 394 aa, synthetic construct
  REGION 1..394: note = Variant of terminal deoxynucleotidyl transferase
MHHHHHHGGSGHPEGNTPEKEVPSVIARHVSQYACQRKTTLNNYNKKFTDALEIMAENYKFKENLQACLEAKRAASVLKSLPFEVTSMKDIQGLPCITDDVRDVIEEIIEEGESSRVKEILNDERYKAFKQFTSVFGVGVKTSEKWYRMGLRTVEEAKASKSLKLSKMQKAGFLYYEDLASGVSKEEADAVTLIVKETVRTVSPDALVTIAGGFRRGKPMGHDVDLLITIPGRPEDDELLHKVVDLLKKQGLLLYEDIRESTFVEGQLPSPKPDALDNHQKCFAILKLYRPKVDNSAVGTSKKSDMAEVKDWKAVRVDLVITPFEQFAYALLGWTGSGQFRRDLRRYAEEERDMLLDNHRLYDLKKGIFLSAGSEEEIFGHLGLDYLEPWERNA

SEQ ID NO: 4139 - DNA, 1182 bp, synthetic construct
  misc_feature 1..1182: note = Variant of terminal deoxynucleotidyl transferase
  source 1..1182: mol_type = other DNA
atgcatcaccaccatcatcatgggggttctggtcatccggaaggtaataccccggagaaggaggtgccgagcgttatcgcccgtcatgttagtcagtacgcgtgccagcgcaagaccacgctgaataactacaacaaaaagttcaccgacgcgctggagatcatggccgagaactacaaatttaaagagaacctgcaggcgtgtctggaagccaagcgcgccgcgagtgtcctgaaaagcctgccgttcgaggttaccagcatgaaagacatccaaggtctgccgtgcattaccgacgacgtacgtgatgtgatcgaggagatcatcgaagagggcgagagcagccgtgttaaagaaatcctcaatgacgagcgctacaaggcctttaagcagttcaccagcgtgttcggtgtgggcgtgaaaacctcggaaaagtggtaccgtatgggcctccgtacggttgaagaagcaaaggccagtaagagtctgaagctgagcaagatgcagaaggcgggcttcctgtattacgaggatctggcgagcggtgttagtaaagaagaagccgatgccgttacgctcatcgtgaaggaaacggtgcgtactgttagtccggatgcgctggtgaccctggccggcggtttccgccgtggcaaacctatgggccacgacgttgacctgctgatcacgattccgggccgtcctgaagatgacgagctgctccacaaagtggttgatctgctcaagaagcaaggtctgctgctgtacgaagacatccgtgagagcacgttcgtggaggggcaactgccaagtcctaaacctgacgccctggacaaccatcagaagtgcttcgccattctcaagctgtaccgtccgaaggtggataacagtgcggttgggacgagtaagaaaagtgacatggctgaggttaaggattggaaagcggttcgtgtggatctggtgatcacgccattcgagcagttcgcctatgcgctgctcggttggacgggcagcggccaatttcgtcgcgatctgcgtcgctatgcggaggaagagcgcgacatgctgctcgacaaccatcgtctctacgacctgaaaaagggcatctttctgagtgcgggcagcgaagaagagattttcggtcatctgggtctggattatctggagccgtgggaacgcaacgcg

SEQ ID NO: 4140 - protein, 394 aa, synthetic construct
  REGION 1..394: note = Variant of terminal deoxynucleotidyl transferase
MHHHHHHGGSGHPEGNTPEKEVPSVIARHVSQYACQRKTTLNNYNKKFTDALEIMAENYKFKENLQACLEAKRAASVLKSLPFEVTSMKDIQGLPCITDDVRDVIEEIIEEGESSRVKEILNDERYKAFKQFTSVFGVGVKTSEKWYRMGLRTVEEAKASKSLKLSKMQKAGFLYYEDLASGVSKEEADAVTLIVKETVRTVSPDALVTLAGGFRRGKPMGHDVDLLITIPGRPEDDELLHKVVDLLKKQGLLLYEDIRESTFVEGQLPSPKPDALDNHQKCFAILKLYRPKVDNSAVGTSKKSDMAEVKDWKAVRVDLVITPFEQFAYALLGWTGSGQFRRDLRRYAEEERDMLLDNHRLYDLKKGIFLSAGSEEEIFGHLGLDYLEPWERNA

SEQ ID NO: 4141 - DNA, 1182 bp, synthetic construct
  misc_feature 1..1182: note = Variant of terminal deoxynucleotidyl transferase
  source 1..1182: mol_type = other DNA
atgcatcaccaccatcatcatgggggttctggtcatccggaaggtaataccccggagaaggaggtgccgagcgttatcgcccgtcatgttagtcagtacgcgtgccagcgcaagaccacgctgaataactacaacaaaaagttcaccgacgcgctggagatcatggccgagaactacaaatttaaagagaacctgcaggcgtgtctggaagccaagcgcgccgcgagtgtcctgaaaagcctgccgttcgaggttaccagcatgaaagacatccaaggtctgccgtgcattaccgacgacgtacgtgacctgatccgtgagatcatcgaagaaggcgagagcagccgtgttaaagaaatcctcaatgacgagcgctacaaggcctttaagcagttcaccagcgtgttcggtgtgggcgtgaaaacctcggaaaagtggtaccgtatgggcctccgtacggttgaagaagcaaaggccagtaagagtctgaagctgagcaagatgcagaaggcgggcttcctgtattacgaggatctggcgagcggtgttagtaaagaagaagccgatgccgttacgctcatcgtgaaggaaacggtgcgtactgttagtccggatgcgctggtgaccatcgccggcggtttccgccgtggcaaacctatgggccacgacgttgacctgctgatcacgattccgggccgtcctgaagatgacgagctgctccacaaagtggttgatctgctcaagaagcaaggtctgctgctgtacgaagacatccgtgagagcacgttcgtggaggggcaactgccaagtcctaaaatcgacgccctggacaactttcagaagtgcttcgccattctcaagctgtaccgtccgaaggtggataacagtgcggttgggacgagtaagaaaagtgacatggctgaggttaaggattggaaagcggttcgtgtggatctggtgatcacgccattcgagcagttcgcctatgcgctgctcggttggacgggcagcggccaatttcgtcgcgatctgcgtcgctatgcggaggaagagcgcgacatgctgctcgacaaccatcgtctctacgacctgaaaaagggcatctttctgagtgcgggcagcgaagaagagattttcggtcatctgggtctggattatctggagccgtgggaacgcaacgcg

SEQ ID NO: 4142 - protein, 394 aa, synthetic construct
  REGION 1..394: note = Variant of terminal deoxynucleotidyl transferase
MHHHHHHGGSGHPEGNTPEKEVPSVIARHVSQYACQRKTTLNNYNKKFTDALEIMAENYKFKENLQACLEAKRAASVLKSLPFEVTSMKDIQGLPCITDDVRDLIREIIEEGESSRVKEILNDERYKAFKQFTSVFGVGVKTSEKWYRMGLRTVEEAKASKSLKLSKMQKAGFLYYEDLASGVSKEEADAVTLIVKETVRTVSPDALVTIAGGFRRGKPMGHDVDLLITIPGRPEDDELLHKVVDLLKKQGLLLYEDIRESTFVEGQLPSPKIDALDNFQKCFAILKLYRPKVDNSAVGTSKKSDMAEVKDWKAVRVDLVITPFEQFAYALLGWTGSGQFRRDLRRYAEEERDMLLDNHRLYDLKKGIFLSAGSEEEIFGHLGLDYLEPWERNA

SEQ ID NO: 4143 - DNA, 1182 bp, synthetic construct
  misc_feature 1..1182: note = Variant of terminal deoxynucleotidyl transferase
  source 1..1182: mol_type = other DNA
atgcatcaccaccatcatcatgggggttctggtcatccggaaggtaataccccggagaaggaggtgccgagcgttatcgcccgtcatgttagtccatacgcgtgccagcgcaagaccacgctgaataactacaacaaaaagttcaccgacgcgctggagatcatggccgagaactacaaatttaaagagaacctgcaggcgtgtctggaagccaagcgcgccgcgagtgtcctgaaaagcctgccgttcgaggttaccagcatgaaagacatccaaggtctgccgtgcattaccgacgacgtacgtccggtgatcgaggagatcatcgaagagggcgagagcagccgtgttaaagaaatcctcaatgacgagcgctacaaggcctttaagcagttcaccagcgtgttcggtgtgggcgtgaaaacctcggaaaagtggtaccgtatgggcctccgtacggttgaagaagcaaaggccagtaagagtctgaagctgagcaagatgcagaaggcgggcttcctgtattacgaggatctggcgagcggtgttagtaaagaagaagccgatgccgttacgctcatcgtgaaggaaacggtgcgtactgttagtccggatgcggaggtgaccctggccggcggtttccgccgtggcaaacctatgggccacgacgttgacctgctgatcacgattccgggccgtcctgaagatgacgagctgctccacaaagtggttgatctgctcaagaagcaaggtctgctgctgtacgaagacatccgtgagagcacgttcgtggaggggcaactgccaagtcctaaaatcgacgccctggacaactttcagaagtgcttcgccattctcaagctgtaccgtccgaaggtggataacagtgcggttgggacgagtaagaaaagtgacatggctgaggttaaggattggaaagcggttcgtgtggatctggtgatcacgccattcgagcagttcgcctatgcgctgctcggttggacgggcagcggccaatttcgtcgcgatacgcgtcgctatgcgagtgaagagcgcgacatgctgctcgacaaccatcgtctctacgacctgaaaaagggcatctttctgagtgcgggcagcgaagaagagattttcggtcatctgggtctggattatctggagccgtgggaacgcaacgcg

SEQ ID NO: 4144 - protein, 394 aa, synthetic construct
  REGION 1..394: note = Variant of terminal deoxynucleotidyl transferase
MHHHHHHGGSGHPEGNTPEKEVPSVIARHVSPYACQRKTTLNNYNKKFTDALEIMAENYKFKENLQACLEAKRAASVLKSLPFEVTSMKDIQGLPCITDDVRPVIEEIIEEGESSRVKEILNDERYKAFKQFTSVFGVGVKTSEKWYRMGLRTVEEAKASKSLKLSKMQKAGFLYYEDLASGVSKEEADAVTLIVKETVRTVSPDAEVTLAGGFRRGKPMGHDVDLLITIPGRPEDDELLHKVVDLLKKQGLLLYEDIRESTFVEGQLPSPKIDALDNFQKCFAILKLYRPKVDNSAVGTSKKSDMAEVKDWKAVRVDLVITPFEQFAYALLGWTGSGQFRRDTRRYASEERDMLLDNHRLYDLKKGIFLSAGSEEEIFGHLGLDYLEPWERNA

SEQ ID NO: 4145 - DNA, 1182 bp, synthetic construct
  misc_feature 1..1182: note = Variant of terminal deoxynucleotidyl transferase
  source 1..1182: mol_type = other DNA
atgcatcaccaccatcatcatgggggttctggtcatccggaaggtaataccccggagaaggaggtgccgagcgttatcgcccgtcatgttagtcagtacgcgtgccagcgcaagaccacgctgaataactacaacaaaaagttcaccgacgcgctggagatcatggccgagaactacaaatttaaagagaacctgcaggcgtgtctggaagccaagcgcgccgcgagtgtcctgaaaagcctgccgttcgaggttaccagcatgaaagacatccaaggtctgccgtgcattaccgacgacgtacgtgacgtgatccaggagatcatcgaagaaggcgagagcagccgtgttaaagaaatcctcaatgacgagcgctacaaggcctttaagcagttcaccagcgtgttcggtgtgggcgtgaaaacctcggaaaagtggtaccgtatgggcctccgtacggttgaagaagcaaaggccagtaagagtctgaagctgagcaagatgcagaaggcgggcttcctgtattacgaggatctggcgagcggtgttagtaaagaagaagccgatgccgttacgctcatcgtgaaggaaacggtggctcgcgttagtccggatgcgctggtgaccatcgccggcggtttccgccgtggcaaacctatgggccacgacgttgacctgctgatcacgattccgggccgtcctgaggatgacgagctgctccacaaagtggttgatctgctcaagaagcaaggtctgctgctgtacgaagacatccgtgagagcacgttcgtggaggggcaactgccaagtcctaaaatcgacgccctggacaactttcagaagtgcttcgccattctcaagctgtaccgtccgaaggtggataacagtgcggttgggacgagtaagaaaagtgacatggctgaggttaaggattggaaagcggttcgtgtggatctggtgatcacgccattcgagcagttcgcctatgcgctgctcggttggacgggcagcggccaatttcgtcgcgatctgcgtcgctatgcggaggaagagcgcgacatgctgctcgacaaccatcgtctctacgacctgaaaaagggccaatttctgagtgcgggcagcgaagaagagattttcggtcatctgggtctggattatctggagccgtgggaacgcaacgcg

SEQ ID NO: 4146 - protein, 394 aa, synthetic construct
  REGION 1..394: note = Variant of terminal deoxynucleotidyl transferase
MHHHHHHGGSGHPEGNTPEKEVPSVIARHVSQYACQRKTTLNNYNKKFTDALEIMAENYKFKENLQACLEAKRAASVLKSLPFEVTSMKDIQGLPCITDDVRDVIQEIIEEGESSRVKEILNDERYKAFKQFTSVFGVGVKTSEKWYRMGLRTVEEAKASKSLKLSKMQKAGFLYYEDLASGVSKEEADAVTLIVKETVARVSPDALVTIAGGFRRGKPMGHDVDLLITIPGRPEDDELLHKVVDLLKKQGLLLYEDIRESTFVEGQLPSPKIDALDNFQKCFAILKLYRPKVDNSAVGTSKKSDMAEVKDWKAVRVDLVITPFEQFAYALLGWTGSGQFRRDLRRYAEEERDMLLDNHRLYDLKKGQFLSAGSEEEIFGHLGLDYLEPWERNA

SEQ ID NO: 4147 - DNA, 1182 bp, synthetic construct
  misc_feature 1..1182: note = Variant of terminal deoxynucleotidyl transferase
  source 1..1182: mol_type = other DNA
atgcatcaccaccatcatcatgggggttctggtcatccggaaggtaataccccggagaaggaggtgccgagcgttatcgcccgtcatgttagtccatacgcgtgccagcgcaagaccacgctgaataactacaacaaaaagttcaccgacgcgctggagatcatggccgagaactacaaatttaaagagaacctgcaggcgtgtctggaagccaagcgcgccgcgagtgtcctgaaaagcctgccgttcgaggttaccagcatgaaagacatccaaggtctgccgtgcattaccgacgacgtacgtgatgtgatcgaggagatcatcgaagagggcgagagcagccgtgttaaagaaatcctcaatgacgagcgctacaaggcctttaagcagttcaccagcgtgttcggtgtgggcgtgaaaacctcggaaaagtggtaccgtatgggcctccgtacggttgaagaagcaaaggccagtaagagtctgaagctgagcaagatgcagaaggcgggcttcctgtattacgaggatctggcgagcggtgttagtaaagaagaagccgatgccgttacgctcatcgtgaaggaaacggtgcgtactgttagtccggatgcggaggtgaccctggccggcggtttccgccgtggcaaacctatgggccacgacgttgacctgctgatcacgattccgggccgtcctgaagatgacgagctgctccacaaagtggttgatctgctcaagaagcaaggtctgctgctgtacgaagacatccgtgagagcacgttcgtggaggggcaactgccaagtcctaaaatcgacgccctggacaaccatcagaagtgcttcgccattctcaagctgtaccgtccgaaggtggataacagtgcggttgggacgagtaagaaaagtgacatggctgaggttaaggattggaaagcggttcgtgtggatctggtgatcacgccattcgagcagttcgcctatgcgctgctcggttggacgggcagcggccaatttcgtcgcgatctgcgtcgctatgcggaggaagagcgcgacatgctgctcgacaaccatcgtctctacgacctgaaaaagggcatctttctgagtgcgggcagcgaagaagagattttcggtcatctgggtctggattatctggagccgtgggaacgcaacgcg

SEQ ID NO: 4148 - protein, 394 aa, synthetic construct
  REGION 1..394: note = Variant of terminal deoxynucleotidyl transferase
MHHHHHHGGSGHPEGNTPEKEVPSVIARHVSPYACQRKTTLNNYNKKFTDALEIMAENYKFKENLQACLEAKRAASVLKSLPFEVTSMKDIQGLPCITDDVRDVIEEIIEEGESSRVKEILNDERYKAFKQFTSVFGVGVKTSEKWYRMGLRTVEEAKASKSLKLSKMQKAGFLYYEDLASGVSKEEADAVTLIVKETVRTVSPDAEVTLAGGFRRGKPMGHDVDLLITIPGRPEDDELLHKVVDLLKKQGLLLYEDIRESTFVEGQLPSPKIDALDNHQKCFAILKLYRPKVDNSAVGTSKKSDMAEVKDWKAVRVDLVITPFEQFAYALLGWTGSGQFRRDLRRYAEEERDMLLDNHRLYDLKKGIFLSAGSEEEIFGHLGLDYLEPWERNA

SEQ ID NO: 4149 - DNA, 1182 bp, synthetic construct
  misc_feature 1..1182: note = Variant of terminal deoxynucleotidyl transferase
  source 1..1182: mol_type = other DNA
atgcatcaccaccatcatcatgggggttctggtcatccggaaggtaataccccggagaaggaggtgccgagcgttatcgcccgtcatgttagtcagtacgcgtgccagcgcaagaccacgctgaataactacaacaaaaagttcaccgacgcgctggagatcatggccgagaactacaaatttaaagagaacctgcaggcgtgtctggaagccaagcgcgccgcgagtgtcctgaaaagcctgccgttcgaggttaccagcatgaaagacatccaaggtctgccgtgcattaccgacgacgtacgtgacgtgatccgtgagatcatcgaagaaggcgagagcagccgtgttaaagaaatcctcaatgacgagcgctacaaggcctttaagcagttcaccagcgtgttcggtgtgggcgtgaaaacctcggaaaagtggtaccgtatgggcctccgtacggttgaagaagcaaaggccagtaagagtctgaagctgagcaagatgcagaaggcgggcttcctgtattacgaggatctggcgagcggtgttagtaaagaagaagccgatgccgttacgctcatcgtgaaggaaacggtggctcgcgttagtccggatgcgctggtggccatcgccggcggtttccgccgtggcaaacctatgggccacgacgttgacctgctgatcacgattccgggccgtcctgaggatgacgagctgctccacaaagtggttgatctgctcaagaagcaaggtctgctgctgtacgaagacatccgtgagagcacgttcgtggaggggcaactgccaagtcctaaaatcgacgccctggacaactttcagaagtgcttcgccattctcaagctgtaccgtccgaaggtggataacagtgcggttgggacgagtaagaaaagtgacatggctgaggttaaggattggaaagcggttcgtgtggatctggtgatcacgccattcgagcagttcgcctatgcgctgctcggttggacgggcagcggccaatttcgtcgcgatctgcgtcgctatgcggaggaagagcgcgacatgctgctcgacaaccatcgtctctacgacctgaaaaagggccaatttctgagtgcgggcagcgaagaagagattttcggtcatctgggtctggattatctggagccgtgggaacgcaacgcg

SEQ ID NO: 4150 - protein, 394 aa, synthetic construct
  REGION 1..394: note = Variant of terminal deoxynucleotidyl transferase
MHHHHHHGGSGHPEGNTPEKEVPSVIARHVSQYACQRKTTLNNYNKKFTDALEIMAENYKFKENLQACLEAKRAASVLKSLPFEVTSMKDIQGLPCITDDVRDVIREIIEEGESSRVKEILNDERYKAFKQFTSVFGVGVKTSEKWYRMGLRTVEEAKASKSLKLSKMQKAGFLYYEDLASGVSKEEADAVTLIVKETVARVSPDALVAIAGGFRRGKPMGHDVDLLITIPGRPEDDELLHKVVDLLKKQGLLLYEDIRESTFVEGQLPSPKIDALDNFQKCFAILKLYRPKVDNSAVGTSKKSDMAEVKDWKAVRVDLVITPFEQFAYALLGWTGSGQFRRDLRRYAEEERDMLLDNHRLYDLKKGQFLSAGSEEEIFGHLGLDYLEPWERNA

SEQ ID NO: 4151 - DNA, 1182 bp, synthetic construct
  misc_feature 1..1182: note = Variant of terminal deoxynucleotidyl transferase
  source 1..1182: mol_type = other DNA
atgcatcaccaccatcatcatgggggttctggtcatccggaaggtaataccccggagaaggaggtgccgagcgttatcgcccgtcatgttagtcagtacgcgtgccagcgcaagaccacgctgaataactacaacaaaaagttcaccgacgcgctggagatcatggccgagaactacaaatttaaagagaacctgcaggcgtgtctggaagccaagcgcgccgcgagtgtcctgaaaagcctgccgttcgaggttaccagcatgaaagacatccaaggtctgccgtgcattaccgacgacgtacgtgacctgatccgtgagatcatcgaagaaggcgagagcagccgtgttaaagaaatcctcaatgacgagcgctacaaggcctttaagcagttcaccagcgtgttcggtgtgggcgtgaaaacctcggaaaagtggtaccgtatgggcctccgtacggttgaagaagcaaaggccagtaagagtctgaagctgagcaagatgcagaaggcgggcttcctgtattacgaggatctggcgagcggtgttagtaaagaagaagccgatgccgttacgctcatcgtgaaggaaacggtggctcgcgttagtccggatgcgctggtgaccatcgccggcggtttccgccgtggcaaacctatgggccacgacgttgacctgctgatcacgattccgggccgtcctgaggatgacgagctgctccacaaagtggttgatctgctcaagaagcaaggtctgctgctgtacgaagacatccgtgagagcacgttcgtggaggggcaaattccaagtcctaaaatcgacgccctggacaactttcagaagtgcttcgccattctcaagctgtaccgtccgaaggtggataacagtgcggttgggacgagtaagaaaagtgacatggctgaggttaaggattggaaagcggttcgtgtggatctggtgatcacgccattcgagcagttcgcctatgcgctgctcggttggacgggcagcggccaatttcgtcgcgatctgcgtcgctatgcggaggaagagcgcgacatgctgctcgacaaccatcgtctctacgacctgaaaaagggcatctttctgagtgcgggcagcgaagaagagattttcggtcatctgggtctggattatctggagccgtgggaacgcaacgcg

SEQ ID NO: 4152 - protein, 394 aa, synthetic construct
  REGION 1..394: note = Variant of terminal deoxynucleotidyl transferase
MHHHHHHGGSGHPEGNTPEKEVPSVIARHVSQYACQRKTTLNNYNKKFTDALEIMAENYKFKENLQACLEAKRAASVLKSLPFEVTSMKDIQGLPCITDDVRDLIREIIEEGESSRVKEILNDERYKAFKQFTSVFGVGVKTSEKWYRMGLRTVEEAKASKSLKLSKMQKAGFLYYEDLASGVSKEEADAVTLIVKETVARVSPDALVTIAGGFRRGKPMGHDVDLLITIPGRPEDDELLHKVVDLLKKQGLLLYEDIRESTFVEGQIPSPKIDALDNFQKCFAILKLYRPKVDNSAVGTSKKSDMAEVKDWKAVRVDLVITPFEQFAYALLGWTGSGQFRRDLRRYAEEERDMLLDNHRLYDLKKGIFLSAGSEEEIFGHLGLDYLEPWERNA

SEQ ID NO: 4153 - DNA, 1182 bp, synthetic construct
  misc_feature 1..1182: note = Variant of terminal deoxynucleotidyl transferase
  source 1..1182: mol_type = other DNA
atgcatcaccaccatcatcatgggggttctggtcatccggaaggtaataccccggagaaggaggtgccgagcgttatcgcccgtcatgttagtcaatacgcgtgccagcgcaagaccacgctgaataactacaacaaaaagttcaccgacgcgctggagatcatggccgagaactacaaatttaaagagaacctgcaggcgtgtctggaagccaagcgcgccgcgagtgtcctgaaaagcctgccgttcgaggttaccagcatgaaagacatccaaggtctgccgtgcattaccgacgacgtacgtgatgtgatcgaggagatcatcgaagagggcgagagcagccgtgttaaagaaatcctcaatgacgagcgctacaaggcctttaagcagttcaccagcgtgttcggtgtgggcgtgaaaacctcggaaaagtggtaccgtatgggcctccgtacggttgaagaagcaaaggccagtaagagtctgaagctgagcaagatgcagaaggcgggcttcctgtattacgaggatctggcgagcggtgttagtaaagaagaagccgatgccgttacgctcatcgtgaaggaaacggtgcgtactgttagtccggatgcgctggtgaccctggccggcggtttccgccgtggcaaacctatgggccacgacgttgacctgctgatcacgattccgggccgtcctgaagatgacgagctgctccacaaagtggttgatctgctcaagaagcaaggtctgctgctgtacgaagacatccgtgagagcacgttcgtggaggggcaactgccaagtcctaaaatcgacgccctggacaaccatcagaagtgcttcgccattctcaagctgtaccgtccgaaggtggataacagtgcggttgggacgagtaagaaaagtgacatggctgaggttaaggattggaaagcggttcgtgtggatctggtgatcacgccattcgagcagttcgcctatgcgctgctcggttggacgggcagcggccaatttcgtcgcgatctgcgtcgctatgcggaggaagagcgcgacatgctgctcgacaaccatcgtctctacgacctgaaaaagggcatctttctgagtgcgggcagcgaagaagagattttcggtcatctgggtctggattatctggagccgtgggaacgcaacgcg

SEQ ID NO: 4154 - protein, 394 aa, synthetic construct
  REGION 1..394: note = Variant of terminal deoxynucleotidyl transferase
MHHHHHHGGSGHPEGNTPEKEVPSVIARHVSQYACQRKTTLNNYNKKFTDALEIMAENYKFKENLQACLEAKRAASVLKSLPFEVTSMKDIQGLPCITDDVRDVIEEIIEEGESSRVKEILNDERYKAFKQFTSVFGVGVKTSEKWYRMGLRTVEEAKASKSLKLSKMQKAGFLYYEDLASGVSKEEADAVTLIVKETVRTVSPDALVTLAGGFRRGKPMGHDVDLLITIPGRPEDDELLHKVVDLLKKQGLLLYEDIRESTFVEGQLPSPKIDALDNHQKCFAILKLYRPKVDNSAVGTSKKSDMAEVKDWKAVRVDLVITPFEQFAYALLGWTGSGQFRRDLRRYAEEERDMLLDNHRLYDLKKGIFLSAGSEEEIFGHLGLDYLEPWERNA

SEQ ID NO: 4155 - DNA, 1182 bp, synthetic construct
  misc_feature 1..1182: note = Variant of terminal deoxynucleotidyl transferase
  source 1..1182: mol_type = other DNA
atgcatcaccaccatcatcatgggggttctggtcatccggaaggtaataccccggagaaggaggtgccgagcgttatcgcccgtcatgttagtcaatacgcgtgccagcgcaagaccacgctgaataactacaacaaaaagttcaccgacgcgctggagatcatggccgagaactacaaatttaaagagaacctgcaggcgtgtctggaagccaagcgcgccgcgagtgtcctgaaaagcctgccgttcgaggttaccagcatgaaagacatccaaggtctgccgtgcattaccgacgacgtacgtgacgtgatcgaggagatcatcgaagagggcgagagcagccgtgttaaagaaatcctcaatgacgagcgctacaaggcctttaagcagttcaccagcgtgttcggtgtgggcgtgaaaacctcggaaaagtggtaccgtatgggcctccgtacggttgaagaagcaaaggccagtaagagtctgaagctgagcaagatgcagaaggcgggcttcctgtattacgaggatctggcgagcggtgttagtaaagaagaagccgatgccgttacgctcatcgtgaaggaaacggtgcgtactgttagtccggatgcggaggtgaccctggccggcggtttccgccgtggcaaacctatgggccacgacgttgacctgctgatcacgattccgggccgtcctgaagatgacgagctgctccacaaagtggttgatctgctcaagaagcaaggtctgctgctgtacgaagacatccgtgagagcacgttcgtggaggggcaactgccaagtcctaaacctgacgccctggacaacttccagaagtgcttcgccattctcaagctgtaccgtccgaaggtggataacagtgcggttgggacgagtaagaaaagtgacatggctgaggttaaggattggaaagcggttcgtgtggatctggtgatgacgccattcgagcagttcgcctatgcgctgctcggttggacgggcagcggccaatttcgtcgcgatacgcgtcgctatgcgagtgaagagcgcgacatgctgctcgacaaccatcgtctctacgacctgaaaaagggcatctttctgagtgcgggcagcgaagaagagattttcggtcatctgggtctggattatctggagccgtgggaacgcaacgcg

SEQ ID NO: 4156 - protein, 394 aa, synthetic construct
  REGION 1..394: note = Variant of terminal deoxynucleotidyl transferase
MHHHHHHGGSGHPEGNTPEKEVPSVIARHVSQYACQRKTTLNNYNKKFTDALEIMAENYKFKENLQACLEAKRAASVLKSLPFEVTSMKDIQGLPCITDDVRDVIEEIIEEGESSRVKEILNDERYKAFKQFTSVFGVGVKTSEKWYRMGLRTVEEAKASKSLKLSKMQKAGFLYYEDLASGVSKEEADAVTLIVKETVRTVSPDAEVTLAGGFRRGKPMGHDVDLLITIPGRPEDDELLHKVVDLLKKQGLLLYEDIRESTFVEGQLPSPKPDALDNFQKCFAILKLYRPKVDNSAVGTSKKSDMAEVKDWKAVRVDLVMTPFEQFAYALLGWTGSGQFRRDTRRYASEERDMLLDNHRLYDLKKGIFLSAGSEEEIFGHLGLDYLEPWERNA

SEQ ID NO: 4157 - DNA, 1182 bp, synthetic construct
  misc_feature 1..1182: note = Variant of terminal deoxynucleotidyl transferase
  source 1..1182: mol_type = other DNA
atgcatcaccaccatcatcatgggggttctggtcatccggaaggtaataccccggagaaggaggtgccgagcgttatcgcccgtcatgttagtcagtacgcgtgccagcgcaagaccacgctgaataactacaacaaaaagttcaccgacgcgctggagatcatggccgagaactacaaatttaaagagaacctgcaggcgtgtctggaagccaagcgcgccgcgagtgtcctgaaaagcctgccgttcgaggttaccagcatgaaagacatccaaggtctgccgtgcattaccgacgacgtacgtgacgtgatccaggagatcatcgaagaaggcgagagcagccgtgttaaagaaatcctcaatgacgagcgctacaaggcctttaagcagttcaccagcgtgttcggtgtgggcgtgaaaacctcggaaaagtggtaccgtatgggcctccgtacggttgaagaagcaaaggccagtaagagtctgaagctgagcaagatgcagaaggcgggcttcctgtattacgaggatctggcgagcggtgttagtaaagaagaagccgatgccgttacgctcatcgtgaaggaaacggtgcgcctggttagtccggatgcgctggtgaccatcgccggcggtttccgccgtggcaaacctatgggccacgacgttgacctgctgatcacgattccgggccgtcctaccgatgacgagctgctccacaaagtggttgatctgctcaagaagcaaggtctgctgctgtacgaagacatccgtgagagcacgttcgtggaggggcaactgccaagtcctaaaatcgacgccctggacaactttcagaagtgcttcgccattctcaagctgtaccgtccgaaggtggataacagtgcggttgggacgagtaagaaaagtgacatggctgaggttaaggattggaaagcggttcgtgtggatctggtgatcacgccattcgagcagttcgcctatgcgctgctcggttggacgggcagcggccaatttcgtcgcgatctgcgtcgctatgcggaggaagagcgcgacatgctgctcgacaaccatcgtctctacgacctgaaaaagggcatctttctgagtgcgggcagcgaagaagagattttcggtcatctgggtctggattatctggagccgtgggaacgcaacgcg

SEQ ID NO: 4158 - protein, 394 aa, synthetic construct
  REGION 1..394: note = Variant of terminal deoxynucleotidyl transferase
MHHHHHHGGSGHPEGNTPEKEVPSVIARHVSQYACQRKTTLNNYNKKFTDALEIMAENYKFKENLQACLEAKRAASVLKSLPFEVTSMKDIQGLPCITDDVRDVIQEIIEEGESSRVKEILNDERYKAFKQFTSVFGVGVKTSEKWYRMGLRTVEEAKASKSLKLSKMQKAGFLYYEDLASGVSKEEADAVTLIVKETVRLVSPDALVTIAGGFRRGKPMGHDVDLLITIPGRPTDDELLHKVVDLLKKQGLLLYEDIRESTFVEGQLPSPKIDALDNFQKCFAILKLYRPKVDNSAVGTSKKSDMAEVKDWKAVRVDLVITPFEQFAYALLGWTGSGQFRRDLRRYAEEERDMLLDNHRLYDLKKGIFLSAGSEEEIFGHLGLDYLEPWERNA

SEQ ID NO: 4159 - DNA, 1182 bp, synthetic construct
  misc_feature 1..1182: note = Variant of terminal deoxynucleotidyl transferase
  source 1..1182: mol_type = other DNA
atgcatcaccaccatcatcatgggggttctggtcatccggaaggtaataccccggagaaggaggtgccgagcgttatcgcccgtcatgttagtcagtacgcgtgccagcgcaagaccacgctgaataactacaacaaaaagttcaccgacgcgctggagatcatggccgagaactacaaatttaaagagaacctgcaggcgtgtctggaagccaagcgcgccgcgagtgtcctgaaaagcctgccgttcgaggttaccagcatgaaagacatccaaggtctgccgtgcattaccgacgacgtacgtgacgtgatcgaggagatcatcgaagaaggcgagagcagccgtgttaaagaaatcctcaatgacgagcgctacaaggcctttaagcagttcaccagcgtgttcggtgtgggcgtgaaaacctcggaaaagtggtaccgtatgggcctccgtacggttgaagaagcaaaggccagtaagagtctgaagctgagcaagatgcagaaggcgggcttcctgtattacgaggatctggcgagcggtgttagtaaagaagaagccgatgccgttacgctcatcgtgaaggaaacggtgcgcctggttagtccggatgcgctggtgaccatcgccggcggtttccgccgtggcaaacctatgggccacgacgttgacctgctgatcacgattccgggccgtcctgaggatgacgagctgctccacaaagtggttgatctgctcaagaagcaaggtctgctgctgtacgaagacatccgtgagagcacgttcgtggaggggcaactgccaagtcctaaaatcgacgccctggacaactttcagaagtgcttcgccattctcaagctgtaccgtccgaaggtggataacagtgcggttgggacgagtaagaaaagtgacatggctgaggttaaggattggaaagcggttcgtgtggatctggtgatcacgccattcgagcagttcgcctatgcgctgctcggttggacgggcagcggccaatttcgtcgcgatctgcgtcgctatgcggaggaagagcgcgacatgctgctcgacaaccatcgtctctacgacctgaaaaagggccaatttctgagtgcgggcagcgaagaagagattttcggtcatctgggtctggattatctggagccgtgggaacgcaacgcg

SEQ ID NO: 4160 - protein, 394 aa, synthetic construct
  REGION 1..394: note = Variant of terminal deoxynucleotidyl transferase
MHHHHHHGGSGHPEGNTPEKEVPSVIARHVSQYACQRKTTLNNYNKKFTDALEIMAENYKFKENLQACLEAKRAASVLKSLPFEVTSMKDIQGLPCITDDVRDVIEEIIEEGESSRVKEILNDERYKAFKQFTSVFGVGVKTSEKWYRMGLRTVEEAKASKSLKLSKMQKAGFLYYEDLASGVSKEEADAVTLIVKETVRLVSPDALVTIAGGFRRGKPMGHDVDLLITIPGRPEDDELLHKVVDLLKKQGLLLYEDIRESTFVEGQLPSPKIDALDNFQKCFAILKLYRPKVDNSAVGTSKKSDMAEVKDWKAVRVDLVITPFEQFAYALLGWTGSGQFRRDLRRYAEEERDMLLDNHRLYDLKKGQFLSAGSEEEIFGHLGLDYLEPWERNA

SEQ ID NO: 4161 - DNA, 1182 bp, synthetic construct
  misc_feature 1..1182: note = Variant of terminal deoxynucleotidyl transferase
  source 1..1182: mol_type = other DNA
atgcatcaccaccatcatcatgggggttctggtcatccggaaggtaataccccggagaaggaggtgccgagcgttatcgcccgtcatgttagtcagtacgcgtgccagcgcaagaccacgctgaataactacaacaaaaagttcaccgacgcgctggagatcatggccgagaactacaaatttaaagagaacctgcaggcgtgtctggaagccaagcgcgccgcgagtgtcctgaaaagcctgccgttcgaggttaccagcatgaaagacatccaaggtctgccgtgcattaccgacgacgtacgtgacgtgatcgaggagatcatcgaagtaggcgagagcagccgtgttaaagaaatcctcaatgacgagcgctacaaggcctttaagcagttcaccagcgtgttcggtgtgggcgtgaaaacctcggaaaagtggtaccgtatgggcctccgtacggttgaagaagcaaaggccagtaagagtctgaagctgagcaagatgcagaaggcgggcttcctgtattacgaggatctggcgagcggtgttagtaaagaagaagccgatgccgttacgctcatcgtgaaggaaacggtgcgtactgttagtccggatgcgctggtgaccatcgccggcggtttccgccgtggcaaacctatgggccacgacgttgacctgctgatcacgattccgggccgtcctgaggatgacgagctgctccacaaagtggttgatctgctcaagaagcaaggtctgctgctgtacgaagacatccgtgagagcacgttcgtggaggggcaactgccaagtcctaaaatcgacgccctggacaactttcagaagtgcttcgccattctcaagctgtaccgtccgaaggtggataacagtgcggttgggacgagtaagaaaagtgacatggctgaggttaaggattggaaagcggttcgtgtggatctggtgatcacgccattcgagcagttcgcctatgcgctgctcggttggacgggcagcggccaatttcgtcgcgatctgcgtcgctatgcggaggaagagcgcgacatgctgctcgacaaccatcgtctctacgacctgaaaaagggcatctttctgagtgcgggcagcgaagaagagattttcggtcatctgggtctggattatctggagccgtgggaacgcaacgcg

SEQ ID NO: 4162 - protein, 394 aa, synthetic construct
  REGION 1..394: note = Variant of terminal deoxynucleotidyl transferase
MHHHHHHGGSGHPEGNTPEKEVPSVIARHVSQYACQRKTTLNNYNKKFTDALEIMAENYKFKENLQACLEAKRAASVLKSLPFEVTSMKDIQGLPCITDDVRDVIEEIIEVGESSRVKEILNDERYKAFKQFTSVFGVGVKTSEKWYRMGLRTVEEAKASKSLKLSKMQKAGFLYYEDLASGVSKEEADAVTLIVKETVRTVSPDALVTIAGGFRRGKPMGHDVDLLITIPGRPEDDELLHKVVDLLKKQGLLLYEDIRESTFVEGQLPSPKIDALDNFQKCFAILKLYRPKVDNSAVGTSKKSDMAEVKDWKAVRVDLVITPFEQFAYALLGWTGSGQFRRDLRRYAEEERDMLLDNHRLYDLKKGIFLSAGSEEEIFGHLGLDYLEPWERNA

SEQ ID NO: 4163 - DNA, 1182 bp, synthetic construct
  misc_feature 1..1182: note = Variant of terminal deoxynucleotidyl transferase
  source 1..1182: mol_type = other DNA
atgcatcaccaccatcatcatgggggttctggtcatccggaaggtaataccccggagaaggaggtgccgagcgttatcgcccgtcatgttagtccatacgcgtgccagcgcaagaccacgctgaataactacaacaaaaagttcaccgacgcgctggagatcatggccgagaactacaaatttaaagagaacctgcaggcgtgtctggaagccaagcgcgccgcgagtgtcctgaaaagcctgccgttcgaggttaccagcatgaaagacatccaaggtctgccgtgcattaccgacgacgtacgtgacgtgatcgaggagatcatcgaagagggcgagagcagccgtgttaaagaaatcctcaatgacgagcgctacaaggcctttaagcagttcaccagcgtgttcggtgtgggcgtgaaaacctcggaaaagtggtaccgtatgggcctccgtacggttgaagaagcaaaggccagtaagagtctgaagctgagcaagatgcagaaggcgggcttcctgtattacgaggatctggcgagcggtgttagtaaagaagaagccgatgccgttacgctcatcgtgaaggaaacggtgcgtactgttagtccggatgcgctggtgaccattgccggcggtttccgccgtggcaaacctatgggccacgacgttgacctgctgatcacgattccgggccgtcctgaagatgacgagctgctccacaaagtggttgatctgctcaagaagcaaggtctgctgctgtacgaagacatccgtgagagcacgttcgtggaggggcaactgccaagtcctaaaattgacgccctggacaaccatcagaagtgcttcgccattctcaagctgtaccgtccgaaggtggataacagtgcggttgggacgagtaagaaaagtgacatggctgaggttaaggattggaaagcggttcgtgtggatctggtgatcacgccattcgagcagttcgcctatgcgctgctcggttggacgggcagcggccaatttcgtcgcgatctgcgtcgctatgcggaggaagagcgcgacatgctgctcgacaaccatcgtctctacgacctgaaaaagggcatctttctgagtgcgggcagcgaagaagagattttcggtcatctgggtctggattatctggagccgtgggaacgcaacgcg

SEQ ID NO: 4164 - protein, 394 aa, synthetic construct
  REGION 1..394: note = Variant of terminal deoxynucleotidyl transferase
MHHHHHHGGSGHPEGNTPEKEVPSVIARHVSPYACQRKTTLNNYNKKFTDALEIMAENYKFKENLQACLEAKRAASVLKSLPFEVTSMKDIQGLPCITDDVRDVIEEIIEEGESSRVKEILNDERYKAFKQFTSVFGVGVKTSEKWYRMGLRTVEEAKASKSLKLSKMQKAGFLYYEDLASGVSKEEADAVTLIVKETVRTVSPDALVTIAGGFRRGKPMGHDVDLLITIPGRPEDDELLHKVVDLLKKQGLLLYEDIRESTFVEGQLPSPKIDALDNHQKCFAILKLYRPKVDNSAVGTSKKSDMAEVKDWKAVRVDLVITPFEQFAYALLGWTGSGQFRRDLRRYAEEERDMLLDNHRLYDLKKGIFLSAGSEEEIFGHLGLDYLEPWERNA

SEQ ID NO: 4165 - DNA, 1182 bp, synthetic construct
  misc_feature 1..1182: note = Variant of terminal deoxynucleotidyl transferase
  source 1..1182: mol_type = other DNA
atgcatcaccaccatcatcatgggggttctggtcatccggaaggtaataccccggagaaggaggtgccgagcgttatcgcccgtcatgttagtcagtacgcgtgccagcgcaagaccacgctgaataactacaacaaaaagttcaccgacgcgctggagatcatggccgagaactacaaatttaaagagaacctgcaggcgtgtctggaagccaagcgcgccgcgagtgtcctgaaaagcctgccgttcgaggttaccagcatgaaagacatccaaggtctgccgtgcattaccgacgacgtacgtgacgtgatcgaggagatcatcgaagaaggcgagagcagccgtgttaaagaaatcctcaatgacgagcgctacaaggcctttaagcagttcaccagcgtgttcggtgtgggcgtgaaaacctcggaaaagtggtaccgtatgggcctccgtacggttgaagaagcaaaggccagtaagagtctgaagctgagcaagatgcagaaggcgggcttcctgtattacgaggatctggcgagcggtgttagtaaagaagaagccgatgccgttacgctcatcgtgaaggaaacggtggctaccgttagtccggatgcgctggtgaccatcgccggcggtttccgccgtggcaaacctatgggccacgacgttgacctgctgatcacgattccgggccgtcctaccgatgacgagctgctccacaaagtggttgatctgctcaagaagcaaggtctgctgctgtacgaagacatccgtgagagcacgttcgtggaggggcaactgccaagtcctaaaatcgacgccctggacaactttcagaagtgcttcgccattctcaagctgtaccgtccgaaggtggataacagtgcggttgggacgagtaagaaaagtgacatggctgaggttaaggattggaaagcggttcgtgtggatctggtgatcacgccattcgagcagttcgcctatgcgctgctcggttggacgggcagcggccaatttcgtcgcgatctgcgtcgctatgcggaggaagagcgcgacatgctgctcgacaaccatcgtctctacgacctgaaaaagggccaatttctgagtgcgggcagcgaagaagagattttcggtcatctgggtctggattatctggagccgtgggaacgcaacgcg

SEQ ID NO: 4166 - protein, 394 aa, synthetic construct
  REGION 1..394: note = Variant of terminal deoxynucleotidyl transferase
MHHHHHHGGSGHPEGNTPEKEVPSVIARHVSQYACQRKTTLNNYNKKFTDALEIMAENYKFKENLQACLEAKRAASVLKSLPFEVTSMKDIQGLPCITDDVRDVIEEIIEEGESSRVKEILNDERYKAFKQFTSVFGVGVKTSEKWYRMGLRTVEEAKASKSLKLSKMQKAGFLYYEDLASGVSKEEADAVTLIVKETVATVSPDALVTIAGGFRRGKPMGHDVDLLITIPGRPTDDELLHKVVDLLKKQGLLLYEDIRESTFVEGQLPSPKIDALDNFQKCFAILKLYRPKVDNSAVGTSKKSDMAEVKDWKAVRVDLVITPFEQFAYALLGWTGSGQFRRDLRRYAEEERDMLLDNHRLYDLKKGQFLSAGSEEEIFGHLGLDYLEPWERNA

SEQ ID NO: 4167 - DNA, 1182 bp, synthetic construct
  misc_feature 1..1182: note = Variant of terminal deoxynucleotidyl transferase
  source 1..1182: mol_type = other DNA
atgcatcaccaccatcatcatgggggttctggtcatccggaaggtaataccccggagaaggaggtgccgagcgttatcgcccgtcatgttagtcagtacgcgtgccagcgcaagaccacgctgaataactacaacaaaaagttcaccgacgcgctggagatcatggccgagaactacaaatttaaagagaacctgcaggcgtgtctggaagccaagcgcgccgcgagtgtcctgaaaagcctgccgttcgaggttaccagcatgaaagacatccaaggtctgccgtgcattaccgacgacgtacgtgacctgatccaggagatcatcgaagtaggcgagagcagccgtgttaaagaaatcctcaatgacgagcgctacaaggcctttaagcagttcaccagcgtgttcggtgtgggcgtgaaaacctcggaaaagtggtaccgtatgggcctccgtacggttgaagaagcaaaggccagtaagagtctgaagctgagcaagatgcagaaggcgggcttcctgtattacgaggatctggcgagcggtgttagtaaagaagaagccgatgccgttacgctcatcgtgaaggaaacggtggctctggttagtccggatgcgctggtgaccatcgccggcggtttccgccgtggcaaacctatgggccacgacgttgacctgctgatcacgattccgggccgtcctaccgatgacgagctgctccacaaagtggttgatctgctcaagaagcaaggtctgctgctgtacgaagacatccgtgagagcacgttcgtggaggggcaaattccaagtcctaaaatcgacgccctggacaactttcagaagtgcttcgccattctcaagctgtaccgtccgaaggtggataacagtgcggttgggacgagtaagaaaagtgacatggctgaggttaaggattggaaagcggttcgtgtggatctggtgatcacgccattcgagcagttcgcctatgcgctgctcggttggacgggcagcggccaatttcgtcgcgatctgcgtcgctatgcggaggaagagcgcgacatgctgctcgacaaccatcgtctctacgacctgaaaaagggccaatttctgagtgcgggcagcgaagaagagattttcggtcatctgggtctggattatctggagccgtgggaacgcaacgcg

SEQ ID NO: 4168 - protein, 394 aa, synthetic construct
  REGION 1..394: note = Variant of terminal deoxynucleotidyl transferase
MHHHHHHGGSGHPEGNTPEKEVPSVIARHVSQYACQRKTTLNNYNKKFTDALEIMAENYKFKENLQACLEAKRAASVLKSLPFEVTSMKDIQGLPCITDDVRDLIQEIIEVGESSRVKEILNDERYKAFKQFTSVFGVGVKTSEKWYRMGLRTVEEAKASKSLKLSKMQKAGFLYYEDLASGVSKEEADAVTLIVKETVALVSPDALVTIAGGFRRGKPMGHDVDLLITIPGRPTDDELLHKVVDLLKKQGLLLYEDIRESTFVEGQIPSPKIDALDNFQKCFAILKLYRPKVDNSAVGTSKKSDMAEVKDWKAVRVDLVITPFEQFAYALLGWTGSGQFRRDLRRYAEEERDMLLDNHRLYDLKKGQFLSAGSEEEIFGHLGLDYLEPWERNA

SEQ ID NO: 4169 - DNA, 1182 bp, synthetic construct
  misc_feature 1..1182: note = Variant of terminal deoxynucleotidyl transferase
  source 1..1182: mol_type = other DNA
atgcatcaccaccatcatcatgggggttctggtcatccggaaggtaataccccggagaaggaggtgccgagcgttatcgcccgtcatgttagtcagtacgcgtgccagcgcaagaccacgctgaataactacaacaaaaagttcaccgacgcgctggagatcatggccgagaactacaaatttaaagagaacctgcaggcgtgtctggaagccaagcgcgccgcgagtgtcctgaaaagcctgccgttcgaggttaccagcatgaaagacatccaaggtctgccgtgcattaccgacgacgtacgtgacgtgatccgtgagatcatcgaagaaggcgagagcagccgtgttaaagaaatcctcaatgacgagcgctacaaggcctttaagcagttcaccagcgtgttcggtgtgggcgtgaaaacctcggaaaagtggtaccgtatgggcctccgtacggttgaagaagcaaaggccagtaagagtctgaagctgagcaagatgcagaaggcgggcttcctgtattacgaggatctggcgagcggtgttagtaaagaagaagccgatgccgttacgctcatcgtgaaggaaacggtggctctggttagtccggatgcgctggtgaccatcgccggcggtttccgccgtggcaaacctatgggccacgacgttgacctgctgatcacgattccgggccgtcctgaggatgacgagctgctccacaaagtggttgatctgctcaagaagcaaggtctgctgctgtacgaagacatccgtgagagcacgttcgtggaggggcaactgccaagtcctaaaatcgacgccctggacaactttcagaagtgcttcgccattctcaagctgtaccgtccgaaggtggataacagtgcggttgggacgagtaagaaaagtgacatggctgaggttaaggattggaaagcggttcgtgtggatctggtgatcacgccattcgagcagttcgcctatgcgctgctcggttggacgggcagcggccaatttcgtcgcgatctgcgtcgctatgcggaggaagagcgcgacatgctgctcgacaaccatcgtctctacgacctgaaaaagggcatctttctgagtgcgggcagcgaagaagagattttcggtcatctgggtctggattatctggagccgtgggaacgcaacgcg

SEQ ID NO: 4170 - protein, 394 aa, synthetic construct
  REGION 1..394: note = Variant of terminal deoxynucleotidyl transferase
MHHHHHHGGSGHPEGNTPEKEVPSVIARHVSQYACQRKTTLNNYNKKFTDALEIMAENYKFKENLQACLEAKRAASVLKSLPFEVTSMKDIQGLPCITDDVRDVIREIIEEGESSRVKEILNDERYKAFKQFTSVFGVGVKTSEKWYRMGLRTVEEAKASKSLKLSKMQKAGFLYYEDLASGVSKEEADAVTLIVKETVALVSPDALVTIAGGFRRGKPMGHDVDLLITIPGRPEDDELLHKVVDLLKKQGLLLYEDIRESTFVEGQLPSPKIDALDNFQKCFAILKLYRPKVDNSAVGTSKKSDMAEVKDWKAVRVDLVITPFEQFAYALLGWTGSGQFRRDLRRYAEEERDMLLDNHRLYDLKKGIFLSAGSEEEIFGHLGLDYLEPWERNA

SEQ ID NO: 4171 - DNA, 1182 bp, synthetic construct
  misc_feature 1..1182: note = Variant of terminal deoxynucleotidyl transferase
  source 1..1182: mol_type = other DNA
atgcatcaccaccatcatcatgggggttctggtcatccggaaggtaataccccggagaaggaggtgccgagcgttatcgcccgtcatgttagtcagtacgcgtgccagcgcaagaccacgctgaataactacaacaaaaagttcaccgacgcgctggagatcatggccgagaactacaaatttaaagagaacctgcaggcgtgtctggaagccaagcgcgccgcgagtgtcctgaaaagcctgccgttcgaggttaccagcatgaaagacatccaaggtctgccgtgcattaccgacgacgtacgtgacgtgatcgaggagatcatcgaagagggcgagagcagccgtgttaaagaaatcctcaatgacgagcgctacaaggcctttaagcagttcaccagcgtgttcggtgtgggcgtgaaaacctcggaaaagtggtaccgtatgggcctccgtacggttgaagaagcaaaggccagtaagagtctgaagctgagcaagatgcagaaggcgggcttcctgtattacgaggatctggcgagcggtgttagtaaagaagaagccgatgccgttacgctcatcgtgaaggaaacggtgcgtactgttagtccggatgcgctggtgaccctggccggcggtttccgccgtggcaaacctatgggccacgacgttgacctgctgatcacgattccgggccgtcctgaagatgacgagctgctccacaaagtggttgatctgctcaagaagcaaggtctgctgctgtacgaagacatccgtgagagcacgttcgtggaggggcaactgccaagtcctaaaattgacgccctggacaaccatcagaagtgcttcgccattctcaagctgtaccgtccgaaggtggataacagtgcggttgggacgagtaagaaaagtgacatggctgaggttaaggattggaaagcggttcgtgtggatctggtgatcacgccattcgagcagttcgcctatgcgctgctcggttggacgggcagcggccaatttcgtcgcgatctgcgtcgctatgcggaggaagagcgcgacatgctgctcgacaaccatcgtctctacgacctgaaaaagggcatctttctgagtgcgggcagcgaagaagagattttcggtcatctgggtctggattatctggagccgtgggaacgcaacgcg

SEQ ID NO: 4172 - protein, 394 aa, synthetic construct; identical to SEQ ID NO: 4154
  REGION 1..394: note = Variant of terminal deoxynucleotidyl transferase

SEQ ID NO: 4173 - DNA, 1182 bp, synthetic construct
  misc_feature 1..1182: note = Variant of terminal deoxynucleotidyl transferase
  source 1..1182: mol_type = other DNA
atgcatcaccaccatcatcatgggggttctggtcatccggaaggtaataccccggagaaggaggtgccgagcgttatcgcccgtcatgttagtcagtacgcgtgccagcgcaagaccacgctgaataactacaacaaaaagttcaccgacgcgctggagatcatggccgagaactacaaatttaaagagaacctgcaggcgtgtctggaagccaagcgcgccgcgagtgtcctgaaaagcctgccgttcgaggttaccagcatgaaagacatccaaggtctgccgtgcattaccgacgacgtacgtgacgtgatccaggagatcatcgaagaaggcgagagcagccgtgttaaagaaatcctcaatgacgagcgctacaaggcctttaagcagttcaccagcgtgttcggtgtgggcgtgaaaacctcggaaaagtggtaccgtatgggcctccgtacggttgaagaagcaaaggccagtaagagtctgaagctgagcaagatgcagaaggcgggcttcctgtattacgaggatctggcgagcggtgttagtaaagaagaagccgatgccgttacgctcatcgtgaaggaaacggtggctcgcgttagtccggatgcgctggtgaccatcgccggcggtttccgccgtggcaaacctatgggccacgacgttgacctgctgatcacgattccgggccgtcctaccgatgacgagctgctccacaaagtggttgatctgctcaagaagcaaggtctgctgctgtacgaagacatccgtgagagcacgttcgtggaggggcaactgccaagtcctaaaatcgacgccctggacaactttcagaagtgcttcgccattctcaagctgtaccgtccgaaggtggataacagtgcggttgggacgagtaagaaaagtgacatggctgaggttaaggattggaaagcggttcgtgtggatctggtgatcacgccattcgagcagttcgcctatgcgctgctcggttggacgggcagcggccaatttcgtcgcgatctgcgtcgctatgcggaggaagagcgcgacatgctgctcgacaaccatcgtctctacgacctgaaaaagggcatctttctgagtgcgggcagcgaagaagagattttcggtcatctgggtctggattatctggagccgtgggaacgcaacgcg

SEQ ID NO: 4174 - protein, 394 aa, synthetic construct
  REGION 1..394: note = Variant of terminal deoxynucleotidyl transferase
MHHHHHHGGSGHPEGNTPEKEVPSVIARHVSQYACQRKTTLNNYNKKFTDALEIMAENYKFKENLQACLEAKRAASVLKSLPFEVTSMKDIQGLPCITDDVRDVIQEIIEEGESSRVKEILNDERYKAFKQFTSVFGVGVKTSEKWYRMGLRTVEEAKASKSLKLSKMQKAGFLYYEDLASGVSKEEADAVTLIVKETVARVSPDALVTIAGGFRRGKPMGHDVDLLITIPGRPTDDELLHKVVDLLKKQGLLLYEDIRESTFVEGQLPSPKIDALDNFQKCFAILKLYRPKVDNSAVGTSKKSDMAEVKDWKAVRVDLVITPFEQFAYALLGWTGSGQFRRDLRRYAEEERDMLLDNHRLYDLKKGIFLSAGSEEEIFGHLGLDYLEPWERNA

SEQ ID NO: 4175 - DNA, 1182 bp, synthetic construct
  misc_feature 1..1182: note = Variant of terminal deoxynucleotidyl transferase
  source 1..1182: mol_type = other DNA
atgcatcaccaccatcatcatgggggttctggtcatccggaaggtaataccccggagaaggaggtgccgagcgttatcgcccgtcatgttagtcagtacgcgtgccagcgcaagaccacgctgaataactacaacaaaaagttcaccgacgcgctggagatcatggccgagaactacaaatttaaagagaacctgcaggcgtgtctggaagccaagcgcgccgcgagtgtcctgaaaagcctgccgttcgaggttaccagcatgaaagacatccaaggtctgccgtgcattaccgacgacgtacgtgacgtgatccgtgagatcatcgaagtaggcgagagcagccgtgttaaagaaatcctcaatgacgagcgctacaaggcctttaagcagttcaccagcgtgttcggtgtgggcgtgaaaacctcggaaaagtggtaccgtatgggcctccgtacggttgaagaagcaaaggccagtaagagtctgaagctgagcaagatgcagaaggcgggcttcctgtattacgaggatctggcgagcggtgttagtaaagaagaagccgatgccgttacgctcatcgtgaaggaaacggtggctctggttagtccggatgcgctggtgaccatcgccggcggtttccgccgtggcaaacctatgggccacgacgttgacctgctgatcacgattccgggccgtcctgaggatgacgagctgctccacaaagtggttgatctgctcaagaagcaaggtctgctgctgtacgaagacatccgtgagagcacgttcgtggaggggcaactgccaagtcctaaaatcgacgccctggacaactttcagaagtgcttcgccattctcaagctgtaccgtccgaaggtggataacagtgcggttgggacgagtaagaaaagtgacatggctgaggttaaggattggaaagcggttcgtgtggatctggtgatcacgccattcgagcagttcgcctatgcgctgctcggttggacgggcagcggccaatttcgtcgcgatctgcgtcgctatgcggaggaagagcgcgacatgctgctcgacaaccatcgtctctacgacctgaaaaagggcatctttctgagtgcgggcagcgaagaagagattttcggtcatctgggtctggattatctggagccgtgggaacgcaacgcg

SEQ ID NO: 4176 - protein, 394 aa, synthetic construct
  REGION 1..394: note = Variant of terminal deoxynucleotidyl transferase
MHHHHHHGGSGHPEGNTPEKEVPSVIARHVSQYACQRKTTLNNYNKKFTDALEIMAENYKFKENLQACLEAKRAASVLKSLPFEVTSMKDIQGLPCITDDVRDVIREIIEVGESSRVKEILNDERYKAFKQFTSVFGVGVKTSEKWYRMGLRTVEEAKASKSLKLSKMQKAGFLYYEDLASGVSKEEADAVTLIVKETVALVSPDALVTIAGGFRRGKPMGHDVDLLITIPGRPEDDELLHKVVDLLKKQGLLLYEDIRESTFVEGQLPSPKIDALDNFQKCFAILKLYRPKVDNSAVGTSKKSDMAEVKDWKAVRVDLVITPFEQFAYALLGWTGSGQFRRDLRRYAEEERDMLLDNHRLYDLKKGIFLSAGSEEEIFGHLGLDYLEPWERNA

SEQ ID NO: 4177 - DNA, 1182 bp, synthetic construct
  misc_feature 1..1182: note = Variant of terminal deoxynucleotidyl transferase
  source 1..1182: mol_type = other DNA
atgcatcaccaccatcatcatgggggttctggtcatccggaaggtaataccccggagaaggaggtgccgagcgttatcgcccgtcatgttagtcaatacgcgtgccagcgcaagaccacgctgaataactacaacaaaaagttcaccgacgcgctggagatcatggccgagaactacaaatttaaagagaacctgcaggcgtgtctggaagccaagcgcgccgcgagtgtcctgaaaagcctgccgttcgaggttaccagcatgaaagacatccaaggtctgccgtgcattaccgacgacgtacgtgatgtgatcgaggagatcatcgaagagggcgagagcagccgtgttaaagaaatcctcaatgacgagcgctacaaggcctttaagcagttcaccagcgtgttcggtgtgggcgtgaaaacctcggaaaagtggtaccgtatgggcctccgtacggttgaagaagcaaaggccagtaagagtctgaagctgagcaagatgcagaaggcgggcttcctgtattacgaggatctggcgagcggtgttagtaaagaagaagccgatgccgttacgctcatcgtgaaggaaacggtgcgtactgttagtccggatgcgctggtgaccctggccggcggtttccgccgtggcaaacctatgggccacgacgttgacctgctgatcacgattccgggccgtcctgaagatgacgagctgctccacaaagtggttgatctgctcaagaagcaaggtctgctgctgtacgaagacatccgtgagagcacgttcgtggaggggcaactgccaagtcctaaacctgacgccctggacaaccatcagaagtgcttcgccattctcaagctgtaccgtccgaaggtggataacagtgcggttgggacgagtaagaaaagtgacatggctgaggttaaggattggaaagcggttcgtgtggatctggtgatcacgccattcgagcagttcgcctatgcgctgctcggttggacgggcagcggccaatttcgtcgcgatctgcgtcgctatgcgagtgaagagcgcgacatgctgctcgacaaccatcgtctctacgacctgaaaaagggcatctttctgagtgcgggcagcgaagaagagattttcggtcatctgggtctggattatctggagccgtgggaacgcaacgcg

SEQ ID NO: 4178 - protein, 394 aa, synthetic construct
  REGION 1..394: note = Variant of terminal deoxynucleotidyl transferase
MHHHHHHGGSGHPEGNTPEKEVPSVIARHVSQYACQRKTTLNNYNKKFTDALEIMAENYKFKENLQACLEAKRAASVLKSLPFEVTSMKDIQGLPCITDDVRDVIEEIIEEGESSRVKEILNDERYKAFKQFTSVFGVGVKTSEKWYRMGLRTVEEAKASKSLKLSKMQKAGFLYYEDLASGVSKEEADAVTLIVKETVRTVSPDALVTLAGGFRRGKPMGHDVDLLITIPGRPEDDELLHKVVDLLKKQGLLLYEDIRESTFVEGQLPSPKPDALDNHQKCFAILKLYRPKVDNSAVGTSKKSDMAEVKDWKAVRVDLVITPFEQFAYALLGWTGSGQFRRDLRRYASEERDMLLDNHRLYDLKKGIFLSAGSEEEIFGHLGLDYLEPWERNA

SEQ ID NO: 4179 - DNA, 1182 bp, synthetic construct
  misc_feature 1..1182: note = Variant of terminal deoxynucleotidyl transferase
  source 1..1182: mol_type = other DNA
atgcatcaccaccatcatcatgggggttctggtcatccggaaggtaataccccggagaaggaggtgccgagcgttatcgcccgtcatgttagtccatacgcgtgccagcgcaagaccacgctgaataactacaacaaaaagttcaccgacgcgctggagatcatggccgagaactacaaatttaaagagaacctgcaggcgtgtctggaagccaagcgcgccgcgagtgtcctgaaaagcctgccgttcgaggttaccagcatgaaagacatccaaggtctgccgtgcattaccgacgacgtacgtgacgtgatcgaggagatcatcgaagagggcgagagcagccgtgttaaagaaatcctcaatgacgagcgctacaaggcctttaagcagttcaccagcgtgttcggtgtgggcgtgaaaacctcggaaaagtggtaccgtatgggcctccgtacggttgaagaagcaaaggccagtaagagtctgaagctgagcaagatgcagaaggcgggcttcctgtattacgaggatctggcgagcggtgttagtaaagaagaagccgatgccgttacgctcatcgtgaaggaaacggtgcgtactgttagtccggatgcgctggtgaccattgccggcggtttccgccgtggcaaacctatgggccacgacgttgacctgctgatcacgattccgggccgtcctgaagatgacgagctgctccacaaagtggttgatctgctcaagaagcaaggtctgctgctgtacgaagacatccgtgagagcacgttcgtggaggggcaactgccaagtcctaaacctgacgccctggacaaccatcagaagtgcttcgccattctcaagctgtaccgtccgaaggtggataacagtgcggttgggacgagtaagaaaagtgacatggctgaggttaaggattggaaagcggttcgtgtggatctggtgatcacgccattcgagcagttcgcctatgcgctgctcggttggacgggcagcggccaatttcgtcgcgatacgcgtcgctatgcgagtgaagagcgcgacatgctgctcgacaaccatcgtctctacgacctgaaaaagggcatctttctgagtgcgggcagcgaagaagagattttcggtcatctgggtctggattatctggagccgtgggaacgcaacgcg

SEQ ID NO: 4180 - protein, 394 aa, synthetic construct
  REGION 1..394: note = Variant of terminal deoxynucleotidyl transferase
MHHHHHHGGSGHPEGNTPEKEVPSVIARHVSPYACQRKTTLNNYNKKFTDALEIMAENYKFKENLQACLEAKRAASVLKSLPFEVTSMKDIQGLPCITDDVRDVIEEIIEEGESSRVKEILNDERYKAFKQFTSVFGVGVKTSEKWYRMGLRTVEEAKASKSLKLSKMQKAGFLYYEDLASGVSKEEADAVTLIVKETVRTVSPDALVTIAGGFRRGKPMGHDVDLLITIPGRPEDDELLHKVVDLLKKQGLLLYEDIRESTFVEGQLPSPKPDALDNHQKCFAILKLYRPKVDNSAVGTSKKSDMAEVKDWKAVRVDLVITPFEQFAYALLGWTGSGQFRRDTRRYASEERDMLLDNHRLYDLKKGIFLSAGSEEEIFGHLGLDYLEPWERNA

SEQ ID NO: 4181 - DNA, 1182 bp, synthetic construct
  misc_feature 1..1182: note = Variant of terminal deoxynucleotidyl transferase
  source 1..1182: mol_type = other DNA
atgcatcaccaccatcatcatgggggttctggtcatccggaaggtaataccccggagaaggaggtgccgagcgttatcgcccgtcatgttagtcaatacgcgtgccagcgcaagaccacgctgaataactacaacaaaaagttcaccgacgcgctggagatcatggccgagaactacaaatttaaagagaacctgcaggcgtgtctggaagccaagcgcgccgcgagtgtcctgaaaagcctgccgttcgaggttaccagcatgaaagacatccaaggtctgccgtgcattaccgacgacgtacgtgatgtgatcgaggagatcatcgaagagggcgagagcagccgtgttaaagaaatcctcaatgacgagcgctacaaggcctttaagcagttcaccagcgtgttcggtgtgggcgtgaaaacctcggaaaagtggtaccgtatgggcctccgtacggttgaagaagcaaaggccagtaagagtctgaagctgagcaagatgcagaaggcgggcttcctgtattacgaggatctggcgagcggtgttagtaaagaagaagccgatgccgttacgctcatcgtgaaggaaacggtgcgtactgttagtccggatgcggaggtgaccattgccggcggtttccgccgtggcaaacctatgggccacgacgttgacctgctgatcacgattccgggccgtcctgaagatgacgagctgctccacaaagtggttgatctgctcaagaagcaaggtctgctgctgtacgaagacatccgtgagagcacgttcgtggaggggcaactgccaagtcctaaaattgacgccctggacaaccatcagaagtgcttcgccattctcaagctgtaccgtccgaaggtggataacagtgcggttgggacgagtaagaaaagtgacatggctgaggttaaggattggaaagcggttcgtgtggatctggtgatcacgccattcgagcagttcgcctatgcgctgctcggttggacgggcagcggccaatttcgtcgcgatctgcgtcgctatgcgagtgaagagcgcgacatgctgctcgacaaccatcgtctctacgacctgaaaaagggcatctttctgagtgcgggcagcgaagaagagattttcggtcatctgggtctggattatctggagccgtgggaacgcaacgcg

SEQ ID NO: 4182 - protein, 394 aa, synthetic construct
  REGION 1..394: note = Variant of terminal deoxynucleotidyl transferase
MHHHHHHGGSGHPEGNTPEKEVPSVIARHVSQYACQRKTTLNNYNKKFTDALEIMAENYKFKENLQACLEAKRAASVLKSLPFEVTSMKDIQGLPCITDDVRDVIEEIIEEGESSRVKEILNDERYKAFKQFTSVFGVGVKTSEKWYRMGLRTVEEAKASKSLKLSKMQKAGFLYYEDLASGVSKEEADAVTLIVKETVRTVSPDAEVTIAGGFRRGKPMGHDVDLLITIPGRPEDDELLHKVVDLLKKQGLLLYEDIRESTFVEGQLPSPKIDALDNHQKCFAILKLYRPKVDNSAVGTSKKSDMAEVKDWKAVRVDLVITPFEQFAYALLGWTGSGQFRRDLRRYASEERDMLLDNHRLYDLKKGIFLSAGSEEEIFGHLGLDYLEPWERNA

SEQ ID NO: 4183 - DNA, 1182 bp, synthetic construct
  misc_feature 1..1182: note = Variant of terminal deoxynucleotidyl transferase
  source 1..1182: mol_type = other DNA
atgcatcaccaccatcatcatgggggttctggtcatccggaaggtaataccccggagaaggaggtgccgagcgttatcgcccgtcatgttagtcagtacgcgtgccagcgcaagaccacgctgaataactacaacaaaaagttcaccgacgcgctggagatcatggccgagaactacaaatttaaagagaacctgcaggcgtgtctggaagccaagcgcgccgcgagtgtcctgaaaagcctgccgttcgaggttaccagcatgaaagacatccaaggtctgccgtgcattaccgacgacgtacgtgacgtgatccgtgagatcatcgaagtaggcgagagcagccgtgttaaagaaatcctcaatgacgagcgctacaaggcctttaagcagttcaccagcgtgttcggtgtgggcgtgaaaacctcggaaaagtggtaccgtatgggcctccgtacggttgaagaagcaaaggccagtaagagtctgaagctgagcaagatgcagaaggcgggcttcctgtattacgaggatctggcgagcggtgttagtaaagaagaagccgatgccgttacgctcatcgtgaaggaaacggtgcgccgcgttagtccggatgcgctggtgaccatcgccggcggtttccgccgtggcaaacctatgggccacgacgttgacctgctgatcacgattccgggccgtcctgaggatgacgagctgctccacaaagtggttgatctgctcaagaagcaaggtctgctgctgtacgaagacatccgtgagagcacgttcgtggaggggcaactgccaagtcctaaaatcgacgccctggacaactttcagaagtgcttcgccattctcaagctgtaccgtccgaaggtggataacagtgcggttgggacgagtaagaaaagtgacatggctgaggttaaggattggaaagcggttcgtgtggatctggtgatcacgccattcgagcagttcgcctatgcgctgctcggttggacgggcagcggccaatttcgtcgcgatctgcgtcgctatgcggaggaagagcgcgacatgctgctcgacaaccatcgtctctacgacctgaaaaagggccaatttctgagtgcgggcagcgaagaagagattttcggtcatctgggtctggattatctggagccgtgggaacgcaacgcg

SEQ ID NO: 4184 - protein, 394 aa, synthetic construct
  REGION 1..394: note = Variant of terminal deoxynucleotidyl transferase
MHHHHHHGGSGHPEGNTPEKEVPSVIARHVSQYACQRKTTLNNYNKKFTDALEIMAENYKFKENLQACLEAKRAASVLKSLPFEVTSMKDIQGLPCITDDVRDVIREIIEVGESSRVKEILNDERYKAFKQFTSVFGVGVKTSEKWYRMGLRTVEEAKASKSLKLSKMQKAGFLYYEDLASGVSKEEADAVTLIVKETVRRVSPDALVTIAGGFRRGKPMGHDVDLLITIPGRPEDDELLHKVVDLLKKQGLLLYEDIRESTFVEGQLPSPKIDALDNFQKCFAILKLYRPKVDNSAVGTSKKSDMAEVKDWKAVRVDLVITPFEQFAYALLGWTGSGQFRRDLRRYAEEERDMLLDNHRLYDLKKGQFLSAGSEEEIFGHLGLDYLEPWERNA

SEQ ID NO: 4185 - DNA, 1182 bp, synthetic construct
  misc_feature 1..1182: note = Variant of terminal deoxynucleotidyl transferase
  source 1..1182: mol_type = other DNA
atgcatcaccaccatcatcatgggggttctggtcatccggaaggtaataccccggagaaggaggtgccgagcgttatcgcccgtcatgttagtcaatacgcgtgccagcgcaagaccacgctgaataactacaacaaaaagttcaccgacgcgctggagatcatggccgagaactacaaatttaaagagaacctgcaggcgtgtctggaagccaagcgcgccgcgagtgtcctgaaaagcctgccgttcgaggttaccagcatgaaagacatccaaggtctgccgtgcattaccgacgacgtacgtgacgtgatcgaggagatcatcgaagagggcgagagcagccgtgttaaagaaatcctcaatgacgagcgctacaaggcctttaagcagttcaccagcgtgttcggtgtgggcgtgaaaacctcggaaaagtggtaccgtatgggcctccgtacggttgaagaagcaaaggccagtaagagtctgaagctgagcaagatgcagaaggcgggcttcctgtattacgaggatctggcgagcggtgttagtaaagaagaagccgatgccgttacgctcatcgtgaaggaaacggtgcgtactgttagtccggatgcggaggtgaccctggccggcggtttccgccgtggcaaacctatgggccacgacgttgacctgctgatcacgattccgggccgtcctgaagatgacgagctgctccacaaagtggttgatctgctcaagaagcaaggtctgctgctgtacgaagacatccgtgagagcacgttcgtggaggggcaactgccaagtcctaaacctgacgccctggacaaccatcagaagtgcttcgccattctcaagctgtaccgtccgaaggtggataacagtgcggttgggacgagtaagaaaagtgacatggctgaggttaaggattggaaagcggttcgtgtggatctggtgatcacgccattcgagcagttcgcctatgcgctgctcggttggacgggcagcggccaatttcgtcgcgatacgcgtcgctatgcgagtgaagagcgcgacatgctgctcgacaaccatcgtctctacgacctgaaaaagggcatctttctgagtgcggacagcgaagaagagattttcggtcatctgggtctggattatctggagccgtgggaacgcaacgcg

SEQ ID NO: 4186 - protein, 394 aa, synthetic construct
  REGION 1..394: note = Variant of terminal deoxynucleotidyl transferase
MHHHHHHGGSGHPEGNTPEKEVPSVIARHVSQYACQRKTTLNNYNKKFTDALEIMAENYKFKENLQACLEAKRAASVLKSLPFEVTSMKDIQGLPCITDDVRDVIEEIIEEGESSRVKEILNDERYKAFKQFTSVFGVGVKTSEKWYRMGLRTVEEAKASKSLKLSKMQKAGFLYYEDLASGVSKEEADAVTLIVKETVRTVSPDAEVTLAGGFRRGKPMGHDVDLLITIPGRPEDDELLHKVVDLLKKQGLLLYEDIRESTFVEGQLPSPKPDALDNHQKCFAILKLYRPKVDNSAVGTSKKSDMAEVKDWKAVRVDLVITPFEQFAYALLGWTGSGQFRRDTRRYASEERDMLLDNHRLYDLKKGIFLSADSEEEIFGHLGLDYLEPWERNA

SEQ ID NO: 4187 - DNA, 1182 bp, synthetic construct
  misc_feature 1..1182: note = Variant of terminal deoxynucleotidyl transferase
  source 1..1182: mol_type = other DNA
atgcatcaccaccatcatcatgggggttctggtcatccggaaggtaataccccggagaaggaggtgccgagcgttatcgcccgtcatgttagtcagtacgcgtgccagcgcaagaccacgctgaataactacaacaaaaagttcaccgacgcgctggagatcatggccgagaactacaaatttaaagagaacctgcaggcgtgtctggaagccaagcgcgccgcgagtgtcctgaaaagcctgccgttcgaggttaccagcatgaaagacatccaaggtctgccgtgcattaccgacgacgtacgtgacgtgatcgaggagatcatcgaagtaggcgagagcagccgtgttaaagaaatcctcaatgacgagcgctacaaggcctttaagcagttcaccagcgtgttcggtgtgggcgtgaaaacctcggaaaagtggtaccgtatgggcctccgtacggttgaagaagcaaaggccagtaagagtctgaagctgagcaagatgcagaaggcgggcttcctgtattacgaggatctggcgagcggtgttagtaaagaagaagccgatgccgttacgctcatcgtgaaggaaacggtggctcgcgttagtccggatgcgctggtgaccatcgccggcggtttccgccgtggcaaacctatgggccacgacgttgacctgctgatcacgattccgggccgtcctgaagatgacgagctgctccacaaagtggttgatctgctcaagaagcaaggtctgctgctgtacgaagacatccgtgagagcacgttcgtggaggggcaaattccaagtcctaaaatcgacgccctggacaactttcagaagtgcttcgccattctcaagctgtaccgtccgaaggtggataacagtgcggttgggacgagtaagaaaagtgacatggctgaggttaaggattggaaagcggttcgtgtggatctggtgatcacgccattcgagcagttcgcctatgcgctgctcggttggacgggcagcggccaatttcgtcgcgatctgcgtcgctatgcggaggaagagcgcgacatgctgctcgacaaccatcgtctctacgacctgaaaaagggcatctttctgagtgcgggcagcgaagaagagattttcggtcatctgggtctggattatctggagccgtgggaacgcaacgcg

SEQ ID NO: 4188 - protein, 394 aa, synthetic construct
  REGION 1..394: note = Variant of terminal deoxynucleotidyl transferase
MHHHHHHGGSGHPEGNTPEKEVPSVIARHVSQYACQRKTTLNNYNKKFTDALEIMAENYKFKENLQACLEAKRAASVLKSLPFEVTSMKDIQGLPCITDDVRDVIEEIIEVGESSRVKEILNDERYKAFKQFTSVFGVGVKTSEKWYRMGLRTVEEAKASKSLKLSKMQKAGFLYYEDLASGVSKEEADAVTLIVKETVARVSPDALVTIAGGFRRGKPMGHDVDLLITIPGRPEDDELLHKVVDLLKKQGLLLYEDIRESTFVEGQIPSPKIDALDNFQKCFAILKLYRPKVDNSAVGTSKKSDMAEVKDWKAVRVDLVITPFEQFAYALLGWTGSGQFRRDLRRYAEEERDMLLDNHRLYDLKKGIFLSAGSEEEIFGHLGLDYLEPWERNA

SEQ ID NO: 4189 - DNA, 1182 bp, synthetic construct
  misc_feature 1..1182: note = Variant of terminal deoxynucleotidyl transferase
  source 1..1182: mol_type = other DNA
atgcatcaccaccatcatcatgggggttctggtcatccggaaggtaataccccggagaaggaggtgccgagcgttatcgcccgtcatgttagtcagtacgcgtgccagcgcaagaccacgctgaataactacaacaaaaagttcaccgacgcgctggagatcatggccgagaactacaaatttaaagagaacctgcaggcgtgtctggaagccaagcgcgccgcgagtgtcctgaaaagcctgccgttcgaggttaccagcatgaaagacatccaaggtctgccgtgcattaccgacgacgtacgtgacgtgatccgtgagatcatcgaagaaggcgagagcagccgtgttaaagaaatcctcaatgacgagcgctacaaggcctttaagcagttcaccagcgtgttcggtgtgggcgtgaaaacctcggaaaagtggtaccgtatgggcctccgtacggttgaagaagcaaaggccagtaagagtctgaagctgagcaagatgcagaaggcgggcttcctgtattacgaggatctggcgagcggtgttagtaaagaagaagccgatgccgttacgctcatcgtgaaggaaacggtgcgcaccgttagtccggatgcgctggtgaccatcgccggcggtttccgccgtggcaaacctatgggccacgacgttgacctgctgatcacgattccgggccgtcctgaggatgacgagctgctccacaaagtggttgatctgctcaagaagcaaggtctgctgctgtacgaagacatccgtgagagcacgttcgtggaggggcaactgccaagtcctaaaatcgacgccctggacaactttcagaagtgcttcgccattctcaagctgtaccgtccgaaggtggataacagtgcggttgggacgagtaagaaaagtgacatggctgaggttaaggattggaaagcggttcgtgtggatctggtgatcacgccattcgagcagttcgcctatgcgctgctcggttggacgggcagcggccaatttcgtcgcgatctgcgtcgctatgcggaggaagagcgcgacatgctgctcgacaaccatcgtctctacgacctgaaaaagggcatctttctgagtgcgggcagcgaagaagagattttcggtcatctgggtctggattatctggagccgtgggaacgcaacgcg

SEQ ID NO: 4190 - protein, 394 aa, synthetic construct
  REGION 1..394: note = Variant of terminal deoxynucleotidyl transferase
MHHHHHHGGSGHPEGNTPEKEVPSVIARHVSQYACQRKTTLNNYNKKFTDALEIMAENYKFKENLQACLEAKRAASVLKSLPFEVTSMKDIQGLPCITDDVRDVIREIIEEGESSRVKEILNDERYKAFKQFTSVFGVGVKTSEKWYRMGLRTVEEAKASKSLKLSKMQKAGFLYYEDLASGVSKEEADAVTLIVKETVRTVSPDALVTIAGGFRRGKPMGHDVDLLITIPGRPEDDELLHKVVDLLKKQGLLLYEDIRESTFVEGQLPSPKIDALDNFQKCFAILKLYRPKVDNSAVGTSKKSDMAEVKDWKAVRVDLVITPFEQFAYALLGWTGSGQFRRDLRRYAEEERDMLLDNHRLYDLKKGIFLSAGSEEEIFGHLGLDYLEPWERNA

SEQ ID NO: 4191 - DNA, 1182 bp, synthetic construct
  misc_feature 1..1182: note = Variant of terminal deoxynucleotidyl transferase
  source 1..1182: mol_type = other DNA
atgcatcaccaccatcatcatgggggttctggtcatccggaaggtaataccccggagaaggaggtgccgagcgttatcgcccgtcatgttagtcagtacgcgtgccagcgcaagaccacgctgaataactacaacaaaaagttcaccgacgcgctggagatcatggccgagaactacaaatttaaagagaacctgcaggcgtgtctggaagccaagcgcgccgcgagtgtcctgaaaagcctgccgttcgaggttaccagcatgaaagacatccaaggtctgccgtgcattaccgacgacgtacgtgacgtgatccgtgagatcatcgaagtaggcgagagcagccgtgttaaagaaatcctcaatgacgagcgctacaaggcctttaagcagttcaccagcgtgttcggtgtgggcgtgaaaacctcggaaaagtggtaccgtatgggcctccgtacggttgaagaagcaaaggccagtaagagtctgaagctgagcaagatgcagaaggcgggcttcctgtattacgaggatctggcgagcggtgttagtaaagaagaagccgatgccgttacgctcatcgtgaaggaaacggtgcgcctggttagtccggatgcgctggtgaccatcgccggcggtttccgccgtggcaaacctatgggccacgacgttgacctgctgatcacgattccgggccgtcctgaggatgacgagctgctccacaaagtggttgatctgctcaagaagcaaggtctgctgctgtacgaagacatccgtgagagcacgttcgtggaggggcaactgccaagtcctaaaatcgacgccctggacaactttcagaagtgcttcgccattctcaagctgtaccgtccgaaggtggataacagtgcggttgggacgagtaagaaaagtgacatggctgaggttaaggattggaaagcggttcgtgtggatctggtgatcacgccattcgagcagttcgcctatgcgctgctcggttggacgggcagcggccaatttcgtcgcgatctgcgtcgctatgcggaggaagagcgcgacatgctgctcgacaaccatcgtctctacgacctgaaaaagggcatctttctgagtgcgggcagcgaagaagagattttcggtcatctgggtctggattatctggagccgtgggaacgcaacgcg

SEQ ID NO: 4192 - protein, 394 aa, synthetic construct
  REGION 1..394: note = Variant of terminal deoxynucleotidyl transferase
MHHHHHHGGSGHPEGNTPEKEVPSVIARHVSQYACQRKTTLNNYNKKFTDALEIMAENYKFKENLQACLEAKRAASVLKSLPFEVTSMKDIQGLPCITDDVRDVIREIIEVGESSRVKEILNDERYKAFKQFTSVFGVGVKTSEKWYRMGLRTVEEAKASKSLKLSKMQKAGFLYYEDLASGVSKEEADAVTLIVKETVRLVSPDALVTIAGGFRRGKPMGHDVDLLITIPGRPEDDELLHKVVDLLKKQGLLLYEDIRESTFVEGQLPSPKIDALDNFQKCFAILKLYRPKVDNSAVGTSKKSDMAEVKDWKAVRVDLVITPFEQFAYALLGWTGSGQFRRDLRRYAEEERDMLLDNHRLYDLKKGIFLSAGSEEEIFGHLGLDYLEPWERNA

SEQ ID NO: 4193 - DNA, 1182 bp, synthetic construct
  misc_feature 1..1182: note = Variant of terminal deoxynucleotidyl transferase
  source 1..1182: mol_type = other DNA
atgcatcaccaccatcatcatgggggttctggtcatccggaaggtaataccccggagaaggaggtgccgagcgttatcgcccgtcatgttagtcagtacgcgtgccagcgcaagaccacgctgaataactacaacaaaaagttcaccgacgcgctggagatcatggccgagaactacaaatttaaagagaacctgcaggcgtgtctggaagccaagcgcgccgcgagtgtcctgaaaagcctgccgttcgaggttaccagcatgaaagacatccaaggtctgccgtgcattaccgacgacgtacgtgacctgatccgtgagatcatcgaagtaggcgagagcagccgtgttaaagaaatcctcaatgacgagcgctacaaggcctttaagcagttcaccagcgtgttcggtgtgggcgtgaaaacctcggaaaagtggtaccgtatgggcctccgtacggttgaagaagcaaaggccagtaagagtctgaagctgagcaagatgcagaaggcgggcttcctgtattacgaggatctggcgagcggtgttagtaaagaagaagccgatgccgttacgctcatcgtgaaggaaacggtgcgccgcgttagtccggatgcgctggtgaccatcgccggcggtttccgccgtggcaaacctatgggccacgacgttgacctgctgatcacgattccgggccgtcctaccgatgacgagctgctccacaaagtggttgatctgctcaagaagcaaggtctgctgctgtacgaagacatccgtgagagcacgttcgtggaggggcaactgccaagtcctaaaatcgacgccctggacaactttcagaagtgcttcgccattctcaagctgtaccgtccgaaggtggataacagtgcggttgggacgagtaagaaaagtgacatggctgaggttaaggattggaaagcggttcgtgtggatctggtgatcacgccattcgagcagttcgcctatgcgctgctcggttggacgggcagcggccaatttcgtcgcgatctgcgtcgctatgcggaggaagagcgcgacatgctgctcgacaaccatcgtctctacgacctgaaaaagggccaatttctgagtgcgggcagcgaagaagagattttcggtcatctgggtctggattatctggagccgtgggaacgcaacgcg

SEQ ID NO: 4194 - protein, 394 aa, synthetic construct
  REGION 1..394: note = Variant of terminal deoxynucleotidyl transferase
MHHHHHHGGSGHPEGNTPEKEVPSVIARHVSQYACQRKTTLNNYNKKFTDALEIMAENYKFKENLQACLEAKRAASVLKSLPFEVTSMKDIQGLPCITDDVRDLIREIIEVGESSRVKEILNDERYKAFKQFTSVFGVGVKTSEKWYRMGLRTVEEAKASKSLKLSKMQKAGFLYYEDLASGVSKEEADAVTLIVKETVRRVSPDALVTIAGGFRRGKPMGHDVDLLITIPGRPTDDELLHKVVDLLKKQGLLLYEDIRESTFVEGQLPSPKIDALDNFQKCFAILKLYRPKVDNSAVGTSKKSDMAEVKDWKAVRVDLVITPFEQFAYALLGWTGSGQFRRDLRRYAEEERDMLLDNHRLYDLKKGQFLSAGSEEEIFGHLGLDYLEPWERNA

SEQ ID NO: 4195 - DNA, 1182 bp, synthetic construct
  misc_feature 1..1182: note = Variant of terminal deoxynucleotidyl transferase
  source 1..1182: mol_type = other DNA
atgcatcaccaccatcatcatgggggttctggtcatccggaaggtaataccccggagaaggaggtgccgagcgttatcgcccgtcatgttagtcagtacgcgtgccagcgcaagaccacgctgaataactacaacaaaaagttcaccgacgcgctggagatcatggccgagaactacaaatttaaagagaacctgcaggcgtgtctggaagccaagcgcgccgcgagtgtcctgaaaagcctgccgttcgaggttaccagcatgaaagacatccaaggtctgccgtgcattaccgacgacgtacgtgacctgatccgtgagatcatcgaagtaggcgagagcagccgtgttaaagaaatcctcaatgacgagcgctacaaggcctttaagcagttcaccagcgtgttcggtgtgggcgtgaaaacctcggaaaagtggtaccgtatgggcctccgtacggttgaagaagcaaaggccagtaagagtctgaagctgagcaagatgcagaaggcgggcttcctgtattacgaggatctggcgagcggtgttagtaaagaagaagccgatgccgttacgctcatcgtgaaggaaacggtggctctggttagtccggatgcgctggtgaccatcgccggcggtttccgccgtggcaaacctatgggccacgacgttgacctgctgatcacgattccgggccgtcctgaagatgacgagctgctccacaaagtggttgatctgctcaagaagcaaggtctgctgctgtacgaagacatccgtgagagcacgttcgtggaggggcaaattccaagtcctaaaatcgacgccctggacaactttcagaagtgcttcgccattctcaagctgtaccgtccgaaggtggataacagtgcggttgggacgagtaagaaaagtgacatggctgaggttaaggattggaaagcggttcgtgtggatctggtgatcacgccattcgagcagttcgcctatgcgctgctcggttggacgggcagcggccaatttcgtcgcgatctgcgtcgctatgcggaggaagagcgcgacatgctgctcgacaaccatcgtctctacgacctgaaaaagggcatctttctgagtgcgggcagcgaagaagagattttcggtcatctgggtctggattatctggagccgtgggaacgcaacgcg

SEQ ID NO: 4196 - protein, 394 aa, synthetic construct
  REGION 1..394: note = Variant of terminal deoxynucleotidyl transferase
MHHHHHHGGSGHPEGNTPEKEVPSVIARHVSQYACQRKTTLNNYNKKFTDALEIMAENYKFKENLQACLEAKRAASVLKSLPFEVTSMKDIQGLPCITDDVRDLIREIIEVGESSRVKEILNDERYKAFKQFTSVFGVGVKTSEKWYRMGLRTVEEAKASKSLKLSKMQKAGFLYYEDLASGVSKEEADAVTLIVKETVALVSPDALVTIAGGFRRGKPMGHDVDLLITIPGRPEDDELLHKVVDLLKKQGLLLYEDIRESTFVEGQIPSPKIDALDNFQKCFAILKLYRPKVDNSAVGTSKKSDMAEVKDWKAVRVDLVITPFEQFAYALLGWTGSGQFRRDLRRYAEEERDMLLDNHRLYDLKKGIFLSAGSEEEIFGHLGLDYLEPWERNA

SEQ ID NO: 4197 - DNA, 1182 bp, synthetic construct
  misc_feature 1..1182: note = Variant of terminal deoxynucleotidyl transferase
  source 1..1182: mol_type = other DNA
atgcatcaccaccatcatcatgggggttctggtcatccggaaggtaataccccggagaaggaggtgccgagcgttatcgcccgtcatgttagtccatacgcgtgccagcgcaagaccacgctgaataactacaacaaaaagttcaccgacgcgctggagatcatggccgagaactacaaatttaaagagaacctgcaggcgtgtctggaagccaagcgcgccgcgagtgtcctgaaaagcctgccgttcgaggttaccagcatgaaagacatccaaggtctgccgtgcattaccgacgacgtacgtccggtgatcgaggagatcatcgaagagggcgagagcagccgtgttaaagaaatcctcaatgacgagcgctacaaggcctttaagcagttcaccagcgtgttcggtgtgggcgtgaaaacctcggaaaagtggtaccgtatgggcctccgtacggttgaagaagcaaaggccagtaagagtctgaagctgagcaagatgcagaaggcgggcttcctgtattacgaggatctggcgagcggtgttagtaaagaagaagccgatgccgttacgctcatcgtgaaggaaacggtgcgtactgttagtccggatgcgctggtgaccattgccggcggtttccgccgtggcaaacctatgggccacgacgttgacctgctgatcacgattccgggccgtcctgaagatgacgagctgctccacaaagtggttgatctgctcaagaagcaaggtctgctgctgtacgaagacatccgtgagagcacgttcgtggaggggcaactgccaagtcctaaaattgacgccctggacaacttccagaagtgcttcgccattctcaagctgtaccgtccgaaggtggataacagtgcggttgggacgagtaagaaaagtgacatggctgaggttaaggattggaaagcggttcgtgtggatctggtgatgacgccattcgagcagttcgcctatgcgctgctcggttggacgggcagcggccaatttcgtcgcgatacgcgtcgctatgcggaagaagagcgcgacatgctgctcgacaaccatcgtctctacgacctgaaaaagggcatctttctgagtgcgggcagcgaagaagagattttcggtcatctgggtctggattatctggagccgtgggaacgcaacgcg

SEQ ID NO: 4198 - protein, 394 aa, synthetic construct
  REGION 1..394: note = Variant of terminal deoxynucleotidyl transferase
MHHHHHHGGSGHPEGNTPEKEVPSVIARHVSPYACQRKTTLNNYNKKFTDALEIMAENYKFKENLQACLEAKRAASVLKSLPFEVTSMKDIQGLPCITDDVRPVIEEIIEEGESSRVKEILNDERYKAFKQFTSVFGVGVKTSEKWYRMGLRTVEEAKASKSLKLSKMQKAGFLYYEDLASGVSKEEADAVTLIVKETVRTVSPDALVTIAGGFRRGKPMGHDVDLLITIPGRPEDDELLHKVVDLLKKQGLLLYEDIRESTFVEGQLPSPKIDALDNFQKCFAILKLYRPKVDNSAVGTSKKSDMAEVKDWKAVRVDLVMTPFEQFAYALLGWTGSGQFRRDTRRYAEEERDMLLDNHRLYDLKKGIFLSAGSEEEIFGHLGLDYLEPWERNA

SEQ ID NO: 4199 - DNA, 1182 bp, synthetic construct
  misc_feature 1..1182: note = Variant of terminal deoxynucleotidyl transferase
  source 1..1182: mol_type = other DNA
atgcatcaccaccatcatcatgggggttctggtcatccggaaggtaataccccggagaaggaggtgccgagcgttatcgcccgtcatgttagtcagtacgcgtgccagcgcaagaccacgctgaataactacaacaaaaagttcaccgacgcgctggagatcatggccgagaactacaaatttaaagagaacctgcaggcgtgtctggaagccaagcgcgccgcgagtgtcctgaaaagcctgccgttcgaggttaccagcatgaaagacatccaaggtctgccgtgcattaccgacgacgtacgtgacgtgatcgaggagatcatcgaagtaggcgagagcagccgtgttaaagaaatcctcaatgacgagcgctacaaggcctttaagcagttcaccagcgtgttcggtgtgggcgtgaaaacctcggaaaagtggtaccgtatgggcctccgtacggttgaagaagcaaaggccagtaagagtctgaagctgagcaagatgcagaaggcgggcttcctgtattacgaggatctggcgagcggtgttagtaaagaagaagccgatgccgttacgctcatcgtgaaggaaacggtggctaccgttagtccggatgcgctggtgaccatcgccggcggtttccgccgtggcaaacctatgggccacgacgttgacctgctgatcacgattccgggccgtcctgaggatgacgagctgctccacaaagtggttgatctgctcaagaagcaaggtctgctgctgtacgaagacatccgtgagagcacgttcgtggaggggcaactgccaagtcctaaaatcgacgccctggacaactttcagaagtgcttcgccattctcaagctgtaccgtccgaaggtggataacagtgcggttgggacgagtaagaaaagtgacatggctgaggttaaggattggaaagcggttcgtgtggatctggtgatcacgccattcgagcagttcgcctatgcgctgctcggttggacgggcagcggccaatttcgtcgcgatctgcgtcgctatgcggaggaagagcgcgacatgctgctcgacaaccatcgtctctacgacctgaaaaagggccaatttctgagtgcgggcagcgaagaagagattttcggtcatctgggtctggattatctggagccgtgggaacgcaacgcg

SEQ ID NO: 4200 - protein, 394 aa, synthetic construct
  REGION 1..394: note = Variant of terminal deoxynucleotidyl transferase
MHHHHHHGGSGHPEGNTPEKEVPSVIARHVSQYACQRKTTLNNYNKKFTDALEIMAENYKFKENLQACLEAKRAASVLKSLPFEVTSMKDIQGLPCITDDVRDVIEEIIEVGESSRVKEILNDERYKAFKQFTSVFGVGVKTSEKWYRMGLRTVEEAKASKSLKLSKMQKAGFLYYEDLASGVSKEEADAVTLIVKETVATVSPDALVTIAGGFRRGKPMGHDVDLLITIPGRPEDDELLHKVVDLLKKQGLLLYEDIRESTFVEGQLPSPKIDALDNFQKCFAILKLYRPKVDNSAVGTSKKSDMAEVKDWKAVRVDLVITPFEQFAYALLGWTGSGQFRRDLRRYAEEERDMLLDNHRLYDLKKGQFLSAGSEEEIFGHLGLDYLEPWERNA

SEQ ID NO: 4201 - DNA, 1182 bp, synthetic construct
  misc_feature 1..1182: note = Variant of terminal deoxynucleotidyl transferase
  source 1..1182: mol_type = other DNA
atgcatcaccaccatcatcatgggggttctggtcatccggaaggtaataccccggagaaggaggtgccgagcgttatcgcccgtcatgttagtcagtacgcgtgccagcgcaagaccacgctgaataactacaacaaaaagttcaccgacgcgctggagatcatggccgagaactacaaatttaaagagaacctgcaggcgtgtctggaagccaagcgcgccgcgagtgtcctgaaaagcctgccgttcgaggttaccagcatgaaagacatccaaggtctgccgtgcattaccgacgacgtacgtgacgtgatccgtgagatcatcgaagaaggcgagagcagccgtgttaaagaaatcctcaatgacgagcgctacaaggcctttaagcagttcaccagcgtgttcggtgtgggcgtgaaaacctcggaaaagtggtaccgtatgggcctccgtacggttgaagaagcaaaggccagtaagagtctgaagctgagcaagatgcagaaggcgggcttcctgtattacgaggatctggcgagcggtgttagtaaagaagaagccgatgccgttacgctcatcgtgaaggaaacggtgcgccgcgttagtccggatgcgctggtgaccatcgccggcggtttccgccgtggcaaacctatgggccacgacgttgacctgctgatcacgattccgggccgtcctgaagatgacgagctgctccacaaagtggttgatctgctcaagaagcaaggtctgctgctgtacgaagacatccgtgagagcacgttcgtggaggggcaaattccaagtcctaaaatcgacgccctggacaactttcagaagtgcttcgccattctcaagctgtaccgtccgaaggtggataacagtgcggttgggacgagtaagaaaagtgacatggctgaggttaaggattggaaagcggttcgtgtggatctggtgatcacgccattcgagcagttcgcctatgcgctgctcggttggacgggcagcggccaatttcgtcgcgatctgcgtcgctatgcggaggaagagcgcgacatgctgctcgacaaccatcgtctctacgacctgaaaaagggcatctttctgagtgcgggcagcgaagaagagattttcggtcatctgggtctggattatctggagccgtgggaacgcaacgcg

SEQ ID NO: 4202 - protein, 394 aa, synthetic construct
  REGION 1..394: note = Variant of terminal deoxynucleotidyl transferase
MHHHHHHGGSGHPEGNTPEKEVPSVIARHVSQYACQRKTTLNNYNKKFTDALEIMAENYKFKENLQACLEAKRAASVLKSLPFEVTSMKDIQGLPCITDDVRDVIREIIEEGESSRVKEILNDERYKAFKQFTSVFGVGVKTSEKWYRMGLRTVEEAKASKSLKLSKMQKAGFLYYEDLASGVSKEEADAVTLIVKETVRRVSPDALVTIAGGFRRGKPMGHDVDLLITIPGRPEDDELLHKVVDLLKKQGLLLYEDIRESTFVEGQIPSPKIDALDNFQKCFAILKLYRPKVDNSAVGTSKKSDMAEVKDWKAVRVDLVITPFEQFAYALLGWTGSGQFRRDLRRYAEEERDMLLDNHRLYDLKKGIFLSAGSEEEIFGHLGLDYLEPWERNA

SEQ ID NO: 4203 - DNA, 1182 bp, synthetic construct
  misc_feature 1..1182: note = Variant of terminal deoxynucleotidyl transferase
  source 1..1182: mol_type = other DNA
atgcatcaccaccatcatcatgggggttctggtcatccggaaggtaataccccggagaaggaggtgccgagcgttatcgcccgtcatgttagtcagtacgcgtgccagcgcaagaccacgctgaataactacaacaaaaagttcaccgacgcgctggagatcatggccgagaactacaaatttaaagagaacctgcaggcgtgtctggaagccaagcgcgccgcgagtgtcctgaaaagcctgccgttcgaggttaccagcatgaaagacatccaaggtctgccgtgcattaccgacgacgtacgtgacgtgatcgaggagatcatcgaagagggcgagagcagccgtgttaaagaaatcctcaatgacgagcgctacaaggcctttaagcagttcaccagcgtgttcggtgtgggcgtgaaaacctcggaaaagtggtaccgtatgggcctccgtacggttgaagaagcaaaggccagtaagagtctgaagctgagcaagatgcagaaggcgggcttcctgtattacgaggatctggcgagcggtgttagtaaagaagaagccgatgccgttacgctcatcgtgaaggaaacggtggctaccgttagtccggatgcgctggtgaccatcgccggcggtttccgccgtggcaaacctatgggccacgacgttgacctgctgatcacgattccgggccgtcctgaggatgacgagctgctccacaaagtggttgatctgctcaagaagcaaggtctgctgctgtacgaagacatccgtgagagcacgttcgtggaggggcaactgccaagtcctaaaatcgacgccctggacaactttcagaagtgcttcgccattctcaagctgtaccgtccgaaggtggataacagtgcggttgggacgagtaagaaaagtgacatggctgaggttaaggattggaaagcggttcgtgtggatctggtgatcacgccattcgagcagttcgcctatgcgctgctcggttggacgggcagcggccaatttcgtcgcgatctgcgtcgctatgcggaggaagagcgcgacatgctgctcgacaaccatcgtctctacgacctgaaaaagggccaatttctgagtgcgggcagcgaagaagagattttcggtcatctgggtctggattatctggagccgtgggaacgcaacgcg

SEQ ID NO: 4204 - protein, 394 aa, synthetic construct
  REGION 1..394: note = Variant of terminal deoxynucleotidyl transferase
MHHHHHHGGSGHPEGNTPEKEVPSVIARHVSQYACQRKTTLNNYNKKFTDALEIMAENYKFKENLQACLEAKRAASVLKSLPFEVTSMKDIQGLPCITDDVRDVIEEIIEEGESSRVKEILNDERYKAFKQFTSVFGVGVKTSEKWYRMGLRTVEEAKASKSLKLSKMQKAGFLYYEDLASGVSKEEADAVTLIVKETVATVSPDALVTIAGGFRRGKPMGHDVDLLITIPGRPEDDELLHKVVDLLKKQGLLLYEDIRESTFVEGQLPSPKIDALDNFQKCFAILKLYRPKVDNSAVGTSKKSDMAEVKDWKAVRVDLVITPFEQFAYALLGWTGSGQFRRDLRRYAEEERDMLLDNHRLYDLKKGQFLSAGSEEEIFGHLGLDYLEPWERNA

SEQ ID NO: 4205 - DNA, 1182 bp, synthetic construct
  misc_feature 1..1182: note = Variant of terminal deoxynucleotidyl transferase
  source 1..1182: mol_type = other DNA
atgcatcaccaccatcatcatgggggttctggtcatccggaaggtaataccccggagaaggaggtgccgagcgttatcgcccgtcatgttagtccatacgcgtgccagcgcaagaccacgctgaataactacaacaaaaagttcaccgacgcgctggagatcatggccgagaactacaaatttaaagagaacctgcaggcgtgtctggaagccaagcgcgccgcgagtgtcctgaaaagcctgccgttcgaggttaccagcatgaaagacatccaaggtctgccgtgcattaccgacgacgtacgtgatgtgatcgaggagatcatcgaagagggcgagagcagccgtgttaaagaaatcctcaatgacgagcgctacaaggcctttaagcagttcaccagcgtgttcggtgtgggcgtgaaaacctcggaaaagtggtaccgtatgggcctccgtacggttgaagaagcaaaggccagtaagagtctgaagctgagcaagatgcagaaggcgggcttcctgtattacgaggatctggcgagcggtgttagtaaagaagaagccgatgccgttacgctcatcgtgaaggaaacggtgcgtactgttagtccggatgcggaggtgaccattgccggcggtttccgccgtggcaaacctatgggccacgacgttgacctgctgatcacgattccgggccgtcctgaagatgacgagctgctccacaaagtggttgatctgctcaagaagcaaggtctgctgctgtacgaagacatccgtgagagcacgttcgtggaggggcaactgccaagtcctaaacctgacgccctggacaaccatcagaagtgcttcgccattctcaagctgtaccgtccgaaggtggataacagtgcggttgggacgagtaagaaaagtgacatggctgaggttaaggattggaaagcggttcgtgtggatctggtgatgacgccattcgagcagttcgcctatgcgctgctcggttggacgggcagcggccaatttcgtcgcgatctgcgtcgctatgcggaagaagagcgcgacatgctgctcgacaaccatcgtctctacgacctgaaaaagggcatctttctgagtgcgggcagcgaagaagagattttcggtcatctgggtctggattatctggagccgtgggaacgcaacgcg

SEQ ID NO: 4206 - protein, 394 aa, synthetic construct
  REGION 1..394: note = Variant of terminal deoxynucleotidyl transferase
MHHHHHHGGSGHPEGNTPEKEVPSVIARHVSPYACQRKTTLNNYNKKFTDALEIMAENYKFKENLQACLEAKRAASVLKSLPFEVTSMKDIQGLPCITDDVRDVIEEIIEEGESSRVKEILNDERYKAFKQFTSVFGVGVKTSEKWYRMGLRTVEEAKASKSLKLSKMQKAGFLYYEDLASGVSKEEADAVTLIVKETVRTVSPDAEVTIAGGFRRGKPMGHDVDLLITIPGRPEDDELLHKVVDLLKKQGLLLYEDIRESTFVEGQLPSPKPDALDNHQKCFAILKLYRPKVDNSAVGTSKKSDMAEVKDWKAVRVDLVMTPFEQFAYALLGWTGSGQFRRDLRRYAEEERDMLLDNHRLYDLKKGIFLSAGSEEEIFGHLGLDYLEPWERNA

SEQ ID NO: 4207 - DNA, 1182 bp, synthetic construct
  misc_feature 1..1182: note = Variant of terminal deoxynucleotidyl transferase
  source 1..1182: mol_type = other DNA
atgcatcaccaccatcatcatgggggttctggtcatccggaaggtaataccccggagaaggaggtgccgagcgttatcgcccgtcatgttagtcagtacgcgtgccagcgcaagaccacgctgaataactacaacaaaaagttcaccgacgcgctggagatcatggccgagaactacaaatttaaagagaacctgcaggcgtgtctggaagccaagcgcgccgcgagtgtcctgaaaagcctgccgttcgaggttaccagcatgaaagacatccaaggtctgccgtgcattaccgacgacgtacgtgacgtgatccgtgagatcatcgaagtaggcgagagcagccgtgttaaagaaatcctcaatgacgagcgctacaaggcctttaagcagttcaccagcgtgttcggtgtgggcgtgaaaacctcggaaaagtggtaccgtatgggcctccgtacggttgaagaagcaaaggccagtaagagtctgaagctgagcaagatgcagaaggcgggcttcctgtattacgaggatctggcgagcggtgttagtaaagaagaagccgatgccgttacgctcatcgtgaaggaaacggtggctcgcgttagtccggatgcgctggtgaccatcgccggcggtttccgccgtggcaaacctatgggccacgacgttgacctgctgatcacgattccgggccgtcctgaggatgacgagctgctccacaaagtggttgatctgctcaagaagcaaggtctgctgctgtacgaagacatccgtgagagcacgttcgtggaggggcaaattccaagtcctaaaatcgacgccctggacaactttcagaagtgcttcgccattctcaagctgtaccgtccgaaggtggataacagtgcggttgggacgagtaagaaaagtgacatggctgaggttaaggattggaaagcggttcgtgtggatctggtgatcacgccattcgagcagttcgcctatgcgctgctcggttggacgggcagcggccaatttcgtcgcgatctgcgtcgctatgcggaggaagagcgcgacatgctgctcgacaaccatcgtctctacgacctgaaaaagggccaatttctgagtgcgggcagcgaagaagagattttcggtcatctgggtctggattatctggagccgtgggaacgcaacgcg

SEQ ID NO: 4208 - protein, 394 aa, synthetic construct
  REGION 1..394: note = Variant of terminal deoxynucleotidyl transferase
MHHHHHHGGSGHPEGNTPEKEVPSVIARHVSQYACQRKTTLNNYNKKFTDALEIMAENYKFKENLQACLEAKRAASVLKSLPFEVTSMKDIQGLPCITDDVRDVIREIIEVGESSRVKEILNDERYKAFKQFTSVFGVGVKTSEKWYRMGLRTVEEAKASKSLKLSKMQKAGFLYYEDLASGVSKEEADAVTLIVKETVARVSPDALVTIAGGFRRGKPMGHDVDLLITIPGRPEDDELLHKVVDLLKKQGLLLYEDIRESTFVEGQIPSPKIDALDNFQKCFAILKLYRPKVDNSAVGTSKKSDMAEVKDWKAVRVDLVITPFEQFAYALLGWTGSGQFRRDLRRYAEEERDMLLDNHRLYDLKKGQFLSAGSEEEIFGHLGLDYLEPWERNA

SEQ ID NO: 4209 - DNA, 1182 bp, synthetic construct
  misc_feature 1..1182: note = Variant of terminal deoxynucleotidyl transferase
  source 1..1182: mol_type = other DNA
atgcatcaccaccatcatcatgggggttctggtcatccggaaggtaataccccggagaaggaggtgccgagcgttatcgcccgtcatgttagtccatacgcgtgccagcgcaagaccacgctgaataactacaacaaaaagttcaccgacgcgctggagatcatggccgagaactacaaatttaaagagaacctgcaggcgtgtctggaagccaagcgcgccgcgagtgtcctgaaaagcctgccgttcgaggttaccagcatgaaagacatccaaggtctgccgtgcattaccgacgacgtacgtgacgtgatcgaggagatcatcgaagagggcgagagcagccgtgttaaagaaatcctcaatgacgagcgctacaaggcctttaagcagttcaccagcgtgttcggtgtgggcgtgaaaacctcggaaaagtggtaccgtatgggcctccgtacggttgaagaagcaaaggccagtaagagtctgaagctgagcaagatgcagaaggcgggcttcctgtattacgaggatctggcgagcggtgttagtaaagaagaagccgatgccgttacgctcatcgtgaaggaaacggtgcgtactgttagtccggatgcggaggtgaccattgccggcggtttccgccgtggcaaacctatgggccacgacgttgacctgctgatcacgattccgggccgtcctgaagatgacgagctgctccacaaagtggttgatctgctcaagaagcaaggtctgctgctgtacgaagacatccgtgagagcacgttcgtggaggggcaactgccaagtcctaaaatcgacgccctggacaactttcagaagtgcttcgccattctcaagctgtaccgtccgaaggtggataacagtgcggttgggacgagtaagaaaagtgacatggctgaggttaaggattggaaagcggttcgtgtggatctggtgatcacgccattcgagcagttcgcctatgcgctgctcggttggacgggcagcggccaatttcgtcgcgatacgcgtcgctatgcggaggaagagcgcgacatgctgctcgacaaccatcgtctctacgacctgaaaaagggcatctttctgagtgcgggcagcgaagaagagattttcggtcatctgggtctggattatctggagccgtgggaacgcaacgcg

SEQ ID NO: 4210 - protein, 394 aa, synthetic construct
  REGION 1..394: note = Variant of terminal deoxynucleotidyl transferase
MHHHHHHGGSGHPEGNTPEKEVPSVIARHVSPYACQRKTTLNNYNKKFTDALEIMAENYKFKENLQACLEAKRAASVLKSLPFEVTSMKDIQGLPCITDDVRDVIEEIIEEGESSRVKEILNDERYKAFKQFTSVFGVGVKTSEKWYRMGLRTVEEAKASKSLKLSKMQKAGFLYYEDLASGVSKEEADAVTLIVKETVRTVSPDAEVTIAGGFRRGKPMGHDVDLLITIPGRPEDDELLHKVVDLLKKQGLLLYEDIRESTFVEGQLPSPKIDALDNFQKCFAILKLYRPKVDNSAVGTSKKSDMAEVKDWKAVRVDLVITPFEQFAYALLGWTGSGQFRRDTRRYAEEERDMLLDNHRLYDLKKGIFLSAGSEEEIFGHLGLDYLEPWERNA

SEQ ID NO: 4211 - DNA, 1182 bp, synthetic construct
  misc_feature 1..1182: note = Variant of terminal deoxynucleotidyl transferase
  source 1..1182: mol_type = other DNA
atgcatcaccaccatcatcatgggggttctggtcatccggaaggtaataccccggagaaggaggtgccgagcgttatcgcccgtcatgttagtcagtacgcgtgccagcgcaagaccacgctgaataactacaacaaaaagttcaccgacgcgctggagatcatggccgagaactacaaatttaaagagaacctgcaggcgtgtctggaagccaagcgcgccgcgagtgtcctgaaaagcctgccgttcgaggttaccagcatgaaagacatccaaggtctgccgtgcattaccgacgacgtacgtgacgtgatccgtgagatcatcgaagtaggcgagagcagccgtgttaaagaaatcctcaatgacgagcgctacaaggcctttaagcagttcaccagcgtgttcggtgtgggcgtgaaaacctcggaaaagtggtaccgtatgggcctccgtacggttgaagaagcaaaggccagtaagagtctgaagctgagcaagatgcagaaggcgggcttcctgtattacgaggatctggcgagcggtgttagtaaagaagaagccgatgccgttacgctcatcgtgaaggaaacggtggctctggttagtccggatgcgctggtgaccatcgccggcggtttccgccgtggcaaacctatgggccacgacgttgacctgctgatcacgattccgggccgtcctgaagatgacgagctgctccacaaagtggttgatctgctcaagaagcaaggtctgctgctgtacgaagacatccgtgagagcacgttcgtggaggggcaaattccaagtcctaaaatcgacgccctggacaactttcagaagtgcttcgccattctcaagctgtaccgtccgaaggtggataacagtgcggttgggacgagtaagaaaagtgacatggctgaggttaaggattggaaagcggttcgtgtggatctggtgatcacgccattcgagcagttcgcctatgcgctgctcggttggacgggcagcggccaatttcgtcgcgatctgcgtcgctatgcggaggaagagcgcgacatgctgctcgacaaccatcgtctctacgacctgaaaaagggccaatttctgagtgcgggcagcgaagaagagattttcggtcatctgggtctggattatctggagccgtgggaacgcaacgcg

SEQ ID NO: 4212 - protein, 394 aa, synthetic construct
  REGION 1..394: note = Variant of terminal deoxynucleotidyl transferase
MHHHHHHGGSGHPEGNTPEKEVPSVIARHVSQYACQRKTTLNNYNKKFTDALEIMAENYKFKENLQACLEAKRAASVLKSLPFEVTSMKDIQGLPCITDDVRDVIREIIEVGESSRVKEILNDERYKAFKQFTSVFGVGVKTSEKWYRMGLRTVEEAKASKSLKLSKMQKAGFLYYEDLASGVSKEEADAVTLIVKETVALVSPDALVTIAGGFRRGKPMGHDVDLLITIPGRPEDDELLHKVVDLLKKQGLLLYEDIRESTFVEGQIPSPKIDALDNFQKCFAILKLYRPKVDNSAVGTSKKSDMAEVKDWKAVRVDLVITPFEQFAYALLGWTGSGQFRRDLRRYAEEERDMLLDNHRLYDLKKGQFLSAGSEEEIFGHLGLDYLEPWERNA

SEQ ID NO: 4213 - DNA, 1182 bp, synthetic construct
  misc_feature 1..1182: note = Variant of terminal deoxynucleotidyl transferase
  source 1..1182: mol_type = other DNA
atgcatcaccaccatcatcatgggggttctggtcatccggaaggtaataccccggagaaggaggtgccgagcgttatcgcccgtcatgttagtccatacgcgtgccagcgcaagaccacgctgaataactacaacaaaaagttcaccgacgcgctggagatcatggccgagaactacaaatttaaagagaacctgcaggcgtgtctggaagccaagcgcgccgcgagtgtcctgaaaagcctgccgttcgaggttaccagcatgaaagacatccaaggtctgccgtgcattaccgacgacgtacgtgacgtgatcgaggagatcatcgaagagggcgagagcagccgtgttaaagaaatcctcaatgacgagcgctacaaggcctttaagcagttcaccagcgtgttcggtgtgggcgtgaaaacctcggaaaagtggtaccgtatgggcctccgtacggttgaagaagcaaaggccagtaagagtctgaagctgagcaagatgcagaaggcgggcttcctgtattacgaggatctggcgagcggtgttagtaaagaagaagccgatgccgttacgctcatcgtgaaggaaacggtgcgtactgttagtccggatgcggaggtgaccattgccggcggtttccgccgtggcaaacctatgggccacgacgttgacctgctgatcacgattccgggccgtcctgaagatgacgagctgctccacaaagtggttgatctgctcaagaagcaaggtctgctgctgtacgaagacatccgtgagagcacgttcgtggaggggcaactgccaagtcctaaaattgacgccctggacaaccatcagaagtgcttcgccattctcaagctgtaccgtccgaaggtggataacagtgcggttgggacgagtaagaaaagtgacatggctgaggttaaggattggaaagcggttcgtgtggatctggtgatcacgccattcgagcagttcgcctatgcgctgctcggttggacgggcagcggccaatttcgtcgcgatctgcgtcgctatgcggaggaagagcgcgacatgctgctcgacaaccatcgtctctacgacctgaaaaagggcatctttctgagtgcgggcagcgaagaagagattttcggtcatctgggtctggattatctggagccgtgggaacgcaacgcg

SEQ ID NO: 4214 - protein, 394 aa, synthetic construct
  REGION 1..394: note = Variant of terminal deoxynucleotidyl transferase
MHHHHHHGGSGHPEGNTPEKEVPSVIARHVSPYACQRKTTLNNYNKKFTDALEIMAENYKFKENLQACLEAKRAASVLKSLPFEVTSMKDIQGLPCITDDVRDVIEEIIEEGESSRVKEILNDERYKAFKQFTSVFGVGVKTSEKWYRMGLRTVEEAKASKSLKLSKMQKAGFLYYEDLASGVSKEEADAVTLIVKETVRTVSPDAEVTIAGGFRRGKPMGHDVDLLITIPGRPEDDELLHKVVDLLKKQGLLLYEDIRESTFVEGQLPSPKIDALDNHQKCFAILKLYRPKVDNSAVGTSKKSDMAEVKDWKAVRVDLVITPFEQFAYALLGWTGSGQFRRDLRRYAEEERDMLLDNHRLYDLKKGIFLSAGSEEEIFGHLGLDYLEPWERNA

SEQ ID NO: 4215 - DNA, 1182 bp, synthetic construct
  misc_feature 1..1182: note = Variant of terminal deoxynucleotidyl transferase
  source 1..1182: mol_type = other DNA
atgcatcaccaccatcatcatgggggttctggtcatccggaaggtaataccccggagaaggaggtgccgagcgttatcgcccgtcatgttagtcagtacgcgtgccagcgcaagaccacgctgaataactacaacaaaaagttcaccgacgcgctggagatcatggccgagaactacaaatttaaagagaacctgcaggcgtgtctggaagccaagcgcgccgcgagtgtcctgaaaagcctgccgttcgaggttaccagcatgaaagacatccaaggtctgccgtgcattaccgacgacgtacgtgacgtgatcgaagagatcatcgaagagggcgagagcagccgtgttaaagaaatcctcaatgacgagcgctacaaggcctttaagcagttcaccagcgtgttcggtgtgggcgtgaaaacctcggaaaagtggtaccgtatgggcctccgtacggttgaagaagcaaaggccagtaagagtctgaagctgagcaagatgcagaaggcgggcttcctgtattacgaggatctggcgagcggtgttagtaaagaagaagccgatgccgttacgctcatcgtgaaggaaacggtggctactgttagtccggatgcgctggtgaccatcgccggcggtttccgccgtggcaaacctatgggccacgacgttgacctgctgatcacgattccgggccgtcctgaagatgacgagctgctccacaaagtggttgatctgctcaagaagcaaggtctgctgctgtacgaagacatccgtgagagcacgttcgtggaggggcaactgccaaatcctaaacctgacgccctggacaaccatcagaagtgcttcgccattctcaagctgtaccgtccgaaggtggataacagtgcggttgggacgagtaagaaaagtgacatggctgaggttaaggattggaaagcggttcgtgtggatctggtgatcacgccattcgagcagttcgcctatgcgctgctcggttggacgggcagcggccaatttcgtcgcgatctgcgtcgctatgcggaggaagagcgcgacatgctgctcgacaaccatcgtctctacgacctgaaaaagggcatctttctgagtgcggacagcgaagaagagattttcggtcatctgggtctggattatctggagccgtgggaacgcaacgcg

SEQ ID NO: 4216 - protein, 394 aa, synthetic construct
  REGION 1..394: note = Variant of terminal deoxynucleotidyl transferase
MHHHHHHGGSGHPEGNTPEKEVPSVIARHVSQYACQRKTTLNNYNKKFTDALEIMAENYKFKENLQACLEAKRAASVLKSLPFEVTSMKDIQGLPCITDDVRDVIEEIIEEGESSRVKEILNDERYKAFKQFTSVFGVGVKTSEKWYRMGLRTVEEAKASKSLKLSKMQKAGFLYYEDLASGVSKEEADAVTLIVKETVATVSPDALVTIAGGFRRGKPMGHDVDLLITIPGRPEDDELLHKVVDLLKKQGLLLYEDIRESTFVEGQLPNPKPDALDNHQKCFAILKLYRPKVDNSAVGTSKKSDMAEVKDWKAVRVDLVITPFEQFAYALLGWTGSGQFRRDLRRYAEEERDMLLDNHRLYDLKKGIFLSADSEEEIFGHLGLDYLEPWERNA

SEQ ID NO: 4217 - DNA, 1182 bp, synthetic construct
  misc_feature 1..1182: note = Variant of terminal deoxynucleotidyl transferase
  source 1..1182: mol_type = other DNA
atgcatcaccaccatcatcatgggggttctggtcatccggaaggtaataccccggagaaggaggtgccgagcgttatcgcccgtcatgttagtccatacgcgtgccagcgcaagaccacgctgaataactacaacaaaaagttcaccgacgcgctggagatcatggccgagaactacaaatttaaagagaacctgcaggcgtgtctggaagccaagcgcgccgcgagtgtcctgaaaagcctgccgttcgaggttaccagcatgaaagacatccaaggtctgccgtgcattaccgacgacgtacgtgacgtgatcgaggagatcatcgaagagggcgagagcagccgtgttaaagaaatcctcaatgacgagcgctacaaggcctttaagcagttcaccagcgtgttcggtgtgggcgtgaaaacctcggaaaagtggtaccgtatgggcctccgtacggttgaagaagcaaaggccagtaagagtctgaagctgagcaagatgcagaaggcgggcttcctgtattacgaggatctggcgagcggtgttagtaaagaagaagccgatgccgttacgctcatcgtgaaggaaacggtgcgtactgttagtccggatgcgctggtgaccatcgccggcggtttccgccgtggcaaacctatgggccacgacgttgacctgctgatcacgattccgggccgtcctactgatgacgagctgctccacaaagtggttgatctgctcaagaagcaaggtctgctgctgtacgaagacatccgtgagagcacgttcgtggaggggcaactgccaagtcctcgtcctgacgccctggacaaccatcagaagtgcttcgccattctcaagctgtaccgtccgaaggtggataacagtgcggttgggacgagtaagaaaagtgacatggctgaggttaaggattggaaagcggttcgtgtggatctggtgatcacgccattcgagcagttcgcctatgcgctgctcggttggacgggcagcggcatgtttcgtcgcgatctgcgtcgctatgcggaggaagagcgcgacatgctgctcgacaaccatcgtctctacgacctgaaaaagggcatctttctgagtgcggacagcgaagaagagattttcggtcatctgggtctggattatctggagccgtgggaacgcaacgcg

SEQ ID NO: 4218 - protein, 394 aa, synthetic construct
  REGION 1..394: note = Variant of terminal deoxynucleotidyl transferase
MHHHHHHGGSGHPEGNTPEKEVPSVIARHVSPYACQRKTTLNNYNKKFTDALEIMAENYKFKENLQACLEAKRAASVLKSLPFEVTSMKDIQGLPCITDDVRDVIEEIIEEGESSRVKEILNDERYKAFKQFTSVFGVGVKTSEKWYRMGLRTVEEAKASKSLKLSKMQKAGFLYYEDLASGVSKEEADAVTLIVKETVRTVSPDALVTIAGGFRRGKPMGHDVDLLITIPGRPTDDELLHKVVDLLKKQGLLLYEDIRESTFVEGQLPSPRPDALDNHQKCFAILKLYRPKVDNSAVGTSKKSDMAEVKDWKAVRVDLVITPFEQFAYALLGWTGSGMFRRDLRRYAEEERDMLLDNHRLYDLKKGIFLSADSEEEIFGHLGLDYLEPWERNA

SEQ ID NO: 4219 - DNA, 1182 bp, synthetic construct
  misc_feature 1..1182: note = Variant of terminal deoxynucleotidyl transferase
  source 1..1182: mol_type = other DNA
atgcatcaccaccatcatcatgggggttctggtcatccggaaggtaataccccggagaaggaggtgccgagcgttatcgcccgtcatgttagtccatacgcgtgccagcgcaagaccacgctgaataactacaacaaaaagttcaccgacgcgctggagatcatggccgagaactacaaatttaaagagaacctgcaggcgtgtctggaagccaagcgcgccgcgagtgtcctgaaaagcctgccgttcgaggttaccagcatgaaagacatccaaggtctgccgtgcattaccgacgacgtacgtgacgtgatcgaggagatcatcgaagtgggcgagagcagccgtgttaaagaaatcctcaatgacgagcgctacaaggcctttaagcagttcaccagcgtgttcggtgtgggcgtgaaaacctcggaaaagtggtaccgtatgggcctccgtacggttgaagaagcaaaggccagtaagagtctgaagctgagcaagatgcagaaggcgggcttcctgtattacgaggatctggcgagcggtgttagtaaagaagaagccgatgccgttacgctcatcgtgaaggaaacggtgcgtactgttagtccggatgcgctggtgaccatcgccggcggtttccgccgtggcaaacctatgggccacgacgttgacctgctgatcacgattccgggccgtcctactgatgacgagctgctccacaaagtggttgatctgctcaagaagcaaggtctgctgctgtacgaagacatccgtgagagcacgttcgtggaggggcaactgccaagtcctaaacctgacgccctggacaaccatcagaagtgcttcgccattctcaagctgtaccgtccgaaggtggataacagtgcggttgggacgagtaagaaaagtgacatggctgaggttaaggattggaaagcggttcgtgtggatctggtgatcacgccattcgagcagttcgcctatgcgctgctcggttggacgggcagcggcatgtttcgtcgcgatctgcgtcgctatgcggaggaagagcgcgacatgctgctcgacaaccatcgtctctacgacctgaaaaagggcatctttctgagtgcggacagcgaagaagagattttcggtcatctgggtctggattatctggagccgtgggaacgcaacgcg

SEQ ID NO: 4220 - protein, 394 aa, synthetic construct
  REGION 1..394: note = Variant of terminal deoxynucleotidyl transferase
MHHHHHHGGSGHPEGNTPEKEVPSVIARHVSPYACQRKTTLNNYNKKFTDALEIMAENYKFKENLQACLEAKRAASVLKSLPFEVTSMKDIQGLPCITDDVRDVIEEIIEVGESSRVKEILNDERYKAFKQFTSVFGVGVKTSEKWYRMGLRTVEEAKASKSLKLSKMQKAGFLYYEDLASGVSKEEADAVTLIVKETVRTVSPDALVTIAGGFRRGKPMGHDVDLLITIPGRPTDDELLHKVVDLLKKQGLLLYEDIRESTFVEGQLPSPKPDALDNHQKCFAILKLYRPKVDNSAVGTSKKSDMAEVKDWKAVRVDLVITPFEQFAYALLGWTGSGMFRRDLRRYAEEERDMLLDNHRLYDLKKGIFLSADSEEEIFGHLGLDYLEPWERNA

SEQ ID NO: 4221 - DNA, 1182 bp, synthetic construct
  misc_feature 1..1182: note = Variant of terminal deoxynucleotidyl transferase
  source 1..1182: mol_type = other DNA
atgcatcaccaccatcatcatgggggttctggtcatccggaaggtaataccccggagaaggaggtgccgagcgttatcgcccgtcatgttagtcagtacgcgtgccagcgcaagaccacgctgaataactacaacaaaaagttcaccgacgcgctggagatcatggccgagaactacaaatttaaagagaacctgcaggcgtgcctggaagccaagcgcgccgcgagtgtcctgaaaagcctgccgttcgaggttaccagcatgaaagacatccaaggtctgccgtgcattaccgacgacgtacgtgacgtgatccgcgagatcatcgaagagggcgagagcagccgtgttaaagaaatcctcaatgacgagcgctacaaggcctttaagcagttcaccagcgtgttcggtgtgggcgtgaaaacctcggaaaagtggtaccgtatgggcctccgtacggttgaagaagcaaaggccagtaagagtctgaagctgagcaagatgcagaaggcgggcttcctgtattacgaggatctggcgagcggtgttagtaaagaagaagccgatgccgttacgctcatcgtgaaggaaacggtggctactgttagtccggatgcgctggtgaccatcgccggcggtttccgccgtggcaaacctatgggccacgacgttgacctgctgatcacgattccgggccgtcctgaagatgacgagctgctccacaaagtggttgatctgctcaagaagcaaggtctgctgctgtacgaagacatccgtgagagcacgttcgtggaggggcaactgccaagtcctaaacctgacgccctggacaaccatcagaagtgcttcgccattctcaagctgtaccgtccgaaggtggataacagtgcggttgggacgagtaagaaaagtgacatggctgaggttaaggattggaaagcggttcgtgtggatctggtggttgcgccattcgagcagttcgcctatgcgctgctcggttggacgggcagcggccaatttcgtcgcgatctgcgtcgctatgcggaggaagagcgcgacatgctgctcgacaaccatcgtctctacgacctgaaaaagggcatctttctgagtgcggacagcgaagaagagattttcggtcatctggacctggattatctggagccgtgggaacgcaacgcg

SEQ ID NO: 4222 - protein, 394 aa, synthetic construct
  REGION 1..394: note = Variant of terminal deoxynucleotidyl transferase
MHHHHHHGGSGHPEGNTPEKEVPSVIARHVSQYACQRKTTLNNYNKKFTDALEIMAENYKFKENLQACLEAKRAASVLKSLPFEVTSMKDIQGLPCITDDVRDVIREIIEEGESSRVKEILNDERYKAFKQFTSVFGVGVKTSEKWYRMGLRTVEEAKASKSLKLSKMQKAGFLYYEDLASGVSKEEADAVTLIVKETVATVSPDALVTIAGGFRRGKPMGHDVDLLITIPGRPEDDELLHKVVDLLKKQGLLLYEDIRESTFVEGQLPSPKPDALDNHQKCFAILKLYRPKVDNSAVGTSKKSDMAEVKDWKAVRVDLVVAPFEQFAYALLGWTGSGQFRRDLRRYAEEERDMLLDNHRLYDLKKGIFLSADSEEEIFGHLDLDYLEPWERNA

SEQ ID NO: 4223 - DNA, 1182 bp, synthetic construct
  misc_feature 1..1182: note = Variant of terminal deoxynucleotidyl transferase
  source 1..1182: mol_type = other DNA
atgcatcaccaccatcatcatgggggttctggtcatccggaaggtaataccccggagaaggaggtgccgagcgttatcgcccgtcatgttagtcaatacgcgtgccagcgcaagaccacgctgaataactacaacaaaaagttcaccgacgcgctggagatcatggccgagaactacaaatttaaagagaacctgcaggcgtgtctggaagccaagcgcgccgcgagtgtcctgaaaagcctgccgttcgaggttaccagcatgaaagacatccaaggtctgccgtgcattaccgacgacgtacgtgacgtgatcgaggagatcatcgaagagggcgagagcagccgtgttaaagaaatcctcaatgacgagcgctacaaggcctttaagcagttcaccagcgtgttcggtgtgggcgtgaaaacctcggaaaagtggtaccgtatgggcctccgtacggttgaagaagcaaaggccagtaagagtctgaagctgagcaagatgcagaaggcgggcttcctgtattacgaggatctggcgagcggtgttagtaaagaagaagccgatgccgttacgctcatcgtgaaggaaacggtgcgtactgttagtccggatgcgctggtgaccatcgccggcggtttccgccgtggcaaacctatgggccacgacgttgacctgctgatcacgattccgggccgtcctactgatgacgagctgctccacaaagtggttgatctgctcaagaagcaaggtctgctgctgtacgaagacatccgtgagagcacgttcgtggaggggcaactgccaagtcctaaacctgacgccctggacaaccatcagaagtgcttcgccattctcaagctgtaccgtccgaaggtggataacagtgcggttgggacgagtaagaaaagtgacatggctgaggttaaggattggaaagcggttcgtgtggatctggtgatcacgccattcgagcagttcgcctatgcgctgctcggttggacgggcagcggcatgtttcgtcgcgatctgcgtcgctatgcggaggaagagcgcgacatgctgctcgacaaccatcgtctctacgacctgaaaaagggcatctttctgagtgcggacagcgaagaagagattttcggtcatctgggtctggattggctggagccgtgggaacgcaacgcg

SEQ ID NO: 4224 - protein, 394 aa, synthetic construct
  REGION 1..394: note = Variant of terminal deoxynucleotidyl transferase
MHHHHHHGGSGHPEGNTPEKEVPSVIARHVSQYACQRKTTLNNYNKKFTDALEIMAENYKFKENLQACLEAKRAASVLKSLPFEVTSMKDIQGLPCITDDVRDVIEEIIEEGESSRVKEILNDERYKAFKQFTSVFGVGVKTSEKWYRMGLRTVEEAKASKSLKLSKMQKAGFLYYEDLASGVSKEEADAVTLIVKETVRTVSPDALVTIAGGFRRGKPMGHDVDLLITIPGRPTDDELLHKVVDLLKKQGLLLYEDIRESTFVEGQLPSPKPDALDNHQKCFAILKLYRPKVDNSAVGTSKKSDMAEVKDWKAVRVDLVITPFEQFAYALLGWTGSGMFRRDLRRYAEEERDMLLDNHRLYDLKKGIFLSADSEEEIFGHLGLDWLEPWERNA

SEQ ID NO: 4225 - DNA, 1182 bp, synthetic construct
  misc_feature 1..1182: note = Variant of terminal deoxynucleotidyl transferase
  source 1..1182: mol_type = other DNA
atgcatcaccaccatcatcatgggggttctggtcatccggaaggtaataccccggagaaggaggtgccgagcgttatcgcccgtcatgttagtcagtacgcgtgccagcgcaagaccacgctgaataactacaacaaaaagttcaccgacgcgctggagatcatggccgagaactacaaatttaaagagaacctgcaggcgtgcctggaagccaagcgcgccgcgagtgtcctgaaaagcctgccgttcgaggttaccagcatgaaagacatccaaggtctgccgtgcattaccgacgacgtacgtgacgtgatcgaagagatcatcgaagagggcgagagcagccgtgttaaagaaatcctcaatgacgagcgctacaaggcctttaagcagttcaccagcgtgttcggtgtgggcgtgaaaacctcggaaaagtggtaccgtatgggcctccgtacggttgaagaagcaaaggccagtaagagtctgaagctgagcaagatgcagaaggcgggcttcctgtattacgaggatctggcgagcggtgttagtaaagaagaagccgatgccgttacgctcatcgtgaaggaaacggtgcgcactgttagtccggatgcgctggtgaccatcgccggcggtttccgccgtggcaaacctatgggccacgacgttgacctgctgatcacgattccgggccgtcctgaagatgacgagctgctccacaaagtggttgatctgctcaagaagcaaggtctgctgctgtacgaagacatccgtgagagcacgttcgtggaggggcaactgccaaatcctaaacctgacgccctggacaaccatcagaagtgcttcgccattctcaagctgtaccgtccgaaggtggataacagtgcggttgggacgagtaagaaaagtgacatggctgaggttaaggattggaaagcggttcgtgtggatctggtgattgcgccattcgagcagttcgcctatgcgctgctcggttggacgggcagcggccaatttcgtcgcgatactcgtcgctatgcggaggaagagcgcgacatgctgctcgacaaccatcgtctctacgacctgaaaaagggcatctttctgagtgcggacagcgaagaagagattttcggtcatctggacctggattatctggagccgtgggaacgcaacgcg

SEQ ID NO: 4226 - protein, 394 aa, synthetic construct
  REGION 1..394: note = Variant of terminal deoxynucleotidyl transferase
MHHHHHHGGSGHPEGNTPEKEVPSVIARHVSQYACQRKTTLNNYNKKFTDALEIMAENYKFKENLQACLEAKRAASVLKSLPFEVTSMKDIQGLPCITDDVRDVIEEIIEEGESSRVKEILNDERYKAFKQFTSVFGVGVKTSEKWYRMGLRTVEEAKASKSLKLSKMQKAGFLYYEDLASGVSKEEADAVTLIVKETVRTVSPDALVTIAGGFRRGKPMGHDVDLLITIPGRPEDDELLHKVVDLLKKQGLLLYEDIRESTFVEGQLPNPKPDALDNHQKCFAILKLYRPKVDNSAVGTSKKSDMAEVKDWKAVRVDLVIAPFEQFAYALLGWTGSGQFRRDTRRYAEEERDMLLDNHRLYDLKKGIFLSADSEEEIFGHLDLDYLEPWERNA

SEQ ID NO: 4227 - DNA, 1182 bp, synthetic construct
  misc_feature 1..1182: note = Variant of terminal deoxynucleotidyl transferase
  source 1..1182: mol_type = other DNA
atgcatcaccaccatcatcatgggggttctggtcatccggaaggtaataccccggagaaggaggtgccgagcgttatcgcccgtcatgttagtcaatacgcgtgccagcgcaagaccacgctgaataactacaacaaaaagttcaccgacgcgctggagatcatggccgagaactacaaatttaaagagaacctgcaggcgtgtctggaagccaagcgcgccgcgagtgtcctgaaaagcctgccgttcgaggttaccagcatgaaagacatccaaggtctgccgtgcattaccgacgacgtacgtgacgtgatcgaggagatcatcgaagagggcgagagcagccgtgttaaagaaatcctcaatgacgagcgctacaaggcctttaagcagttcaccagcgtgttcggtgtgggcgtgaaaacctcggaaaagtggtaccgtatgggcctccgtacggttgaagaagcaaaggccagtaagagtctgaagctgagcaagatgcagaaggcgggcttcctgtattacgaggatctggcgagcggtgttagtaaagaagaagccgatgccgttacgctcatcgtgaaggaaacggtgcgtactgttagtccggatgcgctggtgaccatcgccggcggtttccgccgtggcaaacctatgggccacgacgttgacctgctgatcacgattccgggccgtcctactgatgacgagctgctccacaaagtggttgatctgctcaagaagcaaggtctgctgctgtacgaagacatccgtgagagcacgttcgtggaggggcaactgccaagtcctaagcctgacgccctggacaaccatcagaagtgcttcgccattctcaagctgtaccgtccgaaggtggataacagtgcggttgggacgagtaagaaaagtgacatggctgaggttaaggattggaaagcggttcgtgtggatctggtgatcacgccattcgagcagttcgcctatgcgctgctcggttggacgggcagcggcatgtttcgtcgcgatctgcgtcgctatgcggaggaagagcgcgacatgctgctcgacaaccatcgtctctacgacctgaaaaagggcatctttctgagtgcggacagcgaagaagagattttcggtcatctgggtctggattatctggagccgtgggaacgcaacgcg

SEQ ID NO: 4228 - protein, 394 aa, synthetic construct
  REGION 1..394: note = Variant of terminal deoxynucleotidyl transferase
MHHHHHHGGSGHPEGNTPEKEVPSVIARHVSQYACQRKTTLNNYNKKFTDALEIMAENYKFKENLQACLEAKRAASVLKSLPFEVTSMKDIQGLPCITDDVRDVIEEIIEEGESSRVKEILNDERYKAFKQFTSVFGVGVKTSEKWYRMGLRTVEEAKASKSLKLSKMQKAGFLYYEDLASGVSKEEADAVTLIVKETVRTVSPDALVTIAGGFRRGKPMGHDVDLLITIPGRPTDDELLHKVVDLLKKQGLLLYEDIRESTFVEGQLPSPKPDALDNHQKCFAILKLYRPKVDNSAVGTSKKSDMAEVKDWKAVRVDLVITPFEQFAYALLGWTGSGMFRRDLRRYAEEERDMLLDNHRLYDLKKGIFLSADSEEEIFGHLGLDYLEPWERNA

SEQ ID NO: 4229 - DNA, 1182 bp, synthetic construct
  misc_feature 1..1182: note = Variant of terminal deoxynucleotidyl transferase
  source 1..1182: mol_type = other DNA
atgcatcaccaccatcatcatgggggttctggtcatccggaaggtaataccccggagaaggaggtgccgagcgttatcgcccgtcatgttagtcagtacgcgtgccagcgcaagaccacgctgaataactacaacaaaaagttcaccgacgcgctggagatcatggccgagaactacaaatttaaagagaacctgcaggcgtgtctggaagccaagcgcgccgcgagtgtcctgaaaagcctgccgttcgaggttaccagcatgaaagacatccaaggtctgccgtgcattaccgacgacgtacgtgacgtgatcgaggagatcatcgaagagggcgagagcagccgtgttaaagaaatcctcaatgacgagcgctacaaggcctttaagcagttcaccagcgtgttcggtgtgggcgtgaaaacctcggaaaagtggtaccgtatgggcctccgtacggttgaagaagcaaaggccagtaagagtctgaagctgagcaagatgcagaaggcgggcttcctgtattacgaggatctggcgagcggtgttagtaaagaagaagccgatgccgttacgctcatcgtgaaggaaacggtgcgtactgttagtccggatgcgctggtgaccatcgccggcggtttccgccgtggcaaacctatgggccacgacgttgacctgctgatcacgattccgggccgtcctactgatgacgagctgctccacaaagtggttgatctgctcaagaagcaaggtctgctgctgtacgaagacatccgtgagagcacgttcgtggaggggcaactgccaagtcctcgtcctgacgccctggacaaccatcagaagtgcttcgccattctcaagctgtaccgtccgaaggtggataacagtgcggttgggacgagtaagaaaagtgacatggctgaggttaaggattggaaagcggttcgtgtggatctggtgatcacgccattcgagcagttcgcctatgcgctgctcggttggacgggcagcggcatgtttcgtcgcgatctgcgtcgctatgcggaggaagagcgcgacatgctgctcgacaaccatcgtctctacgacctgaaaaagggcatctttctgagtgcggacagcgaagaagagattttcggtcatctgggtctggattatctggagccgtgggaacgcaacgcg

SEQ ID NO: 4230 - protein, 394 aa, synthetic construct
  REGION 1..394: note = Variant of terminal deoxynucleotidyl transferase
MHHHHHHGGSGHPEGNTPEKEVPSVIARHVSQYACQRKTTLNNYNKKFTDALEIMAENYKFKENLQACLEAKRAASVLKSLPFEVTSMKDIQGLPCITDDVRDVIEEIIEEGESSRVKEILNDERYKAFKQFTSVFGVGVKTSEKWYRMGLRTVEEAKASKSLKLSKMQKAGFLYYEDLASGVSKEEADAVTLIVKETVRTVSPDALVTIAGGFRRGKPMGHDVDLLITIPGRPTDDELLHKVVDLLKKQGLLLYEDIRESTFVEGQLPSPRPDALDNHQKCFAILKLYRPKVDNSAVGTSKKSDMAEVKDWKAVRVDLVITPFEQFAYALLGWTGSGMFRRDLRRYAEEERDMLLDNHRLYDLKKGIFLSADSEEEIFGHLGLDYLEPWERNA

SEQ ID NO: 4231 - DNA, 1182 bp, synthetic construct
  misc_feature 1..1182: note = Variant of terminal deoxynucleotidyl transferase
  source 1..1182: mol_type = other DNA
atgcatcaccaccatcatcatgggggttctggtcatccggaaggtaataccccggagaaggaggtgccgagcgttatcgcccgtcatgttagtcagtacgcgtgccagcgcaagaccacgctgaataactacaacaaaaagttcaccgacgcgctggagatcatggccgagaactacaaatttaaagagaacctgcaggcgtgcctggaagccaagcgcgccgcgagtgtcctgaaaagcctgccgttcgaggttaccagcatgaaagacatccaaggtctgccgtgcattaccgacgacgtacgtgacgtgatcgaagagatcatcgaagagggcgagagcagccgtgttaaagaaatcctcaatgacgagcgctacaaggcctttaagcagttcaccagcgtgttcggtgtgggcgtgaaaacctcggaaaagtggtaccgtatgggcctccgtacggttgaagaagcaaaggccagtaagagtctgaagctgagcaagatgcagaaggcgggcttcctgtattacgaggatctggcgagcggtgttagtaaagaagaagccgatgccgttacgctcatcgtgaaggaaacggtggctactgttagtccggatgcgctggtgaccatcgccggcggtttccgccgtggcaaacctatgggccacgacgttgacctgctgatcacgattccgggccgtcctgaagatgacgagctgctccacaaagtggttgatctgctcaagaagcaaggtctgctgctgtacgaagacatccgtgagagcacgttcgtggaggggcaactgccaagtcctaaacctgacgccctggacaaccatcagaagtgcttcgccattctcaagctgtaccgtccgaaggtggataacagtgcggttgggacgagtaagaaaagtgacatggctgaggttaaggattggaaagcggttcgtgtggatctggtgatcacgccattcgagcagttcgcctatgcgctgctcggttggacgggcagcggccaatttcgtcgcgatactcgtcgctatgcggaggaagagcgcgacatgctgctcgacaaccatcgtctctacgacctgaaaaagggcatctttctgagtgcggacagcgaagaagagattttcggtcatctgggtctggattatctggagccgtgggaacgcaacgcg

SEQ ID NO: 4232 - protein, 394 aa, synthetic construct
  REGION 1..394: note = Variant of terminal deoxynucleotidyl transferase
MHHHHHHGGSGHPEGNTPEKEVPSVIARHVSQYACQRKTTLNNYNKKFTDALEIMAENYKFKENLQACLEAKRAASVLKSLPFEVTSMKDIQGLPCITDDVRDVIEEIIEEGESSRVKEILNDERYKAFKQFTSVFGVGVKTSEKWYRMGLRTVEEAKASKSLKLSKMQKAGFLYYEDLASGVSKEEADAVTLIVKETVATVSPDALVTIAGGFRRGKPMGHDVDLLITIPGRPEDDELLHKVVDLLKKQGLLLYEDIRESTFVEGQLPSPKPDALDNHQKCFAILKLYRPKVDNSAVGTSKKSDMAEVKDWKAVRVDLVITPFEQFAYALLGWTGSGQFRRDTRRYAEEERDMLLDNHRLYDLKKGIFLSADSEEEIFGHLGLDYLEPWERNA

SEQ ID NO: 4233 - DNA, 1182 bp, synthetic construct
  misc_feature 1..1182: note = Variant of terminal deoxynucleotidyl transferase
  source 1..1182: mol_type = other DNA
atgcatcaccaccatcatcatgggggttctggtcatccggaaggtaataccccggagaaggaggtgccgagcgttatcgcccgtcatgttagtccatacgcgtgccagcgcaagaccacgctgaataactacaacaaaaagttcaccgacgcgctggagatcatggccgagaactacaaatttaaagagaacctgcaggcgtgtctggaagccaagcgcgccgcgagtgtcctgaaaagcctgccgttcgaggttaccagcatgaaagacatccaaggtctgccgtgcattaccgacgacgtacgtgacgtgatcgaggagatcatcgaagagggcgagagcagccgtgttaaagaaatcctcaatgacgagcgctacaaggcctttaagcagttcaccagcgtgttcggtgtgggcgtgaaaacctcggaaaagtggtaccgtatgggcctccgtacggttgaagaagcaaaggccagtaagagtctgaagctgagcaagatgcagaaggcgggcttcctgtattacgaggatctggcgagcggtgttagtaaagaagaagccgatgccgttacgctcatcgtgaaggaaacggtgcgtactgttagtccggatgcgctggtgaccatcgccggcggtttccgccgtggcaaacctatgggccacgacgttgacctgctgatcacgattccgggccgtcctactgatgacgagctgctccacaaagtggttgatctgctcaagaagcaaggtctgctgctgtacgaagacatccgtgagagcacgttcgtggaggggcaactgccaagtcctaagcctgacgccctggacaaccatcagaagtgcttcgccattctcaagctgtaccgtccgaaggtggataacagtgcggttgggacgagtaagaaaagtgacatggctgaggttaaggattggaaagcggttcgtgtggatctggtgatcacgccattcgagcagttcgcctatgcgctgctcggttggacgggcagcggcatgtttcgtcgcgatctgcgtcgctatgcggaggaagagcgcgacatgctgctcgacaaccatcgtctctacgacctgaaaaagggcatctttctgagtgcggacagcgaagaagagattttcggtcatctgggtctggattggctggagccgtgggaacgcaacgcg

SEQ ID NO: 4234 - protein, 394 aa, synthetic construct
  REGION 1..394: note = Variant of terminal deoxynucleotidyl transferase
MHHHHHHGGSGHPEGNTPEKEVPSVIARHVSPYACQRKTTLNNYNKKFTDALEIMAENYKFKENLQACLEAKRAASVLKSLPFEVTSMKDIQGLPCITDDVRDVIEEIIEEGESSRVKEILNDERYKAFKQFTSVFGVGVKTSEKWYRMGLRTVEEAKASKSLKLSKMQKAGFLYYEDLASGVSKEEADAVTLIVKETVRTVSPDALVTIAGGFRRGKPMGHDVDLLITIPGRPTDDELLHKVVDLLKKQGLLLYEDIRESTFVEGQLPSPKPDALDNHQKCFAILKLYRPKVDNSAVGTSKKSDMAEVKDWKAVRVDLVITPFEQFAYALLGWTGSGMFRRDLRRYAEEERDMLLDNHRLYDLKKGIFLSADSEEEIFGHLGLDWLEPWERNA

SEQ ID NO: 4235 - DNA, 1182 bp, synthetic construct
  misc_feature 1..1182: note = Variant of terminal deoxynucleotidyl transferase
  source 1..1182: mol_type = other DNA
atgcatcaccaccatcatcatgggggttctggtcatccggaaggtaataccccggagaaggaggtgccgagcgttatcgcccgtcatgttagtcagtacgcgtgccagcgcaagaccacgctgaataactacaacaaaaagttcaccgacgcgctggagatcatggccgagaactacaaatttaaagagaacctgcaggcgtgcctggaagccaagcgcgccgcgagtgtcctgaaaagcctgccgttcgaggttaccagcatgaaagacatccaaggtctgccgtgcattaccgacgacgtacgtgacgtgatcgaagagatcatcgaagagggcgagagcagccgtgttaaagaaatcctcaatgacgagcgctacaaggcctttaagcagttcaccagcgtgttcggtgtgggcgtgaaaacctcggaaaagtggtaccgtatgggcctccgtacggttgaagaagcaaaggccagtaagagtctgaagctgagcaagatgcagaaggcgggcttcctgtattacgaggatctggcgagcggtgttagtaaagaagaagccgatgccgttacgctcatcgtgaaggaaacggtgcgcactgttagtccggatgcgctggtgaccatcgccggcggtttccgccgtggcaaacctatgggccacgacgttgacctgctgatcacgattccgggccgtcctgaagatgacgagctgctccacaaagtggttgatctgctcaagaagcaaggtctgctgctgtacgaagacatccgtgagagcacgttcgtggaggggcaactgccaagtcctaaacctgacgccctggacaaccatcagaagtgcttcgccattctcaagctgtaccgtccgaaggtggataacagtgcggttgggacgagtaagaaaagtgacatggctgaggttaaggattggaaagcggttcgtgtggatctggtgatcacgccattcgagcagttcgcctatgcgctgctcggttggacgggcagcggccaatttcgtcgcgatactcgtcgctatgcggaggaagagcgcgacatgctgctcgacaaccatcgtctctacgacctgaaaaagggcatctttctgagtgcggacagcgaagaagagattttcggtcatctgggtctggattatctggagccgtgggaacgcaacgcg

SEQ ID NO: 4236 - protein, 394 aa, synthetic construct
  REGION 1..394: note = Variant of terminal deoxynucleotidyl transferase
MHHHHHHGGSGHPEGNTPEKEVPSVIARHVSQYACQRKTTLNNYNKKFTDALEIMAENYKFKENLQACLEAKRAASVLKSLPFEVTSMKDIQGLPCITDDVRDVIEEIIEEGESSRVKEILNDERYKAFKQFTSVFGVGVKTSEKWYRMGLRTVEEAKASKSLKLSKMQKAGFLYYEDLASGVSKEEADAVTLIVKETVRTVSPDALVTIAGGFRRGKPMGHDVDLLITIPGRPEDDELLHKVVDLLKKQGLLLYEDIRESTFVEGQLPSPKPDALDNHQKCFAILKLYRPKVDNSAVGTSKKSDMAEVKDWKAVRVDLVITPFEQFAYALLGWTGSGQFRRDTRRYAEEERDMLLDNHRLYDLKKGIFLSADSEEEIFGHLGLDYLEPWERNA

SEQ ID NO: 4237 - DNA, 1182 bp, synthetic construct
  misc_feature 1..1182: note = Variant of terminal deoxynucleotidyl transferase
  source 1..1182: mol_type = other DNA
atgcatcaccaccatcatcatgggggttctggtcatccggaaggtaataccccggagaaggaggtgccgagcgttatcgcccgtcatgttagtcaatacgcgtgccagcgcaagaccacgctgaataactacaacaaaaagttcaccgacgcgctggagatcatggccgagaactacaaatttaaagagaacctgcaggcgtgtctggaagccaagcgcgccgcgagtgtcctgaaaagcctgccgttcgaggttaccagcatgaaagacatccaaggtctgccgtgcattaccgacgacgtacgtgacgtgatcgaggagatcatcgaagagggcgagagcagccgtgttaaagaaatcctcaatgacgagcgctacaaggcctttaagcagttcaccagcgtgttcggtgtgggcgtgaaaacctcggaaaagtggtaccgtatgggcctccgtacggttgaagaagcaaaggccagtaagagtctgaagctgagcaagatgcagaaggcgggcttcctgtattacgaggatctggcgagcggtgttagtaaagaagaagccgatgccgttacgctcatcgtgaaggaaacggtgcgtactgttagtccggatgcgctggtgaccatcgccggcggtttccgccgtggcaaacctatgggccacgacgttgacctgctgatcacgattccgggccgtcctactgatgacgagctgctccacaaagtggttgatctgctcaagaagcaaggtctgctgctgtacgaagacatccgtgagagcacgttcgtggaggggcaactgccaagtggtaagcctgacgccctggacaaccatcagaagtgcttcgccattctcaagctgtaccgtccgaaggtggataacagtgcggttgggacgagtaagaaaagtgacatggctgaggttaaggattggaaagcggttcgtgtggatctggtgatcacgccattcgagcagttcgcctatgcgctgctcggttggacgggcagcggcatgtttcgtcgcgatctgcgtcgctatgcggaggaagagcgcgacatgctgctcgacaaccatcgtctctacgacctgaaaaagggcatctttctgagtgcggacagcgaagaagagattttcggtcatctgggtctggattggctggagccgtgggaacgcaacgcg

SEQ ID NO: 4238 - protein, 394 aa, synthetic construct
  REGION 1..394: note = Variant of terminal deoxynucleotidyl transferase
MHHHHHHGGSGHPEGNTPEKEVPSVIARHVSQYACQRKTTLNNYNKKFTDALEIMAENYKFKENLQACLEAKRAASVLKSLPFEVTSMKDIQGLPCITDDVRDVIEEIIEEGESSRVKEILNDERYKAFKQFTSVFGVGVKTSEKWYRMGLRTVEEAKASKSLKLSKMQKAGFLYYEDLASGVSKEEADAVTLIVKETVRTVSPDALVTIAGGFRRGKPMGHDVDLLITIPGRPTDDELLHKVVDLLKKQGLLLYEDIRESTFVEGQLPSGKPDALDNHQKCFAILKLYRPKVDNSAVGTSKKSDMAEVKDWKAVRVDLVITPFEQFAYALLGWTGSGMFRRDLRRYAEEERDMLLDNHRLYDLKKGIFLSADSEEEIFGHLGLDWLEPWERNA

SEQ ID NO: 4239 - DNA, 1182 bp, synthetic construct
  misc_feature 1..1182: note = Variant of terminal deoxynucleotidyl transferase
  source 1..1182: mol_type = other DNA
atgcatcaccaccatcatcatgggggttctggtcatccggaaggtaataccccggagaaggaggtgccgagcgttatcgcccgtcatgttagtcagtacgcgtgccagcgcaagaccacgctgaataactacaacaaaaagttcaccgacgcgctggagatcatggccgagaactacaaatttaaagagaacctgcaggcgtgcctggaagccaagcgcgccgcgagtgtcctgaaaagcctgccgttcgaggttaccagcatgaaagacatccaaggtctgccgtgcattaccgacgacgtacgtgacgtgatcgaagagatcatcgaagagggcgagagcagccgtgttaaagaaatcctcaatgacgagcgctacaaggcctttaagcagttcaccagcgtgttcggtgtgggcgtgaaaacctcggaaaagtggtaccgtatgggcctccgtacggttgaagaagcaaaggccagtaagagtctgaagctgagcaagatgcagaaggcgggcttcctgtattacgaggatctggcgagcggtgttagtaaagaagaagccgatgccgttacgctcatcgtgaaggaaacggtggctactgttagtccggatgcgctggtgaccatcgccggcggtttccgccgtggcaaacctatgggccacgacgttgacctgctgatcacgattccgggccgtcctgaagatgacgagctgctccacaaagtggttgatctgctcaagaagcaaggtctgctgctgtacgaagacatccgtgagagcacgttcgtggaggggcaactgccaagtcctaaacctgacgccctggacaaccatcagaagtgcttcgccattctcaagctgtaccgtccgaaggtggataacagtgcggttgggacgagtaagaaaagtgacatggctgaggttaaggattggaaagcggttcgtgtggatctggtgatcacgccattcgagcagttcgcctatgcgctgctcggttggacgggcagcggccaatttcgtcgcgatctgcgtcgctatgcggaggaagagcgcgacatgctgctcgacaaccatcgtctctacgacctgaaaaagggcatctttctgagtgcggacagcgaagaagagattttcggtcatctgggtctggattatctggagccgtgggaacgcaacgcg

SEQ ID NO: 4240 - protein, 394 aa, synthetic construct
  REGION 1..394: note = Variant of terminal deoxynucleotidyl transferase
MHHHHHHGGSGHPEGNTPEKEVPSVIARHVSQYACQRKTTLNNYNKKFTDALEIMAENYKFKENLQACLEAKRAASVLKSLPFEVTSMKDIQGLPCITDDVRDVIEEIIEEGESSRVKEILNDERYKAFKQFTSVFGVGVKTSEKWYRMGLRTVEEAKASKSLKLSKMQKAGFLYYEDLASGVSKEEADAVTLIVKETVATVSPDALVTIAGGFRRGKPMGHDVDLLITIPGRPEDDELLHKVVDLLKKQGLLLYEDIRESTFVEGQLPSPKPDALDNHQKCFAILKLYRPKVDNSAVGTSKKSDMAEVKDWKAVRVDLVITPFEQFAYALLGWTGSGQFRRDLRRYAEEERDMLLDNHRLYDLKKGIFLSADSEEEIFGHLGLDYLEPWERNA

SEQ ID NO: 4241 - DNA, 1182 bp, synthetic construct
  misc_feature 1..1182: note = Variant of terminal deoxynucleotidyl transferase
  source 1..1182: mol_type = other DNA
atgcatcaccaccatcatcatgggggttctggtcatccggaaggtaataccccggagaaggaggtgccgagcgttatcgcccgtcatgttagtcagtacgcgtgccagcgcaagaccacgctgaataactacaacaaaaagttcaccgacgcgctggagatcatggccgagaactacaaatttaaagagaacctgcaggcgtgtctggaagccaagcgcgccgcgagtgtcctgaaaagcctgccgttcgaggttaccagcatgaaagacatccaaggtctgccgtgcattaccgacgacgtacgtgacgtgatcgaggagatcatcgaagtgggcgagagcagccgtgttaaagaaatcctcaatgacgagcgctacaaggcctttaagcagttcaccagcgtgttcggtgtgggcgtgaaaacctcggaaaagtggtaccgtatgggcctccgtacggttgaagaagcaaaggccagtaagagtctgaagctgagcaagatgcagaaggcgggcttcctgtattacgaggatctggcgagcggtgttagtaaagaagaagccgatgccgttacgctcatcgtgaaggaaacggtgcgtactgttagtccggatgcgctggtgaccatcgccggcggtttccgccgtggcaaacctatgggccacgacgttgacctgctgatcacgattccgggccgtcctactgatgacgagctgctccacaaagtggttgatctgctcaagaagcaaggtctgctgctgtacgaagacatccgtgagagcacgttcgtggaggggcaactgccaagtcctaaacctgacgccctggacaaccatcagaagtgcttcgccattctcaagctgtaccgtccgaaggtggataacagtgcggttgggacgagtaagaaaagtgacatggctgaggttaaggattggaaagcggttcgtgtggatctggtgatcacgccattcgagcagttcgcctatgcgctgctcggttggacgggcagcggccaatttcgtcgcgatctgcgtcgctatgcggaggaagagcgcgacatgctgctcgacaaccatcgtctctacgacctgaaaaagggcatctttctgagtgcggacagcgaagaagagattttcggtcatctgggtctggattatctggagccgtgggaacgcaacgcg

SEQ ID NO: 4242 - protein, 394 aa, synthetic construct
  REGION 1..394: note = Variant of terminal deoxynucleotidyl transferase
MHHHHHHGGSGHPEGNTPEKEVPSVIARHVSQYACQRKTTLNNYNKKFTDALEIMAENYKFKENLQACLEAKRAASVLKSLPFEVTSMKDIQGLPCITDDVRDVIEEIIEVGESSRVKEILNDERYKAFKQFTSVFGVGVKTSEKWYRMGLRTVEEAKASKSLKLSKMQKAGFLYYEDLASGVSKEEADAVTLIVKETVRTVSPDALVTIAGGFRRGKPMGHDVDLLITIPGRPTDDELLHKVVDLLKKQGLLLYEDIRESTFVEGQLPSPKPDALDNHQKCFAILKLYRPKVDNSAVGTSKKSDMAEVKDWKAVRVDLVITPFEQFAYALLGWTGSGQFRRDLRRYAEEERDMLLDNHRLYDLKKGIFLSADSEEEIFGHLGLDYLEPWERNA

SEQ ID NO: 4243 - DNA, 1182 bp, synthetic construct
  misc_feature 1..1182: note = Variant of terminal deoxynucleotidyl transferase
  source 1..1182: mol_type = other DNA
atgcatcaccaccatcatcatgggggttctggtcatccggaaggtaataccccggagaaggaggtgccgagcgttatcgcccgtcatgttagtccatacgcgtgccagcgcaagaccacgctgaataactacaacaaaaagttcaccgacgcgctggagatcatggccgagaactacaaatttaaagagaacctgcaggcgtgtctggaagccaagcgcgccgcgagtgtcctgaaaagcctgccgttcgaggttaccagcatgaaagacatccaaggtctgccgtgcattaccgacgacgtacgtgacgtgatcgaggagatcatcgaagtgggcgagagcagccgtgttaaagaaatcctcaatgacgagcgctacaaggcctttaagcagttcaccagcgtgttcggtgtgggcgtgaaaacctcggaaaagtggtaccgtatgggcctccgtacggttgaagaagcaaaggccagtaagagtctgaagctgagcaagatgcagaaggcgggcttcctgtattacgaggatctggcgagcggtgttagtaaagaagaagccgatgccgttacgctcatcgtgaaggaaacggtgcgtactgttagtccggatgcgctggtgaccatcgccggcggtttccgccgtggcaaacctatgggccacgacgttgacctgctgatcacgattccgggccgtcctactgatgacgagctgctccacaaagtggttgatctgctcaagaagcaaggtctgctgctgtacgaagacatccgtgagagcacgttcgtggaggggcaactgccaagtcctaagcctgacgccctggacaaccatcagaagtgcttcgccattctcaagctgtaccgtccgaaggtggataacagtgcggttgggacgagtaagaaaagtgacatggctgaggttaaggattggaaagcggttcgtgtggatctggtgatcacgccattcgagcagttcgcctatgcgctgctcggttggacgggcagcggcaactttcgtcgcgatctgcgtcgctatgcggaggaagagcgcgacatgctgctcgacaaccatcgtctctacgacctgaaaaagggcatctttctgagtgcggacagcgaagaagagattttcggtcatctgggtctggattatctggagccgtgggaacgcaacgcg

SEQ ID NO: 4244 - protein, 394 aa, synthetic construct
  REGION 1..394: note = Variant of terminal deoxynucleotidyl transferase
MHHHHHHGGSGHPEGNTPEKEVPSVIARHVSPYACQRKTTLNNYNKKFTDALEIMAENYKFKENLQACLEAKRAASVLKSLPFEVTSMKDIQGLPCITDDVRDVIEEIIEVGESSRVKEILNDERYKAFKQFTSVFGVGVKTSEKWYRMGLRTVEEAKASKSLKLSKMQKAGFLYYEDLASGVSKEEADAVTLIVKETVRTVSPDALVTIAGGFRRGKPMGHDVDLLITIPGRPTDDELLHKVVDLLKKQGLLLYEDIRESTFVEGQLPSPKPDALDNHQKCFAILKLYRPKVDNSAVGTSKKSDMAEVKDWKAVRVDLVITPFEQFAYALLGWTGSGNFRRDLRRYAEEERDMLLDNHRLYDLKKGIFLSADSEEEIFGHLGLDYLEPWERNA

SEQ ID NO: 4245 - DNA, 1182 bp, synthetic construct
  misc_feature 1..1182: note = Variant of terminal deoxynucleotidyl transferase
  source 1..1182: mol_type = other DNA
atgcatcaccaccatcatcatgggggttctggtcatccggaaggtaataccccggagaaggaggtgccgagcgttatcgcccgtcatgttagtcaatacgcgtgccagcgcaagaccacgctgaataactacaacaaaaagttcaccgacgcgctggagatcatggccgagaactacaaatttaaagagaacctgcaggcgtgtctggaagccaagcgcgccgcgagtgtcctgaaaagcctgccgttcgaggttaccagcatgaaagacatccaaggtctgccgtgcattaccgacgacgtacgtgacgtgatcgaggagatcatcgaagagggcgagagcagccgtgttaaagaaatcctcaatgacgagcgctacaaggcctttaagcagttcaccagcgtgttcggtgtgggcgtgaaaacctcggaaaagtggtaccgtatgggcctccgtacggttgaagaagcaaaggccagtaagagtctgaagctgagcaagatgcagaaggcgggcttcctgtattacgaggatctggcgagcggtgttagtaaagaagaagccgatgccgttacgctcatcgtgaaggaaacggtgcgtactgttagtccggatgcgctggtgaccatcgccggcggtttccgccgtggcaaacctatgggccacgacgttgacctgctgatcacgattccgggccgtcctactgatgacgagctgctccacaaagtggttgatctgctcaagaagcaaggtctgctgctgtacgaagacatccgtgagagcacgttcgtggaggggcaactgccaagtggtcgtcctgacgccctggacaaccatcagaagtgcttcgccattctcaagctgtaccgtccgaaggtggataacagtgcggttgggacgagtaagaaaagtgacatggctgaggttaaggattggaaagcggttcgtgtggatctggtgatcacgccattcgagcagttcgcctatgcgctgctcggttggacgggcagcggcatgtttcgtcgcgatctgcgtcgctatgcggaggaagagcgcgacatgctgctcgacaaccatcgtctctacgacctgaaaaagggcatctttctgagtgcggacagcgaagaagagattttcggtcatctgggtctggattggctggagccgtgggaacgcaacgcg

SEQ ID NO: 4246 - protein, 394 aa, synthetic construct
  REGION 1..394: note = Variant of terminal deoxynucleotidyl transferase
MHHHHHHGGSGHPEGNTPEKEVPSVIARHVSQYACQRKTTLNNYNKKFTDALEIMAENYKFKENLQACLEAKRAASVLKSLPFEVTSMKDIQGLPCITDDVRDVIEEIIEEGESSRVKEILNDERYKAFKQFTSVFGVGVKTSEKWYRMGLRTVEEAKASKSLKLSKMQKAGFLYYEDLASGVSKEEADAVTLIVKETVRTVSPDALVTIAGGFRRGKPMGHDVDLLITIPGRPTDDELLHKVVDLLKKQGLLLYEDIRESTFVEGQLPSGRPDALDNHQKCFAILKLYRPKVDNSAVGTSKKSDMAEVKDWKAVRVDLVITPFEQFAYALLGWTGSGMFRRDLRRYAEEERDMLLDNHRLYDLKKGIFLSADSEEEIFGHLGLDWLEPWERNA

SEQ ID NO: 4247 - DNA, 1182 bp, synthetic construct
  misc_feature 1..1182: note = Variant of terminal deoxynucleotidyl transferase
  source 1..1182: mol_type = other DNA
atgcatcaccaccatcatcatgggggttctggtcatccggaaggtaataccccggagaaggaggtgccgagcgttatcgcccgtcatgttagtccatacgcgtgccagcgcaagaccacgctgaataactacaacaaaaagttcaccgacgcgctggagatcatggccgagaactacaaatttaaagagaacctgcaggcgtgtctggaagccaagcgcgccgcgagtgtcctgaaaagcctgccgttcgaggttaccagcatgaaagacatccaaggtctgccgtgcattaccgacgacgtacgtgacgtgatcgaggagatcatcgaagagggcgagagcagccgtgttaaagaaatcctcaatgacgagcgctacaaggcctttaagcagttcaccagcgtgttcggtgtgggcgtgaaaacctcggaaaagtggtaccgtatgggcctccgtacggttgaagaagcaaaggccagtaagagtctgaagctgagcaagatgcagaaggcgggcttcctgtattacgaggatctggcgagcggtgttagtaaagaagaagccgatgccgttacgctcatcgtgaaggaaacggtgcgtactgttagtccggatgcgctggtgaccatcgccggcggtttccgccgtggcaaacctatgggccacgacgttgacctgctgatcacgattccgggccgtcctgaagatgacgagctgctccacaaagtggttgatctgctcaagaagcaaggtctgctgctgtacgaagacatccgtgagagcacgttcgtggaggggcaactgccaagtggtaagcctgacgccctggacaaccatcagaagtgcttcgccattctcaagctgtaccgtccgaaggtggataacagtgcggttgggacgagtaagaaaagtgacatggctgaggttaaggattggaaagcggttcgtgtggatctggtgatcacgccattcgagcagttcgcctatgcgctgctcggttggacgggcagcggcatgtttcgtcgcgatctgcgtcgctatgcggaggaagagcgcgacatgctgctcgacaaccatcgtctctacgacctgaaaaagggcatctttctgagtgcggacagcgaagaagagattttcggtcatctgggtctggattatctggagccgtgggaacgcaacgcg

SEQ ID NO: 4248 - protein, 394 aa, synthetic construct
  REGION 1..394: note = Variant of terminal deoxynucleotidyl transferase
MHHHHHHGGSGHPEGNTPEKEVPSVIARHVSPYACQRKTTLNNYNKKFTDALEIMAENYKFKENLQACLEAKRAASVLKSLPFEVTSMKDIQGLPCITDDVRDVIEEIIEEGESSRVKEILNDERYKAFKQFTSVFGVGVKTSEKWYRMGLRTVEEAKASKSLKLSKMQKAGFLYYEDLASGVSKEEADAVTLIVKETVRTVSPDALVTIAGGFRRGKPMGHDVDLLITIPGRPEDDELLHKVVDLLKKQGLLLYEDIRESTFVEGQLPSGKPDALDNHQKCFAILKLYRPKVDNSAVGTSKKSDMAEVKDWKAVRVDLVITPFEQFAYALLGWTGSGMFRRDLRRYAEEERDMLLDNHRLYDLKKGIFLSADSEEEIFGHLGLDYLEPWERNA

SEQ ID NO: 4249 - DNA, 1182 bp, synthetic construct
  misc_feature 1..1182: note = Variant of terminal deoxynucleotidyl transferase
  source 1..1182: mol_type = other DNA
atgcatcaccaccatcatcatgggggttctggtcatccggaaggtaataccccggagaaggaggtgccgagcgttatcgcccgtcatgttagtccatacgcgtgccagcgcaagaccacgctgaataactacaacaaaaagttcaccgacgcgctggagatcatggccgagaactacaaatttaaagagaacctgcaggcgtgtctggaagccaagcgcgccgcgagtgtcctgaaaagcctgccgttcgaggttaccagcatgaaagacatccaaggtctgccgtgcattaccgacgacgtacgtgacgtgatcgaggagatcatcgaagtgggcgagagcagccgtgttaaagaaatcctcaatgacgagcgctacaaggcctttaagcagttcaccagcgtgttcggtgtgggcgtgaaaacctcggaaaagtggtaccgtatgggcctccgtacggttgaagaagcaaaggccagtaagagtctgaagctgagcaagatgcagaaggcgggcttcctgtattacgaggatctggcgagcggtgttagtaaagaagaagccgatgccgttacgctcatcgtgaaggaaacggtgcgtactgttagtccggatgcgctggtgaccatcgccggcggtttccgccgtggcaaacctatgggccacgacgttgacctgctgatcacgattccgggccgtcctactgatgacgagctgctccacaaagtggttgatctgctcaagaagcaaggtctgctgctgtacgaagacatccgtgagagcacgttcgtggaggggcaactgccaagtcctaagcctgacgccctggacaaccatcagaagtgcttcgccattctcaagctgtaccgtccgaaggtggataacagtgcggttgggacgagtaagaaaagtgacatggctgaggttaaggattggaaagcggttcgtgtggatctggtgatcacgccattcgagcagttcgcctatgcgctgctcggttggacgggcagcggccaatttcgtcgcgatctgcgtcgctatgcggaggaagagcgcgacatgctgctcgacaaccatcgtctctacgacctgaaaaagggcatctttctgagtgcggacagcgaagaagagattttcggtcatctgggtctggattatctggagccgtgggaacgcaacgcg

SEQ ID NO: 4250 - protein, 394 aa, synthetic construct
  REGION 1..394: note = Variant of terminal deoxynucleotidyl transferase
MHHHHHHGGSGHPEGNTPEKEVPSVIARHVSPYACQRKTTLNNYNKKFTDALEIMAENYKFKENLQACLEAKRAASVLKSLPFEVTSMKDIQGLPCITDDVRDVIEEIIEVGESSRVKEILNDERYKAFKQFTSVFGVGVKTSEKWYRMGLRTVEEAKASKSLKLSKMQKAGFLYYEDLASGVSKEEADAVTLIVKETVRTVSPDALVTIAGGFRRGKPMGHDVDLLITIPGRPTDDELLHKVVDLLKKQGLLLYEDIRESTFVEGQLPSPKPDALDNHQKCFAILKLYRPKVDNSAVGTSKKSDMAEVKDWKAVRVDLVITPFEQFAYALLGWTGSGQFRRDLRRYAEEERDMLLDNHRLYDLKKGIFLSADSEEEIFGHLGLDYLEPWERNA

SEQ ID NO: 4251 - DNA, 1182 bp, synthetic construct
  misc_feature 1..1182: note = Variant of terminal deoxynucleotidyl transferase
  source 1..1182: mol_type = other DNA
atgcatcaccaccatcatcatgggggttctggtcatccggaaggtaataccccggagaaggaggtgccgagcgttatcgcccgtcatgttagtcaatacgcgtgccagcgcaagaccacgctgaataactacaacaaaaagttcaccgacgcgctggagatcatggccgagaactacaaatttaaagagaacctgcaggcgtgtctggaagccaagcgcgccgcgagtgtcctgaaaagcctgccgttcgaggttaccagcatgaaagacatccaaggtctgccgtgcattaccgacgacgtacgtgacgtgatcgaggagatcatcgaagtgggcgagagcagccgtgttaaagaaatcctcaatgacgagcgctacaaggcctttaagcagttcaccagcgtgttcggtgtgggcgtgaaaacctcggaaaagtggtaccgtatgggcctccgtacggttgaagaagcaaaggccagtaagagtctgaagctgagcaagatgcagaaggcgggcttcctgtattacgaggatctggcgagcggtgttagtaaagaagaagccgatgccgttacgctcatcgtgaaggaaacggtgcgtactgttagtccggatgcgctggtgaccatcgccggcggtttccgccgtggcaaacctatgggccacgacgttgacctgctgatcacgattccgggccgtcctactgatgacgagctgctccacaaagtggttgatctgctcaagaagcaaggtctgctgctgtacgaagacatccgtgagagcacgttcgtggaggggcaactgccaagtcctcgtcctgacgccctggacaaccatcagaagtgcttcgccattctcaagctgtaccgtccgaaggtggataacagtgcggttgggacgagtaagaaaagtgacatggctgaggttaaggattggaaagcggttcgtgtggatctggtgatcacgccattcgagcagttcgcctatgcgctgctcggttggacgggcagcggcaactttcgtcgcgatctgcgtcgctatgcggaggaagagcgcgacatgctgctcgacaaccatcgtctctacgacctgaaaaagggcatctttctgagtgcggacagcgaagaagagattttcggtcatctgggtctggattggctggagccgtgggaacgcaacgcg

SEQ ID NO: 4252 - protein, 394 aa, synthetic construct
  REGION 1..394: note = Variant of terminal deoxynucleotidyl transferase
MHHHHHHGGSGHPEGNTPEKEVPSVIARHVSQYACQRKTTLNNYNKKFTDALEIMAENYKFKENLQACLEAKRAASVLKSLPFEVTSMKDIQGLPCITDDVRDVIEEIIEVGESSRVKEILNDERYKAFKQFTSVFGVGVKTSEKWYRMGLRTVEEAKASKSLKLSKMQKAGFLYYEDLASGVSKEEADAVTLIVKETVRTVSPDALVTIAGGFRRGKPMGHDVDLLITIPGRPTDDELLHKVVDLLKKQGLLLYEDIRESTFVEGQLPSPRPDALDNHQKCFAILKLYRPKVDNSAVGTSKKSDMAEVKDWKAVRVDLVITPFEQFAYALLGWTGSGNFRRDLRRYAEEERDMLLDNHRLYDLKKGIFLSADSEEEIFGHLGLDWLEPWERNA

SEQ ID NO: 4253 - DNA, 1182 bp, synthetic construct
  misc_feature 1..1182: note = Variant of terminal deoxynucleotidyl transferase
  source 1..1182: mol_type = other DNA
atgcatcaccaccatcatcatgggggttctggtcatccggaaggtaataccccggagaaggaggtgccgagcgttatcgcccgtcatgttagtcagtacgcgtgccagcgcaagaccacgctgaataactacaacaaaaagttcaccgacgcgctggagatcatggccgagaactacaaatttaaagagaacctgcaggcgtgtctggaagccaagcgcgccgcgagtgtcctgaaaagcctgccgttcgaggttaccagcatgaaagacatccaaggtctgccgtgcattaccgacgacgtacgtgacgtgatcgaggagatcatcgaagtgggcgagagcagccgtgttaaagaaatcctcaatgacgagcgctacaaggcctttaagcagttcaccagcgtgttcggtgtgggcgtgaaaacctcggaaaagtggtaccgtatgggcctccgtacggttgaagaagcaaaggccagtaagagtctgaagctgagcaagatgcagaaggcgggcttcctgtattacgaggatctggcgagcggtgttagtaaagaagaagccgatgccgttacgctcatcgtgaaggaaacggtgcgtactgttagtccggatgcgctggtgaccatcgccggcggtttccgccgtggcaaacctatgggccacgacgttgacctgctgatcacgattccgggccgtcctactgatgacgagctgctccacaaagtggttgatctgctcaagaagcaaggtctgctgctgtacgaagacatccgtgagagcacgttcgtggaggggcaactgccaagtggtaagcctgacgccctggacaaccatcagaagtgcttcgccattctcaagctgtaccgtccgaaggtggataacagtgcggttgggacgagtaagaaaagtgacatggctgaggttaaggattggaaagcggttcgtgtggatctggtgatcacgccattcgagcagttcgcctatgcgctgctcggttggacgggcagcggcaactttcgtcgcgatctgcgtcgctatgcggaggaagagcgcgacatgctgctcgacaaccatcgtctctacgacctgaaaaagggcatctttctgagtgcggacagcgaagaagagattttcggtcatctgggtctggattatctggagccgtgggaacgcaacgcg

SEQ ID NO: 4254 - protein, 394 aa, synthetic construct
  REGION 1..394: note = Variant of terminal deoxynucleotidyl transferase
MHHHHHHGGSGHPEGNTPEKEVPSVIARHVSQYACQRKTTLNNYNKKFTDALEIMAENYKFKENLQACLEAKRAASVLKSLPFEVTSMKDIQGLPCITDDVRDVIEEIIEVGESSRVKEILNDERYKAFKQFTSVFGVGVKTSEKWYRMGLRTVEEAKASKSLKLSKMQKAGFLYYEDLASGVSKEEADAVTLIVKETVRTVSPDALVTIAGGFRRGKPMGHDVDLLITIPGRPTDDELLHKVVDLLKKQGLLLYEDIRESTFVEGQLPSGKPDALDNHQKCFAILKLYRPKVDNSAVGTSKKSDMAEVKDWKAVRVDLVITPFEQFAYALLGWTGSGNFRRDLRRYAEEERDMLLDNHRLYDLKKGIFLSADSEEEIFGHLGLDYLEPWERNA

SEQ ID NO: 4255 - DNA, 1182 bp, synthetic construct
  misc_feature 1..1182: note = Variant of terminal deoxynucleotidyl transferase
  source 1..1182: mol_type = other DNA
atgcatcaccaccatcatcatgggggttctggtcatccggaaggtaataccccggagaaggaggtgccgagcgttatcgcccgtcatgttagtcaatacgcgtgccagcgcaagaccacgctgaataactacaacaaaaagttcaccgacgcgctggagatcatggccgagaactacaaatttaaagagaacctgcaggcgtgtctggaagccaagcgcgccgcgagtgtcctgaaaagcctgccgttcgaggttaccagcatgaaagacatccaaggtctgccgtgcattaccgacgacgtacgtgacgtgatcgaggagatcatcgaagagggcgagagcagccgtgttaaagaaatcctcaatgacgagcgctacaaggcctttaagcagttcaccagcgtgttcggtgtgggcgtgaaaacctcggaaaagtggtaccgtatgggcctccgtacggttgaagaagcaaaggccagtaagagtctgaagctgagcaagatgcagaaggcgggcttcctgtattacgaggatctggcgagcggtgttagtaaagaagaagccgatgccgttacgctcatcgtgaaggaaacggtgcgtactgttagtccggatgcgctggtgaccatcgccggcggtttccgccgtggcaaacctatgggccacgacgttgacctgctgatcacgattccgggccgtcctactgatgacgagctgctccacaaagtggttgatctgctcaagaagcaaggtctgctgctgtacgaagacatccgtgagagcacgttcgtggaggggcaactgccaagtcctaagcctgacgccctggacaaccatcagaagtgcttcgccattctcaagctgtaccgtccgaaggtggataacagtgcggttgggacgagtaagaaaagtgacatggctgaggttaaggattggaaagcggttcgtgtggatctggtgatcacgccattcgagcagttcgcctatgcgctgctcggttggacgggcagcggcaactttcgtcgcgatctgcgtcgctatgcggaggaagagcgcgacatgctgctcgacaaccatcgtctctacgacctgaaaaagggcatctttctgagtgcggacagcgaagaagagattttcggtcatctgggtctggattggctggagccgtgggaacgcaacgcg

SEQ ID NO: 4256 - protein, 394 aa, synthetic construct
  REGION 1..394: note = Variant of terminal deoxynucleotidyl transferase
MHHHHHHGGSGHPEGNTPEKEVPSVIARHVSQYACQRKTTLNNYNKKFTDALEIMAENYKFKENLQACLEAKRAASVLKSLPFEVTSMKDIQGLPCITDDVRDVIEEIIEEGESSRVKEILNDERYKAFKQFTSVFGVGVKTSEKWYRMGLRTVEEAKASKSLKLSKMQKAGFLYYEDLASGVSKEEADAVTLIVKETVRTVSPDALVTIAGGFRRGKPMGHDVDLLITIPGRPTDDELLHKVVDLLKKQGLLLYEDIRESTFVEGQLPSPKPDALDNHQKCFAILKLYRPKVDNSAVGTSKKSDMAEVKDWKAVRVDLVITPFEQFAYALLGWTGSGNFRRDLRRYAEEERDMLLDNHRLYDLKKGIFLSADSEEEIFGHLGLDWLEPWERNA

SEQ ID NO: 4257 - DNA, 1182 bp, synthetic construct
  misc_feature 1..1182: note = Variant of terminal deoxynucleotidyl transferase
  source 1..1182: mol_type = other DNA
atgcatcaccaccatcatcatgggggttctggtcatccggaaggtaataccccggagaaggaggtgccgagcgttatcgcccgtcatgttagtcagtacgcgtgccagcgcaagaccacgctgaataactacaacaaaaagttcaccgacgcgctggagatcatggccgagaactacaaatttaaagagaacctgcaggcgtgtctggaagccaagcgcgccgcgagtgtcctgaaaagcctgccgttcgaggttaccagcatgaaagacatccaaggtctgccgtgcattaccgacgacgtacgtgacgtgatcgaggagatcatcgaagagggcgagagcagccgtgttaaagaaatcctcaatgacgagcgctacaaggcctttaagcagttcaccagcgtgttcggtgtgggcgtgaaaacctcggaaaagtggtaccgtatgggcctccgtacggttgaagaagcaaaggccagtaagagtctgaagctgagcaagatgcagaaggcgggcttcctgtattacgaggatctggcgagcggtgttagtaaagaagaagccgatgccgttacgctcatcgtgaaggaaacggtgcgtactgttagtccggatgcgctggtgaccatcgccggcggtttccgccgtggcaaacctatgggccacgacgttgacctgctgatcacgattccgggccgtcctactgatgacgagctgctccacaaagtggttgatctgctcaagaagcaaggtctgctgctgtacgaagacatccgtgagagcacgttcgtggaggggcaactgccaagtcctaaacctgacgccctggacaaccatcagaagtgcttcgccattctcaagctgtaccgtccgaaggtggataacagtgcggttgggacgagtaagaaaagtgacatggctgaggttaaggattggaaagcggttcgtgtggatctggtgatcacgccattcgagcagttcgcctatgcgctgctcggttggacgggcagcggccaatttcgtcgcgatctgcgtcgctatgcggaggaagagcgcgacatgctgctcgacaaccatcgtctctacgacctgaaaaagggcatctttctgagtgcggacagcgaagaagagattttcggtcatctgggtctggattatctggagccgtgggaacgcaacgcg

SEQ ID NO: 4258 - protein, 394 aa, synthetic construct
  REGION 1..394: note = Variant of terminal deoxynucleotidyl transferase
MHHHHHHGGSGHPEGNTPEKEVPSVIARHVSQYACQRKTTLNNYNKKFTDALEIMAENYKFKENLQACLEAKRAASVLKSLPFEVTSMKDIQGLPCITDDVRDVIEEIIEEGESSRVKEILNDERYKAFKQFTSVFGVGVKTSEKWYRMGLRTVEEAKASKSLKLSKMQKAGFLYYEDLASGVSKEEADAVTLIVKETVRTVSPDALVTIAGGFRRGKPMGHDVDLLITIPGRPTDDELLHKVVDLLKKQGLLLYEDIRESTFVEGQLPSPKPDALDNHQKCFAILKLYRPKVDNSAVGTSKKSDMAEVKDWKAVRVDLVITPFEQFAYALLGWTGSGQFRRDLRRYAEEERDMLLDNHRLYDLKKGIFLSADSEEEIFGHLGLDYLEPWERNA

SEQ ID NO: 4259 - DNA, 1182 bp, synthetic construct
  misc_feature 1..1182: note = Variant of terminal deoxynucleotidyl transferase
  source 1..1182: mol_type = other DNA
atgcatcaccaccatcatcatgggggttctggtcatccggaaggtaataccccggagaaggaggtgccgagcgttatcgcccgtcatgttagtcagtacgcgtgccagcgcaagaccacgctgaataactacaacaaaaagttcaccgacgcgctggagatcatggccgagaactacaaatttaaagagaacctgcaggcgtgcctggaagccaagcgcgccgcgagtgtcctgaaaagcctgccgttcgaggttaccagcatgaaagacatccaaggtctgccgtgcattaccgacgacgtacgtgacgtgatcgaagagatcatcgaagagggcgagagcagccgtgttaaagaaatcctcaatgacgagcgctacaaggcctttaagcagttcaccagcgtgttcggtgtgggcgtgaaaacctcggaaaagtggtaccgtatgggcctccgtacggttgaagaagcaaaggccagtaagagtctgaagctgagcaagatgcagaaggcgggcttcctgtattacgaggatctggcgagcggtgttagtaaagaagaagccgatgccgttacgctcatcgtgaaggaaacggtggctactgttagtccggatgcgctggtgaccatcgccggcggtttccgccgtggcaaacctatgggccacgacgttgacctgctgatcacgattccgggccgtcctgaagatgacgagctgctccacaaagtggttgatctgctcaagaagcaaggtctgctgctgtacgaagacatccgtgagagcacgttcgtggaggggcaactgccaaatcctaaacctgacgccctggacaaccatcagaagtgcttcgccattctcaagctgtaccgtccgaaggtggataacagtgcggttgggacgagtaagaaaagtgacatggctgaggttaaggattggaaagcggttcgtgtggatctggtgattgcgccattcgagcagttcgcctatgcgctgctcggttggacgggcagcggccaatttcgtcgcgatctgcgtcgctatgcggaggaagagcgcgacatgctgctcgacaaccatcgtctctacgacctgaaaaagggcatctttctgagtgcggacagcgaagaagagattttcggtcatctggacctggattatctggagccgtgggaacgcaacgcg

SEQ ID NO: 4260 - protein, 394 aa, synthetic construct
  REGION 1..394: note = Variant of terminal deoxynucleotidyl transferase
MHHHHHHGGSGHPEGNTPEKEVPSVIARHVSQYACQRKTTLNNYNKKFTDALEIMAENYKFKENLQACLEAKRAASVLKSLPFEVTSMKDIQGLPCITDDVRDVIEEIIEEGESSRVKEILNDERYKAFKQFTSVFGVGVKTSEKWYRMGLRTVEEAKASKSLKLSKMQKAGFLYYEDLASGVSKEEADAVTLIVKETVATVSPDALVTIAGGFRRGKPMGHDVDLLITIPGRPEDDELLHKVVDLLKKQGLLLYEDIRESTFVEGQLPNPKPDALDNHQKCFAILKLYRPKVDNSAVGTSKKSDMAEVKDWKAVRVDLVIAPFEQFAYALLGWTGSGQFRRDLRRYAEEERDMLLDNHRLYDLKKGIFLSADSEEEIFGHLDLDYLEPWERNA

SEQ ID NO: 4261 - DNA, 1182 bp, synthetic construct
  misc_feature 1..1182: note = Variant of terminal deoxynucleotidyl transferase
  source 1..1182: mol_type = other DNA
atgcatcaccaccatcatcatgggggttctggtcatccggaaggtaataccccggagaaggaggtgccgagcgttatcgcccgtcatgttagtccatacgcgtgccagcgcaagaccacgctgaataactacaacaaaaagttcaccgacgcgctggagatcatggccgagaactacaaatttaaagagaacctgcaggcgtgtctggaagccaagcgcgccgcgagtgtcctgaaaagcctgccgttcgaggttaccagcatgaaagacatccaaggtctgccgtgcattaccgacgacgtacgtgacgtgatcgaggagatcatcgaagagggcgagagcagccgtgttaaagaaatcctcaatgacgagcgctacaaggcctttaagcagttcaccagcgtgttcggtgtgggcgtgaaaacctcggaaaagtggtaccgtatgggcctccgtacggttgaagaagcaaaggccagtaagagtctgaagctgagcaagatgcagaaggcgggcttcctgtattacgaggatctggcgagcggtgttagtaaagaagaagccgatgccgttacgctcatcgtgaaggaaacggtgcgtactgttagtccggatgcgctggtgaccatcgccggcggtttccgccgtggcaaacctatgggccacgacgttgacctgctgatcacgattccgggccgtcctactgatgacgagctgctccacaaagtggttgatctgctcaagaagcaaggtctgctgctgtacgaagacatccgtgagagcacgttcgtggaggggcaactgccaagtcctaagcctgacgccctggacaaccatcagaagtgcttcgccattctcaagctgtaccgtccgaaggtggataacagtgcggttgggacgagtaagaaaagtgacatggctgaggttaaggattggaaagcggttcgtgtggatctggtgatcacgccattcgagcagttcgcctatgcgctgctcggttggacgggcagcggcaactttcgtcgcgatctgcgtcgctatgcggaggaagagcgcgacatgctgctcgacaaccatcgtctctacgacctgaaaaagggcatctttctgagtgcggacagcgaagaagagattttcggtcatctgggtctggattggctggagccgtgggaacgcaacgcg

SEQ ID NO: 4262 - protein, 394 aa, synthetic construct
  REGION 1..394: note = Variant of terminal deoxynucleotidyl transferase
MHHHHHHGGSGHPEGNTPEKEVPSVIARHVSPYACQRKTTLNNYNKKFTDALEIMAENYKFKENLQACLEAKRAASVLKSLPFEVTSMKDIQGLPCITDDVRDVIEEIIEEGESSRVKEILNDERYKAFKQFTSVFGVGVKTSEKWYRMGLRTVEEAKASKSLKLSKMQKAGFLYYEDLASGVSKEEADAVTLIVKETVRTVSPDALVTIAGGFRRGKPMGHDVDLLITIPGRPTDDELLHKVVDLLKKQGLLLYEDIRESTFVEGQLPSPKPDALDNHQKCFAILKLYRPKVDNSAVGTSKKSDMAEVKDWKAVRVDLVITPFEQFAYALLGWTGSGNFRRDLRRYAEEERDMLLDNHRLYDLKKGIFLSADSEEEIFGHLGLDWLEPWERNA

SEQ ID NO: 4263 - DNA, 1182 bp, synthetic construct
  misc_feature 1..1182: note = Variant of terminal deoxynucleotidyl transferase
  source 1..1182: mol_type = other DNA
atgcatcaccaccatcatcatgggggttctggtcatccggaaggtaataccccggagaaggaggtgccgagcgttatcgcccgtcatgttagtccatacgcgtgccagcgcaagaccacgctgaataactacaacaaaaagttcaccgacgcgctggagatcatggccgagaactacaaatttaaagagaacctgcaggcgtgtctggaagccaagcgcgccgcgagtgtcctgaaaagcctgccgttcgaggttaccagcatgaaagacatccaaggtctgccgtgcattaccgacgacgtacgtgacgtgatcgaggagatcatcgaagagggcgagagcagccgtgttaaagaaatcctcaatgacgagcgctacaaggcctttaagcagttcaccagcgtgttcggtgtgggcgtgaaaacctcggaaaagtggtaccgtatgggcctccgtacggttgaagaagcaaaggccagtaagagtctgaagctgagcaagatgcagaaggcgggcttcctgtattacgaggatctggcgagcggtgttagtaaagaagaagccgatgccgttacgctcatcgtgaaggaaacggtgcgtactgttagtccggatgcgctggtgaccatcgccggcggtttccgccgtggcaaacctatgggccacgacgttgacctgctgatcacgattccgggccgtcctactgatgacgagctgctccacaaagtggttgatctgctcaagaagcaaggtctgctgctgtacgaagacatccgtgagagcacgttcgtggaggggcaactgccaagtcctaaacctgacgccctggacaaccatcagaagtgcttcgccattctcaagctgtaccgtccgaaggtggataacagtgcggttgggacgagtaagaaaagtgacatggctgaggttaaggattggaaagcggttcgtgtggatctggtgatcacgccattcgagcagttcgcctatgcgctgctcggttggacgggcagcggccaatttcgtcgcgatctgcgtcgctatgcggaggaagagcgcgacatgctgctcgacaaccatcgtctctacgacctgaaaaagggcatctttctgagtgcggacagcgaagaagagattttcggtcatctgggtctggattatctggagccgtgggaacgcaacgcg

SEQ ID NO: 4264 - protein, 394 aa, synthetic construct
  REGION 1..394: note = Variant of terminal deoxynucleotidyl transferase
MHHHHHHGGSGHPEGNTPEKEVPSVIARHVSPYACQRKTTLNNYNKKFTDALEIMAENYKFKENLQACLEAKRAASVLKSLPFEVTSMKDIQGLPCITDDVRDVIEEIIEEGESSRVKEILNDERYKAFKQFTSVFGVGVKTSEKWYRMGLRTVEEAKASKSLKLSKMQKAGFLYYEDLASGVSKEEADAVTLIVKETVRTVSPDALVTIAGGFRRGKPMGHDVDLLITIPGRPTDDELLHKVVDLLKKQGLLLYEDIRESTFVEGQLPSPKPDALDNHQKCFAILKLYRPKVDNSAVGTSKKSDMAEVKDWKAVRVDLVITPFEQFAYALLGWTGSGQFRRDLRRYAEEERDMLLDNHRLYDLKKGIFLSADSEEEIFGHLGLDYLEPWERNA

SEQ ID NO: 4265 - DNA, 1182 bp, synthetic construct
  misc_feature 1..1182: note = Variant of terminal deoxynucleotidyl transferase
  source 1..1182: mol_type = other DNA
atgcatcaccaccatcatcatgggggttctggtcatccggaaggtaataccccggagaaggaggtgccgagcgttatcgcccgtcatgttagtcagtacgcgtgccagcgcaagaccacgctgaataactacaacaaaaagttcaccgacgcgctggagatcatggccgagaactacaaatttaaagagaacctgcaggcgggcctggaagccaagcgcgccgcgagtgtcctgaaaagcctgccgttcgaggttaccagcatgaaagacatccaaggtctgccgtgcattaccgacgacgtacgtgacgtgatccgcgagatcatcgaagagggcgagagcagccgtgttaaagaaatcctcaatgacgagcgctacaaggcctttaagcagttcaccagcgtgttcggtgtgggcgtgaaaacctcggaaaagtggtaccgtatgggcctccgtacggttgaagaagcaaaggccagtaagagtctgaagctgagcaagatgcagaaggcgggcttcctgtattacgaggatctggcgagcggtgttagtaaagaagaagccgatgccgttacgctcatcgtgaaggaaacggtggctactgttagtccggatgcgctggtgaccatcgccggcggtttccgccgtggcaaacctatgggccacgacgttgacctgctgatcacgattccgggccgtcctgaagatgacgagctgctccacaaagtggttgatctgctcaagaagcaaggtctgctgctgtacgaagacatccgtgagagcacgttcgtggaggggcaactgccaagtcctaaacctgacgccctggacaaccatcagaagtgcttcgccattctcaagctgtaccgtccgaaggtggataacagtgcggttgggacgagtaagaaaagtgacatggctgaggttaaggattggaaagcggttcgtgtggatctggtgatcacgccattcgagcagttcgcctatgcgctgctcggttggacgggcagcggccaatttcgtcgcgatctgcgtcgctatgcggaggaagagcgcgacatgctgctcgacaaccatcgtctctacgacctgaaaaagggcatctttctgagtgcggacagcgaagaagagattttcggtcatctgggtctggattatctggagccgtgggaacgcaacgcg

SEQ ID NO: 4266 - protein, 394 aa, synthetic construct
  REGION 1..394: note = Variant of terminal deoxynucleotidyl transferase
MHHHHHHGGSGHPEGNTPEKEVPSVIARHVSQYACQRKTTLNNYNKKFTDALEIMAENYKFKENLQAGLEAKRAASVLKSLPFEVTSMKDIQGLPCITDDVRDVIREIIEEGESSRVKEILNDERYKAFKQFTSVFGVGVKTSEKWYRMGLRTVEEAKASKSLKLSKMQKAGFLYYEDLASGVSKEEADAVTLIVKETVATVSPDALVTIAGGFRRGKPMGHDVDLLITIPGRPEDDELLHKVVDLLKKQGLLLYEDIRESTFVEGQLPSPKPDALDNHQKCFAILKLYRPKVDNSAVGTSKKSDMAEVKDWKAVRVDLVITPFEQFAYALLGWTGSGQFRRDLRRYAEEERDMLLDNHRLYDLKKGIFLSADSEEEIFGHLGLDYLEPWERNA

SEQ ID NO: 4267 - DNA, 1182 bp, synthetic construct
  misc_feature 1..1182: note = Variant of terminal deoxynucleotidyl transferase
  source 1..1182: mol_type = other DNA
atgcatcaccaccatcatcatgggggttctggtcatccggaaggtaataccccggagaaggaggtgccgagcgttatcgcccgtcatgttagtcaatacgcgtgccagcgcaagaccacgctgaataactacaacaaaaagttcaccgacgcgctggagatcatggccgagaactacaaatttaaagagaacctgcaggcgtgtctggaagccaagcgcgccgcgagtgtcctgaaaagcctgccgttcgaggttaccagcatgaaagacatccaaggtctgccgtgcattaccgacgacgtacgtgacgtgatcgaggagatcatcgaagagggcgagagcagccgtgttaaagaaatcctcaatgacgagcgctacaaggcctttaagcagttcaccagcgtgttcggtgtgggcgtgaaaacctcggaaaagtggtaccgtatgggcctccgtacggttgaagaagcaaaggccagtaagagtctgaagctgagcaagatgcagaaggcgggcttcctgtattacgaggatctggcgagcggtgttagtaaagaagaagccgatgccgttacgctcatcgtgaaggaaacggtgcgtactgttagtccggatgcgctggtgaccatcgccggcggtttccgccgtggcaaacctatgggccacgacgttgacctgctgatcacgattccgggccgtcctactgatgacgagctgctccacaaagtggttgatctgctcaagaagcaaggtctgctgctgtacgaagacatccgtgagagcacgttcgtggaggggcaactgccaagtcctaaacctgacgccctggacaaccatcagaagtgcttcgccattctcaagctgtaccgtccgaaggtggataacagtgcggttgggacgagtaagaaaagtgacatggctgaggttaaggattggaaagcggttcgtgtggatctggtgatcacgccattcgagcagttcgcctatgcgctgctcggttggacgggcagcggcaactttcgtcgcgatctgcgtcgctatgcggaggaagagcgcgacatgctgctcgacaaccatcgtctctacgacctgaaaaagggcatctttctgagtgcggacagcgaagaagagattttcggtcatctgggtctggattatctggagccgtgggaacgcaacgcg

SEQ ID NO: 4268 - protein, 394 aa, synthetic construct
  REGION 1..394: note = Variant of terminal deoxynucleotidyl transferase
MHHHHHHGGSGHPEGNTPEKEVPSVIARHVSQYACQRKTTLNNYNKKFTDALEIMAENYKFKENLQACLEAKRAASVLKSLPFEVTSMKDIQGLPCITDDVRDVIEEIIEEGESSRVKEILNDERYKAFKQFTSVFGVGVKTSEKWYRMGLRTVEEAKASKSLKLSKMQKAGFLYYEDLASGVSKEEADAVTLIVKETVRTVSPDALVTIAGGFRRGKPMGHDVDLLITIPGRPTDDELLHKVVDLLKKQGLLLYEDIRESTFVEGQLPSPKPDALDNHQKCFAILKLYRPKVDNSAVGTSKKSDMAEVKDWKAVRVDLVITPFEQFAYALLGWTGSGNFRRDLRRYAEEERDMLLDNHRLYDLKKGIFLSADSEEEIFGHLGLDYLEPWERNA

SEQ ID NO: 4269 - DNA, 1182 bp, synthetic construct
  misc_feature 1..1182: note = Variant of terminal deoxynucleotidyl transferase
  source 1..1182: mol_type = other DNA
atgcatcaccaccatcatcatgggggttctggtcatccggaaggtaataccccggagaaggaggtgccgagcgttatcgcccgtcatgttagtccatacgcgtgccagcgcaagaccacgctgaataactacaacaaaaagttcaccgacgcgctggagatcatggccgagaactacaaatttaaagagaacctgcaggcgtgtctggaagccaagcgcgccgcgagtgtcctgaaaagcctgccgttcgaggttaccagcatgaaagacatccaaggtctgccgtgcattaccgacgacgtacgtgacgtgatcgaggagatcatcgaagagggcgagagcagccgtgttaaagaaatcctcaatgacgagcgctacaaggcctttaagcagttcaccagcgtgttcggtgtgggcgtgaaaacctcggaaaagtggtaccgtatgggcctccgtacggttgaagaagcaaaggccagtaagagtctgaagctgagcaagatgcagaaggcgggcttcctgtattacgaggatctggcgagcggtgttagtaaagaagaagccgatgccgttacgctcatcgtgaaggaaacggtgcgtactgttagtccggatgcgctggtgaccatcgccggcggtttccgccgtggcaaacctatgggccacgacgttgacctgctgatcacgattccgggccgtcctactgatgacgagctgctccacaaagtggttgatctgctcaagaagcaaggtctgctgctgtacgaagacatccgtgagagcacgttcgtggaggggcaactgccaagtcctcgtcctgacgccctggacaaccatcagaagtgcttcgccattctcaagctgtaccgtccgaaggtggataacagtgcggttgggacgagtaagaaaagtgacatggctgaggttaaggattggaaagcggttcgtgtggatctggtgatcacgccattcgagcagttcgcctatgcgctgctcggttggacgggcagcggccaatttcgtcgcgatctgcgtcgctatgcggaggaagagcgcgacatgctgctcgacaaccatcgtctctacgacctgaaaaagggcatctttctgagtgcggacagcgaagaagagattttcggtcatctgggtctggattatctggagccgtgggaacgcaacgcg

SEQ ID NO: 4270 - protein, 394 aa, synthetic construct
  REGION 1..394: note = Variant of terminal deoxynucleotidyl transferase
MHHHHHHGGSGHPEGNTPEKEVPSVIARHVSPYACQRKTTLNNYNKKFTDALEIMAENYKFKENLQACLEAKRAASVLKSLPFEVTSMKDIQGLPCITDDVRDVIEEIIEEGESSRVKEILNDERYKAFKQFTSVFGVGVKTSEKWYRMGLRTVEEAKASKSLKLSKMQKAGFLYYEDLASGVSKEEADAVTLIVKETVRTVSPDALVTIAGGFRRGKPMGHDVDLLITIPGRPTDDELLHKVVDLLKKQGLLLYEDIRESTFVEGQLPSPRPDALDNHQKCFAILKLYRPKVDNSAVGTSKKSDMAEVKDWKAVRVDLVITPFEQFAYALLGWTGSGQFRRDLRRYAEEERDMLLDNHRLYDLKKGIFLSADSEEEIFGHLGLDYLEPWERNA

SEQ ID NO: 4271 - DNA, 1182 bp, synthetic construct
  misc_feature 1..1182: note = Variant of terminal deoxynucleotidyl transferase
  source 1..1182: mol_type = other DNA
atgcatcaccaccatcatcatgggggttctggtcatccggaaggtaataccccggagaaggaggtgccgagcgttatcgcccgtcatgttagtccatacgcgtgccagcgcaagaccacgctgaataactacaacaaaaagttcaccgacgcgctggagatcatggccgagaactacaaatttaaagagaacctgcaggcgtgtctggaagccaagcgcgccgcgagtgtcctgaaaagcctgccgttcgaggttaccagcatgaaagacatccaaggtctgccgtgcattaccgacgacgtacgtgacgtgatcgaggagatcatcgaagtgggcgagagcagccgtgttaaagaaatcctcaatgacgagcgctacaaggcctttaagcagttcaccagcgtgttcggtgtgggcgtgaaaacctcggaaaagtggtaccgtatgggcctccgtacggttgaagaagcaaaggccagtaagagtctgaagctgagcaagatgcagaaggcgggcttcctgtattacgaggatctggcgagcggtgttagtaaagaagaagccgatgccgttacgctcatcgtgaaggaaacggtgcgtactgttagtccggatgcgctggtgaccatcgccggcggtttccgccgtggcaaacctatgggccacgacgttgacctgctgatcacgattccgggccgtcctactgatgacgagctgctccacaaagtggttgatctgctcaagaagcaaggtctgctgctgtacgaagacatccgtgagagcacgttcgtggaggggcaactgccaagtcctaagcctgacgccctggacaaccatcagaagtgcttcgccattctcaagctgtaccgtccgaaggtggataacagtgcggttgggacgagtaagaaaagtgacatggctgaggttaaggattggaaagcggttcgtgtggatctggtgatcacgccattcgagcagttcgcctatgcgctgctcggttggacgggcagcggccaatttcgtcgcgatctgcgtcgctatgcggaggaagagcgcgacatgctgctcgacaaccatcgtctctacgacctgaaaaagggcatctttctgagtgcggacagcgaagaagagattttcggtcatctgggtctggattggctggagccgtgggaacgcaacgcg

SEQ ID NO: 4272 - protein, 394 aa, synthetic construct
  REGION 1..394: note = Variant of terminal deoxynucleotidyl transferase
MHHHHHHGGSGHPEGNTPEKEVPSVIARHVSPYACQRKTTLNNYNKKFTDALEIMAENYKFKENLQACLEAKRAASVLKSLPFEVTSMKDIQGLPCITDDVRDVIEEIIEVGESSRVKEILNDERYKAFKQFTSVFGVGVKTSEKWYRMGLRTVEEAKASKSLKLSKMQKAGFLYYEDLASGVSKEEADAVTLIVKETVRTVSPDALVTIAGGFRRGKPMGHDVDLLITIPGRPTDDELLHKVVDLLKKQGLLLYEDIRESTFVEGQLPSPKPDALDNHQKCFAILKLYRPKVDNSAVGTSKKSDMAEVKDWKAVRVDLVITPFEQFAYALLGWTGSGQFRRDLRRYAEEERDMLLDNHRLYDLKKGIFLSADSEEEIFGHLGLDWLEPWERNA

SEQ ID NO: 4273 - DNA, 1182 bp, synthetic construct
  misc_feature 1..1182: note = Variant of terminal deoxynucleotidyl transferase
  source 1..1182: mol_type = other DNA
atgcatcaccaccatcatcatgggggttctggtcatccggaaggtaataccccggagaaggaggtgccgagcgttatcgcccgtcatgttagtcagtacgcgtgccagcgcaagaccacgctgaataactacaacaaaaagttcaccgacgcgctggagatcatggccgagaactacaaatttaaagagaacctgcaggcgtgtctggaagccaagcgcgtcgcgagtgtcctgaaaagcctgccgttcgaggttaccagcatgaaagacatccaaggtctgccgtgcattaccgacgacgtacgtgacgtgatccgcgagatcatcgaagagggcgagagcagccgtgttaaagaaatcctcaatgacgagcgctacaaggcctttaagcagttcaccagcgtgttcggtgtgggcgtgaaaacctcggaaaagtggtaccgtatgggcctccgtacggttgaagaagcaaaggccagtaagagtctgaagctgagcaagatgcagaaggcgggcttcctgtattacgaggatctggcgagcggtgttagtaaagaagaagccgatgccgttacgctcatcgtgaaggaaacggtgcgtactgttagtccggatgcgctggtgaccatcgccggcggtttccgccgtggcaaacctatgggccacgacgttgacctgctgatcacgattccgggccgtcctgaagatgacgagctgctccacaaagtggttgatctgctcaagaagcaaggtctgctgctgtacgaagacatccgtgagagcacgttcgtggaggggcaactgccaaatcctaaacctgacgccctggacaaccatcagaagtgcttcgccattctcaagctgtaccgtccgaaggtggataacagtgcggttgggacgagtaagaaaagtgacatggctgaggttaaggattggaaagcggttcgtgtggatctggtgatcacgccattcgagcagttcgcctatgcgctgctcggttggacgggcagcggccaatttcgtcgcgatactcgtcgctatgcggaggaagagcgcgacatgctgctcgacaaccatcgtctctacgacctgaaaaagggcatctttctgagtgcggacagcgaagaagagattttcggtcatctgggcctggattatctggagccgtgggaacgcaacgcg

SEQ ID NO: 4274 - protein, 394 aa, synthetic construct
  REGION 1..394: note = Variant of terminal deoxynucleotidyl transferase
MHHHHHHGGSGHPEGNTPEKEVPSVIARHVSQYACQRKTTLNNYNKKFTDALEIMAENYKFKENLQACLEAKRVASVLKSLPFEVTSMKDIQGLPCITDDVRDVIREIIEEGESSRVKEILNDERYKAFKQFTSVFGVGVKTSEKWYRMGLRTVEEAKASKSLKLSKMQKAGFLYYEDLASGVSKEEADAVTLIVKETVRTVSPDALVTIAGGFRRGKPMGHDVDLLITIPGRPEDDELLHKVVDLLKKQGLLLYEDIRESTFVEGQLPNPKPDALDNHQKCFAILKLYRPKVDNSAVGTSKKSDMAEVKDWKAVRVDLVITPFEQFAYALLGWTGSGQFRRDTRRYAEEERDMLLDNHRLYDLKKGIFLSADSEEEIFGHLGLDYLEPWERNA

SEQ ID NO: 4275 - DNA, 1182 bp, synthetic construct
  misc_feature 1..1182: note = Variant of terminal deoxynucleotidyl transferase
  source 1..1182: mol_type = other DNA
atgcatcaccaccatcatcatgggggttctggtcatccggaaggtaataccccggagaaggaggtgccgagcgttatcgcccgtcatgttagtcagtacgcgtgccagcgcaagaccacgctgaataactacaacaaaaagttcaccgacgcgctggagatcatggccgagaactacaaatttaaagagaacctgcaggcgtgtctggaagccaagcgcgccgcgagtgtcctgaaaagcctgccgttcgaggttaccagcatgaaagacatccaaggtctgccgtgcattaccgacgacgtacgtgatgtgatcgaggagatcatcgaagagggcgagagcagccgtgttaaagaaatcctcaatgacgagcgctacaaggcctttaagcagttcaccagcgtgttcggtgtgggcgtgaaaacctcggaaaagtggtaccgtatgggcctccgtacggttgaagaagcaaaggccagtaagagtctgaagctgagcaagatgcagaaggcgggcttcctgtattacgaggatctggcgagcggtgttagtaaagaagaagccgatgccgttacgctcatcgtgaaggaaacggtgcgtactgttagtccggatgcgctggtgaccatcgccggcggtttccgccgtggcaaacctatgggccacgacgttgacctgctgatcacgattccgggccgtcctgaagatgacgagctgctccacaaagtggttgatctgctcaagaagcaaggtctgctgctgtacgaagacatccgtgagagcacgttcgtggaggggcaactgccaagtcctaaacctgacgccctggacaaccatcagaagtgcttcgccattctcaagctgtaccgtccgaaggtggataacagtgcggttgggacgagtaagaaaagtgacatggctgaggttaaggattggaaagcggttcgtgtggatctggtgatcacgccacgtgagcagttcgcctatgcgctgctcggttggacgggcagcggccaatttcgtcgcgatctgcgtcgctatgcggaggaagagcgcgacatgctgctcgacaaccatcgtctctacgacctgaaaaagggcatctttctgagtgcggacagcgaagaagagattttcggtcatctgggtctggattatctggaaccgtgggaacgcaacgcg

SEQ ID NO: 4276 - protein, 394 aa, synthetic construct
  REGION 1..394: note = Variant of terminal deoxynucleotidyl transferase
MHHHHHHGGSGHPEGNTPEKEVPSVIARHVSQYACQRKTTLNNYNKKFTDALEIMAENYKFKENLQACLEAKRAASVLKSLPFEVTSMKDIQGLPCITDDVRDVIEEIIEEGESSRVKEILNDERYKAFKQFTSVFGVGVKTSEKWYRMGLRTVEEAKASKSLKLSKMQKAGFLYYEDLASGVSKEEADAVTLIVKETVRTVSPDALVTIAGGFRRGKPMGHDVDLLITIPGRPEDDELLHKVVDLLKKQGLLLYEDIRESTFVEGQLPSPKPDALDNHQKCFAILKLYRPKVDNSAVGTSKKSDMAEVKDWKAVRVDLVITPREQFAYALLGWTGSGQFRRDLRRYAEEERDMLLDNHRLYDLKKGIFLSADSEEEIFGHLGLDYLEPWERNA

SEQ ID NO: 4277 - DNA, 1182 bp, synthetic construct
  misc_feature 1..1182: note = Variant of terminal deoxynucleotidyl transferase
  source 1..1182: mol_type = other DNA
atgcatcaccaccatcatcatgggggttctggtcatccggaaggtaataccccggagaaggaggtgccgagcgttatcgcccgtcatgttagtccatacgcgtgccagcgcaagaccacgctgaataactacaacaaaaagttcaccgacgcgctggagatcatggccgagaactacaaatttaaagagaacctgcaggcgtgtctggaagccaagcgcgccgcgagtgtcctgaaaagcctgccgttcgaggttaccagcatgaaagacatccaaggtctgccgtgcattaccgacgacgtacgtgacgtgatcgaggagatcatcgaagagggcgagagcagccgtgttaaagaaatcctcaatgacgagcgctacaaggcctttaagcagttcaccagcgtgttcggtgtgggcgtgaaaacctcggaaaagtggtaccgtatgggcctccgtacggttgaagaagcaaaggccagtaagagtctgaagctgagcaagatgcagaaggcgggcttcctgtattacgaggatctggcgagcggtgttagtaaagaagaagccgatgccgttacgctcatcgtgaaggaaacggtgcgtactgttagtccggatgcgctggtgaccatcgccggcggtttccgccgtggcaaacctatgggccacgacgttgacctgctgatcacgattccgggccgtcctgaagatgacgagctgctccacaaagtggttgatctgctcaagaagcaaggtctgctgctgtacgaagacatccgtgagagcacgttcgtggaggggcaactgccaagtcctaagcctgacgccctggacaaccatcagaagtgcttcgccattctcaagctgtaccgtccgaaggtggataacagtgcggttgggacgagtaagaaaagtgacatggctgaggttaaggattggaaagcggttcgtgtggatctggtgatcacgccattcgagcagttcgcctatgcgctgctcggttggacgggcagcggccaatttcgtcgcgatctgcgtcgctatgcggaggaagagcgcgacatgctgctcgacaaccatcgtctctacgacctgaaaaagggcatctttctgagtgcggacagcgaagaagagattttcggtcatctgggtctggattatctggagccgtgggaacgcaacgcg

SEQ ID NO: 4278 - protein, 394 aa, synthetic construct
  REGION 1..394: note = Variant of terminal deoxynucleotidyl transferase
MHHHHHHGGSGHPEGNTPEKEVPSVIARHVSPYACQRKTTLNNYNKKFTDALEIMAENYKFKENLQACLEAKRAASVLKSLPFEVTSMKDIQGLPCITDDVRDVIEEIIEEGESSRVKEILNDERYKAFKQFTSVFGVGVKTSEKWYRMGLRTVEEAKASKSLKLSKMQKAGFLYYEDLASGVSKEEADAVTLIVKETVRTVSPDALVTIAGGFRRGKPMGHDVDLLITIPGRPEDDELLHKVVDLLKKQGLLLYEDIRESTFVEGQLPSPKPDALDNHQKCFAILKLYRPKVDNSAVGTSKKSDMAEVKDWKAVRVDLVITPFEQFAYALLGWTGSGQFRRDLRRYAEEERDMLLDNHRLYDLKKGIFLSADSEEEIFGHLGLDYLEPWERNA

SEQ ID NO: 4279 - DNA, 1182 bp, synthetic construct
  misc_feature 1..1182: note = Variant of terminal deoxynucleotidyl transferase
  source 1..1182: mol_type = other DNA
atgcatcaccaccatcatcatgggggttctggtcatccggaaggtaataccccggagaaggaggtgccgagcgttatcgcccgtcatgttagtcaatacgcgtgccagcgcaagaccacgctgaataactacaacaaaaagttcaccgacgcgctggagatcatggccgagaactacaaatttaaagagaacctgcaggcgtgtctggaagccaagcgcgccgcgagtgtcctgaaaagcctgccgttcgaggttaccagcatgaaagacatccaaggtctgccgtgcattaccgacgacgtacgtgacgtgatcgaggagatcatcgaagagggcgagagcagccgtgttaaagaaatcctcaatgacgagcgctacaaggcctttaagcagttcaccagcgtgttcggtgtgggcgtgaaaacctcggaaaagtggtaccgtatgggcctccgtacggttgaagaagcaaaggccagtaagagtctgaagctgagcaagatgcagaaggcgggcttcctgtattacgaggatctggcgagcggtgttagtaaagaagaagccgatgccgttacgctcatcgtgaaggaaacggtgcgtactgttagtccggatgcgctggtgaccatcgccggcggtttccgccgtggcaaacctatgggccacgacgttgacctgctgatcacgattccgggccgtcctactgatgacgagctgctccacaaagtggttgatctgctcaagaagcaaggtctgctgctgtacgaagacatccgtgagagcacgttcgtggaggggcaactgccaagtcctcgtcctgacgccctggacaaccatcagaagtgcttcgccattctcaagctgtaccgtccgaaggtggataacagtgcggttgggacgagtaagaaaagtgacatggctgaggttaaggattggaaagcggttcgtgtggatctggtgatcacgccattcgagcagttcgcctatgcgctgctcggttggacgggcagcggccaatttcgtcgcgatctgcgtcgctatgcggaggaagagcgcgacatgctgctcgacaaccatcgtctctacgacctgaaaaagggcatctttctgagtgcggacagcgaagaagagattttcggtcatctgggtctggattggctggagccgtgggaacgcaacgcg

SEQ ID NO: 4280 - protein, 394 aa, synthetic construct
  REGION 1..394: note = Variant of terminal deoxynucleotidyl transferase
MHHHHHHGGSGHPEGNTPEKEVPSVIARHVSQYACQRKTTLNNYNKKFTDALEIMAENYKFKENLQACLEAKRAASVLKSLPFEVTSMKDIQGLPCITDDVRDVIEEIIEEGESSRVKEILNDERYKAFKQFTSVFGVGVKTSEKWYRMGLRTVEEAKASKSLKLSKMQKAGFLYYEDLASGVSKEEADAVTLIVKETVRTVSPDALVTIAGGFRRGKPMGHDVDLLITIPGRPTDDELLHKVVDLLKKQGLLLYEDIRESTFVEGQLPSPRPDALDNHQKCFAILKLYRPKVDNSAVGTSKKSDMAEVKDWKAVRVDLVITPFEQFAYALLGWTGSGQFRRDLRRYAEEERDMLLDNHRLYDLKKGIFLSADSEEEIFGHLGLDWLEPWERNA

SEQ ID NO: 4281 - DNA, 1182 bp, synthetic construct
  misc_feature 1..1182: note = Variant of terminal deoxynucleotidyl transferase
  source 1..1182: mol_type = other DNA
atgcatcaccaccatcatcatgggggttctggtcatccggaaggtaataccccggagaaggaggtgccgagcgttatcgcccgtcatgttagtcagtacgcgtgccagcgcaagaccacgctgaataactacaacaaaaagttcaccgacgcgctggagatcatggccgagaactacaaatttaaagagaacctgcaggcgtgtctggaagccaagcgcgccgcgagtgtcctgaaaagcctgccgttcgaggttaccagcatgaaagacatccaaggtctgccgtgcattaccgacgacgtacgtgacgtgatcgaggagatcatcgaagagggcgagagcagccgtgttaaagaaatcctcaatgacgagcgctacaaggcctttaagcagttcaccagcgtgttcggtgtgggcgtgaaaacctcggaaaagtggtaccgtatgggcctccgtacggttgaagaagcaaaggccagtaagagtctgaagctgagcaagatgcagaaggcgggcttcctgtattacgaggatctggcgagcggtgttagtaaagaagaagccgatgccgttacgctcatcgtgaaggaaacggtgcgtactgttagtccggatgcgctggtgaccatcgccggcggtttccgccgtggcaaacctatgggccacgacgttgacctgctgatcactattccgggccgtcctgaagatgacgagctgctccacaaagtggttgatctgctcaagaagcaaggtctgctgctgtacgaagacatccgtgagagcacgttcgtggaggggcaactgccaagtcctaaacctgacgccctggacaaccatcagaagtgcttcgccattctcaagctgtaccgtccgaaggtggataacagtgcggttgggacgagtaagaaaagtgacatggctgaggttaaggattggaaagcggttcgtgtggatctggtgatcacgccattccaccagttcgcctatgcgctgctcggttggacgggcagcggccaatttcgtcgcgatctgcgtcgctatgcggaggaagagcgcgacatgctgctcgacaaccatcgtctctacgacctgaaaaagggcatctttctgagtgcggacagcgaagaagagattttcgggcatctgggtctggattatctggagccgtgggaacgcaacgcg

SEQ ID NO: 4282 - protein, 394 aa, synthetic construct
  REGION 1..394: note = Variant of terminal deoxynucleotidyl transferase
MHHHHHHGGSGHPEGNTPEKEVPSVIARHVSQYACQRKTTLNNYNKKFTDALEIMAENYKFKENLQACLEAKRAASVLKSLPFEVTSMKDIQGLPCITDDVRDVIEEIIEEGESSRVKEILNDERYKAFKQFTSVFGVGVKTSEKWYRMGLRTVEEAKASKSLKLSKMQKAGFLYYEDLASGVSKEEADAVTLIVKETVRTVSPDALVTIAGGFRRGKPMGHDVDLLITIPGRPEDDELLHKVVDLLKKQGLLLYEDIRESTFVEGQLPSPKPDALDNHQKCFAILKLYRPKVDNSAVGTSKKSDMAEVKDWKAVRVDLVITPFHQFAYALLGWTGSGQFRRDLRRYAEEERDMLLDNHRLYDLKKGIFLSADSEEEIFGHLGLDYLEPWERNA

SEQ ID NO: 4283 - DNA, 1182 bp, synthetic construct
  misc_feature 1..1182: note = Variant of terminal deoxynucleotidyl transferase
  source 1..1182: mol_type = other DNA
atgcatcaccaccatcatcatgggggttctggtcatccggaaggtaataccccggagaaggaggtgccgagcgttatcgcccgtcatgttagtcagtacgcgtgccagcgcaagaccacgctgaataactacaacaaaaagttcaccgacgcgctggagatcatggccgagaactacaaatttaaagagaacctgcaggcgtgcctggaagccaagcgcgccgcgagtgtcctgaaaagcctgccgttcgaggttaccagcatgaaagacatccaaggtctgccgtgcattaccgacgacgtacgtgacgtgatccgcgagatcatcgaagagggcgagagcagccgtgttaaagaaatcctcaatgacgagcgctacaaggcctttaagcagttcaccagcgtgttcggtgtgggcgtgaaaacctcggaaaagtggtaccgtatgggcctccgtacggttgaagaagcaaaggccagtaagagtctgaagctgagcaagatgcagaaggcgggcttcctgtattacgaggatctggcgagcggtgttagtaaagaagaagccgatgccgttacgctcatcgtgaaggaaacggtgcgtactgttagtccggatgcgctggtgaccatcgccggcggtttccgccgtggcaaacctatgggccacgacgttgacctgctgatcacgattccgggccgtcctgaagatgacgagctgctccacaaagtggttgatctgctcaagaagcaaggtctgctgctgtacgaagacatccgtgagagcacgttcgtggaggggcaactgccaaatcctaaacctgacgccctggacaaccatcagaagtgcttcgccattctcaagctgtaccgtccgaaggtggataacagtgcggttgggacgagtaagaaaagtgacatggctgaggttaaggattggaaagcggttcgtgtggatctggtgattacgccattcgagcagttcgcctatgcgctgctcggttggacgggcagcggccaatttcgtcgcgatactcgtcgctatgcggaggaagagcgcgacatgctgctcgacaaccatcgtctctacgacctgaaaaagggcatctttctgagtgcggacagcgaagaagagattttcggtcatctgggtctggattatctggagccgtgggaacgcaacgcg

SEQ ID NO: 4284 - protein, 394 aa, synthetic construct
  REGION 1..394: note = Variant of terminal deoxynucleotidyl transferase
MHHHHHHGGSGHPEGNTPEKEVPSVIARHVSQYACQRKTTLNNYNKKFTDALEIMAENYKFKENLQACLEAKRAASVLKSLPFEVTSMKDIQGLPCITDDVRDVIREIIEEGESSRVKEILNDERYKAFKQFTSVFGVGVKTSEKWYRMGLRTVEEAKASKSLKLSKMQKAGFLYYEDLASGVSKEEADAVTLIVKETVRTVSPDALVTIAGGFRRGKPMGHDVDLLITIPGRPEDDELLHKVVDLLKKQGLLLYEDIRESTFVEGQLPNPKPDALDNHQKCFAILKLYRPKVDNSAVGTSKKSDMAEVKDWKAVRVDLVITPFEQFAYALLGWTGSGQFRRDTRRYAEEERDMLLDNHRLYDLKKGIFLSADSEEEIFGHLGLDYLEPWERNA

SEQ ID NO: 4285 - DNA, 1182 bp, synthetic construct
  misc_feature 1..1182: note = Variant of terminal deoxynucleotidyl transferase
  source 1..1182: mol_type = other DNA
atgcatcaccaccatcatcatgggggttctggtcatccggaaggtaataccccggagaaggaggtgccgagcgttatcgcccgtcatgttagtcagtacgcgtgccagcgcaagaccacgctgaataactacaacaaaaagttcaccgacgcgctggagatcatggccgagaactacaaatttaaagagaacctgcaggcgggcctggaagccaagcgcgccgcgagtgtcctgaaaagcctgccgttcgaggttaccagcatgaaagacatccaaggtctgccgtgcattaccgacgacgtacgtgacgtgatcgaagagatcatcgaagagggcgagagcagccgtgttaaagaaatcctcaatgacgagcgctacaaggcctttaagcagttcaccagcgtgttcggtgtgggcgtgaaaacctcggaaaagtggtaccgtatgggcctccgtacggttgaagaagcaaaggccagtaagagtctgaagctgagcaagatgcagaaggcgggcttcctgtattacgaggatctggcgagcggtgttagtaaagaagaagccgatgccgttacgctcatcgtgaaggaaacggtgcgtactgttagtccggatgcgctggtgaccatcgccggcggtttccgccgtggcaaacctatgggccacgacgttgacctgctgatcacgattccgggccgtcctgaagatgacgagctgctccacaaagtggttgatctgctcaagaagcaaggtctgctgctgtacgaagacatccgtgagagcacgttcgtggaggggcaactgccaagtcctaaacctgacgccctggacaaccatcagaagtgcttcgccattctcaagctgtaccgtccgaaggtggataacagtgcggttgggacgagtaagaaaagtgacatggctgaggttaaggattggaaagcggttcgtgtggatctggtgatcacgccattcgagcagttcgcctatgcgctgctcggttggacgggcagcggccaatttcgtcgcgatactcgtcgctatgcggaggaagagcgcgacatgctgctcgacaaccatcgtctctacgacctgaaaaagggcatctttctgagtgcggacagcgaagaagagattttcggtcatctggacctggattatctggagccgtgggaacgcaacgcg

SEQ ID NO: 4286 - protein, 394 aa, synthetic construct
  REGION 1..394: note = Variant of terminal deoxynucleotidyl transferase
MHHHHHHGGSGHPEGNTPEKEVPSVIARHVSQYACQRKTTLNNYNKKFTDALEIMAENYKFKENLQAGLEAKRAASVLKSLPFEVTSMKDIQGLPCITDDVRDVIEEIIEEGESSRVKEILNDERYKAFKQFTSVFGVGVKTSEKWYRMGLRTVEEAKASKSLKLSKMQKAGFLYYEDLASGVSKEEADAVTLIVKETVRTVSPDALVTIAGGFRRGKPMGHDVDLLITIPGRPEDDELLHKVVDLLKKQGLLLYEDIRESTFVEGQLPSPKPDALDNHQKCFAILKLYRPKVDNSAVGTSKKSDMAEVKDWKAVRVDLVITPFEQFAYALLGWTGSGQFRRDTRRYAEEERDMLLDNHRLYDLKKGIFLSADSEEEIFGHLDLDYLEPWERNA

SEQ ID NO: 4287 - DNA, 1182 bp, synthetic construct
  misc_feature 1..1182: note = Variant of terminal deoxynucleotidyl transferase
  source 1..1182: mol_type = other DNA
atgcatcaccaccatcatcatgggggttctggtcatccggaaggtaataccccggagaaggaggtgccgagcgttatcgcccgtcatgttagtccatacgcgtgccagcgcaagaccacgctgaataactacaacaaaaagttcaccgacgcgctggagatcatggccgagaactacaaatttaaagagaacctgcaggcgtgtctggaagccaagcgcgccgcgagtgtcctgaaaagcctgccgttcgaggttaccagcatgaaagacatccaaggtctgccgtgcattaccgacgacgtacgtgacgtgatcgaggagatcatcgaagagggcgagagcagccgtgttaaagaaatcctcaatgacgagcgctacaaggcctttaagcagttcaccagcgtgttcggtgtgggcgtgaaaacctcggaaaagtggtaccgtatgggcctccgtacggttgaagaagcaaaggccagtaagagtctgaagctgagcaagatgcagaaggcgggcttcctgtattacgaggatctggcgagcggtgttagtaaagaagaagccgatgccgttacgctcatcgtgaaggaaacggtgcgtactgttagtccggatgcgctggtgaccatcgccggcggtttccgccgtggcaaacctatgggccacgacgttgacctgctgatcacgattccgggccgtcctactgatgacgagctgctccacaaagtggttgatctgctcaagaagcaaggtctgctgctgtacgaagacatccgtgagagcacgttcgtggaggggcaactgccaagtcctcgtcctgacgccctggacaaccatcagaagtgcttcgccattctcaagctgtaccgtccgaaggtggataacagtgcggttgggacgagtaagaaaagtgacatggctgaggttaaggattggaaagcggttcgtgtggatctggtgatcacgccattcgagcagttcgcctatgcgctgctcggttggacgggcagcggccaatttcgtcgcgatctgcgtcgctatgcggaggaagagcgcgacatgctgctcgacaaccatcgtctctacgacctgaaaaagggcatctttctgagtgcggacagcgaagaagagattttcggtcatctgggtctggattggctggagccgtgggaacgcaacgcg

SEQ ID NO: 4288 - protein, 394 aa, synthetic construct
  REGION 1..394: note = Variant of terminal deoxynucleotidyl transferase
MHHHHHHGGSGHPEGNTPEKEVPSVIARHVSPYACQRKTTLNNYNKKFTDALEIMAENYKFKENLQACLEAKRAASVLKSLPFEVTSMKDIQGLPCITDDVRDVIEEIIEEGESSRVKEILNDERYKAFKQFTSVFGVGVKTSEKWYRMGLRTVEEAKASKSLKLSKMQKAGFLYYEDLASGVSKEEADAVTLIVKETVRTVSPDALVTIAGGFRRGKPMGHDVDLLITIPGRPTDDELLHKVVDLLKKQGLLLYEDIRESTFVEGQLPSPRPDALDNHQKCFAILKLYRPKVDNSAVGTSKKSDMAEVKDWKAVRVDLVITPFEQFAYALLGWTGSGQFRRDLRRYAEEERDMLLDNHRLYDLKKGIFLSADSEEEIFGHLGLDWLEPWERNA

SEQ ID NO: 4289 - DNA, 1182 bp, synthetic construct
  misc_feature 1..1182: note = Variant of terminal deoxynucleotidyl transferase
  source 1..1182: mol_type = other DNA
atgcatcaccaccatcatcatgggggttctggtcatccggaaggtaataccccggagaaggaggtgccgagcgttatcgcccgtcatgttagtccatacgcgtgccagcgcaagaccacgctgaataactacaacaaaaagttcaccgacgcgctggagatcatggccgagaactacaaatttaaagagaacctgcaggcgtgtctggaagccaagcgcgccgcgagtgtcctgaaaagcctgccgttcgaggttaccagcatgaaagacatccaaggtctgccgtgcattaccgacgacgtacgtgacgtgatcgaggagatcatcgaagagggcgagagcagccgtgttaaagaaatcctcaatgacgagcgctacaaggcctttaagcagttcaccagcgtgttcggtgtgggcgtgaaaacctcggaaaagtggtaccgtatgggcctccgtacggttgaagaagcaaaggccagtaagagtctgaagctgagcaagatgcagaaggcgggcttcctgtattacgaggatctggcgagcggtgttagtaaagaagaagccgatgccgttacgctcatcgtgaaggaaacggtgcgtactgttagtccggatgcgctggtgaccatcgccggcggtttccgccgtggcaaacctatgggccacgacgttgacctgctgatcacgattccgggccgtcctgaagatgacgagctgctccacaaagtggttgatctgctcaagaagcaaggtctgctgctgtacgaagacatccgtgagagcacgttcgtggaggggcaactgccaagtcctcgtcctgacgccctggacaaccatcagaagtgcttcgccattctcaagctgtaccgtccgaaggtggataacagtgcggttgggacgagtaagaaaagtgacatggctgaggttaaggattggaaagcggttcgtgtggatctggtgatcacgccattcgagcagttcgcctatgcgctgctcggttggacgggcagcggccaatttcgtcgcgatctgcgtcgctatgcggaggaagagcgcgacatgctgctcgacaaccatcgtctctacgacctgaaaaagggcatctttctgagtgcggacagcgaagaagagattttcggtcatctgggtctggattatctggagccgtgggaacgcaacgcg

SEQ ID NO: 4290 - protein, 394 aa, synthetic construct
  REGION 1..394: note = Variant of terminal deoxynucleotidyl transferase
MHHHHHHGGSGHPEGNTPEKEVPSVIARHVSPYACQRKTTLNNYNKKFTDALEIMAENYKFKENLQACLEAKRAASVLKSLPFEVTSMKDIQGLPCITDDVRDVIEEIIEEGESSRVKEILNDERYKAFKQFTSVFGVGVKTSEKWYRMGLRTVEEAKASKSLKLSKMQKAGFLYYEDLASGVSKEEADAVTLIVKETVRTVSPDALVTIAGGFRRGKPMGHDVDLLITIPGRPEDDELLHKVVDLLKKQGLLLYEDIRESTFVEGQLPSPRPDALDNHQKCFAILKLYRPKVDNSAVGTSKKSDMAEVKDWKAVRVDLVITPFEQFAYALLGWTGSGQFRRDLRRYAEEERDMLLDNHRLYDLKKGIFLSADSEEEIFGHLGLDYLEPWERNA

SEQ ID NO: 4291 - DNA, 1182 bp, synthetic construct
  misc_feature 1..1182: note = Variant of terminal deoxynucleotidyl transferase
  source 1..1182: mol_type = other DNA
atgcatcaccaccatcatcatgggggttctggtcatccggaaggtaataccccggagaaggaggtgccgagcgttatcgcccgtcatgttagtccatacgcgtgccagcgcaagaccacgctgaataactacaacaaaaagttcaccgacgcgctggagatcatggccgagaactacaaatttaaagagaacctgcaggcgtgtctggaagccaagcgcgccgcgagtgtcctgaaaagcctgccgttcgaggttaccagcatgaaagacatccaaggtctgccgtgcattaccgacgacgtacgtgacgtgatcgaggagatcatcgaagtgggcgagagcagccgtgttaaagaaatcctcaatgacgagcgctacaaggcctttaagcagttcaccagcgtgttcggtgtgggcgtgaaaacctcggaaaagtggtaccgtatgggcctccgtacggttgaagaagcaaaggccagtaagagtctgaagctgagcaagatgcagaaggcgggcttcctgtattacgaggatctggcgagcggtgttagtaaagaagaagccgatgccgttacgctcatcgtgaaggaaacggtgcgtactgttagtccggatgcgctggtgaccatcgccggcggtttccgccgtggcaaacctatgggccacgacgttgacctgctgatcacgattccgggccgtcctactgatgacgagctgctccacaaagtggttgatctgctcaagaagcaaggtctgctgctgtacgaagacatccgtgagagcacgttcgtggaggggcaactgccaagtggtcgtcctgacgccctggacaaccatcagaagtgcttcgccattctcaagctgtaccgtccgaaggtggataacagtgcggttgggacgagtaagaaaagtgacatggctgaggttaaggattggaaagcggttcgtgtggatctggtgatcacgccattcgagcagttcgcctatgcgctgctcggttggacgggcagcggcacgtttcgtcgcgatctgcgtcgctatgcggaggaagagcgcgacatgctgctcgacaaccatcgtctctacgacctgaaaaagggcatctttctgagtgcggacagcgaagaagagattttcggtcatctgggtctggattatctggagccgtgggaacgcaacgcg

SEQ ID NO: 4292 - protein, 394 aa, synthetic construct
  REGION 1..394: note = Variant of terminal deoxynucleotidyl transferase
MHHHHHHGGSGHPEGNTPEKEVPSVIARHVSPYACQRKTTLNNYNKKFTDALEIMAENYKFKENLQACLEAKRAASVLKSLPFEVTSMKDIQGLPCITDDVRDVIEEIIEVGESSRVKEILNDERYKAFKQFTSVFGVGVKTSEKWYRMGLRTVEEAKASKSLKLSKMQKAGFLYYEDLASGVSKEEADAVTLIVKETVRTVSPDALVTIAGGFRRGKPMGHDVDLLITIPGRPTDDELLHKVVDLLKKQGLLLYEDIRESTFVEGQLPSGRPDALDNHQKCFAILKLYRPKVDNSAVGTSKKSDMAEVKDWKAVRVDLVITPFEQFAYALLGWTGSGTFRRDLRRYAEEERDMLLDNHRLYDLKKGIFLSADSEEEIFGHLGLDYLEPWERNA

SEQ ID NO: 4293 - DNA, 1182 bp, synthetic construct
  misc_feature 1..1182: note = Variant of terminal deoxynucleotidyl transferase
  source 1..1182: mol_type = other DNA
atgcatcaccaccatcatcatgggggttctggtcatccggaaggtaataccccggagaaggaggtgccgagcgttatcgcccgtcatgttagtcaatacgcgtgccagcgcaagaccacgctgaataactacaacaaaaagttcaccgacgcgctggagatcatggccgagaactacaaatttaaagagaacctgcaggcgtgtctggaagccaagcgcgccgcgagtgtcctgaaaagcctgccgttcgaggttaccagcatgaaagacatccaaggtctgccgtgcattaccgacgacgtacgtgacgtgatcgaggagatcatcgaagtgggcgagagcagccgtgttaaagaaatcctcaatgacgagcgctacaaggcctttaagcagttcaccagcgtgttcggtgtgggcgtgaaaacctcggaaaagtggtaccgtatgggcctccgtacggttgaagaagcaaaggccagtaagagtctgaagctgagcaagatgcagaaggcgggcttcctgtattacgaggatctggcgagcggtgttagtaaagaagaagccgatgccgttacgctcatcgtgaaggaaacggtgcgtactgttagtccggatgcgctggtgaccatcgccggcggtttccgccgtggcaaacctatgggccacgacgttgacctgctgatcacgattccgggccgtcctgaagatgacgagctgctccacaaagtggttgatctgctcaagaagcaaggtctgctgctgtacgaagacatccgtgagagcacgttcgtggaggggcaactgccaagtcctcgtcctgacgccctggacaaccatcagaagtgcttcgccattctcaagctgtaccgtccgaaggtggataacagtgcggttgggacgagtaagaaaagtgacatggctgaggttaaggattggaaagcggttcgtgtggatctggtgatcacgccattcgagcagttcgcctatgcgctgctcggttggacgggcagcggcaactttcgtcgcgatctgcgtcgctatgcggaggaagagcgcgacatgctgctcgacaaccatcgtctctacgacctgaaaaagggcatctttctgagtgcggacagcgaagaagagattttcggtcatctgggtctggattggctggagccgtgggaacgcaacgcg

SEQ ID NO: 4294 - protein, 394 aa, synthetic construct
  REGION 1..394: note = Variant of terminal deoxynucleotidyl transferase
MHHHHHHGGSGHPEGNTPEKEVPSVIARHVSQYACQRKTTLNNYNKKFTDALEIMAENYKFKENLQACLEAKRAASVLKSLPFEVTSMKDIQGLPCITDDVRDVIEEIIEVGESSRVKEILNDERYKAFKQFTSVFGVGVKTSEKWYRMGLRTVEEAKASKSLKLSKMQKAGFLYYEDLASGVSKEEADAVTLIVKETVRTVSPDALVTIAGGFRRGKPMGHDVDLLITIPGRPEDDELLHKVVDLLKKQGLLLYEDIRESTFVEGQLPSPRPDALDNHQKCFAILKLYRPKVDNSAVGTSKKSDMAEVKDWKAVRVDLVITPFEQFAYALLGWTGSGNFRRDLRRYAEEERDMLLDNHRLYDLKKGIFLSADSEEEIFGHLGLDWLEPWERNA

SEQ ID NO: 4295 - DNA, 1182 bp, synthetic construct
  misc_feature 1..1182: note = Variant of terminal deoxynucleotidyl transferase
  source 1..1182: mol_type = other DNA
atgcatcaccaccatcatcatgggggttctggtcatccggaaggtaataccccggagaaggaggtgccgagcgttatcgcccgtcatgttagtcagtacgcgtgccagcgcaagaccacgctgaataactacaacaaaaagttcaccgacgcgctggagatcatggccgagaactacaaatttaaagagaacctgcaggcgtgtctggaagccaagcgcgccgcgagtgtcctgaaaagcctgccgttcgaggttaccagcatgaaagacatccaaggtctgccgtgcattaccgacgacgtacgtgacgtgatcgaggagatcatcgaagagggcgagagcagccgtgttaaagaaatcctcaatgacgagcgctacaaggcctttaagcagttcaccagcgtgttcggtgtgggcgtgaaaacctcggaaaagtggtaccgtatgggcctccgtacggttgaagaagcaaaggccagtaagagtctgaagctgagcaagatgcagaaggcgggcttcctgtattacgaggatctggcgagcggtgttagtaaagaagaagccgatgccgttacgctcatcgtgaaggaaacggtgcgtactgttagtccggatgcgctggtgaccatcgccggcggtttccgccgtggcaaacctatgggccacgacgttgacctgctgatcacgattccgggccgtcctactgatgacgagctgctccacaaagtggttgatctgctcaagaagcaaggtctgctgctgtacgaagacatccgtgagagcacgttcgtggaggggcaactgccaagtcctcgtcctgacgccctggacaaccatcagaagtgcttcgccattctcaagctgtaccgtccgaaggtggataacagtgcggttgggacgagtaagaaaagtgacatggctgaggttaaggattggaaagcggttcgtgtggatctggtgatcacgccattcgagcagttcgcctatgcgctgctcggttggacgggcagcggccaatttcgtcgcgatctgcgtcgctatgcggaggaagagcgcgacatgctgctcgacaaccatcgtctctacgacctgaaaaagggcatctttctgagtgcggacagcgaagaagagattttcggtcatctgggtctggattatctggagccgtgggaacgcaacgcg

SEQ ID NO: 4296 - protein, 394 aa, synthetic construct
  REGION 1..394: note = Variant of terminal deoxynucleotidyl transferase
MHHHHHHGGSGHPEGNTPEKEVPSVIARHVSQYACQRKTTLNNYNKKFTDALEIMAENYKFKENLQACLEAKRAASVLKSLPFEVTSMKDIQGLPCITDDVRDVIEEIIEEGESSRVKEILNDERYKAFKQFTSVFGVGVKTSEKWYRMGLRTVEEAKASKSLKLSKMQKAGFLYYEDLASGVSKEEADAVTLIVKETVRTVSPDALVTIAGGFRRGKPMGHDVDLLITIPGRPTDDELLHKVVDLLKKQGLLLYEDIRESTFVEGQLPSPRPDALDNHQKCFAILKLYRPKVDNSAVGTSKKSDMAEVKDWKAVRVDLVITPFEQFAYALLGWTGSGQFRRDLRRYAEEERDMLLDNHRLYDLKKGIFLSADSEEEIFGHLGLDYLEPWERNA

SEQ ID NO: 4297 - DNA, 1182 bp, synthetic construct
  misc_feature 1..1182: note = Variant of terminal deoxynucleotidyl transferase
  source 1..1182: mol_type = other DNA
atgcatcaccaccatcatcatgggggttctggtcatccggaaggtaataccccggagaaggaggtgccgagcgttatcgcccgtcatgttagtcagtacgcgtgccagcgcaagaccacgctgaataactacaacaaaaagttcaccgacgcgctggagatcatggccgagaactacaaatttaaagagaacctgcaggcgtgtctggaagccaagcgcgccgcgagtgtcctgaaaagcctgccgttcgaggttaccagcatgaaagacatccaaggtctgccgtgcattaccgacgacgtacgtccggtgatcgaggagatcatcgaagagggcgagagcagccgtgttaaagaaatcctcaatgacgagcgctacaaggcctttaagcagttcaccagcgtgttcggtgtgggcgtgaaaacctcggaaaagtggtaccgtatgggcctccgtacggttgaagaagcaaaggccagtaagagtctgaagctgagcaagatgcagaaggcgggcttcctgtattacgaggatctggcgagcggtgttagtaaagaagaagccgatgccgttacgctcatcgtgaaggaaacggtgcgtactgttagtccggatgcgctggtgaccatcgccggcggtttccgccgtggcaaacctatgggccacgacgttgacctgctgatcacgattccgggccgtcctgaagatgacgagctgctccacaaagtggttgatctgctcaagaagcaaggtctgctgctgtacgaagacatccgtgagagcacgttcgtggaggggcaactgccaagtcctaaacctgacgccctggacaaccatcagaagtgcttcgccattctcaagctgtaccgtccgaaggtggataacagtgcggttgggacgagtaagaaaagtgacatggctgaggttaaggattggaaagcggttcgtgtggatctggtgatcacgccagaggagcagttcgcctatgcgctgctcggttggacgggcagcggccaatttcgtcgcgatctgcgtcgctatgcggaggaagagcgcgacatgctgctcgacaaccatcgtctctacgacctgaaaaagggcatctttctgagtgcggacagcgaagaagagattttcggtcatctgggtctggattatctggaaccgtgggaacgcaacgcg

SEQ ID NO: 4298 - protein, 394 aa, synthetic construct
  REGION 1..394: note = Variant of terminal deoxynucleotidyl transferase
MHHHHHHGGSGHPEGNTPEKEVPSVIARHVSQYACQRKTTLNNYNKKFTDALEIMAENYKFKENLQACLEAKRAASVLKSLPFEVTSMKDIQGLPCITDDVRPVIEEIIEEGESSRVKEILNDERYKAFKQFTSVFGVGVKTSEKWYRMGLRTVEEAKASKSLKLSKMQKAGFLYYEDLASGVSKEEADAVTLIVKETVRTVSPDALVTIAGGFRRGKPMGHDVDLLITIPGRPEDDELLHKVVDLLKKQGLLLYEDIRESTFVEGQLPSPKPDALDNHQKCFAILKLYRPKVDNSAVGTSKKSDMAEVKDWKAVRVDLVITPEEQFAYALLGWTGSGQFRRDLRRYAEEERDMLLDNHRLYDLKKGIFLSADSEEEIFGHLGLDYLEPWERNA

SEQ ID NO: 4299 - DNA, 1182 bp, synthetic construct
  misc_feature 1..1182: note = Variant of terminal deoxynucleotidyl transferase
  source 1..1182: mol_type = other DNA
atgcatcaccaccatcatcatgggggttctggtcatccggaaggtaataccccggagaaggaggtgccgagcgttatcgcccgtcatgttagtcagtacgcgtgccagcgcaagaccacgctgaataactacaacaaaaagttcaccgacgcgctggagatcatggccgagaactacaaatttaaagagaacctgcaggcgtgtctggaagccaagcgcgccgcgagtgtcctgaaaagcctgccgttcgaggttaccagcatgaaagacatccaaggtctgccgtgcattaccgacgacgtacgtgacgtgatcgaggagatcatcgaagagggcgagagcagccgtgttaaagaaatcctcaatgacgagcgctacaaggcctttaagcagttcaccagcgtgttcggtgtgggcgtgaaaacctcggaaaagtggtaccgtatgggcctccgtacggttgaagaagcaaaggccagtaagagtctgaagctgagcaagatgcagaaggcgggcttcctgtattacgaggatctggcgagcggtgttagtaaagaagaagccgatgccgttacgctcatcgtgaaggaaacggtgcgtactgttagtccggatgcgctggtgaccatcgccggcggtttccgccgtggcaaacctatgggccacgacgttgacctgctgatcacgattccgggccgtcctactgatgacgagctgctccacaaagtggttgatctgctcaagaagcaaggtctgctgctgtacgaagacatccgtgagagcacgttcgtggaggggcaactgccaagtcctcgtcctgacgccctggacaaccatcagaagtgcttcgccattctcaagctgtaccgtccgaaggtggataacagtgcggttgggacgagtaagaaaagtgacatggctgaggttaaggattggaaagcggttcgtgtggatctggtgatcacgccattcgagcagttcgcctatgcgctgctcggttggacgggcagcggcacgtttcgtcgcgatctgcgtcgctatgcggaggaagagcgcgacatgctgctcgacaaccatcgtctctacgacctgaaaaagggcatctttctgagtgcggacagcgaagaagagattttcggtcatctgggtctggattatctggagccgtgggaacgcaacgcg

SEQ ID NO: 4300 - protein, 394 aa, synthetic construct
  REGION 1..394: note = Variant of terminal deoxynucleotidyl transferase
MHHHHHHGGSGHPEGNTPEKEVPSVIARHVSQYACQRKTTLNNYNKKFTDALEIMAENYKFKENLQACLEAKRAASVLKSLPFEVTSMKDIQGLPCITDDVRDVIEEIIEEGESSRVKEILNDERYKAFKQFTSVFGVGVKTSEKWYRMGLRTVEEAKASKSLKLSKMQKAGFLYYEDLASGVSKEEADAVTLIVKETVRTVSPDALVTIAGGFRRGKPMGHDVDLLITIPGRPTDDELLHKVVDLLKKQGLLLYEDIRESTFVEGQLPSPRPDALDNHQKCFAILKLYRPKVDNSAVGTSKKSDMAEVKDWKAVRVDLVITPFEQFAYALLGWTGSGTFRRDLRRYAEEERDMLLDNHRLYDLKKGIFLSADSEEEIFGHLGLDYLEPWERNA

SEQ ID NO: 4301 - DNA, 1182 bp, synthetic construct
  misc_feature 1..1182: note = Variant of terminal deoxynucleotidyl transferase
  source 1..1182: mol_type = other DNA
atgcatcaccaccatcatcatgggggttctggtcatccggaaggtaataccccggagaaggaggtgccgagcgttatcgcccgtcatgttagtccatacgcgtgccagcgcaagaccacgctgaataactacaacaaaaagttcaccgacgcgctggagatcatggccgagaactacaaatttaaagagaacctgcaggcgtgtctggaagccaagcgcgccgcgagtgtcctgaaaagcctgccgttcgaggttaccagcatgaaagacatccaaggtctgccgtgcattaccgacgacgtacgtgacgtgatcgaggagatcatcgaagagggcgagagcagccgtgttaaagaaatcctcaatgacgagcgctacaaggcctttaagcagttcaccagcgtgttcggtgtgggcgtgaaaacctcggaaaagtggtaccgtatgggcctccgtacggttgaagaagcaaaggccagtaagagtctgaagctgagcaagatgcagaaggcgggcttcctgtattacgaggatctggcgagcggtgttagtaaagaagaagccgatgccgttacgctcatcgtgaaggaaacggtgcgtactgttagtccggatgcgctggtgaccatcgccggcggtttccgccgtggcaaacctatgggccacgacgttgacctgctgatcacgattccgggccgtcctactgatgacgagctgctccacaaagtggttgatctgctcaagaagcaaggtctgctgctgtacgaagacatccgtgagagcacgttcgtggaggggcaactgccaagtggtaagcctgacgccctggacaaccatcagaagtgcttcgccattctcaagctgtaccgtccgaaggtggataacagtgcggttgggacgagtaagaaaagtgacatggctgaggttaaggattggaaagcggttcgtgtggatctggtgatcacgccattcgagcagttcgcctatgcgctgctcggttggacgggcagcggcacgtttcgtcgcgatctgcgtcgctatgcggaggaagagcgcgacatgctgctcgacaaccatcgtctctacgacctgaaaaagggcatctttctgagtgcggacagcgaagaagagattttcggtcatctgggtctggattatctggagccgtgggaacgcaacgcg

SEQ ID NO: 4302 - protein, 394 aa, synthetic construct
  REGION 1..394: note = Variant of terminal deoxynucleotidyl transferase
MHHHHHHGGSGHPEGNTPEKEVPSVIARHVSPYACQRKTTLNNYNKKFTDALEIMAENYKFKENLQACLEAKRAASVLKSLPFEVTSMKDIQGLPCITDDVRDVIEEIIEEGESSRVKEILNDERYKAFKQFTSVFGVGVKTSEKWYRMGLRTVEEAKASKSLKLSKMQKAGFLYYEDLASGVSKEEADAVTLIVKETVRTVSPDALVTIAGGFRRGKPMGHDVDLLITIPGRPTDDELLHKVVDLLKKQGLLLYEDIRESTFVEGQLPSGKPDALDNHQKCFAILKLYRPKVDNSAVGTSKKSDMAEVKDWKAVRVDLVITPFEQFAYALLGWTGSGTFRRDLRRYAEEERDMLLDNHRLYDLKKGIFLSADSEEEIFGHLGLDYLEPWERNA

SEQ ID NO: 4303 - DNA, 1182 bp, synthetic construct
  misc_feature 1..1182: note = Variant of terminal deoxynucleotidyl transferase
  source 1..1182: mol_type = other DNA
atgcatcaccaccatcatcatgggggttctggtcatccggaaggtaataccccggagaaggaggtgccgagcgttatcgcccgtcatgttagtcaatacgcgtgccagcgcaagaccacgctgaataactacaacaaaaagttcaccgacgcgctggagatcatggccgagaactacaaatttaaagagaacctgcaggcgtgtctggaagccaagcgcgccgcgagtgtcctgaaaagcctgccgttcgaggttaccagcatgaaagacatccaaggtctgccgtgcattaccgacgacgtacgtgacgtgatcgaggagatcatcgaagagggcgagagcagccgtgttaaagaaatcctcaatgacgagcgctacaaggcctttaagcagttcaccagcgtgttcggtgtgggcgtgaaaacctcggaaaagtggtaccgtatgggcctccgtacggttgaagaagcaaaggccagtaagagtctgaagctgagcaagatgcagaaggcgggcttcctgtattacgaggatctggcgagcggtgttagtaaagaagaagccgatgccgttacgctcatcgtgaaggaaacggtgcgtactgttagtccggatgcgctggtgaccatcgccggcggtttccgccgtggcaaacctatgggccacgacgttgacctgctgatcacgattccgggccgtcctactgatgacgagctgctccacaaagtggttgatctgctcaagaagcaaggtctgctgctgtacgaagacatccgtgagagcacgttcgtggaggggcaactgccaagtggtaagcctgacgccctggacaaccatcagaagtgcttcgccattctcaagctgtaccgtccgaaggtggataacagtgcggttgggacgagtaagaaaagtgacatggctgaggttaaggattggaaagcggttcgtgtggatctggtgatcacgccattcgagcagttcgcctatgcgctgctcggttggacgggcagcggcaactttcgtcgcgatctgcgtcgctatgcggaggaagagcgcgacatgctgctcgacaaccatcgtctctacgacctgaaaaagggcatctttctgagtgcggacagcgaagaagagattttcggtcatctgggtctggattatctggagccgtgggaacgcaacgcg

SEQ ID NO: 4304 - protein, 394 aa, synthetic construct
  REGION 1..394: note = Variant of terminal deoxynucleotidyl transferase
MHHHHHHGGSGHPEGNTPEKEVPSVIARHVSQYACQRKTTLNNYNKKFTDALEIMAENYKFKENLQACLEAKRAASVLKSLPFEVTSMKDIQGLPCITDDVRDVIEEIIEEGESSRVKEILNDERYKAFKQFTSVFGVGVKTSEKWYRMGLRTVEEAKASKSLKLSKMQKAGFLYYEDLASGVSKEEADAVTLIVKETVRTVSPDALVTIAGGFRRGKPMGHDVDLLITIPGRPTDDELLHKVVDLLKKQGLLLYEDIRESTFVEGQLPSGKPDALDNHQKCFAILKLYRPKVDNSAVGTSKKSDMAEVKDWKAVRVDLVITPFEQFAYALLGWTGSGNFRRDLRRYAEEERDMLLDNHRLYDLKKGIFLSADSEEEIFGHLGLDYLEPWERNA

SEQ ID NO: 4305 - DNA, 1182 bp, synthetic construct
  misc_feature 1..1182: note = Variant of terminal deoxynucleotidyl transferase
  source 1..1182: mol_type = other DNA
atgcatcaccaccatcatcatgggggttctggtcatccggaaggtaataccccggagaaggaggtgccgagcgttatcgcccgtcatgttagtcaatacgcgtgccagcgcaagaccacgctgaataactacaacaaaaagttcaccgacgcgctggagatcatggccgagaactacaaatttaaagagaacctgcaggcgtgtctggaagccaagcgcgccgcgagtgtcctgaaaagcctgccgttcgaggttaccagcatgaaagacatccaaggtctgccgtgcattaccgacgacgtacgtgacgtgatcgaggagatcatcgaagtgggcgagagcagccgtgttaaagaaatcctcaatgacgagcgctacaaggcctttaagcagttcaccagcgtgttcggtgtgggcgtgaaaacctcggaaaagtggtaccgtatgggcctccgtacggttgaagaagcaaaggccagtaagagtctgaagctgagcaagatgcagaaggcgggcttcctgtattacgaggatctggcgagcggtgttagtaaagaagaagccgatgccgttacgctcatcgtgaaggaaacggtgcgtactgttagtccggatgcgctggtgaccatcgccggcggtttccgccgtggcaaacctatgggccacgacgttgacctgctgatcacgattccgggccgtcctactgatgacgagctgctccacaaagtggttgatctgctcaagaagcaaggtctgctgctgtacgaagacatccgtgagagcacgttcgtggaggggcaactgccaagtcctaagcctgacgccctggacaaccatcagaagtgcttcgccattctcaagctgtaccgtccgaaggtggataacagtgcggttgggacgagtaagaaaagtgacatggctgaggttaaggattggaaagcggttcgtgtggatctggtgatcacgccattcgagcagttcgcctatgcgctgctcggttggacgggcagcggcacgtttcgtcgcgatctgcgtcgctatgcggaggaagagcgcgacatgctgctcgacaaccatcgtctctacgacctgaaaaagggcatctttctgagtgcggacagcgaagaagagattttcggtcatctgggtctggattatctggagccgtgggaacgcaacgcg

SEQ ID NO: 4306 - protein, 394 aa, synthetic construct
  REGION 1..394: note = Variant of terminal deoxynucleotidyl transferase
MHHHHHHGGSGHPEGNTPEKEVPSVIARHVSQYACQRKTTLNNYNKKFTDALEIMAENYKFKENLQACLEAKRAASVLKSLPFEVTSMKDIQGLPCITDDVRDVIEEIIEVGESSRVKEILNDERYKAFKQFTSVFGVGVKTSEKWYRMGLRTVEEAKASKSLKLSKMQKAGFLYYEDLASGVSKEEADAVTLIVKETVRTVSPDALVTIAGGFRRGKPMGHDVDLLITIPGRPTDDELLHKVVDLLKKQGLLLYEDIRESTFVEGQLPSPKPDALDNHQKCFAILKLYRPKVDNSAVGTSKKSDMAEVKDWKAVRVDLVITPFEQFAYALLGWTGSGTFRRDLRRYAEEERDMLLDNHRLYDLKKGIFLSADSEEEIFGHLGLDYLEPWERNA

SEQ ID NO: 4307 - DNA, 1182 bp, synthetic construct
  misc_feature 1..1182: note = Variant of terminal deoxynucleotidyl transferase
  source 1..1182: mol_type = other DNA
atgcatcaccaccatcatcatgggggttctggtcatccggaaggtaataccccggagaaggaggtgccgagcgttatcgcccgtcatgttagtcagtacgcgtgccagcgcaagaccacgctgaataactacaacaaaaagttcaccgacgcgctggagatcatggccgagaactacaaatttaaagagaacctgcaggcgtgcctggaagccaagcgcgccgcgagtgtcctgaaaagcctgccgttcgaggttaccagcatgaaagacatccaaggtctgccgtgcattaccgacgacgtacgtgacgtgatcgaggagatcatcgaagagggcgagagcagccgtgttaaagaaatcctcaatgacgagcgctacaaggcctttaagcagttcaccagcgtgttcggtgtgggcgtgaaaacctcggaaaagtggtaccgtatgggcctccgtacggttgaagaagcaaaggccagtaagagtctgaagctgagcaagatgcagaaggcgggcttcctgtattacgaggatctggcgagcggtgttagtaaagaagaagccgatgccgttacgctcatcgtgaaggaaacggtgcgcactgttagtccggatgcgctggtgaccatcgccggcggtttccgccgtggcaaacctatgggccacgacgttgacctgctgatcacgattccgggccgtcctgaagatgacgagctgctccacaaagtggttgatctgctcaagaagcaaggtctgctgctgtacgaagacatccgtgagagcacgttcgtggaggggcaactgccaagtcctaaacctgacgccctggacaaccatcagaagtgcttcgccattctcaagctgtaccgtccgaaggtggataacagtgcggttgggacgagtaagaaaagtgacatggctgaggttaaggattggaaagcggttcgtgtggatctggtgatcacgccattcgagcagttcgcctatgcgctgctcggttggacgggcagcggccaatttcgtcgcgatactcgtcgctatgcggaggaagagcgcgacatgctgctcgacaaccatcgtctctacgacctgaaaaagggcatcttttatagtgcggacagcgaagaagagattttcggtcatctgggtctggattatctggagccgtgggaacgcaacgcg

SEQ ID NO: 4308 - protein, 394 aa, synthetic construct
  REGION 1..394: note = Variant of terminal deoxynucleotidyl transferase
MHHHHHHGGSGHPEGNTPEKEVPSVIARHVSQYACQRKTTLNNYNKKFTDALEIMAENYKFKENLQACLEAKRAASVLKSLPFEVTSMKDIQGLPCITDDVRDVIEEIIEEGESSRVKEILNDERYKAFKQFTSVFGVGVKTSEKWYRMGLRTVEEAKASKSLKLSKMQKAGFLYYEDLASGVSKEEADAVTLIVKETVRTVSPDALVTIAGGFRRGKPMGHDVDLLITIPGRPEDDELLHKVVDLLKKQGLLLYEDIRESTFVEGQLPSPKPDALDNHQKCFAILKLYRPKVDNSAVGTSKKSDMAEVKDWKAVRVDLVITPFEQFAYALLGWTGSGQFRRDTRRYAEEERDMLLDNHRLYDLKKGIFYSADSEEEIFGHLGLDYLEPWERNA

SEQ ID NO: 4309 - DNA, 1182 bp, synthetic construct
  misc_feature 1..1182: note = Variant of terminal deoxynucleotidyl transferase
  source 1..1182: mol_type = other DNA
atgcatcaccaccatcatcatgggggttctggtcatccggaaggtaataccccggagaaggaggtgccgagcgttatcgcccgtcatgttagtcagtacgcgtgccagcgcaagaccacgctgaataactacaacaaaaagttcaccgacgcgctggagatcatggccgagaactacaaatttaaagagaacctgcaggcgtgcctggaagccaagcgcgccgcgagtgtcctgaaaagcctgccgttcgaggttaccagcatgaaagacatccaaggtctgccgtgcattaccgacgacgtacgtgacgtgatcgaagagatcatcgaagagggcgagagcagccgtgttaaagaaatcctcaatgacgagcgctacaaggcctttaagcagttcaccagcgtgttcggtgtgggcgtgaaaacctcggaaaagtggtaccgtatgggcctccgtacggttgaagaagcaaaggccagtaagagtctgaagctgagcaagatgcagaaggcgggcttcctgtattacgaggatctggcgagcggtgttagtaaagaagaagccgatgccgttacgctcatcgtgaaggaaacggtgcgcactgttagtccggatgcgctggtgaccatcgccggcggtttccgccgtggcaaacctatgggccacgacgttgacctgctgatcacgattccgggccgtcctgaagatgacgagctgctccacaaagtggttgatctgctcaagaagcaaggtctgctgctgtacgaagacatccgtgagagcacgttcgtggaggggcaactgccaagtcctaaacctgacgccctggacaaccatcagaagtgcttcgccattctcaagctgtaccgtccgaaggtggataacagtgcggttgggacgagtaagaaaagtgacatggctgaggttaaggattggaaagcggttcgtgtggatctggtgatcacgccattcgagcagttcgcctatgcgctgctcggttggacgggcagcggccaatttcgtcgcgatctgcgtcgctatgcggaggaagagcgcgacatgctgctcgacaaccatcgtctctacgacctgaaaaagggcatcttttatagtgcggacagcgaagaagagattttcggtcatctgggtctggattatctggagccgtgggaacgcaacgcg

SEQ ID NO: 4310 - protein, 394 aa, synthetic construct
  REGION 1..394: note = Variant of terminal deoxynucleotidyl transferase
MHHHHHHGGSGHPEGNTPEKEVPSVIARHVSQYACQRKTTLNNYNKKFTDALEIMAENYKFKENLQACLEAKRAASVLKSLPFEVTSMKDIQGLPCITDDVRDVIEEIIEEGESSRVKEILNDERYKAFKQFTSVFGVGVKTSEKWYRMGLRTVEEAKASKSLKLSKMQKAGFLYYEDLASGVSKEEADAVTLIVKETVRTVSPDALVTIAGGFRRGKPMGHDVDLLITIPGRPEDDELLHKVVDLLKKQGLLLYEDIRESTFVEGQLPSPKPDALDNHQKCFAILKLYRPKVDNSAVGTSKKSDMAEVKDWKAVRVDLVITPFEQFAYALLGWTGSGQFRRDLRRYAEEERDMLLDNHRLYDLKKGIFYSADSEEEIFGHLGLDYLEPWERNA

SEQ ID NO: 4311 - DNA, 1182 bp, synthetic construct
  misc_feature 1..1182: note = Variant of terminal deoxynucleotidyl transferase
  source 1..1182: mol_type = other DNA
atgcatcaccaccatcatcatgggggttctggtcatccggaaggtaataccccggagaaggaggtgccgagcgttatcgcccgtcatgttagtcagtacgcgtgccagcgcaagaccacgctgaataactacaacaaaaagttcaccgacgcgctggagatcatggccgagaactacaaatttaaagagaacctgcaggcgtgcctggaagccaagcgcgccgcgagtgtcctgaaaagcctgccgttcgaggttaccagcatgaaagacatccaaggtctgccgtgcattaccgacgacgtacgtgacgtgatcgaagagatcatcgaagagggcgagagcagccgtgttaaagaaatcctcaatgacgagcgctacaaggcctttaagcagttcaccagcgtgttcggtgtgggcgtgaaaacctcggaaaagtggtaccgtatgggcctccgtacggttgaagaagcaaaggccagtaagagtctgaagctgagcaagatgcagaaggcgggcttcctgtattacgaggatctggcgagcggtgttagtaaagaagaagccgatgccgttacgctcatcgtgaaggaaacggtggctactgttagtccggatgcgctggtgaccatcgccggcggtttccgccgtggcaaacctatgggccacgacgttgacctgctgatcacgattccgggccgtcctgaagatgacgagctgctccacaaagtggttgatctgctcaagaagcaaggtctgctgctgtacgaagacatccgtgagagcacgttcgtggaggggcaactgccaagtcctaaacctgacgccctggacaaccatcagaagtgcttcgccattctcaagctgtaccgtccgaaggtggataacagtgcggttgggacgagtaagaaaagtgacatggctgaggttaaggattggaaagcggttcgtgtggatctggtgatcacgccattcgagcagttcgcctatgcgctgctcggttggacgggcagcggccaatttcgtcgcgatctgcgtcgctatgcggaggaagagcgcgacatgctgctcgacaaccatcgtctctacgacctgaaaaagggcatctttctgagtgcggacagcgaagaagagattttcggtcatctgggcctggattatctggagccgtgggaacgcaacgcg

SEQ ID NO: 4312 - protein, 394 aa, synthetic construct; identical to SEQ ID NO: 4240
  REGION 1..394: note = Variant of terminal deoxynucleotidyl transferase

SEQ ID NO: 4313 - DNA, 1182 bp, synthetic construct
  misc_feature 1..1182: note = Variant of terminal deoxynucleotidyl transferase
  source 1..1182: mol_type = other DNA
atgcatcaccaccatcatcatgggggttctggtcatccggaaggtaataccccggagaaggaggtgccgagcgttatcgcccgtcatgttagtcagtacgcgtgccagcgcaagaccacgctgaataactacaacaaaaagttcaccgacgcgctggagatcatggccgagaactacaaatttaaagagaacctgcaggcgggcctggaagccaagcgcgccgcgagtgtcctgaaaagcctgccgttcgaggttaccagcatgaaagacatccaaggtctgccgtgcattaccgacgacgtacgtgacgtgatcgaagagatcatcgaagagggcgagagcagccgtgttaaagaaatcctcaatgacgagcgctacaaggcctttaagcagttcaccagcgtgttcggtgtgggcgtgaaaacctcggaaaagtggtaccgtatgggcctccgtacggttgaagaagcaaaggccagtaagagtctgaagctgagcaagatgcagaaggcgggcttcctgtattacgaggatctggcgagcggtgttagtaaagaagaagccgatgccgttacgctcatcgtgaaggaaacggtggctactgttagtccggatgcgctggtgaccatcgccggcggtttccgccgtggcaaacctatgggccacgacgttgacctgctgatcacgattccgggccgtcctgaagatgacgagctgctccacaaagtggttgatctgctcaagaagcaaggtctgctgctgtacgaagacatccgtgagagcacgttcgtggaggggcaactgccaaatcctaaacctgacgccctggacaaccatcagaagtgcttcgccattctcaagctgtaccgtccgaaggtggataacagtgcggttgggacgagtaagaaaagtgacatggctgaggttaaggattggaaagcggttcgtgtggatctggtggttacgccattcgagcagttcgcctatgcgctgctcggttggacgggcagcggccaatttcgtcgcgatctgcgtcgctatgcggaggaagagcgcgacatgctgctcgacaaccatcgtctctacgacctgaaaaagggcatctttctgagtgcggacagcgaagaagagattttcggtcatctgggtctggattatctggagccgtgggaacgcaacgcg

SEQ ID NO: 4314 - protein, 394 aa, synthetic construct
  REGION 1..394: note = Variant of terminal deoxynucleotidyl transferase
MHHHHHHGGSGHPEGNTPEKEVPSVIARHVSQYACQRKTTLNNYNKKFTDALEIMAENYKFKENLQAGLEAKRAASVLKSLPFEVTSMKDIQGLPCITDDVRDVIEEIIEEGESSRVKEILNDERYKAFKQFTSVFGVGVKTSEKWYRMGLRTVEEAKASKSLKLSKMQKAGFLYYEDLASGVSKEEADAVTLIVKETVATVSPDALVTIAGGFRRGKPMGHDVDLLITIPGRPEDDELLHKVVDLLKKQGLLLYEDIRESTFVEGQLPNPKPDALDNHQKCFAILKLYRPKVDNSAVGTSKKSDMAEVKDWKAVRVDLVVTPFEQFAYALLGWTGSGQFRRDLRRYAEEERDMLLDNHRLYDLKKGIFLSADSEEEIFGHLGLDYLEPWERNA

SEQ ID NO: 4315 - DNA, 1182 bp, synthetic construct
  misc_feature 1..1182: note = Variant of terminal deoxynucleotidyl transferase
  source 1..1182: mol_type = other DNA
atgcatcaccaccatcatcatgggggttctggtcatccggaaggtaataccccggagaaggaggtgccgagcgttatcgcccgtcatgttagtcagtacgcgtgccagcgcaagaccacgctgaataactacaacaaaaagttcaccgacgcgctggagatcatggccgagaactacaaatttaaagagaacctgcaggcgggcctggaagccaagcgcgccgcgagtgtcctgaaaagcctgccgttcgaggttaccagcatgaaagacatccaaggtctgccgtgcattaccgacgacgtacgtgacgtgatcgaagagatcatcgaagagggcgagagcagccgtgttaaagaaatcctcaatgacgagcgctacaaggcctttaagcagttcaccagcgtgttcggtgtgggcgtgaaaacctcggaaaagtggtaccgtatgggcctccgtacggttgaagaagcaaaggccagtaagagtctgaagctgagcaagatgcagaaggcgggcttcctgtattacgaggatctggcgagcggtgttagtaaagaagaagccgatgccgttacgctcatcgtgaaggaaacggtggctactgttagtccggatgcgctggtgaccatcgccggcggtttccgccgtggcaaacctatgggccacgacgttgacctgctgatcacgattccgggccgtcctgaagatgacgagctgctccacaaagtggttgatctgctcaagaagcaaggtctgctgctgtacgaagacatccgtgagagcacgttcgtggaggggcaactgccaagtcctaaacctgacgccctggacaaccatcagaagtgcttcgccattctcaagctgtaccgtccgaaggtggataacagtgcggttgggacgagtaagaaaagtgacatggctgaggttaaggattggaaagcggttcgtgtggatctggtgatcacgccattcgagcagttcgcctatgcgctgctcggttggacgggcagcggccaatttcgtcgcgatctgcgtcgctatgcggaggaagagcgcgacatgctgctcgacaaccatcgtctctacgacctgaaaaagggcatctttctgagtgcggacagcgaagaagagattttcggtcatctgggtctggattatctggagccgtgggaacgcaacgcg

SEQ ID NO: 4316 - protein, 394 aa, synthetic construct
  REGION 1..394: note = Variant of terminal deoxynucleotidyl transferase
MHHHHHHGGSGHPEGNTPEKEVPSVIARHVSQYACQRKTTLNNYNKKFTDALEIMAENYKFKENLQAGLEAKRAASVLKSLPFEVTSMKDIQGLPCITDDVRDVIEEIIEEGESSRVKEILNDERYKAFKQFTSVFGVGVKTSEKWYRMGLRTVEEAKASKSLKLSKMQKAGFLYYEDLASGVSKEEADAVTLIVKETVATVSPDALVTIAGGFRRGKPMGHDVDLLITIPGRPEDDELLHKVVDLLKKQGLLLYEDIRESTFVEGQLPSPKPDALDNHQKCFAILKLYRPKVDNSAVGTSKKSDMAEVKDWKAVRVDLVITPFEQFAYALLGWTGSGQFRRDLRRYAEEERDMLLDNHRLYDLKKGIFLSADSEEEIFGHLGLDYLEPWERNA

SEQ ID NO: 4317 - DNA, 1182 bp, synthetic construct
  misc_feature 1..1182: note = Variant of terminal deoxynucleotidyl transferase
  source 1..1182: mol_type = other DNA
atgcatcaccaccatcatcatgggggttctggtcatccggaaggtaataccccggagaaggaggtgccgagcgttatcgcccgtcatgttagtccatacgcgtgccagcgcaagaccacgctgaataactacaacaaaaagttcaccgacgcgctggagatcatggccgagaactacaaatttaaagagaacctgcaggcgtgtctggaagccaagcgcgccgcgagtgtcctgaaaagcctgccgttcgaggttaccagcatgaaagacatccaaggtctgccgtgcattaccgacgacgtacgtgacgtgatcgaggagatcatcgaagtgggcgagagcagccgtgttaaagaaatcctcaatgacgagcgctacaaggcctttaagcagttcaccagcgtgttcggtgtgggcgtgaaaacctcggaaaagtggtaccgtatgggcctccgtacggttgaagaagcaaaggccagtaagagtctgaagctgagcaagatgcagaaggcgggcttcctgtattacgaggatctggcgagcggtgttagtaaagaagaagccgatgccgttacgctcatcgtgaaggaaacggtgcgtactgttagtccggatgcgctggtgaccatcgccggcggtttccgccgtggcaaacctatgggccacgacgttgacctgctgatcacgattccgggccgtcctactgatgacgagctgctccacaaagtggttgatctgctcaagaagcaaggtctgctgctgtacgaagacatccgtgagagcacgttcgtggaggggcaactgccaagtcctaaacctgacgccctggacaaccatcagaagtgcttcgccattctcaagctgtaccgtccgaaggtggataacagtgcggttgggacgagtaagaaaagtgacatggctgaggttaaggattggaaagcggttcgtgtggatctggtgatcacgccattcgagcagttcgcctatgcgctgctcggttggacgggcagcggccaatttcgtcgcgatctgcgtcgctatgcggaggaagagcgcgacatgctgctcgacaaccatcgtctctacgacctgaaaaagggcatctttctgagtgcggacagcgaagaagagattttcggtcatctgggtctggattggctggagccgtgggaacgcaacgcg

SEQ ID NO: 4318 - protein, 394 aa, synthetic construct; identical to SEQ ID NO: 4272
  REGION 1..394: note = Variant of terminal deoxynucleotidyl transferase

SEQ ID NO: 4319 - DNA, 1182 bp, synthetic construct
  misc_feature 1..1182: note = Variant of terminal deoxynucleotidyl transferase
  source 1..1182: mol_type = other DNA
atgcatcaccaccatcatcatgggggttctggtcatccggaaggtaataccccggagaaggaggtgccgagcgttatcgcccgtcatgttagtcagtacgcgtgccagcgcaagaccacgctgaataactacaacaaaaagttcaccgacgcgctggagatcatggccgagaactacaaatttaaagagaacctgcaggcgtgtctggaagccaagcgcgccgcgagtgtcctgaaaagcctgccgttcgaggttaccagcatgaaagacatccaaggtctgccgtgcattaccgacgacgtacgtgacgtgatcgaggagatcatcgaagagggcgagagcagccgtgttaaagaaatcctcaatgacgagcgctacaaggcctttaagcagttcaccagcgtgttcggtgtgggcgtgaaaacctcggaaaagtggtaccgtatgggcctccgtacggttgaagaagcaaaggccagtaagagtctgaagctgagcaagatgcagaaggcgggcttcctgtattacgaggatctggcgagcggtgttagtaaagaagaagccgatgccgttacgctcatcgtgaaggaaacggtgcgtactgttagtccggatgcgctggtgaccatcgccggcggtttccgccgtggcaaacctatgggccacgacgttgacctgctgatcacgattccgggccgtcctgaagatgacgagctgctccacaaagtggttgatctgctcaagaagcaaggtctgctgctgtacgaagacatccgtgagagccgtttcgtggaggggcaactgccaagtcctaaacctgacgccctggacaaccatcagaagtgcttcgccattctcaagctgtaccgtccgaaggtggataacagtgcggttgggacgagtaagaaaagtgacatggctgaggttaaggattggaaagcggttcgtgtggatctggtgatcacgccattcgagcagttcgcctatgcgctgctcggttggacgggcagcggccaatttcgtcgcgatctgcgtcgctatgcggaggaagagcgcgacatgctgctcgacaaccatcgtctctacgacctgaaaaagggcatctttctgagtgcggacagcgaagaagagattttcgggcatctgggtctggattatctggagccgtgggaacgcaacgcg

SEQ ID NO: 4320 - protein, 394 aa, synthetic construct
  REGION 1..394: note = Variant of terminal deoxynucleotidyl transferase
MHHHHHHGGSGHPEGNTPEKEVPSVIARHVSQYACQRKTTLNNYNKKFTDALEIMAENYKFKENLQACLEAKRAASVLKSLPFEVTSMKDIQGLPCITDDVRDVIEEIIEEGESSRVKEILNDERYKAFKQFTSVFGVGVKTSEKWYRMGLRTVEEAKASKSLKLSKMQKAGFLYYEDLASGVSKEEADAVTLIVKETVRTVSPDALVTIAGGFRRGKPMGHDVDLLITIPGRPEDDELLHKVVDLLKKQGLLLYEDIRESRFVEGQLPSPKPDALDNHQKCFAILKLYRPKVDNSAVGTSKKSDMAEVKDWKAVRVDLVITPFEQFAYALLGWTGSGQFRRDLRRYAEEERDMLLDNHRLYDLKKGIFLSADSEEEIFGHLGLDYLEPWERNA

SEQ ID NO: 4321 - DNA, 1182 bp, synthetic construct
  misc_feature 1..1182: note = Variant of terminal deoxynucleotidyl transferase
  source 1..1182: mol_type = other DNA
atgcatcaccaccatcatcatgggggttctggtcatccggaaggtaataccccggagaaggaggtgccgagcgttatcgcccgtcatgttagtcaatacgcgtgccagcgcaagaccacgctgaataactacaacaaaaagttcaccgacgcgctggagatcatggccgagaactacaaatttaaagagaacctgcaggcgtgtctggaagccaagcgcgccgcgagtgtcctgaaaagcctgccgttcgaggttaccagcatgaaagacatccaaggtctgccgtgcattaccgacgacgtacgtgacgtgatcgaggagatcatcgaagagggcgagagcagccgtgttaaagaaatcctcaatgacgagcgctacaaggcctttaagcagttcaccagcgtgttcggtgtgggcgtgaaaacctcggaaaagtggtaccgtatgggcctccgtacggttgaagaagcaaaggccagtaagagtctgaagctgagcaagatgcagaaggcgggcttcctgtattacgaggatctggcgagcggtgttagtaaagaagaagccgatgccgttacgctcatcgtgaaggaaacggtgcgtactgttagtccggatgcgctggtgaccatcgccggcggtttccgccgtggcaaacctatgggccacgacgttgacctgctgatcacgattccgggccgtcctactgatgacgagctgctccacaaagtggttgatctgctcaagaagcaaggtctgctgctgtacgaagacatccgtgagagcacgttcgtggaggggcaactgccaagtcctaagcctgacgccctggacaaccatcagaagtgcttcgccattctcaagctgtaccgtccgaaggtggataacagtgcggttgggacgagtaagaaaagtgacatggctgaggttaaggattggaaagcggttcgtgtggatctggtgatcacgccattcgagcagttcgcctatgcgctgctcggttggacgggcagcggccaatttcgtcgcgatctgcgtcgctatgcggaggaagagcgcgacatgctgctcgacaaccatcgtctctacgacctgaaaaagggcatctttctgagtgcggacagcgaagaagagattttcggtcatctgggtctggattatctggagccgtgggaacgcaacgcg

SEQ ID NO: 4322 - protein, 394 aa, synthetic construct; identical to SEQ ID NO: 4258
  REGION 1..394: note = Variant of terminal deoxynucleotidyl transferase

SEQ ID NO: 4323 - DNA, 1182 bp, synthetic construct
  misc_feature 1..1182: note = Variant of terminal deoxynucleotidyl transferase
  source 1..1182: mol_type = other DNA
atgcatcaccaccatcatcatgggggttctggtcatccggaaggtaataccccggagaaggaggtgccgagcgttatcgcccgtcatgttagtcagtacgcgtgccagcgcaagaccacgctgaataactacaacaaaaagttcaccgacgcgctggagatcatggccgagaactacaaatttaaagagaacctgcaggcgggcctggaagccaagcgcgccgcgagtgtcctgaaaagcctgccgttcgaggttaccagcatgaaagacatccaaggtctgccgtgcattaccgacgacgtacgtgacgtgatcgaagagatcatcgaagagggcgagagcagccgtgttaaagaaatcctcaatgacgagcgctacaaggcctttaagcagttcaccagcgtgttcggtgtgggcgtgaaaacctcggaaaagtggtaccgtatgggcctccgtacggttgaagaagcaaaggccagtaagagtctgaagctgagcaagatgcagaaggcgggcttcctgtattacgaggatctggcgagcggtgttagtaaagaagaagccgatgccgttacgctcatcgtgaaggaaacggtgcgcactgttagtccggatgcgctggtgaccatcgccggcggtttccgccgtggcaaacctatgggccacgacgttgacctgctgatcacgattccgggccgtcctgaagatgacgagctgctccacaaagtggttgatctgctcaagaagcaaggtctgctgctgtacgaagacatccgtgagagcacgttcgtggaggggcaactgccaaatcctaaacctgacgccctggacaaccatcagaagtgcttcgccattctcaagctgtaccgtccgaaggtggataacagtgcggttgggacgagtaagaaaagtgacatggctgaggttaaggattggaaagcggttcgtgtggatctggtggttgcgccattcgagcagttcgcctatgcgctgctcggttggacgggcagcggccaatttcgtcgcgatctgcgtcgctatgcggaggaagagcgcgacatgctgctcgacaaccatcgtctctacgacctgaaaaagggcatctttctgagtgcggacagcgaagaagagattttcggtcatctgggcctggattatctggagccgtgggaacgcaacgcg

SEQ ID NO: 4324 - protein, 394 aa, synthetic construct
  REGION 1..394: note = Variant of terminal deoxynucleotidyl transferase
MHHHHHHGGSGHPEGNTPEKEVPSVIARHVSQYACQRKTTLNNYNKKFTDALEIMAENYKFKENLQAGLEAKRAASVLKSLPFEVTSMKDIQGLPCITDDVRDVIEEIIEEGESSRVKEILNDERYKAFKQFTSVFGVGVKTSEKWYRMGLRTVEEAKASKSLKLSKMQKAGFLYYEDLASGVSKEEADAVTLIVKETVRTVSPDALVTIAGGFRRGKPMGHDVDLLITIPGRPEDDELLHKVVDLLKKQGLLLYEDIRESTFVEGQLPNPKPDALDNHQKCFAILKLYRPKVDNSAVGTSKKSDMAEVKDWKAVRVDLVVAPFEQFAYALLGWTGSGQFRRDLRRYAEEERDMLLDNHRLYDLKKGIFLSADSEEEIFGHLGLDYLEPWERNA

SEQ ID NO: 4325 - DNA, 1182 bp, synthetic construct
  misc_feature 1..1182: note = Variant of terminal deoxynucleotidyl transferase
  source 1..1182: mol_type = other DNA
atgcatcaccaccatcatcatgggggttctggtcatccggaaggtaataccccggagaaggaggtgccgagcgttatcgcccgtcatgttagtcagtacgcgtgccagcgcaagaccacgctgaataactacaacaaaaagttcaccgacgcgctggagatcatggccgagaactacaaatttaaagagaacctgcaggcgtgtctggaagccaagcgcgccgcgagtgtcctgaaaagcctgccgttcgaggttaccagcatgaaagacatccaaggtctgccgtgcattaccgacgacgtacgtgacgtgatcgaggagatcatcgaagagggcgagagcagccgtgttaaagaaatcctcaatgacgagcgctacaaggcctttaagcagttcaccagcgtgttcggtgtgggcgtgaaaacctcggaaaagtggtaccgtatgggcctccgtacggttgaagaagcaaaggccagtaagagtctgaagctgagcaagatgcagaaggcgggcttcctgtattacgaggatctggcgagcggtgttagtaaagaagaagccgatgccgttacgctcatcgtgaaggaaacggtgcgtactgttagtccggatgcgctggtgaccatcgccggcggtttccgccgtggcaaacctatgggccacgacgttgacctgctgatcactattccgggccgtcctgaagatgacgagctgctccacaaagtggttgatctgctcaagaagcaaggtctgctgctgtacgaagacatccgtgagagcacgttcgtggaggggcaactgccaagtcctaaacctgacgccctggaccgtcatcagaagtgcttcgccattctcaagctgtaccgtccgaaggtggataacagtgcggttgggacgagtaagaaaagtgacatggctgaggttaaggattggaaagcggttcgtgtggatctggtgatcacgccattcgagcagttcgcctatgcgctgctcggttggacgggcagcggccaatttcgtcgcgatctgcgtcgctatgcggaggaagagcgcgacatgctgctcgacaaccatcgtctctacgacctgaaaaagggcatctttctgagtgcggacagcgaagaagagattttcggtcatctgggtctggattatctggagccgtgggaacgcaacgcg

SEQ ID NO: 4326 - protein, 394 aa, synthetic construct
  REGION 1..394: note = Variant of terminal deoxynucleotidyl transferase
MHHHHHHGGSGHPEGNTPEKEVPSVIARHVSQYACQRKTTLNNYNKKFTDALEIMAENYKFKENLQACLEAKRAASVLKSLPFEVTSMKDIQGLPCITDDVRDVIEEIIEEGESSRVKEILNDERYKAFKQFTSVFGVGVKTSEKWYRMGLRTVEEAKASKSLKLSKMQKAGFLYYEDLASGVSKEEADAVTLIVKETVRTVSPDALVTIAGGFRRGKPMGHDVDLLITIPGRPEDDELLHKVVDLLKKQGLLLYEDIRESTFVEGQLPSPKPDALDRHQKCFAILKLYRPKVDNSAVGTSKKSDMAEVKDWKAVRVDLVITPFEQFAYALLGWTGSGQFRRDLRRYAEEERDMLLDNHRLYDLKKGIFLSADSEEEIFGHLGLDYLEPWERNA

SEQ ID NO: 4327 - DNA, 1182 bp, synthetic construct
  misc_feature 1..1182: note = Variant of terminal deoxynucleotidyl transferase
  source 1..1182: mol_type = other DNA
atgcatcaccaccatcatcatgggggttctggtcatccggaaggtaataccccggagaaggaggtgccgagcgttatcgcccgtcatgttagtcagtacgcgtgccagcgcaagaccacgctgaataactacaacaaaaagttcaccgacgcgctggagatcatggccgagaactacaaatttaaagagaacctgcaggcgtgtctggaagccaagcgcgccgcgagtgtcctgaaaagcctgccgttcgaggttaccagcatgaaagacatccaaggtctgccgtgcattaccgacgacgtacgtgacgtgatcgaggagatcatcgaagagggcgagagcagccgtgttaaagaaatcctcaatgacgagcgctacaaggcctttaagcagttcaccagcgtgttcggtgtgggcgtgaaaacctcggaaaagtggtaccgtatgggcctccgtacggttgaagaagcaaaggccagtaagagtctgaagctgagcaagatgcagaaggcgggcttcctgtattacgaggatctggcgagcggtgttagtaaagaagaagccgatgccgttacgctcatcgtgaaggaaacggtgcgtactgttagtccggatgcgctggtgaccatcgccggcggtttccgccgtggcaaacctatgggccacgacgttgacctgctgatcactattccgggccgtcctgaagatgacgagctgctccacaaagtggttgatctgctcaagaagcaaggtctgctgctgtacgaagacatccgtgagagcacgttcgtggaggggcaactgccaagtcctaaacctgacgccctggacaaccatcagaagtgcttcgccattctcaagctgtaccgtccgaaggtggataacagtgcggttgggacgagtaagaaaagtgacatggctgaggttaaggattggaaagcggttcgtgtggatctggtgatcacgccattcgagcagttcgcctatgcgctgctcggttggacgggcagcggccaatttcgtcgcgatctgcgtcgctatgcgaacgaagagcgcgacatgctgctcgacaaccatcgtctctacgacctgaaaaagggcatctttctgagtgcggacagcgaagaagagattttcgggcatctgggtctggattatctggagccgtgggaacgcaacgcg

SEQ ID NO: 4328 - protein, 394 aa, synthetic construct
  REGION 1..394: note = Variant of terminal deoxynucleotidyl transferase
MHHHHHHGGSGHPEGNTPEKEVPSVIARHVSQYACQRKTTLNNYNKKFTDALEIMAENYKFKENLQACLEAKRAASVLKSLPFEVTSMKDIQGLPCITDDVRDVIEEIIEEGESSRVKEILNDERYKAFKQFTSVFGVGVKTSEKWYRMGLRTVEEAKASKSLKLSKMQKAGFLYYEDLASGVSKEEADAVTLIVKETVRTVSPDALVTIAGGFRRGKPMGHDVDLLITIPGRPEDDELLHKVVDLLKKQGLLLYEDIRESTFVEGQLPSPKPDALDNHQKCFAILKLYRPKVDNSAVGTSKKSDMAEVKDWKAVRVDLVITPFEQFAYALLGWTGSGQFRRDLRRYANEERDMLLDNHRLYDLKKGIFLSADSEEEIFGHLGLDYLEPWERNA

SEQ ID NO: 4329 - DNA, 1182 bp, synthetic construct
  misc_feature 1..1182: note = Variant of terminal deoxynucleotidyl transferase
  source 1..1182: mol_type = other DNA
atgcatcaccaccatcatcatgggggttctggtcatccggaaggtaataccccggagaaggaggtgccgagcgttatcgcccgtcatgttagtccatacgcgtgccagcgcaagaccacgctgaataactacaacaaaaagttcaccgacgcgctggagatcatggccgagaactacaaatttaaagagaacctgcaggcgtgtctggaagccaagcgcgccgcgagtgtcctgaaaagcctgccgttcgaggttaccagcatgaaagacatccaaggtctgccgtgcattaccgacgacgtacgtgacgtgatcgaggagatcatcgaagagggcgagagcagccgtgttaaagaaatcctcaatgacgagcgctacaaggcctttaagcagttcaccagcgtgttcggtgtgggcgtgaaaacctcggaaaagtggtaccgtatgggcctccgtacggttgaagaagcaaaggccagtaagagtctgaagctgagcaagatgcagaaggcgggcttcctgtattacgaggatctggcgagcggtgttagtaaagaagaagccgatgccgttacgctcatcgtgaaggaaacggtgcgtactgttagtccggatgcgctggtgaccatcgccggcggtttccgccgtggcaaacctatgggccacgacgttgacctgctgatcacgattccgggccgtcctactgatgacgagctgctccacaaagtggttgatctgctcaagaagcaaggtctgctgctgtacgaagacatccgtgagagcacgttcgtggaggggcaactgccaagtcctaaacctgacgccctggacaaccatcagaagtgcttcgccattctcaagctgtaccgtccgaaggtggataacagtgcggttgggacgagtaagaaaagtgacatggctgaggttaaggattggaaagcggttcgtgtggatctggtgatcacgccattcgagcagttcgcctatgcgctgctcggttggacgggcagcggcacgtttcgtcgcgatctgcgtcgctatgcggaggaagagcgcgacatgctgctcgacaaccatcgtctctacgacctgaaaaagggcatctttctgagtgcggacagcgaagaagagattttcggtcatctgggtctggattggctggagccgtgggaacgcaacgcg

SEQ ID NO: 4330 - protein, 394 aa, synthetic construct
  REGION 1..394: note = Variant of terminal deoxynucleotidyl transferase
MHHHHHHGGSGHPEGNTPEKEVPSVIARHVSPYACQRKTTLNNYNKKFTDALEIMAENYKFKENLQACLEAKRAASVLKSLPFEVTSMKDIQGLPCITDDVRDVIEEIIEEGESSRVKEILNDERYKAFKQFTSVFGVGVKTSEKWYRMGLRTVEEAKASKSLKLSKMQKAGFLYYEDLASGVSKEEADAVTLIVKETVRTVSPDALVTIAGGFRRGKPMGHDVDLLITIPGRPTDDELLHKVVDLLKKQGLLLYEDIRESTFVEGQLPSPKPDALDNHQKCFAILKLYRPKVDNSAVGTSKKSDMAEVKDWKAVRVDLVITPFEQFAYALLGWTGSGTFRRDLRRYAEEERDMLLDNHRLYDLKKGIFLSADSEEEIFGHLGLDWLEPWERNA

SEQ ID NO: 4331 - DNA, 1182 bp, synthetic construct
  misc_feature 1..1182: note = Variant of terminal deoxynucleotidyl transferase
  source 1..1182: mol_type = other DNA
atgcatcaccaccatcatcatgggggttctggtcatccggaaggtaataccccggagaaggaggtgccgagcgttatcgcccgtcatgttagtccatacgcgtgccagcgcaagaccacgctgaataactacaacaaaaagttcaccgacgcgctggagatcatggccgagaactacaaatttaaagagaacctgcaggcgtgtctggaagccaagcgcgccgcgagtgtcctgaaaagcctgccgttcgaggttaccagcatgaaagacatccaaggtctgccgtgcattaccgacgacgtacgtgacgtgatcgaggagatcatcgaagtgggcgagagcagccgtgttaaagaaatcctcaatgacgagcgctacaaggcctttaagcagttcaccagcgtgttcggtgtgggcgtgaaaacctcggaaaagtggtaccgtatgggcctccgtacggttgaagaagcaaaggccagtaagagtctgaagctgagcaagatgcagaaggcgggcttcctgtattacgaggatctggcgagcggtgttagtaaagaagaagccgatgccgttacgctcatcgtgaaggaaacggtgcgtactgttagtccggatgcgctggtgaccatcgccggcggtttccgccgtggcaaacctatgggccacgacgttgacctgctgatcacgattccgggccgtcctactgatgacgagctgctccacaaagtggttgatctgctcaagaagcaaggtctgctgctgtacgaagacatccgtgagagcacgttcgtggaggggcaactgccaagtcctaagcctgacgccctggacaaccatcagaagtgcttcgccattctcaagctgtaccgtccgaaggtggataacagtgcggttgggacgagtaagaaaagtgacatggctgaggttaaggattggaaagcggttcgtgtggatctggtgatcacgccattcgagcagttcgcctatgcgctgctcggttggacgggcagcggcacgtttcgtcgcgatctgcgtcgctatgcggaggaagagcgcgacatgctgctcgacaaccatcgtctctacgacctgaaaaagggcatctttctgagtgcggacagcgaagaagagattttcggtcatctgggtctggattggctggagccgtgggaacgcaacgcg

SEQ ID NO: 4332 - protein, 394 aa, synthetic construct
  REGION 1..394: note = Variant of terminal deoxynucleotidyl transferase
MHHHHHHGGSGHPEGNTPEKEVPSVIARHVSPYACQRKTTLNNYNKKFTDALEIMAENYKFKENLQACLEAKRAASVLKSLPFEVTSMKDIQGLPCITDDVRDVIEEIIEVGESSRVKEILNDERYKAFKQFTSVFGVGVKTSEKWYRMGLRTVEEAKASKSLKLSKMQKAGFLYYEDLASGVSKEEADAVTLIVKETVRTVSPDALVTIAGGFRRGKPMGHDVDLLITIPGRPTDDELLHKVVDLLKKQGLLLYEDIRESTFVEGQLPSPKPDALDNHQKCFAILKLYRPKVDNSAVGTSKKSDMAEVKDWKAVRVDLVITPFEQFAYALLGWTGSGTFRRDLRRYAEEERDMLLDNHRLYDLKKGIFLSADSEEEIFGHLGLDWLEPWERNA

SEQ ID NO: 4333 - DNA, 1182 bp, synthetic construct; identical to SEQ ID NO: 4263
  misc_feature 1..1182: note = Variant of terminal deoxynucleotidyl transferase
  source 1..1182: mol_type = other DNA

SEQ ID NO: 4334 - protein, 394 aa, synthetic construct; identical to SEQ ID NO: 4264
  REGION 1..394: note = Variant of terminal deoxynucleotidyl transferase

SEQ ID NO: 4335 - DNA, 1182 bp, synthetic construct
  misc_feature 1..1182: note = Variant of terminal deoxynucleotidyl transferase
  source 1..1182: mol_type = other DNA
atgcatcaccaccatcatcatgggggttctggtcatccggaaggtaataccccggagaaggaggtgccgagcgttatcgcccgtcatgttagtcagtacgcgtgccagcgcaagaccacgctgaataactacaacaaaaagttcaccgacgcgctggagatcatggccgagaactacaaatttaaagagaacctgcaggcgtgtctggaagccaagcgcgccgcgagtgtcctgaaaagcctgccgttcgaggttaccagcatgaaagacatccaaggtctgccgtgcattaccgacgacgtacgtgacgtgatcgaggagatcatcgaagagggcgagagcagccgtgttaaagaaatcctcaatgacgagcgctacaaggcctttaagcagttcaccagcgtgttcggtgtgggcgtgaaaacctcggaaaagtggtaccgtatgggcctccgtacggttgaagaagcaaaggccagtaagagtctgaagctgagcaagatgcagaaggcgggcttcctgtattacgaggatctggcgagcggtgttagtaaagaagaagccgatgccgttacgctcatcgtgaaggaaacggtgcgtactgttagtccggatgcgctggtgaccatcgccggcggtttccgccgtggcaaacctatgggccacgacgttgacctgctgatcacgattccgggccgtcctactgatgacgagctgctccacaaagtggttgatctgctcaagaagcaaggtctgctgctgtacgaagacatccgtgagagcacgttcgtggaggggcaactgccaagtggtcgtcctgacgccctggacaaccatcagaagtgcttcgccattctcaagctgtaccgtccgaaggtggataacagtgcggttgggacgagtaagaaaagtgacatggctgaggttaaggattggaaagcggttcgtgtggatctggtgatcacgccattcgagcagttcgcctatgcgctgctcggttggacgggcagcggcaactttcgtcgcgatctgcgtcgctatgcggaggaagagcgcgacatgctgctcgacaaccatcgtctctacgacctgaaaaagggcatctttctgagtgcggacagcgaagaagagattttcggtcatctgggtctggattatctggagccgtgggaacgcaacgcg

SEQ ID NO: 4336 - protein, 394 aa, synthetic construct
  REGION 1..394: note = Variant of terminal deoxynucleotidyl transferase
MHHHHHHGGSGHPEGNTPEKEVPSVIARHVSQYACQRKTTLNNYNKKFTDALEIMAENYKFKENLQACLEAKRAASVLKSLPFEVTSMKDIQGLPCITDDVRDVIEEIIEEGESSRVKEILNDERYKAFKQFTSVFGVGVKTSEKWYRMGLRTVEEAKASKSLKLSKMQKAGFLYYEDLASGVSKEEADAVTLIVKETVRTVSPDALVTIAGGFRRGKPMGHDVDLLITIPGRPTDDELLHKVVDLLKKQGLLLYEDIRESTFVEGQLPSGRPDALDNHQKCFAILKLYRPKVDNSAVGTSKKSDMAEVKDWKAVRVDLVITPFEQFAYALLGWTGSGNFRRDLRRYAEEERDMLLDNHRLYDLKKGIFLSADSEEEIFGHLGLDYLEPWERNA

SEQ ID NO: 4337 - DNA, 1182 bp, synthetic construct
  misc_feature 1..1182: note = Variant of terminal deoxynucleotidyl transferase
  source 1..1182: mol_type = other DNA
atgcatcaccaccatcatcatgggggttctggtcatccggaaggtaataccccggagaaggaggtgccgagcgttatcgcccgtcatgttagtccatacgcgtgccagcgcaagaccacgctgaataactacaacaaaaagttcaccgacgcgctggagatcatggccgagaactacaaatttaaagagaacctgcaggcgtgtctggaagccaagcgcgccgcgagtgtcctgaaaagcctgccgttcgaggttaccagcatgaaagacatccaaggtctgccgtgcattaccgacgacgtacgtgacgtgatcgaggagatcatcgaagagggcgagagcagccgtgttaaagaaatcctcaatgacgagcgctacaaggcctttaagcagttcaccagcgtgttcggtgtgggcgtgaaaacctcggaaaagtggtaccgtatgggcctccgtacggttgaagaagcaaaggccagtaagagtctgaagctgagcaagatgcagaaggcgggcttcctgtattacgaggatctggcgagcggtgttagtaaagaagaagccgatgccgttacgctcatcgtgaaggaaacggtgcgtactgttagtccggatgcgctggtgaccatcgccggcggtttccgccgtggcaaacctatgggccacgacgttgacctgctgatcacgattccgggccgtcctgaagatgacgagctgctccacaaagtggttgatctgctcaagaagcaaggtctgctgctgtacgaagacatccgtgagagcacgttcgtggaggggcaactgccaagtcctaaacctgacgccctggacaaccatcagaagtgcttcgccattctcaagctgtaccgtccgaaggtggataacagtgcggttgggacgagtaagaaaagtgacatggctgaggttaaggattggaaagcggttcgtgtggatctggtgatcacgccattcgagcagttcgcctatgcgctgctcggttggacgggcagcggcaactttcgtcgcgatctgcgtcgctatgcggaggaagagcgcgacatgctgctcgacaaccatcgtctctacgacctgaaaaagggcatctttctgagtgcggacagcgaagaagagattttcggtcatctgggtctggattatctggagccgtgggaacgcaacgcg

SEQ ID NO: 4338 - protein, 394 aa, synthetic construct
  REGION 1..394: note = Variant of terminal deoxynucleotidyl transferase
MHHHHHHGGSGHPEGNTPEKEVPSVIARHVSPYACQRKTTLNNYNKKFTDALEIMAENYKFKENLQACLEAKRAASVLKSLPFEVTSMKDIQGLPCITDDVRDVIEEIIEEGESSRVKEILNDERYKAFKQFTSVFGVGVKTSEKWYRMGLRTVEEAKASKSLKLSKMQKAGFLYYEDLASGVSKEEADAVTLIVKETVRTVSPDALVTIAGGFRRGKPMGHDVDLLITIPGRPEDDELLHKVVDLLKKQGLLLYEDIRESTFVEGQLPSPKPDALDNHQKCFAILKLYRPKVDNSAVGTSKKSDMAEVKDWKAVRVDLVITPFEQFAYALLGWTGSGNFRRDLRRYAEEERDMLLDNHRLYDLKKGIFLSADSEEEIFGHLGLDYLEPWERNA

SEQ ID NO: 4339 - DNA, 1182 bp, synthetic construct
  misc_feature 1..1182: note = Variant of terminal deoxynucleotidyl transferase
  source 1..1182: mol_type = other DNA
atgcatcaccaccatcatcatgggggttctggtcatccggaaggtaataccccggagaaggaggtgccgagcgttatcgcccgtcatgttagtcagtacgcgtgccagcgcaagaccacgctgaataactacaacaaaaagttcaccgacgcgctggagatcatggccgagaactacaaatttaaagagaacctgcaggcgggcctggaagccaagcgcgccgcgagtgtcctgaaaagcctgccgttcgaggttaccagcatgaaagacatccaaggtctgccgtgcattaccgacgacgtacgtgacgtgatccgcgagatcatcgaagagggcgagagcagccgtgttaaagaaatcctcaatgacgagcgctacaaggcctttaagcagttcaccagcgtgttcggtgtgggcgtgaaaacctcggaaaagtggtaccgtatgggcctccgtacggttgaagaagcaaaggccagtaagagtctgaagctgagcaagatgcagaaggcgggcttcctgtattacgaggatctggcgagcggtgttagtaaagaagaagccgatgccgttacgctcatcgtgaaggaaacggtgcgcactgttagtccggatgcgctggtgaccatcgccggcggtttccgccgtggcaaacctatgggccacgacgttgacctgctgatcacgattccgggccgtcctgaagatgacgagctgctccacaaagtggttgatctgctcaagaagcaaggtctgctgctgtacgaagacatccgtgagagcacgttcgtggaggggcaactgccaagtcctaaacctgacgccctggacaaccatcagaagtgcttcgccattctcaagctgtaccgtccgaaggtggataacagtgcggttgggacgagtaagaaaagtgacatggctgaggttaaggattggaaagcggttcgtgtggatctggtggttgcgccattcgagcagttcgcctatgcgctgctcggttggacgggcagcggccaatttcgtcgcgatctgcgtcgctatgcggaggaagagcgcgacatgctgctcgacaaccatcgtctctacgacctgaaaaagggcatctttctgagtgcggacagcgaagaagagattttcggtcatctgggtctggattatctggagccgtgggaacgcaacgcg

SEQ ID NO: 4340 - protein, 394 aa, synthetic construct
  REGION 1..394: note = Variant of terminal deoxynucleotidyl transferase
MHHHHHHGGSGHPEGNTPEKEVPSVIARHVSQYACQRKTTLNNYNKKFTDALEIMAENYKFKENLQAGLEAKRAASVLKSLPFEVTSMKDIQGLPCITDDVRDVIREIIEEGESSRVKEILNDERYKAFKQFTSVFGVGVKTSEKWYRMGLRTVEEAKASKSLKLSKMQKAGFLYYEDLASGVSKEEADAVTLIVKETVRTVSPDALVTIAGGFRRGKPMGHDVDLLITIPGRPEDDELLHKVVDLLKKQGLLLYEDIRESTFVEGQLPSPKPDALDNHQKCFAILKLYRPKVDNSAVGTSKKSDMAEVKDWKAVRVDLVVAPFEQFAYALLGWTGSGQFRRDLRRYAEEERDMLLDNHRLYDLKKGIFLSADSEEEIFGHLGLDYLEPWERNA

SEQ ID NO: 4341 - DNA, 1182 bp, synthetic construct
  misc_feature 1..1182: note = Variant of terminal deoxynucleotidyl transferase
  source 1..1182: mol_type = other DNA
atgcatcaccaccatcatcatgggggttctggtcatccggaaggtaataccccggagaaggaggtgccgagcgttatcgcccgtcatgttagtcagtacgcgtgccagcgcaagaccacgctgaataactacaacaaaaagttcaccgacgcgctggagatcatggccgagaactacaaatttaaagagaacctgcaggcgtgtctggaagccaagcgcgccgcgagtgtcctgaaaagcctgccgttcgaggttaccagcatgaaagacatccaaggtctgccgtgcattaccgacgacgtacgtgacgtgatcgaggagatcatcgaagagggcgagagcagccgtgttaaagaaatcctcaatgacgagcgctacaaggcctttaagcagttcaccagcgtgttcggtgtgggcgtgaaaacctcggaaaagtggtaccgtatgggcctccgtacggttgaagaagcaaaggccagtaagagtctgaagctgagcaagatgcagaaggcgggcttcctgtattacgaggatctggcgagcggtgttagtaaagaagaagccgatgccgttacgctcatcgtgaaggaaacggtgcgtactgttagtccggatgcgctggtgaccatcgccggcggtttccgccgtggcaaacctatgggccacgacgttgacctgctgatcacgattccgggccgtcctgaagatgacgagctgctccacaaagtggttgatctgctcaagaagcaaggtctgctgctgtacgaagacatccgtgagagccgtttcgtggaggggcaactgccaagtcctaaacctgacgccctggacaaccatcagaagtgcttcgccattctcaagctgtaccgtccgaaggtggataacagtgcggttgggacgagtaagaaaagtgacatggctgaggttaaggattggaaagcggttcgtgtggatctggtgatcacgccattccaccagttcgcctatgcgctgctcggttggacgggcagcggccaatttcgtcgcgatctgcgtcgctatgcgaacgaagagcgcgacatgctgctcgacaaccatcgtctctacgacctgaaaaagggcatctttctgagtgcggacagcgaagaagagattttcgggcatctgggtctggattatctggagccgtgggaacgcaacgcg

SEQ ID NO: 4342 - protein, 394 aa, synthetic construct
  REGION 1..394: note = Variant of terminal deoxynucleotidyl transferase
MHHHHHHGGSGHPEGNTPEKEVPSVIARHVSQYACQRKTTLNNYNKKFTDALEIMAENYKFKENLQACLEAKRAASVLKSLPFEVTSMKDIQGLPCITDDVRDVIEEIIEEGESSRVKEILNDERYKAFKQFTSVFGVGVKTSEKWYRMGLRTVEEAKASKSLKLSKMQKAGFLYYEDLASGVSKEEADAVTLIVKETVRTVSPDALVTIAGGFRRGKPMGHDVDLLITIPGRPEDDELLHKVVDLLKKQGLLLYEDIRESRFVEGQLPSPKPDALDNHQKCFAILKLYRPKVDNSAVGTSKKSDMAEVKDWKAVRVDLVITPFHQFAYALLGWTGSGQFRRDLRRYANEERDMLLDNHRLYDLKKGIFLSADSEEEIFGHLGLDYLEPWERNA

SEQ ID NO: 4343 - DNA, 1182 bp, synthetic construct
  misc_feature 1..1182: note = Variant of terminal deoxynucleotidyl transferase
  source 1..1182: mol_type = other DNA
atgcatcaccaccatcatcatgggggttctggtcatccggaaggtaataccccggagaaggaggtgccgagcgttatcgcccgtcatgttagtcagtacgcgtgccagcgcaagaccacgctgaataactacaacaaaaagttcaccgacgcgctggagatcatggccgagaactacaaatttaaagagaacctgcaggcgtgtctggaagccaagcgcgccgcgagtgtcctgaaaagcctgccgttcgaggttaccagcatgaaagacatccaaggtctgccgtgcattaccgacgacgtacgtgacgtgatcgaggagatcatcgaagagggcgagagcagccgtgttaaagaaatcctcaatgacgagcgctacaaggcctttaagcagttcaccagcgtgttcggtgtgggcgtgaaaacctcggaaaagtggtaccgtatgggcctccgtacggttgaagaagcaaaggccagtaagagtctgaagctgagcaagatgcagaaggcgggcttcctgtattacgaggatctggcgagcggtgttagtaaagaagaagccgatgccgttacgctcatcgtgaaggaaacggtgcgtactgttagtccggatgcgctggtgaccatcgccggcggtttccgccgtggcaaacctatgggccacgacgttgacctgctgatcgttattccgggccgtcctgaagatgacgagctgctccacaaagtggttgatctgctcaagaagcaaggtctgctgctgtacgaagacatccgtgagagcacgttcgtggaggggcaactgccaagtcctaaacctgacgccctggacaaccatcagaagtgcttcgccattctcaagctgtaccgtccgaaggtggataacagtgcggttgggacgagtaagaaaagtgacatggctgaggttaaggattggaaagcggttcgtgtggatctggtgatcacgccattccaccagttcgcctatgcgctgctcggttggacgggcagcggccaatttcgtcgcgatctgcgtcgctatgcggaggaagagcgcgacatgctgctcgacaaccatcgtctctacgacctgaaaaagggcatctttctgagtgcggacagcgaagaagagattttcggtcatctgggtctggattatctggagccgtgggaacgcaacgcg

SEQ ID NO: 4344 - protein, 394 aa, synthetic construct
  REGION 1..394: note = Variant of terminal deoxynucleotidyl transferase
MHHHHHHGGSGHPEGNTPEKEVPSVIARHVSQYACQRKTTLNNYNKKFTDALEIMAENYKFKENLQACLEAKRAASVLKSLPFEVTSMKDIQGLPCITDDVRDVIEEIIEEGESSRVKEILNDERYKAFKQFTSVFGVGVKTSEKWYRMGLRTVEEAKASKSLKLSKMQKAGFLYYEDLASGVSKEEADAVTLIVKETVRTVSPDALVTIAGGFRRGKPMGHDVDLLIVIPGRPEDDELLHKVVDLLKKQGLLLYEDIRESTFVEGQLPSPKPDALDNHQKCFAILKLYRPKVDNSAVGTSKKSDMAEVKDWKAVRVDLVITPFHQFAYALLGWTGSGQFRRDLRRYAEEERDMLLDNHRLYDLKKGIFLSADSEEEIFGHLGLDYLEPWERNA

SEQ ID NO: 4345 - DNA, 1182 bp, synthetic construct
  misc_feature 1..1182: note = Variant of terminal deoxynucleotidyl transferase
  source 1..1182: mol_type = other DNA
atgcatcaccaccatcatcatgggggttctggtcatccggaaggtaataccccggagaaggaggtgccgagcgttatcgcccgtcatgttagtcagtacgcgtgccagcgcaagaccacgctgaataactacaacaaaaagttcaccgacgcgctggagatcatggccgagaactacaaatttaaagagaacctgcaggcgggcctggaagccaagcgcgccgcgagtgtcctgaaaagcctgccgttcgaggttaccagcatgaaagacatccaaggtctgccgtgcattaccgacgacgtacgtgacgtgatcgaggagatcatcgaagagggcgagagcagccgtgttaaagaaatcctcaatgacgagcgctacaaggcctttaagcagttcaccagcgtgttcggtgtgggcgtgaaaacctcggaaaagtggtaccgtatgggcctccgtacggttgaagaagcaaaggccagtaagagtctgaagctgagcaagatgcagaaggcgggcttcctgtattacgaggatctggcgagcggtgttagtaaagaagaagccgatgccgttacgctcatcgtgaaggaaacggtgcgcactgttagtccggatgcgctggtgaccatcgccggcggtttccgccgtggcaaacctatgggccacgacgttgacctgctgatcacgattccgggccgtcctgaagatgacgagctgctccacaaagtggttgatctgctcaagaagcaaggtctgctgctgtacgaagacatccgtgagagcacgttcgtggaggggcaactgccaagtcctaaacctgacgccctggacaaccatcagaagtgcttcgccattctcaagctgtaccgtccgaaggtggataacagtgcggttgggacgagtaagaaaagtgacatggctgaggttaaggattggaaagcggttcgtgtggatctggtgatcacgccattcgagcagttcgcctatgcgctgctcggttggacgggcagcggccaatttcgtcgcgatactcgtcgctatgcggaggaagagcgcgacatgctgctcgacaaccatcgtctctacgacctgaaaaagggcatctttctgagtgcggacagcgaagaagagattttcggtcatctgggtctggattatctggagccgtgggaacgcaacgcg

SEQ ID NO: 4346 - protein, 394 aa, synthetic construct
  REGION 1..394: note = Variant of terminal deoxynucleotidyl transferase
MHHHHHHGGSGHPEGNTPEKEVPSVIARHVSQYACQRKTTLNNYNKKFTDALEIMAENYKFKENLQAGLEAKRAASVLKSLPFEVTSMKDIQGLPCITDDVRDVIEEIIEEGESSRVKEILNDERYKAFKQFTSVFGVGVKTSEKWYRMGLRTVEEAKASKSLKLSKMQKAGFLYYEDLASGVSKEEADAVTLIVKETVRTVSPDALVTIAGGFRRGKPMGHDVDLLITIPGRPEDDELLHKVVDLLKKQGLLLYEDIRESTFVEGQLPSPKPDALDNHQKCFAILKLYRPKVDNSAVGTSKKSDMAEVKDWKAVRVDLVITPFEQFAYALLGWTGSGQFRRDTRRYAEEERDMLLDNHRLYDLKKGIFLSADSEEEIFGHLGLDYLEPWERNA

SEQ ID NO: 4347 - DNA, 1182 bp, synthetic construct
  misc_feature 1..1182: note = Variant of terminal deoxynucleotidyl transferase
  source 1..1182: mol_type = other DNA
atgcatcaccaccatcatcatgggggttctggtcatccggaaggtaataccccggagaaggaggtgccgagcgttatcgcccgtcatgttagtcagtacgcgtgccagcgcaagaccacgctgaataactacaacaaaaagttcaccgacgcgctggagatcatggccgagaactacaaatttaaagagaacctgcaggcgtgtctggaagccaagcgcgccgcgagtgtcctgaaaagcctgccgttcgaggttaccagcatgaaagacatccaaggtctgccgtgcattaccgacgacgtacgtgacgtgatcgaggagatcatcgaagagggcgagagcagccgtgttaaagaaatcctcaatgacgagcgctacaaggcctttaagcagttcaccagcgtgttcggtgtgggcgtgaaaacctcggaaaagtggtaccgtatgggcctccgtacggttgaagaagcaaaggccagtaagagtctgaagctgagcaagatgcagaaggcgggcttcctgtattacgaggatctggcgagcggtgttagtaaagaagaagccgatgccgttacgctcatcgtgaaggaaacggtgcgtactgttagtccggatgcgctggtgaccatcgccggcggtttccgccgtggcaaacctatgggccacgacgttgacctgctgatcgttattccgggccgtcctgaagatgacgagctgctccacaaagtggttgatctgctcaagaagcaaggtctgctgctgtacgaagacatccgtgagagcacgttcgtggaggggcaactgccaagtcctaaacctgacgccctggacaaccatcagaagtgcttcgccattctcaagctgtaccgtccgaaggtggataacagtgcggttgggacgagtaagaaaagtgacatggctgaggttaaggattggaaagcggttcgtgtggatctggtgatcacgccattcgagcagttcgcctatgcgctgctcggttggacgggcagcggccaatttcgtcgcgatctgcgtcgctatgcggaggaagagcgcgacatgctgctcgacaaccatcgtctctacgacctgaaaaagggcatctttctgagtgcggacagcgaagaagagattttcggtcatctgggtctggattatctggagccgtgggaacgcaacgcg

SEQ ID NO: 4348 - protein, 394 aa, synthetic construct
  REGION 1..394: note = Variant of terminal deoxynucleotidyl transferase
MHHHHHHGGSGHPEGNTPEKEVPSVIARHVSQYACQRKTTLNNYNKKFTDALEIMAENYKFKENLQACLEAKRAASVLKSLPFEVTSMKDIQGLPCITDDVRDVIEEIIEEGESSRVKEILNDERYKAFKQFTSVFGVGVKTSEKWYRMGLRTVEEAKASKSLKLSKMQKAGFLYYEDLASGVSKEEADAVTLIVKETVRTVSPDALVTIAGGFRRGKPMGHDVDLLIVIPGRPEDDELLHKVVDLLKKQGLLLYEDIRESTFVEGQLPSPKPDALDNHQKCFAILKLYRPKVDNSAVGTSKKSDMAEVKDWKAVRVDLVITPFEQFAYALLGWTGSGQFRRDLRRYAEEERDMLLDNHRLYDLKKGIFLSADSEEEIFGHLGLDYLEPWERNA

SEQ ID NO: 4349 - DNA, 1182 bp, synthetic construct
  misc_feature 1..1182: note = Variant of terminal deoxynucleotidyl transferase
  source 1..1182: mol_type = other DNA
atgcatcaccaccatcatcatgggggttctggtcatccggaaggtaataccccggagaaggaggtgccgagcgttatcgcccgtcatgttagtcagtacgcgtgccagcgcaagaccacgctgaataactacaacaaaaagttcaccgacgcgctggagatcatggccgagaactacaaatttaaagagaacctgcaggcgtgtctggaagccaagcgcgccgcgagtgtcctgaaaagcctgccgttcgaggttaccagcatgaaagacatccaaggtctgccgtgcattaccgacgacgtacgtgacgtgatcgaggagatcatcgaagagggcgagagcagccgtgttaaagaaatcctcaatgacgagcgctacaaggcctttaagcagttcaccagcgtgttcggtgtgggcgtgaaaacctcggaaaagtggtaccgtatgggcctccgtacggttgaagaagcaaaggccagtaagagtctgaagctgagcaagatgcagaaggcgggcttcctgtattacgaggatctggcgagcggtgttagtaaagaagaagccgatgccgttacgctcatcgtgaaggaaacggtgcgtactgttagtccggatgcgctggtgaccatcgccggcggtttccgccgtggcaaacctatgggccacgacgttgacctgctgatcacgattccgggccgtcctgaagatcctgagctgctccacaaagtggttgatctgctcaagaagcaaggtctgctgctgtacgaagacatccgtgagagcacgttcgtggaggggcaactgccaagtcctaaacctgacgccctggacaaccatcagaagtgcttcgccattctcaagctgtaccgtccgaaggtggataacagtgcggttgggacgagtaagaaaagtgacatggctgaggttaaggattggaaagcggttcgtgtggatctggtgatcacgccattcgagcagttcgcctatgcgctgctcggttggacgggcagcggccaatttcgtcgcgatctgcgtcgctatgcggaggaagagcgcgacatgctgctcgacaaccatcgtctctacgacctgaaaaagggcatctttctgagtgcggacagcgaagaagagattttcggtcatctgggtctggattatctggagccgtgggaacgcaacgcg

SEQ ID NO: 4350 - protein, 394 aa, synthetic construct
  REGION 1..394: note = Variant of terminal deoxynucleotidyl transferase
MHHHHHHGGSGHPEGNTPEKEVPSVIARHVSQYACQRKTTLNNYNKKFTDALEIMAENYKFKENLQACLEAKRAASVLKSLPFEVTSMKDIQGLPCITDDVRDVIEEIIEEGESSRVKEILNDERYKAFKQFTSVFGVGVKTSEKWYRMGLRTVEEAKASKSLKLSKMQKAGFLYYEDLASGVSKEEADAVTLIVKETVRTVSPDALVTIAGGFRRGKPMGHDVDLLITIPGRPEDPELLHKVVDLLKKQGLLLYEDIRESTFVEGQLPSPKPDALDNHQKCFAILKLYRPKVDNSAVGTSKKSDMAEVKDWKAVRVDLVITPFEQFAYALLGWTGSGQFRRDLRRYAEEERDMLLDNHRLYDLKKGIFLSADSEEEIFGHLGLDYLEPWERNA

SEQ ID NO: 4351 - DNA, 1182 bp, synthetic construct
  misc_feature 1..1182: note = Variant of terminal deoxynucleotidyl transferase
  source 1..1182: mol_type = other DNA
atgcatcaccaccatcatcatgggggttctggtcatccggaaggtaataccccggagaaggaggtgccgagcgttatcgcccgtcatgttagtcagtacgcgtgccagcgcaagaccacgctgaataactacaacaaaaagttcaccgacgcgctggagatcatggccgagaactacaaatttaaagagaacctgcaggcgtgtctggaagccaagcgcgccgcgagtgtcctgaaaagcctgccgttcgaggttaccagcatgaaagacatccaaggtctgccgtgcattaccgacgacgtacgtgacgtgatcgaggagatcatcgaagagggcgagagcagccgtgttaaagaaatcctcaatgacgagcgctacaaggcctttaagcagttcaccagcgtgttcggtgtgggcgtgaaaacctcggaaaagtggtaccgtatgggcctccgtacggtttatgaagcaaaggccagtaagagtctgaagctgagcaagatgcagaaggcgggcttcctgtattacgaggatctggcgagcggtgttagtaaagaagaagccgatgccgttacgctcatcgtgaaggaaacggtgcgtactgttagtccggatgcgctggtgaccatcgccggcggtttccgccgtggcaaacctatgggccacgacgttgacctgctgatcacgattccgggccgtcctgaagatgacgagctgctccacaaagtggttgatctgctcaagaagcaaggtctgctgctgtacgaagacatccgtgagagcacgttcgtggaggggcaactgccaagtcctaaacctgacgccctggacaaccatcagaagtgcttcgccattctcaagctgtaccgtccgaaggtggataacagtgcggttgggacgagtaagaaaagtgacatggctgaggttaaggattggaaagcggttcgtgtggatctggtgatcacgccattcgagcagttcgcctatgcgctgctcggttggacgggcagcggccaatttcgtcgcgatctgcgtcgctatgcggaggaagagcgcgacatgctgctcgacaaccatcgtctctacgacctgaaaaagggcatctttctgagtgcggacagcgaagaagagattttcggtcatctgggtctggattatctggagccgtgggaacgcaacgcg

SEQ ID NO: 4352 - protein, 394 aa, synthetic construct
  REGION 1..394: note = Variant of terminal deoxynucleotidyl transferase
MHHHHHHGGSGHPEGNTPEKEVPSVIARHVSQYACQRKTTLNNYNKKFTDALEIMAENYKFKENLQACLEAKRAASVLKSLPFEVTSMKDIQGLPCITDDVRDVIEEIIEEGESSRVKEILNDERYKAFKQFTSVFGVGVKTSEKWYRMGLRTVYEAKASKSLKLSKMQKAGFLYYEDLASGVSKEEADAVTLIVKETVRTVSPDALVTIAGGFRRGKPMGHDVDLLITIPGRPEDDELLHKVVDLLKKQGLLLYEDIRESTFVEGQLPSPKPDALDNHQKCFAILKLYRPKVDNSAVGTSKKSDMAEVKDWKAVRVDLVITPFEQFAYALLGWTGSGQFRRDLRRYAEEERDMLLDNHRLYDLKKGIFLSADSEEEIFGHLGLDYLEPWERNA

SEQ ID NO: 4353 - DNA, 1182 bp, synthetic construct
  misc_feature 1..1182: note = Variant of terminal deoxynucleotidyl transferase
  source 1..1182: mol_type = other DNA
atgcatcaccaccatcatcatgggggttctggtcatccggaaggtaataccccggagaaggaggtgccgagcgttatcgcccgtcatgttagtcagtacgcgtgccagcgcaagaccacgctgaataactacaacaaaaagttcaccgacgcgctggagatcatggccgagaactacaaatttaaagagaacctgcaggcgtgtctggaagccaagcgcgccgcgagtgtcctgaaaagcctgccgttcgaggttaccagcatgaaagacatccaaggtctgccgtgcattaccgacgacgtacgtgacgtgatcgaggagatcatcgaagagggcgagagcagccgtgttaaagaaatcctcaatgacgagcgctacaaggcctttaagcagttcaccagcgtgttcggtgtgggcgtgaaaacctcggaaaagtggtaccgtatgggcctccgtacggttgaagaagcaaaggccagtaagagtctgaagctgagcaagatgcagaaggcgggcttcctgtattacgaggatctggcgagcggtgttagtaaagaagaagccgatgccgttacgctcatcgtgaaggaaacggtgcgtactgttagtccggatgcgctggtgaccatcgccggcggtttccgccgtggcaaacctatgggccacgacgttgacctgctgatcacgattccgggccgtcctgaagatgacgagctgctccacaaagtggttgatctgctcaagaagcaaggtctgctgctgtacgaagacatccgtgagagcacgttcgtggaggggcaactgccaagtcctaaacctgacgccctggacaaccatcagaagtgcttcgccattctcaagctgtaccgtccgaaggtggataacagtgcggttgggacgagtaagaaatgggacatggctgaggttaaggattggaaagcggttcgtgtggatctggtgatcacgccattcgagcagttcgcctatgcgctgctcggttggacgggcagcggccaatttcgtcgcgatctgcgtcgctatgcggaggaagagcgcgacatgctgctcgacaaccatcgtctctacgacctgaaaaagggcatctttctgagtgcggacagcgaagaagagattttcggtcatctgggtctggattatctggagccgtgggaacgcaacgcg

SEQ ID NO: 4354 - protein, 394 aa, synthetic construct
  REGION 1..394: note = Variant of terminal deoxynucleotidyl transferase
MHHHHHHGGSGHPEGNTPEKEVPSVIARHVSQYACQRKTTLNNYNKKFTDALEIMAENYKFKENLQACLEAKRAASVLKSLPFEVTSMKDIQGLPCITDDVRDVIEEIIEEGESSRVKEILNDERYKAFKQFTSVFGVGVKTSEKWYRMGLRTVEEAKASKSLKLSKMQKAGFLYYEDLASGVSKEEADAVTLIVKETVRTVSPDALVTIAGGFRRGKPMGHDVDLLITIPGRPEDDELLHKVVDLLKKQGLLLYEDIRESTFVEGQLPSPKPDALDNHQKCFAILKLYRPKVDNSAVGTSKKWDMAEVKDWKAVRVDLVITPFEQFAYALLGWTGSGQFRRDLRRYAEEERDMLLDNHRLYDLKKGIFLSADSEEEIFGHLGLDYLEPWERNA

SEQ ID NO: 4355 - DNA, 1182 bp, synthetic construct
  misc_feature 1..1182: note = Variant of terminal deoxynucleotidyl transferase
  source 1..1182: mol_type = other DNA
atgcatcaccaccatcatcatgggggttctggtcatccggaaggtaataccccggagaaggaggtgccgagcgttatcgcccgtcatgttagtcagtacgcgtgccagcgcaagaccacgctgaataactacaacaaaaagttcaccgacgcgctggagatcatggccgagaactacaaatttaaagagaacctgcaggcgtgtctggaagccaagcgcgccgcgagtgtcctgaaaagcctgccgttcgaggttaccagcatgaaagacatccaaggtctgccgtgcattaccgacgacgtacgtgacgtgatcgaggagatcatcgaagagggcgagagcagccgtgttaaagaaatcctcaatgacgagcgctacaaggcctttaagcagttcaccagcgtgttcggtgtgggcgtgaaaacctcggaaaagtggtaccgtatgggcctccgtacggttgaagaagcaaaggccagtaagagtctgaagctgagcaagatgcagaaggcgggcttcctgtattacgaggatctggcgagcggtgttagtaaagaagaagccgatgccgttacgaagatcgtgaaggaaacggtgcgtactgttagtccggatgcgctggtgaccatcgccggcggtttccgccgtggcaaacctatgggccacgacgttgacctgctgatcacgattccgggccgtcctgaagatgacgagctgctccacaaagtggttgatctgctcaagaagcaaggtctgctgctgtacgaagacatccgtgagagcacgttcgtggaggggcaactgccaagtcctaaacctgacgccctggacaaccatcagaagtgcttcgccattctcaagctgtaccgtccgaaggtggataacagtgcggttgggacgagtaagaaaagtgacatggctgaggttaaggattggaaagcggttcgtgtggatctggtgatcacgccattcgagcagttcgcctatgcgctgctcggttggacgggcagcggccaatttcgtcgcgatctgcgtcgctatgcggaggaagagcgcgacatgctgctcgacaaccatcgtctctacgacctgaaaaagggcatctttctgagtgcggacagcgaagaagagattttcggtcatctgggtctggattatctggagccgtgggaacgcaacgcg

SEQ ID NO: 4356 - protein, 394 aa, synthetic construct
  REGION 1..394: note = Variant of terminal deoxynucleotidyl transferase
MHHHHHHGGSGHPEGNTPEKEVPSVIARHVSQYACQRKTTLNNYNKKFTDALEIMAENYKFKENLQACLEAKRAASVLKSLPFEVTSMKDIQGLPCITDDVRDVIEEIIEEGESSRVKEILNDERYKAFKQFTSVFGVGVKTSEKWYRMGLRTVEEAKASKSLKLSKMQKAGFLYYEDLASGVSKEEADAVTKIVKETVRTVSPDALVTIAGGFRRGKPMGHDVDLLITIPGRPEDDELLHKVVDLLKKQGLLLYEDIRESTFVEGQLPSPKPDALDNHQKCFAILKLYRPKVDNSAVGTSKKSDMAEVKDWKAVRVDLVITPFEQFAYALLGWTGSGQFRRDLRRYAEEERDMLLDNHRLYDLKKGIFLSADSEEEIFGHLGLDYLEPWERNA

SEQ ID NO: 4357 - DNA, 1182 bp, synthetic construct
  misc_feature 1..1182: note = Variant of terminal deoxynucleotidyl transferase
  source 1..1182: mol_type = other DNA
atgcatcaccaccatcatcatgggggttctggtcatccggaaggtaataccccggagaaggaggtgccgagcgttatcgcccgtcatgttagtcagtacgcgtgccagcgcaagaccacgctgaataactacaacaaaaagttcaccgacgcgctggagatcatggccgagaactacaaatttaaagagaacctgcaggcgtgtctggaagccaagcgcgccgcgagtgtcctgaaaagcctgccgttcgaggttaccagcatgaaagacatccaaggtctgccgtgcattaccgacgacgtacgtgacgtgatcgaggagatcatcgaagagggcgagagcagccgtgttaaagaaatcctcaatgacgagcgctacaaggcctttaagcagttcaccagcgtgttcggtgtgggcgtgaaaacctcggaaaagtggtaccgtatgggcctccgtacggttgaagaagcaaaggccagtaagagtctgatgctgagcaagatgcagaaggcgggcttcctgtattacgaggatctggcgagcggtgttagtaaagaagaagccgatgccgttacgctcatcgtgaaggaaacggtgcgtactgttagtccggatgcgctggtgaccatcgccggcggtttccgccgtggcaaacctatgggccacgacgttgacctgctgatcacgattccgggccgtcctgaagatgacgagctgctccacaaagtggttgatctgctcaagaagcaaggtctgctgctgtacgaagacatccgtgagagcacgttcgtggaggggcaactgccaagtcctaaacctgacgccctggacaaccatcagaagtgcttcgccattctcaagctgtaccgtccgaaggtggataacagtgcggttgggacgagtaagaaaagtgacatggctgaggttaaggattggaaagcggttcgtgtggatctggtgatcacgccattcgagcagttcgcctatgcgctgctcggttggacgggcagcggccaatttcgtcgcgatctgcgtcgctatgcggaggaagagcgcgacatgctgctcgacaaccatcgtctctacgacctgaaaaagggcatctttctgagtgcggacagcgaagaagagattttcggtcatctgggtctggattatctggagccgtgggaacgcaacgcg

SEQ ID NO: 4358 - protein, 394 aa, synthetic construct
  REGION 1..394: note = Variant of terminal deoxynucleotidyl transferase
MHHHHHHGGSGHPEGNTPEKEVPSVIARHVSQYACQRKTTLNNYNKKFTDALEIMAENYKFKENLQACLEAKRAASVLKSLPFEVTSMKDIQGLPCITDDVRDVIEEIIEEGESSRVKEILNDERYKAFKQFTSVFGVGVKTSEKWYRMGLRTVEEAKASKSLMLSKMQKAGFLYYEDLASGVSKEEADAVTLIVKETVRTVSPDALVTIAGGFRRGKPMGHDVDLLITIPGRPEDDELLHKVVDLLKKQGLLLYEDIRESTFVEGQLPSPKPDALDNHQKCFAILKLYRPKVDNSAVGTSKKSDMAEVKDWKAVRVDLVITPFEQFAYALLGWTGSGQFRRDLRRYAEEERDMLLDNHRLYDLKKGIFLSADSEEEIFGHLGLDYLEPWERNA

SEQ ID NO: 4359 - DNA, 1182 bp, synthetic construct
  misc_feature 1..1182: note = Variant of terminal deoxynucleotidyl transferase
  source 1..1182: mol_type = other DNA
atgcatcaccaccatcatcatgggggttctggtcatccggaaggtaataccccggagaaggaggtgccgagcgttacggcccgtcatgttagtcagtacgcgtgccagcgcaagaccacgctgaataactacaacaaaaagttcaccgacgcgctggagatcatggccgagaactacaaatttaaagagaacctgcaggcgtgtctggaagccaagcgcgccgcgagtgtcctgaaaagcctgccgttcgaggttaccagcatgaaagacatccaaggtctgccgtgcattaccgacgacgtacgtgacgtgatcgaggagatcatcgaagagggcgagagcagccgtgttaaagaaatcctcaatgacgagcgctacaaggcctttaagcagttcaccagcgtgttcggtgtgggcgtgaaaacctcggaaaagtggtaccgtatgggcctccgtacggttgaagaagcaaaggccagtaagagtctgaagctgagcaagatgcagaaggcgggcttcctgtattacgaggatctggcgagcggtgttagtaaagaagaagccgatgccgttacgctcatcgtgaaggaaacggtgcgtactgttagtccggatgcgctggtgaccatcgccggcggtttccgccgtggcaaacctatgggccacgacgttgacctgctgatcacgattccgggccgtcctgaagatgacgagctgctccacaaagtggttgatctgctcaagaagcaaggtctgctgctgtacgaagacatccgtgagagcacgttcgtggaggggcaactgccaagtcctaaacctgacgccctggacaaccatcagaagtgcttcgccattctcaagctgtaccgtccgaaggtggataacagtgcggttgggacgagtaagaaaagtgacatggctgaggttaaggattggaaagcggttcgtgtggatctggtgatcacgccattcgagcagttcgcctatgcgctgctcggttggacgggcagcggccaatttcgtcgcgatctgcgtcgctatgcggaggaagagcgcgacatgctgctcgacaaccatcgtctctacgacctgaaaaagggcatctttctgagtgcggacagcgaagaagagattttcggtcatctgggtctggattatctggagccgtgggaacgcaacgcg

SEQ ID NO: 4360 - protein, 394 aa, synthetic construct
  REGION 1..394: note = Variant of terminal deoxynucleotidyl transferase
MHHHHHHGGSGHPEGNTPEKEVPSVTARHVSQYACQRKTTLNNYNKKFTDALEIMAENYKFKENLQACLEAKRAASVLKSLPFEVTSMKDIQGLPCITDDVRDVIEEIIEEGESSRVKEILNDERYKAFKQFTSVFGVGVKTSEKWYRMGLRTVEEAKASKSLKLSKMQKAGFLYYEDLASGVSKEEADAVTLIVKETVRTVSPDALVTIAGGFRRGKPMGHDVDLLITIPGRPEDDELLHKVVDLLKKQGLLLYEDIRESTFVEGQLPSPKPDALDNHQKCFAILKLYRPKVDNSAVGTSKKSDMAEVKDWKAVRVDLVITPFEQFAYALLGWTGSGQFRRDLRRYAEEERDMLLDNHRLYDLKKGIFLSADSEEEIFGHLGLDYLEPWERNA

SEQ ID NO: 4361 - DNA, 1182 bp, synthetic construct
  misc_feature 1..1182: note = Variant of terminal deoxynucleotidyl transferase
  source 1..1182: mol_type = other DNA
atgcatcaccaccatcatcatgggggttctggtcatccggaaggtaataccccggagaaggaggtgccgagcgttatcgcccgtcatgttagtcagtacgcgtgccagcgcaagaccacgctgaataactacaacaaaaagttcaccgacgcgctggagatcatggccgagaactacaaatttaaagagaacctgcaggcgtgtctggaagccaagcgcgccgcgagtgtcctgaaaagcctgccgttcgaggttaccagcatgaaagacatccaaggtctgccgtgcattaccgacgacgtacgtgacgtgatcgaggagatcatcgaagagggcgagagcagccgtgttaaagaaatcctcaatgacgagcgctacaaggcctttaagcagttcaccagcgtgttcggtgtgggcgtgaaaacctcggaaaagtggtaccgtatgggcctccgtacggttgaagaagcaaaggccagtaagagtctgaagctgagcaagatgcagaaggcgggcttcctgtattacgaggatctggcgagcggtgttagtaaagaagaagccgatgccgttacgctcatcgtgaaggaaacggtgcgtactgttagtccggatgcgctggtgaccatcgccggcggtttccgccgtggcaaacctatgggccacgacgttgacctgctgatcacgattccgggccgtcctgaagatgacgagctgctccacaaagtggttgatctgctcaagaagcaaggtctgctgctgtacgaagacatccgtgagagcacgttcgtggaggggcaactgccaagtcctaaacctgacgccctggacaaccatcagaagtgcttcgccattctcaagctggatcgtccgaaggtggataacagtgcggttgggacgagtaagaaaagtgacatggctgaggttaaggattggaaagcggttcgtgtggatctggtgatcacgccattcgagcagttcgcctatgcgctgctcggttggacgggcagcggccaatttcgtcgcgatctgcgtcgctatgcggaggaagagcgcgacatgctgctcgacaaccatcgtctctacgacctgaaaaagggcatctttctgagtgcggacagcgaagaagagattttcggtcatctgggtctggattatctggagccgtgggaacgcaacgcg

SEQ ID NO: 4362 - protein, 394 aa, synthetic construct
  REGION 1..394: note = Variant of terminal deoxynucleotidyl transferase
MHHHHHHGGSGHPEGNTPEKEVPSVIARHVSQYACQRKTTLNNYNKKFTDALEIMAENYKFKENLQACLEAKRAASVLKSLPFEVTSMKDIQGLPCITDDVRDVIEEIIEEGESSRVKEILNDERYKAFKQFTSVFGVGVKTSEKWYRMGLRTVEEAKASKSLKLSKMQKAGFLYYEDLASGVSKEEADAVTLIVKETVRTVSPDALVTIAGGFRRGKPMGHDVDLLITIPGRPEDDELLHKVVDLLKKQGLLLYEDIRESTFVEGQLPSPKPDALDNHQKCFAILKLDRPKVDNSAVGTSKKSDMAEVKDWKAVRVDLVITPFEQFAYALLGWTGSGQFRRDLRRYAEEERDMLLDNHRLYDLKKGIFLSADSEEEIFGHLGLDYLEPWERNA

SEQ ID NO: 4363 - DNA, 1182 bp, synthetic construct
  misc_feature 1..1182: note = Variant of terminal deoxynucleotidyl transferase
  source 1..1182: mol_type = other DNA
atgcatcaccaccatcatcatgggggttctggtcatccggaaggtaataccccggagaaggaggtgccgagcgttatcgcccgtcatgttagtcagtacgcgtgccagcgcaagaccacgctgaataactacaacaaaaagttcaccgacgcgctggagatcatggccgagaactacaaatttaaagagaacctgcaggcgtgtctggaagccaagcgcgccgcgagtgtcctgaaaagcctgccgttcgaggttaccagcatgaaagacatccaaggtctgccgtgcattaccgacgacgtacgtgacgtgatcgaggagatcatcgaagagggcgagagcagccgtgttaaagaaatcctcaatgacgagcgctacaaggcctttaagcagttcaccagcgtgttcggtgtgggcgtgaaaacctcggaaaagtggtaccgtatgggcctccgtacggttgaagaagcaaaggccagtaagagtctgaagctgagcaagatgcagaaggcgggcttcctgtattacgaggatctggcgagcggtgttagtaaagaagaagccgatgccgttacggatatcgtgaaggaaacggtgcgtactgttagtccggatgcgctggtgaccatcgccggcggtttccgccgtggcaaacctatgggccacgacgttgacctgctgatcacgattccgggccgtcctgaagatgacgagctgctccacaaagtggttgatctgctcaagaagcaaggtctgctgctgtacgaagacatccgtgagagcacgttcgtggaggggcaactgccaagtcctaaacctgacgccctggacaaccatcagaagtgcttcgccattctcaagctgtaccgtccgaaggtggataacagtgcggttgggacgagtaagaaaagtgacatggctgaggttaaggattggaaagcggttcgtgtggatctggtgatcacgccattcgagcagttcgcctatgcgctgctcggttggacgggcagcggccaatttcgtcgcgatctgcgtcgctatgcggaggaagagcgcgacatgctgctcgacaaccatcgtctctacgacctgaaaaagggcatctttctgagtgcggacagcgaagaagagattttcggtcatctgggtctggattatctggagccgtgggaacgcaacgcg

SEQ ID NO: 4364 - protein, 394 aa, synthetic construct
  REGION 1..394: note = Variant of terminal deoxynucleotidyl transferase
MHHHHHHGGSGHPEGNTPEKEVPSVIARHVSQYACQRKTTLNNYNKKFTDALEIMAENYKFKENLQACLEAKRAASVLKSLPFEVTSMKDIQGLPCITDDVRDVIEEIIEEGESSRVKEILNDERYKAFKQFTSVFGVGVKTSEKWYRMGLRTVEEAKASKSLKLSKMQKAGFLYYEDLASGVSKEEADAVTDIVKETVRTVSPDALVTIAGGFRRGKPMGHDVDLLITIPGRPEDDELLHKVVDLLKKQGLLLYEDIRESTFVEGQLPSPKPDALDNHQKCFAILKLYRPKVDNSAVGTSKKSDMAEVKDWKAVRVDLVITPFEQFAYALLGWTGSGQFRRDLRRYAEEERDMLLDNHRLYDLKKGIFLSADSEEEIFGHLGLDYLEPWERNA

SEQ ID NO: 4365 - DNA, 1182 bp, synthetic construct
  misc_feature 1..1182: note = Variant of terminal deoxynucleotidyl transferase
  source 1..1182: mol_type = other DNA
atgcatcaccaccatcatcatgggggttctggtcatccggaaggtaataccccggagaaggaggtgccgagcgttatcgcccgtcatgttagtcagtacgcgtgccagcgcaagaccacgctgaataactacaacaaaaagttcaccgacgcgctggagatcatggccgagaactacaaatttaaagagaacctgcaggcgtgtctggaagccaagcgcgccgcgagtgtcctgaaaagcctgccgttcgaggttaccagcatgaaagacatccaaggtctgccgtgcattaccgacgacgtacgtgacgtgatcgaggagatcatcgaagagggcgagagcagccgtgttaaagaaatcctcaatgacgagcgctacaaggcctttaagcagttcaccagcgtgttcggtgtgggcgtgaaaacctcggaaaagtggtaccgtatgggcctccgtacggttgaagaagcaaaggccagtaagccgctgaagctgagcaagatgcagaaggcgggcttcctgtattacgaggatctggcgagcggtgttagtaaagaagaagccgatgccgttacgctcatcgtgaaggaaacggtgcgtactgttagtccggatgcgctggtgaccatcgccggcggtttccgccgtggcaaacctatgggccacgacgttgacctgctgatcacgattccgggccgtcctgaagatgacgagctgctccacaaagtggttgatctgctcaagaagcaaggtctgctgctgtacgaagacatccgtgagagcacgttcgtggaggggcaactgccaagtcctaaacctgacgccctggacaaccatcagaagtgcttcgccattctcaagctgtaccgtccgaaggtggataacagtgcggttgggacgagtaagaaaagtgacatggctgaggttaaggattggaaagcggttcgtgtggatctggtgatcacgccattcgagcagttcgcctatgcgctgctcggttggacgggcagcggccaatttcgtcgcgatctgcgtcgctatgcggaggaagagcgcgacatgctgctcgacaaccatcgtctctacgacctgaaaaagggcatctttctgagtgcggacagcgaagaagagattttcggtcatctgggtctggattatctggagccgtgggaacgcaacgcg

SEQ ID NO: 4366 - protein, 394 aa, synthetic construct
  REGION 1..394: note = Variant of terminal deoxynucleotidyl transferase
MHHHHHHGGSGHPEGNTPEKEVPSVIARHVSQYACQRKTTLNNYNKKFTDALEIMAENYKFKENLQACLEAKRAASVLKSLPFEVTSMKDIQGLPCITDDVRDVIEEIIEEGESSRVKEILNDERYKAFKQFTSVFGVGVKTSEKWYRMGLRTVEEAKASKPLKLSKMQKAGFLYYEDLASGVSKEEADAVTLIVKETVRTVSPDALVTIAGGFRRGKPMGHDVDLLITIPGRPEDDELLHKVVDLLKKQGLLLYEDIRESTFVEGQLPSPKPDALDNHQKCFAILKLYRPKVDNSAVGTSKKSDMAEVKDWKAVRVDLVITPFEQFAYALLGWTGSGQFRRDLRRYAEEERDMLLDNHRLYDLKKGIFLSADSEEEIFGHLGLDYLEPWERNA

SEQ ID NO: 4367 - DNA, 1182 bp, synthetic construct
  misc_feature 1..1182: note = Variant of terminal deoxynucleotidyl transferase
  source 1..1182: mol_type = other DNA
atgcatcaccaccatcatcatgggggttctggtcatccggaaggtaataccccggagaaggaggtgccgagcgttatcgcccgtcatgttagtcagtacgcgtgccagcgcaagaccacgctgaataactacaacaaaaagttcaccgacgcgctggagatcatggccgagaactacaaatttaaagagaacctgcaggcgtgtctggaagccaagcgcgccgcgagtgtcctgaaaagcctgccgttcgaggttaccagcatgaaagacatccaaggtctgccgtgcattaccgacgacgtacgtgacgtgatcgaggagatcatcgaagagggcgagagcagccgtgttaaagaaatcctcaatgacgagcgctacaaggcctttaagcagttcaccagcgtgttcggtgtgggcgtgaaaacctcggaaaagtggtaccgtatgggcctccgtacggttgaagaagcaaaggccagtaagagtctgaagctgagcaagatgcagaaggcgggcttcctgtattacgaggatctggcgagcggtgttagtaaagaagaagccgatgccgttacgctcatcgtgaaggaaacggtgcgtactgttagtccggatgcgctggtgaccatcgccggcggtttccgccgtggcaaacctatgggccacgacgttgacctgctgatcacgattccgggccgtcctgaagatgacgagctgctccacaaagtggttgatctgctcaagaagcaaggtctgctgctgtacgaagacatccgtgagagcacgttcgtggaggggcaactgccaagtcctaaacctgacgccctggacaaccatcagaagtgcttcgccattctcaagctgtaccgtccgaaggtggataacagtgcggttgggacgagtttgaaaagtgacatggctgaggttaaggattggaaagcggttcgtgtggatctggtgatcacgccattcgagcagttcgcctatgcgctgctcggttggacgggcagcggccaatttcgtcgcgatctgcgtcgctatgcggaggaagagcgcgacatgctgctcgacaaccatcgtctctacgacctgaaaaagggcatctttctgagtgcggacagcgaagaagagattttcggtcatctgggtctggattatctggagccgtgggaacgcaacgcg

SEQ ID NO: 4368 - protein, 394 aa, synthetic construct
  REGION 1..394: note = Variant of terminal deoxynucleotidyl transferase
MHHHHHHGGSGHPEGNTPEKEVPSVIARHVSQYACQRKTTLNNYNKKFTDALEIMAENYKFKENLQACLEAKRAASVLKSLPFEVTSMKDIQGLPCITDDVRDVIEEIIEEGESSRVKEILNDERYKAFKQFTSVFGVGVKTSEKWYRMGLRTVEEAKASKSLKLSKMQKAGFLYYEDLASGVSKEEADAVTLIVKETVRTVSPDALVTIAGGFRRGKPMGHDVDLLITIPGRPEDDELLHKVVDLLKKQGLLLYEDIRESTFVEGQLPSPKPDALDNHQKCFAILKLYRPKVDNSAVGTSLKSDMAEVKDWKAVRVDLVITPFEQFAYALLGWTGSGQFRRDLRRYAEEERDMLLDNHRLYDLKKGIFLSADSEEEIFGHLGLDYLEPWERNA

SEQ ID NO: 4369 - DNA, 1182 bp, synthetic construct
  misc_feature 1..1182: note = Variant of terminal deoxynucleotidyl transferase
  source 1..1182: mol_type = other DNA
atgcatcaccaccatcatcatgggggttctggtcatccggaaggtaataccccggagaaggaggtgccgagcgttatcgcccgtcatgttagtcagtacgcgtgccagcgcaagaccacgctgaataactacaacaaaaagttcaccgacgcgctggagatcatggccgagaactacaaatttaaagagaacctgcaggcgtgtctggaagccaagcgcgccgcgagtgtcctgaaaagcctgccgttcgaggttaccagcatgaaagacatccaaggtctgccgtgcattaccgacgacgtacgtgacgtgatcgaggagatcatcgaagagggcgagagcagccgtgttaaagaaatcctcaatgacgagcgctacaaggcctttaagcagttcaccagcgtgttcggtgtgggcgtgaaaacctcggaaaagtggtaccgtatgggcctccgtacggttgaagaagcaaaggccagtaagagtctgaagctgagcaagatgcagaaggcgggcttcctgtattacgaggatctggcgagcggtgttagtaaagaagaagccgatgccgttacgctcatcgtgaaggaaacggtgcgtactgttagtccggatgcgctggtgaccatcgccggcggtttccgccgtggcaaacctatgggccacgacgttgacctgctgatcacgattccgggccgtcctgaagatgacgagctgctccacaaagtggttgatctgctcaagaagcaaggtctgctgctgtacgaagacatccgtaatagcacgttcgtggaggggcaactgccaagtcctaaacctgacgccctggacaaccatcagaagtgcttcgccattctcaagctgtaccgtccgaaggtggataacagtgcggttgggacgagtaagaaaagtgacatggctgaggttaaggattggaaagcggttcgtgtggatctggtgatcacgccattcgagcagttcgcctatgcgctgctcggttggacgggcagcggccaatttcgtcgcgatctgcgtcgctatgcggaggaagagcgcgacatgctgctcgacaaccatcgtctctacgacctgaaaaagggcatctttctgagtgcggacagcgaagaagagattttcggtcatctgggtctggattatctggagccgtgggaacgcaacgcg

SEQ ID NO: 4370 - protein, 394 aa, synthetic construct
  REGION 1..394: note = Variant of terminal deoxynucleotidyl transferase
MHHHHHHGGSGHPEGNTPEKEVPSVIARHVSQYACQRKTTLNNYNKKFTDALEIMAENYKFKENLQACLEAKRAASVLKSLPFEVTSMKDIQGLPCITDDVRDVIEEIIEEGESSRVKEILNDERYKAFKQFTSVFGVGVKTSEKWYRMGLRTVEEAKASKSLKLSKMQKAGFLYYEDLASGVSKEEADAVTLIVKETVRTVSPDALVTIAGGFRRGKPMGHDVDLLITIPGRPEDDELLHKVVDLLKKQGLLLYEDIRNSTFVEGQLPSPKPDALDNHQKCFAILKLYRPKVDNSAVGTSKKSDMAEVKDWKAVRVDLVITPFEQFAYALLGWTGSGQFRRDLRRYAEEERDMLLDNHRLYDLKKGIFLSADSEEEIFGHLGLDYLEPWERNA

SEQ ID NO: 4371 - DNA, 1182 bp, synthetic construct
  misc_feature 1..1182: note = Variant of terminal deoxynucleotidyl transferase
  source 1..1182: mol_type = other DNA
atgcatcaccaccatcatcatgggggttctggtcatccggaaggtaataccccggagaaggaggtgccgagcgttatcgcccgtcatgttagtcagtacgcgtgccagcgcaagaccacgctgaataactacaacaaaaagttcaccgacgcgctggagatcatggccgagaactacaaatttaaagagaacctgcaggcgtgtctggaagccaagcgcgccgcgagtgtcctgaaaagcctgccgttcgaggttaccagcatgaaagacatccaaggtctgccgtgcattaccgacgacgtacgtgacgtgatcgaggagatcatcgaagagggcgagagcagccgtgttaaagaaatcctcaatgacgagcgctacaaggcctttaagcagttcaccagcgtgttcggtgtgggcgtgaaaacctcggaaaagtggtaccgtatgggcctccgtacggttgaagaagcaaaggccagtaagagtctgaagctgagcaagatgcagaaggcgggcttcctgtattacgaggatctggcgagcggtgttagtaaagaagaagccgatgccgttacgctcatcgtgaaggaaacggtgcgtactgttagtccggatgcgctggtgaccatcgccggcggtttccgccgtggcaaacctatgggccacgacgttgacctgctgatcacgattccgggccgtcctgaagatgacgagctgctcccgaaagtggttgatctgctcaagaagcaaggtctgctgctgtacgaagacatccgtgagagcacgttcgtggaggggcaactgccaagtcctaaacctgacgccctggacaaccatcagaagtgcttcgccattctcaagctgtaccgtccgaaggtggataacagtgcggttgggacgagtaagaaaagtgacatggctgaggttaaggattggaaagcggttcgtgtggatctggtgatcacgccattcgagcagttcgcctatgcgctgctcggttggacgggcagcggccaatttcgtcgcgatctgcgtcgctatgcggaggaagagcgcgacatgctgctcgacaaccatcgtctctacgacctgaaaaagggcatctttctgagtgcggacagcgaagaagagattttcggtcatctgggtctggattatctggagccgtgggaacgcaacgcg

SEQ ID NO: 4372 - protein, 394 aa, synthetic construct
  REGION 1..394: note = Variant of terminal deoxynucleotidyl transferase
MHHHHHHGGSGHPEGNTPEKEVPSVIARHVSQYACQRKTTLNNYNKKFTDALEIMAENYKFKENLQACLEAKRAASVLKSLPFEVTSMKDIQGLPCITDDVRDVIEEIIEEGESSRVKEILNDERYKAFKQFTSVFGVGVKTSEKWYRMGLRTVEEAKASKSLKLSKMQKAGFLYYEDLASGVSKEEADAVTLIVKETVRTVSPDALVTIAGGFRRGKPMGHDVDLLITIPGRPEDDELLPKVVDLLKKQGLLLYEDIRESTFVEGQLPSPKPDALDNHQKCFAILKLYRPKVDNSAVGTSKKSDMAEVKDWKAVRVDLVITPFEQFAYALLGWTGSGQFRRDLRRYAEEERDMLLDNHRLYDLKKGIFLSADSEEEIFGHLGLDYLEPWERNA

SEQ ID NO: 4373 - DNA, 1182 bp, synthetic construct
  misc_feature 1..1182: note = Variant of terminal deoxynucleotidyl transferase
  source 1..1182: mol_type = other DNA
atgcatcaccaccatcatcatgggggttctggtcatccggaaggtaataccccggagaaggaggtgccgagcgttatcgcccgtcatgttagtcagtacgcgtgccagcgcaagaccacgctgaataactacaacaaaaagttcaccgatgcgctggagatcatggccgagaactacaaatttaaagagaacctgcaggcgtgtctggaagccaagcgcgccgcgagtgtcctgaaaagcctgccgttcgaggttaccagcatgaaagacatccaaggtctgccgtgcattaccgacgacgtacgtgacgtgatcgaggagatcatcgaagagggcgagagcagccgtgttaaagaaatcctcaatgacgagcgctacaaggcctttaagcagttcaccagcgtgttcggtgtgggcgtgaaaacctcggaaaagtggtaccgtatgggcctccgtacggttgaagaagcaaaggccagtaagagtctgaagctgagcaagatgcagaaggcgggcttcctgtattacgaggatctggcgagcggtgttagtaaagaagaagccgatgccgttacgctcatcgtgaaggaaacggtgcgtactgttagtccggatgcgctggtgaccatcgccggcggtttccgccgtggcaaacctatgggccacgacgttgacctgctgatcacgattccgggccgtcctgaagatgacgagctgctccacaaagtggttgatctgctcaagaagcaaggtctgctgctgtacgaagacatccgtgagagcacgttcgtggaggggcaactgccaagtcctaaacctgacgccctggacaaccatcagaagtgcttcgccattctcaagctgtaccgtccgaaggtggataacagtgcggttgggatgagtaagaaaagtgacatggctgaggttaaggattggaaagcggttcgtgtggatctggtgatcacgccattcgagcagttcgcctatgcgctgctcggttggacgggcagcggccaatttcgtcgcgatctgcgtcgctatgcggaggaagagcgcgacatgctgctcgacaaccatcgtctctacgacctgaaaaagggcatctttctgagtgcggacagcgaagaagagattttcggtcatctgggtctggattatctggagccgtgggaacgcaacgcg

SEQ ID NO: 4374 - protein, 394 aa, synthetic construct
  REGION 1..394: note = Variant of terminal deoxynucleotidyl transferase
MHHHHHHGGSGHPEGNTPEKEVPSVIARHVSQYACQRKTTLNNYNKKFTDALEIMAENYKFKENLQACLEAKRAASVLKSLPFEVTSMKDIQGLPCITDDVRDVIEEIIEEGESSRVKEILNDERYKAFKQFTSVFGVGVKTSEKWYRMGLRTVEEAKASKSLKLSKMQKAGFLYYEDLASGVSKEEADAVTLIVKETVRTVSPDALVTIAGGFRRGKPMGHDVDLLITIPGRPEDDELLHKVVDLLKKQGLLLYEDIRESTFVEGQLPSPKPDALDNHQKCFAILKLYRPKVDNSAVGMSKKSDMAEVKDWKAVRVDLVITPFEQFAYALLGWTGSGQFRRDLRRYAEEERDMLLDNHRLYDLKKGIFLSADSEEEIFGHLGLDYLEPWERNA

SEQ ID NO: 4375 - DNA, 1182 bp, synthetic construct
  misc_feature 1..1182: note = Variant of terminal deoxynucleotidyl transferase
  source 1..1182: mol_type = other DNA
atgcatcaccaccatcatcatgggggttctggtcatccggaaggtaataccccggagaaggaggtgccgagcgttatcgcccgtcatgttagtcagtacgcgtgccagcgcaagaccacgctgaataactacaacaaaaagttcaccgacgcgctggagatcatggccgagaactacaaatttaaagagaacctgcaggcgtgtctggaagccaagcgcgccgcgagtgtcctgaaaagcctgccgttcgaggttaccagcatgaaagacatccaaggtctgccgtgcattaccgacgacgtacgtgacgtgatcgaggagatcatctctgagggcgagagcagccgtgttaaagaaatcctcaatgacgagcgctacaaggcctttaagcagttcaccagcgtgttcggtgtgggcgtgaaaacctcggaaaagtggtaccgtatgggcctccgtacggttgaagaagcaaaggccagtaagagtctgaagctgagcaagatgcagaaggcgggcttcctgtattacgaggatctggcgagcggtgttagtaaagaagaagccgatgccgttacgctcatcgtgaaggaaacggtgcgtactgttagtccggatgcgctggtgaccatcgccggcggtttccgccgtggcaaacctatgggccacgacgttgacctgctgatcacgattccgggccgtcctgaagatgacgagctgctccacaaagtggttgatctgctcaagaagcaaggtctgctgctgtacgaagacatccgtgagagcacgttcgtggaggggcaactgccaagtcctaaacctgacgccctggacaaccatcagaagtgcttcgccattctcaagctgtaccgtccgaaggtggataacagtgcggttgggacgagtaagaaaagtgacatggctgaggttaaggattggaaagcggttcgtgtggatctggtgatcacgccattcgagcagttcgcctatgcgctgctcggttggacgggcagcggccaatttcgtcgcgatctgcgtcgctatgcggaggaagagcgcgacatgctgctcgacaaccatcgtctctacgacctgaaaaagggcatctttctgagtgcggacagcgaagaagagattttcggtcatctgggtctggattatctggagccgtgggaacgcaacgcg

SEQ ID NO: 4376 - protein, 394 aa, synthetic construct
  REGION 1..394: note = Variant of terminal deoxynucleotidyl transferase
MHHHHHHGGSGHPEGNTPEKEVPSVIARHVSQYACQRKTTLNNYNKKFTDALEIMAENYKFKENLQACLEAKRAASVLKSLPFEVTSMKDIQGLPCITDDVRDVIEEIISEGESSRVKEILNDERYKAFKQFTSVFGVGVKTSEKWYRMGLRTVEEAKASKSLKLSKMQKAGFLYYEDLASGVSKEEADAVTLIVKETVRTVSPDALVTIAGGFRRGKPMGHDVDLLITIPGRPEDDELLHKVVDLLKKQGLLLYEDIRESTFVEGQLPSPKPDALDNHQKCFAILKLYRPKVDNSAVGTSKKSDMAEVKDWKAVRVDLVITPFEQFAYALLGWTGSGQFRRDLRRYAEEERDMLLDNHRLYDLKKGIFLSADSEEEIFGHLGLDYLEPWERNA

SEQ ID NO: 4377 - DNA, 1182 bp, synthetic construct
  misc_feature 1..1182: note = Variant of terminal deoxynucleotidyl transferase
  source 1..1182: mol_type = other DNA
atgcatcaccaccatcatcatgggggttctggtcatccggaaggtaataccccggagaaggaggtgccgagcgttatcgcccgtcatgttagtcagtacgcgtgccagcgcaagaccacgctgaataactacaacaaaaagttcaccgacgcgctggagatcatggccgagaactacaaatttaaagagaacctgcaggcgtgtctggaagccaagcgcgccgcgagtgtcctgaaaagcctgccgttcgaggttaccagcatgaaagacatccaaggtctgccgtgcattaccgacgacgtacgtgacgtgatcgaggagatcatcgaagagggcgagagcagccgtgttaaagaaatcctcaatgacgagcgctacaaggcctttaagcagttcaccagcgtgttcggtgtgggcgtgaaaacctcggaaaagtggtaccgtatgggcctccgtacggttgaagaagcaaaggccagtaagagtctgaagctgagcaagatgcagaaggcgggcttcctgtattacgaggatctggcgagcggtgttagtaaagaagaagccgatgccgttacgctcatcgtgaaggaaacggtgcgtactgttagtccggatgcgctggtgaccatcgccggcggtttccgccgtggcaaacctatgggccacgacgttgacctgctgatcacgattccgggccgtcctgaagatgacgagctgctccacaaagtggttgatctgctcaagaagcaaggtctgctgctgtacgaagacatccgtgagagcacgttcgtggaggggcaactgccaagtcctaaacctgacgccctggacaaccatcagaagtgcttcgccattctcaagctgtaccgtccgaaggtggatttgagtgcggttgggacgagtaagaaaagtgacatggctgaggttaaggattggaaagcggttcgtgtggatctggtgatcacgccattcgagcagttcgcctatgcgctgctcggttggacgggcagcggccaatttcgtcgcgatctgcgtcgctatgcggaggaagagcgcgacatgctgctcgacaaccatcgtctctacgacctgaaaaagggcatctttctgagtgcggacagcgaagaagagattttcggtcatctgggtctggattatctggagccgtgggaacgcaacgcg

SEQ ID NO: 4378 - protein, 394 aa, synthetic construct
  REGION 1..394: note = Variant of terminal deoxynucleotidyl transferase
MHHHHHHGGSGHPEGNTPEKEVPSVIARHVSQYACQRKTTLNNYNKKFTDALEIMAENYKFKENLQACLEAKRAASVLKSLPFEVTSMKDIQGLPCITDDVRDVIEEIIEEGESSRVKEILNDERYKAFKQFTSVFGVGVKTSEKWYRMGLRTVEEAKASKSLKLSKMQKAGFLYYEDLASGVSKEEADAVTLIVKETVRTVSPDALVTIAGGFRRGKPMGHDVDLLITIPGRPEDDELLHKVVDLLKKQGLLLYEDIRESTFVEGQLPSPKPDALDNHQKCFAILKLYRPKVDLSAVGTSKKSDMAEVKDWKAVRVDLVITPFEQFAYALLGWTGSGQFRRDLRRYAEEERDMLLDNHRLYDLKKGIFLSADSEEEIFGHLGLDYLEPWERNA

SEQ ID NO: 4379 - DNA, 1182 bp, synthetic construct
  misc_feature 1..1182: note = Variant of terminal deoxynucleotidyl transferase
  source 1..1182: mol_type = other DNA
atgcatcaccaccatcatcatgggggttctggtcatccggaaggtaataccccggagaaggaggtgccgagcgttatcgcccgtcatgttagtcagtacgcgtgccagcgcaagaccacgctgaataactacaacaaaaagttcaccgacgcgctggagatcatggccgagaactacaaatttaaagagaacctgcaggcgtgtctggaagccaagcgcgccgcgagtgtcctgaaaagcctgccgttcgaggttaccagcatgaaagacatccaaggtctgccgtgcattaccgacgacgtacgtgacgtgatcgaggagatcatcgaagagggcgagagcagccgtgttaaagaaatcctcaatgacgagcgctacaaggcctttaagcagttcaccagcgtgttcggtgtgggcgtgaaaacctcggaaaagtggtaccgtatgggcctccgtacggttgaagaagcaaaggccagtaagagtctgaagctgagcaagatgcagaaggcgggcttcctgtattacgaggatctggcgagcggtgttagtaaagaagaagccgatgccgttacgctcatcgtgaaggaaacggtgcgtactgttagtccggatgcgctggtgaccatcgccggcggtttccgccgtggcaaacctatgggccacgacgttgacctgctgatcacgattccgggccgtcctgaagatgacgagctgctccacaaagtggttgatctgctcaagaagcaaggtctgctgctgtacgaagacatccgtgagagcacgttcgtggaggggcaactgccaagtcctaaacctgacgccctggacaaccatcagaagtgcttcgccattctcaagctgtaccgtccgaaggtggataacagtgcggttgggacgagtaaggggagtgacatggctgaggttaaggattggaaagcggttcgtgtggatctggtgatcacgccattcgagcagttcgcctatgcgctgctcggttggacgggcagcggccaatttcgtcgcgatctgcgtcgctatgcggaggaagagcgcgacatgctgctcgacaaccatcgtctctacgacctgaaaaagggcatctttctgagtgcggacagcgaagaagagattttcggtcatctgggtctggattatctggagccgtgggaacgcaacgcg

SEQ ID NO: 4380 - protein, 394 aa, synthetic construct
  REGION 1..394: note = Variant of terminal deoxynucleotidyl transferase
MHHHHHHGGSGHPEGNTPEKEVPSVIARHVSQYACQRKTTLNNYNKKFTDALEIMAENYKFKENLQACLEAKRAASVLKSLPFEVTSMKDIQGLPCITDDVRDVIEEIIEEGESSRVKEILNDERYKAFKQFTSVFGVGVKTSEKWYRMGLRTVEEAKASKSLKLSKMQKAGFLYYEDLASGVSKEEADAVTLIVKETVRTVSPDALVTIAGGFRRGKPMGHDVDLLITIPGRPEDDELLHKVVDLLKKQGLLLYEDIRESTFVEGQLPSPKPDALDNHQKCFAILKLYRPKVDNSAVGTSKGSDMAEVKDWKAVRVDLVITPFEQFAYALLGWTGSGQFRRDLRRYAEEERDMLLDNHRLYDLKKGIFLSADSEEEIFGHLGLDYLEPWERNA

SEQ ID NO: 4381 - DNA, 1182 bp, synthetic construct
  misc_feature 1..1182: note = Variant of terminal deoxynucleotidyl transferase
  source 1..1182: mol_type = other DNA
atgcatcaccaccatcatcatgggggttctggtcatccggaaggtaataccccggagaaggaggtgccgagcgttatcgcccgtcatgttagtcagtacgcgtgccagcgcaagaccacgctgaataactacaacaaaaagttcaccgacgcgctggagatcatggccgagaactacaaatttaaagagaacctgcaggcgtgtctggaagccaagcgcgccgcgagtgtcctgaaaagcctgccgttcgaggttaccagcatgaaagacatccaaggtctgccgtgcattaccgacgacgtacgtgacgtgatcgaggagatcatcgaagagggcgagagcagccgtgttaaagaaatcctcaatgacgagcgctacaaggcctttaagcagttcaccagcgtgttcggtgtgggcgtgaaaacctcggaaaagtggtaccgtatgggcctccgtacggttgaagaagcaaaggccagtaagagtctgaagctgagcaagatgcagaaggcgggcttcctgtattacgaggatctggcgagcggtgttagtaaagaagaagccgatgccgttacgctcatcgtgaaggaaacggtgcgtactgttagtccggatgcgctggtgaccatcgccggcggtttccgccgtggcaaacctatgggccacgacgttgacctgctgatcacgattccgggccgtcctgaagatgacgagctgctccacaaagtggttgatctgctcaagaagcaaggtctgctgctgtacgaagacatccgtgagagcacgttcgtggaggggcaactgccaagtcctaaacctgacgccctggacaaccatcagaagtgcttcgccattctcaagctgtaccgtccgaaggtggataacagtgcggttgggacgagtaagaaaagtgacatggctgagtgtaaggattggaaagcggttcgtgtggatctggtgatcacgccattcgagcagttcgcctatgcgctgctcggttggacgggcagcggccaatttcgtcgcgatctgcgtcgctatgcggaggaagagcgcgacatgctgctcgacaaccatcgtctctacgacctgaaaaagggcatctttctgagtgcggacagcgaagaagagattttcggtcatctgggtctggattatctggagccgtgggaacgcaacgcg

SEQ ID NO: 4382 - protein, 394 aa, synthetic construct
  REGION 1..394: note = Variant of terminal deoxynucleotidyl transferase
MHHHHHHGGSGHPEGNTPEKEVPSVIARHVSQYACQRKTTLNNYNKKFTDALEIMAENYKFKENLQACLEAKRAASVLKSLPFEVTSMKDIQGLPCITDDVRDVIEEIIEEGESSRVKEILNDERYKAFKQFTSVFGVGVKTSEKWYRMGLRTVEEAKASKSLKLSKMQKAGFLYYEDLASGVSKEEADAVTLIVKETVRTVSPDALVTIAGGFRRGKPMGHDVDLLITIPGRPEDDELLHKVVDLLKKQGLLLYEDIRESTFVEGQLPSPKPDALDNHQKCFAILKLYRPKVDNSAVGTSKKSDMAECKDWKAVRVDLVITPFEQFAYALLGWTGSGQFRRDLRRYAEEERDMLLDNHRLYDLKKGIFLSADSEEEIFGHLGLDYLEPWERNA

SEQ ID NO: 4383 - DNA, 1182 bp, synthetic construct
  misc_feature 1..1182: note = Variant of terminal deoxynucleotidyl transferase
  source 1..1182: mol_type = other DNA
atgcatcaccaccatcatcatgggggttctggtcatccggaaggtaataccccggagaaggaggtgccgagcgttatcgcccgtcatgttagtcagtacgcgtgccagcgcaagaccacgctgaataactacaacaaaaagttcaccgacgcgctggagatcatggccgagaactacaaatttaaagagaacctgcaggcgtgtctggaagccaagcgcgccgcgagtgtcctgaaaagcctgccgttcgaggttaccagcatgaaagacatccaaggtctgccgtgcattaccgacgacgtacgtgacgtgatcgaggagatcatcgaagagggcgagagcagccgtgttaaagaaatcctcaatgacgagcgctacaaggcctttaagcagttcaccagcgtgttcggtgtgggcgtgaaaacctcggaaaagtggtaccgtatgggcctccgtacggttgaagaagcaaaggccagtaagagtctgaagctgagcaagatgcagaaggcgggcttcctgtattacgaggatctggcgagcggtgttagtaaagaagaagccgatgccgttacgctcatcgtgaaggaaacggtgcgtactgttagtccggatgcgctggtgaccatcgccggcggtttccgccgtggcaaacctatgggccacgacgttgacctgctgatcacgattccgggccgtcctgaagatgacgagctgctccacaaagtggttgatctgctcaagaagcaaggtctgctgctgtacgaagacatccgtgagagcacgttcgtggaggggcaactgccaagtcctaaacctgacgccctggacaaccatcagaagtgcttcgccattctcaagctgtaccgtccgaaggtggataacagtgcggttgggcctagtaagaaaagtgacatggctgaggttaaggattggaaagcggttcgtgtggatctggtgatcacgccattcgagcagttcgcctatgcgctgctcggttggacgggcagcggccaatttcgtcgcgatctgcgtcgctatgcggaggaagagcgcgacatgctgctcgacaaccatcgtctctacgacctgaaaaagggcatctttctgagtgcggacagcgaagaagagattttcggtcatctgggtctggattatctggagccgtgggaacgcaacgcg

SEQ ID NO: 4384 - protein, 394 aa, synthetic construct
  REGION 1..394: note = Variant of terminal deoxynucleotidyl transferase
MHHHHHHGGSGHPEGNTPEKEVPSVIARHVSQYACQRKTTLNNYNKKFTDALEIMAENYKFKENLQACLEAKRAASVLKSLPFEVTSMKDIQGLPCITDDVRDVIEEIIEEGESSRVKEILNDERYKAFKQFTSVFGVGVKTSEKWYRMGLRTVEEAKASKSLKLSKMQKAGFLYYEDLASGVSKEEADAVTLIVKETVRTVSPDALVTIAGGFRRGKPMGHDVDLLITIPGRPEDDELLHKVVDLLKKQGLLLYEDIRESTFVEGQLPSPKPDALDNHQKCFAILKLYRPKVDNSAVGPSKKSDMAEVKDWKAVRVDLVITPFEQFAYALLGWTGSGQFRRDLRRYAEEERDMLLDNHRLYDLKKGIFLSADSEEEIFGHLGLDYLEPWERNA

SEQ ID NO: 4385 - DNA, 1182 bp, synthetic construct
  misc_feature 1..1182: note = Variant of terminal deoxynucleotidyl transferase
  source 1..1182: mol_type = other DNA
atgcatcaccaccatcatcatgggggttctggtcatccggaaggtaataccccggagaaggaggtgccgagcgttatcgcccgtcatgttagtcagtacgcgtgccagcgcaagaccacgctgaataactacaacaaaaagttcaccgacgcgctggagatcatggccgagaactacaaatttaaagagaacctgcaggcgtgtctggaagccaagcgcgccgcgagtgtcctgaaaagcctgccgttcgaggttaccagcatgaaagacatccaaggtctgccgtgcattaccgacgacgtacgtgacgtgatcgaggagatcatcgaagagggcgagagcagccgtgttaaagaaatcctcaatgacgagcgctacaaggcctttaagcagttcaccagcgtgttcggtgtgggcgtgaaaacctcggaaaagtggtaccgtatgggcctccgtacggttgaagaagcaaaggccagtaagagtctgaagctgagcaagatgcagaaggcgggcttcctgtattacgaggatctggcgagcggtgttagtaaagaagaagccgatgccgttacgctcatcgtgaaggaaacggtgcgtactgttagtccggatgcgctggtgaccatcgccggcggtttccgccgtggcaaacctatgggccacgacgttgacctgctgatcacgattccgggccgtcctgaagatgacgagctgctccacaaagtggttgatctgctcaagaagcaaggtctgctgctgtacgaagacatccgtgagagcacgttcgtggaggggcaactgccaagtcctaaacctgacgccctggacaaccatcagaagtgcttcgccattctcaagctgtaccgtccgaaggtggataacagtgcggttgggacgagtaagtatagtgacatggctgaggttaaggattggaaagcggttcgtgtggatctggtgatcacgccattcgagcagttcgcctatgcgctgctcggttggacgggcagcggccaatttcgtcgcgatctgcgtcgctatgcggaggaagagcgcgacatgctgctcgacaaccatcgtctctacgacctgaaaaagggcatctttctgagtgcggacagcgaagaagagattttcggtcatctgggtctggattatctggagccgtgggaacgcaacgcg

SEQ ID NO: 4386 - protein, 394 aa, synthetic construct
  REGION 1..394: note = Variant of terminal deoxynucleotidyl transferase
MHHHHHHGGSGHPEGNTPEKEVPSVIARHVSQYACQRKTTLNNYNKKFTDALEIMAENYKFKENLQACLEAKRAASVLKSLPFEVTSMKDIQGLPCITDDVRDVIEEIIEEGESSRVKEILNDERYKAFKQFTSVFGVGVKTSEKWYRMGLRTVEEAKASKSLKLSKMQKAGFLYYEDLASGVSKEEADAVTLIVKETVRTVSPDALVTIAGGFRRGKPMGHDVDLLITIPGRPEDDELLHKVVDLLKKQGLLLYEDIRESTFVEGQLPSPKPDALDNHQKCFAILKLYRPKVDNSAVGTSKYSDMAEVKDWKAVRVDLVITPFEQFAYALLGWTGSGQFRRDLRRYAEEERDMLLDNHRLYDLKKGIFLSADSEEEIFGHLGLDYLEPWERNA

SEQ ID NO: 4387 - DNA, 1182 bp, synthetic construct
  misc_feature 1..1182: note = Variant of terminal deoxynucleotidyl transferase
  source 1..1182: mol_type = other DNA
atgcatcaccaccatcatcatgggggttctggtcatccggaaggtaataccccggagaaggaggtgccgagcgttatcgcccgtcatgttagtcagtacgcgtgccagcgcaagaccacgctgaataactacaacaaaaagttcaccgacgcgctggagatcatggccgagaactacaaatttaaagagaacctgcaggcgtgtctggaagccaagcgcgccgcgagtgtcctgaaaagcctgccgttcgaggttaccagcatgaaagacatccaaggtctgccgtgcattaccgacgacgtacgtgacgtgatcgaggagatcatcgaagagggcgagagcagccgtgttaaagaaatcctcaatgacgagcgctacaaggcctttaagcagttcaccagcgtgttcggtgtgggcgtgaaaacctcggaaaagtggtaccgtatgggcctccgtacggttgaagaagcaaaggccagtaagagtctgaagctgagcaagatgcagaaggcgggcttcctgtattacgaggatctggcgagcggtgttagtaaagaagaagccgatgccgttacgctcatcgtgaaggaaacggtgcgtactgttagtccggatgcgctggtgaccatcgccggcggtttccgccgtggcaaacctatgggccacgacgttgacctgctgatcacgattccgggccgtcctgaagatgacgagctgctccacaaagtggttgatctgctcaagaagcaaggtctgctgctgtacgaagacatccgtgagagcacgttcgtggaggggcaactgccaagtcctaaacctgacgccctggacaaccatcagaagtgcttcgccattctcaagctgtaccgtccgaaggtggataacagtgcggttgggacgagtaagaaaagtgacatggctgagcagaaggattggaaagcggttcgtgtggatctggtgatcacgccattcgagcagttcgcctatgcgctgctcggttggacgggcagcggccaatttcgtcgcgatctgcgtcgctatgcggaggaagagcgcgacatgctgctcgacaaccatcgtctctacgacctgaaaaagggcatctttctgagtgcggacagcgaagaagagattttcggtcatctgggtctggattatctggagccgtgggaacgcaacgcg

SEQ ID NO: 4388 - protein, 394 aa, synthetic construct
  REGION 1..394: note = Variant of terminal deoxynucleotidyl transferase
MHHHHHHGGSGHPEGNTPEKEVPSVIARHVSQYACQRKTTLNNYNKKFTDALEIMAENYKFKENLQACLEAKRAASVLKSLPFEVTSMKDIQGLPCITDDVRDVIEEIIEEGESSRVKEILNDERYKAFKQFTSVFGVGVKTSEKWYRMGLRTVEEAKASKSLKLSKMQKAGFLYYEDLASGVSKEEADAVTLIVKETVRTVSPDALVTIAGGFRRGKPMGHDVDLLITIPGRPEDDELLHKVVDLLKKQGLLLYEDIRESTFVEGQLPSPKPDALDNHQKCFAILKLYRPKVDNSAVGTSKKSDMAEQKDWKAVRVDLVITPFEQFAYALLGWTGSGQFRRDLRRYAEEERDMLLDNHRLYDLKKGIFLSADSEEEIFGHLGLDYLEPWERNA

SEQ ID NO: 4389 - DNA, 1182 bp, synthetic construct
  misc_feature 1..1182: note = Variant of terminal deoxynucleotidyl transferase
  source 1..1182: mol_type = other DNA
atgcatcaccaccatcatcatgggggttctggtcatccggaaggtaataccccggagaaggaggtgccgagcgttatcgcccgtcatgttagtcagtacgcgtgccagcgcaagaccacgctgaataactacaacaaaaagttcaccgacgcgctggagatcatggccgagaactacaaatttaaagagaacctgcaggcgtgtctggaagccaagcgcgccgcgagtgtcctgaaaagcctgccgttcgaggttaccagcatgaaagacatccaaggtctgccgtgcattaccgacgacgtacgtgacgtgatcgaggagatcatcgaagagggcgagagcagccgtgttaaagaaatcctcaatgacgagcgctacaaggcctttaagcagttcaccagcgtgttcggtgtgggcgtgaaaacctcggaaaagtggtaccgtatgggcctccgtacggttgaagaagcaaaggccagtaagtttctgaagctgagcaagatgcagaaggcgggcttcctgtattacgaggatctggcgagcggtgttagtaaagaagaagccgatgccgttacgctcatcgtgaaggaaacggtgcgtactgttagtccggatgcgctggtgaccatcgccggcggtttccgccgtggcaaacctatgggccacgacgttgacctgctgatcacgattccgggccgtcctgaagatgacgagctgctccacaaagtggttgatctgctcaagaagcaaggtctgctgctgtacgaagacatccgtgagagcacgttcgtggaggggcaactgccaagtcctaaacctgacgccctggacaaccatcagaagtgcttcgccattctcaagctgtaccgtccgaaggtggataacagtgcggttgggacgagtaagaaaagtgacatggctgaggttaaggattggaaagcggttcgtgtggatctggtgatcacgccattcgagcagttcgcctatgcgctgctcggttggacgggcagcggccaatttcgtcgcgatctgcgtcgctatgcggaggaagagcgcgacatgctgctcgacaaccatcgtctctacgacctgaaaaagggcatctttctgagtgcggacagcgaagaagagattttcggtcatctgggtctggattatctggagccgtgggaacgcaacgcg

SEQ ID NO: 4390 - protein, 394 aa, synthetic construct
  REGION 1..394: note = Variant of terminal deoxynucleotidyl transferase
MHHHHHHGGSGHPEGNTPEKEVPSVIARHVSQYACQRKTTLNNYNKKFTDALEIMAENYKFKENLQACLEAKRAASVLKSLPFEVTSMKDIQGLPCITDDVRDVIEEIIEEGESSRVKEILNDERYKAFKQFTSVFGVGVKTSEKWYRMGLRTVEEAKASKFLKLSKMQKAGFLYYEDLASGVSKEEADAVTLIVKETVRTVSPDALVTIAGGFRRGKPMGHDVDLLITIPGRPEDDELLHKVVDLLKKQGLLLYEDIRESTFVEGQLPSPKPDALDNHQKCFAILKLYRPKVDNSAVGTSKKSDMAEVKDWKAVRVDLVITPFEQFAYALLGWTGSGQFRRDLRRYAEEERDMLLDNHRLYDLKKGIFLSADSEEEIFGHLGLDYLEPWERNA

SEQ ID NO: 4391 - DNA, 1182 bp, synthetic construct
  misc_feature 1..1182: note = Variant of terminal deoxynucleotidyl transferase
  source 1..1182: mol_type = other DNA
atgcatcaccaccatcatcatgggggttctggtcatccggaaggtaataccccggagaaggaggtgccgagcgttatcgcccgtcatgttagtcagtacgcgtgccagcgcaagaccacgctgaataactacaacaaaaagttcaccgacgcgctggagatcatggccgagaactacaaatttaaagagaacctgcaggcgtgtctggaagccaagcgcgccgcgagtgtcctgaaaagcctgccgttcgaggttaccagcatgaaagacatccaaggtctgccgtgcattaccgacgacgtacgtgacgtgatcgaggagatcatcgaagagggcgagagcagccgtgttaaagaaatcctcaatgacgagcgctacaaggcctttaagcagttcaccagcgtgttcggtgtgggcgtgaaaacctcggaaaagtggtaccgtatgggcctccgtacggttgaagaagcaaaggccagtaagagtctgaagctgagcaagatgcagaaggcgggcttcctgtattacgaggatctggcgagcggtgttagtaaagaagaagccgatgccgttacgctcatcgtgaaggaaacggtgcgtactgttagtccggatgcgctggtgaccatcgccggcggtttccgccgtggcaaacctatgggccacgacgttgacctgctgatcacgattccgggccgtcctgaagatgacgagctgctccacaaagtggttgatctgctcaagaagcaaggtctgctgctgtacgaagacatccgtgagagcacgttcgtggaggggcaactgccaagtcctaaacctgacgccctggacaaccatcagaagtgcttcgccattctcaagctgtaccgtccgaaggtggataacagtgcggttgggacgagtaagaaagtggacatggctgaggttaaggattggaaagcggttcgtgtggatctggtgatcacgccattcgagcagttcgcctatgcgctgctcggttggacgggcagcggccaatttcgtcgcgatctgcgtcgctatgcggaggaagagcgcgacatgctgctcgacaaccatcgtctctacgacctgaaaaagggcatctttctgagtgcggacagcgaagaagagattttcggtcatctgggtctggattatctggagccgtgggaacgcaacgcg

SEQ ID NO: 4392 - protein, 394 aa, synthetic construct
  REGION 1..394: note = Variant of terminal deoxynucleotidyl transferase
MHHHHHHGGSGHPEGNTPEKEVPSVIARHVSQYACQRKTTLNNYNKKFTDALEIMAENYKFKENLQACLEAKRAASVLKSLPFEVTSMKDIQGLPCITDDVRDVIEEIIEEGESSRVKEILNDERYKAFKQFTSVFGVGVKTSEKWYRMGLRTVEEAKASKSLKLSKMQKAGFLYYEDLASGVSKEEADAVTLIVKETVRTVSPDALVTIAGGFRRGKPMGHDVDLLITIPGRPEDDELLHKVVDLLKKQGLLLYEDIRESTFVEGQLPSPKPDALDNHQKCFAILKLYRPKVDNSAVGTSKKVDMAEVKDWKAVRVDLVITPFEQFAYALLGWTGSGQFRRDLRRYAEEERDMLLDNHRLYDLKKGIFLSADSEEEIFGHLGLDYLEPWERNA

SEQ ID NO: 4393 - DNA, 1182 bp, synthetic construct
  misc_feature 1..1182: note = Variant of terminal deoxynucleotidyl transferase
  source 1..1182: mol_type = other DNA
atgcatcaccaccatcatcatgggggttctggtcatccggaaggtaataccccggagaaggaggtgccgagcgttatcgcccgtcatgttagtcagtacgcgtgccagcgcaagaccacgctgaataactacaacaaaaagttcaccgacgcgctggagatcatggccgagaactacaaatttaaagagaacctgcaggcgtgtctggaagccaagcgcgccgcgagtgtcctgaaaagcctgccgttcgaggttaccagcatgaaagacatccaaggtctgccgtgcattaccgacgacgtacgtgacgtgatcgaggagatcatcgaagagggcgagagcagccgtgttaaagaaatcctcaatgacgagcgctacaaggcctttaagcagttcaccagcgtgttcggtgtgggcgtgaaaacctcggaaaagtggtaccgtatgggcctccgtacggttgaagaagcaaaggccagtaagagtctgaagctgagcaagatgcagaaggcgggcttcctgtattacgaggatctggcgagcggtgttagtaaagaagaagccgatgccgttacgctcatcgtgaaggaaacggtgcgtactgttagtccggatgcgctggtgaccatcgccggcggtttccgccgtggcaaacctatgggccacgacgttgacctgctgatcacgattccgggccgtcctgaagatagtgagctgctccacaaagtggttgatctgctcaagaagcaaggtctgctgctgtacgaagacatccgtgagagcacgttcgtggaggggcaactgccaagtcctaaacctgacgccctggacaaccatcagaagtgcttcgccattctcaagctgtaccgtccgaaggtggataacagtgcggtcgggacgagtaagaaaagtgacatggctgaggttaaggattggaaagcggttcgtgtggatctggtgatcacgccattcgagcagttcgcctatgcgctgctcggttggacgggcagcggccaatttcgtcgcgatctgcgtcgctatgcggaggaagagcgcgacatgctgctcgacaaccatcgtctctacgacctgaaaaagggcatctttctgagtgcggacagcgaagaagagattttcggtcatctgggtctggattatctggagccgtgggaacgcaacgcg

SEQ ID NO: 4394 - protein, 394 aa, synthetic construct
  REGION 1..394: note = Variant of terminal deoxynucleotidyl transferase
MHHHHHHGGSGHPEGNTPEKEVPSVIARHVSQYACQRKTTLNNYNKKFTDALEIMAENYKFKENLQACLEAKRAASVLKSLPFEVTSMKDIQGLPCITDDVRDVIEEIIEEGESSRVKEILNDERYKAFKQFTSVFGVGVKTSEKWYRMGLRTVEEAKASKSLKLSKMQKAGFLYYEDLASGVSKEEADAVTLIVKETVRTVSPDALVTIAGGFRRGKPMGHDVDLLITIPGRPEDSELLHKVVDLLKKQGLLLYEDIRESTFVEGQLPSPKPDALDNHQKCFAILKLYRPKVDNSAVGTSKKSDMAEVKDWKAVRVDLVITPFEQFAYALLGWTGSGQFRRDLRRYAEEERDMLLDNHRLYDLKKGIFLSADSEEEIFGHLGLDYLEPWERNA

SEQ ID NO: 4395 - DNA, 1182 bp, synthetic construct
  misc_feature 1..1182: note = Variant of terminal deoxynucleotidyl transferase
  source 1..1182: mol_type = other DNA
atgcatcaccaccatcatcatgggggttctggtcatccggaaggtaataccccggagaaggaggtgccgagcgttatcgcccgtcatgttagtcagtacgcgtgccagcgcaagaccacgctgaataactacaacaaaaagttcaccgacgcgctggagatcatggccgagaactacaaatttaaagagaacctgcaggcgtgtctggaagccaagcgcgccgcgagtgtcctgaaaagcctgccgttcgaggttaccagcatgaaagacatccaaggtctgccgtgcattaccgacgacgtacgtgacgtgatcgaggagatcatcgaagagggcgagagcagccgtgttaaagaaatcctcaatgacgagcgctacaaggcctttaagcagttcaccagcgtgttcggtgtgggcgtgaaaacctcggaaaagtggtaccgtatgggcctccgtacggttgaagaagcaaagaggagtaagagtctgaagctgagcaagatgcagaaggcgggcttcctgtattacgaggatctggcgagcggtgttagtaaagaagaagccgatgccgttacgctcatcgtgaaggaaacggtgcgtactgttagtccggatgcgctggtgaccatcgccggcggtttccgccgtggcaaacctatgggccacgacgttgacctgctgatcacgattccgggccgtcctgaagatgacgagctgctccacaaagtggttgatctgctcaagaagcaaggtctgctgctgtacgaagacatccgtgagagcacgttcgtggaggggcaactgccaagtcctaaacctgacgccctggacaaccatcagaagtgcttcgccattctcaagctgtaccgtccgaaggtggataacagtgcggttgggacgagtaagaaaagtgacatggctgaggttaaggattggaaagcggttcgtgtggatctggtgatcacgccattcgagcagttcgcctatgcgctgctcggttggacgggcagcggccaatttcgtcgcgatctgcgtcgctatgcggaggaagagcgcgacatgctgctcgacaaccatcgtctctacgacctgaaaaagggcatctttctgagtgcggacagcgaagaagagattttcggtcatctgggtctggattatctggagccgtgggaacgcaacgcg

SEQ ID NO: 4396 - protein, 394 aa, synthetic construct
  REGION 1..394: note = Variant of terminal deoxynucleotidyl transferase
MHHHHHHGGSGHPEGNTPEKEVPSVIARHVSQYACQRKTTLNNYNKKFTDALEIMAENYKFKENLQACLEAKRAASVLKSLPFEVTSMKDIQGLPCITDDVRDVIEEIIEEGESSRVKEILNDERYKAFKQFTSVFGVGVKTSEKWYRMGLRTVEEAKRSKSLKLSKMQKAGFLYYEDLASGVSKEEADAVTLIVKETVRTVSPDALVTIAGGFRRGKPMGHDVDLLITIPGRPEDDELLHKVVDLLKKQGLLLYEDIRESTFVEGQLPSPKPDALDNHQKCFAILKLYRPKVDNSAVGTSKKSDMAEVKDWKAVRVDLVITPFEQFAYALLGWTGSGQFRRDLRRYAEEERDMLLDNHRLYDLKKGIFLSADSEEEIFGHLGLDYLEPWERNA

SEQ ID NO: 4397 - DNA, 1182 bp, synthetic construct
  misc_feature 1..1182: note = Variant of terminal deoxynucleotidyl transferase
  source 1..1182: mol_type = other DNA
atgcatcaccaccatcatcatgggggttctggtcatccggaaggtaataccccggagaaggaggtgccgagcgttatcgcccgtcatgttagtcagtacgcgtgccagcgcaagaccacgctgaataactacaacaaaaagttcaccgacgcgctggagatcatggccgagaactacaaatttaaagagaacctgcaggcgtgtctggaagccaagcgcgccgcgagtgtcctgaaaagcctgccgttcgaggttaccagcatgaaagacatccaaggtctgccgtgcattaccgacgacgtacgtgacgtgatcgaggagatcatcgaagagggcgagagcagccgtgttaaagaaatcctcaatgacgagcgctacaaggcctttaagcagttcaccagcgtgttcggtgtgggcgtgaaaacctcggaaaagtggtaccgtatgggcctccgtacggttgaagaagcaaaggccagtaagagtctgaagctgagcaagatgcagaaggcgggcttcctgtattacgaggatctggcgagcggtgttagtaaagaagaagccgatgccgttacgctcatcgtgaaggaaacggtgcgtactgttagtccggatgcgctggtgaccatcgccggcggtttccgccgtggcaaacctatgggccacgacgttgacctgctgatcacgattccgggccgtcctgaagatgacgagctgctccacaaagtggttgatctgctcaagaagcaaggtctgctgctgtacgaagacatccgtgagagcacgttcgtggaggggcaactgccaagtcctaaacctgacgccctggacaaccatcagaagtgcttcgccattctcaagctgtaccgtccgaaggtggataacagtgcggttgggacgagtaagaaaagtgacatgtcggaggttaaggattggaaagcggttcgtgtggatctggtgatcacgccattcgagcagttcgcctatgcgctgctcggttggacgggcagcggccaatttcgtcgcgatctgcgtcgctatgcggaggaagagcgcgacatgctgctcgacaaccatcgtctctacgacctgaaaaagggcatctttctgagtgcggacagcgaagaagagattttcggtcatctgggtctggattatctggagccgtgggaacgcaacgcg

SEQ ID NO: 4398 - protein, 394 aa, synthetic construct
  REGION 1..394: note = Variant of terminal deoxynucleotidyl transferase
MHHHHHHGGSGHPEGNTPEKEVPSVIARHVSQYACQRKTTLNNYNKKFTDALEIMAENYKFKENLQACLEAKRAASVLKSLPFEVTSMKDIQGLPCITDDVRDVIEEIIEEGESSRVKEILNDERYKAFKQFTSVFGVGVKTSEKWYRMGLRTVEEAKASKSLKLSKMQKAGFLYYEDLASGVSKEEADAVTLIVKETVRTVSPDALVTIAGGFRRGKPMGHDVDLLITIPGRPEDDELLHKVVDLLKKQGLLLYEDIRESTFVEGQLPSPKPDALDNHQKCFAILKLYRPKVDNSAVGTSKKSDMSEVKDWKAVRVDLVITPFEQFAYALLGWTGSGQFRRDLRRYAEEERDMLLDNHRLYDLKKGIFLSADSEEEIFGHLGLDYLEPWERNA

SEQ ID NO: 4399 - DNA, 1182 bp, synthetic construct
  misc_feature 1..1182: note = Variant of terminal deoxynucleotidyl transferase
  source 1..1182: mol_type = other DNA
atgcatcaccaccatcatcatgggggttctggtcatccggaaggtaataccccggagaaggaggtgccgagcgttatcgcccgtcatgttagtcagtacgcgtgccagcgcaagaccacgctgaataactacaacaaaaagttcaccgacgcgctggagatcatggccgagaactacaaatttaaagagaacctgcaggcgtgtctggaagccaagcgcgccgcgagtgtcctgaaaagcctgccgttcgaggttaccagcatgaaagacatccaaggtctgccgtgcattaccgacgacgtacgtgacgtgatcgaggagatcatcgaagagggcgagagcagccgtgttaaagaaatcctcaatgacgagcgctacaaggcctttaagcagttcaccagcgtgttcggtgtgggcgtgaaaacctcggaaaagtggtaccgtatgggcctccgtacggttgaagaagcaaaggccagtaagagtctgaagctgagcaagatgcagaaggcgggcttcctgtattacgaggatctggcgagcggtgttagtaaagaagaagccgatgccgttacgggtatcgtgaaggaaacggtgcgtactgttagtccggatgcgctggtgaccatcgccggcggtttccgccgtggcaaacctatgggccacgacgttgacctgctgatcacgattccgggccgtcctgaagatgacgagctgctccacaaagtggttgatctgctcaagaagcaaggtctgctgctgtacgaagacatccgtgagagcacgttcgtggaggggcaactgccaagtcctaaacctgacgccctggacaaccatcagaagtgcttcgccattctcaagctgtaccgtccgaaggtggataacagtgcggttgggacgagtaagaaaagtgacatggctgaggttaaggattggaaagcggttcgtgtggatctggtgatcacgccattcgagcagttcgcctatgcgctgctcggttggacgggcagcggccaatttcgtcgcgatctgcgtcgctatgcggaggaagagcgcgacatgctgctcgacaaccatcgtctctacgacctgaaaaagggcatctttctgagtgcggacagcgaagaagagattttcggtcatctgggtctggattatctggagccgtgggaacgcaacgcg

SEQ ID NO: 4400 - protein, 394 aa, synthetic construct
  REGION 1..394: note = Variant of terminal deoxynucleotidyl transferase
MHHHHHHGGSGHPEGNTPEKEVPSVIARHVSQYACQRKTTLNNYNKKFTDALEIMAENYKFKENLQACLEAKRAASVLKSLPFEVTSMKDIQGLPCITDDVRDVIEEIIEEGESSRVKEILNDERYKAFKQFTSVFGVGVKTSEKWYRMGLRTVEEAKASKSLKLSKMQKAGFLYYEDLASGVSKEEADAVTGIVKETVRTVSPDALVTIAGGFRRGKPMGHDVDLLITIPGRPEDDELLHKVVDLLKKQGLLLYEDIRESTFVEGQLPSPKPDALDNHQKCFAILKLYRPKVDNSAVGTSKKSDMAEVKDWKAVRVDLVITPFEQFAYALLGWTGSGQFRRDLRRYAEEERDMLLDNHRLYDLKKGIFLSADSEEEIFGHLGLDYLEPWERNA

SEQ ID NO: 4401 - DNA, 1182 bp, synthetic construct
  misc_feature 1..1182: note = Variant of terminal deoxynucleotidyl transferase
  source 1..1182: mol_type = other DNA
atgcatcaccaccatcatcatgggggttctggtcatccggaaggtaataccccggagaaggaggtgccgagcgttatcgcccgtcatgttagtcagtacgcgtgccagcgcaagaccacgctgaataactacaacaaaaagttcaccgacgcgctggagatcatggccgagaactacaaatttaaagagtatctgcaggcgtgtctggaagccaagcgcgccgcgagtgtcctgaaaagcctgccgttcgaggttaccagcatgaaagacatccaaggtctgccgtgcattaccgacgacgtacgtgacgtgatcgaggagatcatcgaagagggcgagagcagccgtgttaaagaaatcctcaatgacgagcgctacaaggcctttaagcagttcaccagcgtgttcggtgtgggcgtgaaaacctcggaaaagtggtaccgtatgggcctccgtacggttgaagaagcaaaggccagtaagagtctgaagctgagcaagatgcagaaggcgggcttcctgtattacgaggatctggcgagcggtgttagtaaagaagaagccgatgccgttacgctcatcgtgaaggaaacggtgcgtactgttagtccggatgcgctggtgaccatcgccggcggtttccgccgtggcaaacctatgggccacgacgttgacctgctgatcacgattccgggccgtcctgaagatgacgagctgctccacaaagtggttgatctgctcaagaagcaaggtctgctgctgtacgaagacatccgtgagagcacgttcgtggaggggcaactgccaagtcctaaacctgacgccctggacaaccatcagaagtgcttcgccattctcaagctgtaccgtccgaaggtggataacagtgcggttgggacgagtaagaaaagtgacatggctgaggttaaggattggaaagcggttcgtgtggatctggtgatcacgccattcgagcagttcgcctatgcgctgctcggttggacgggcagcggccaatttcgtcgcgatctgcgtcgctatgcggaggaagagcgcgacatgctgctcgacaaccatcgtctctacgacctgaaaaagggcatctttctgagtgcggacagcgaagaagagattttcggtcatctgggtctggattatctggagccgtgggaacgcaacgcg

SEQ ID NO: 4402 - protein, 394 aa, synthetic construct
  REGION 1..394: note = Variant of terminal deoxynucleotidyl transferase
MHHHHHHGGSGHPEGNTPEKEVPSVIARHVSQYACQRKTTLNNYNKKFTDALEIMAENYKFKEYLQACLEAKRAASVLKSLPFEVTSMKDIQGLPCITDDVRDVIEEIIEEGESSRVKEILNDERYKAFKQFTSVFGVGVKTSEKWYRMGLRTVEEAKASKSLKLSKMQKAGFLYYEDLASGVSKEEADAVTLIVKETVRTVSPDALVTIAGGFRRGKPMGHDVDLLITIPGRPEDDELLHKVVDLLKKQGLLLYEDIRESTFVEGQLPSPKPDALDNHQKCFAILKLYRPKVDNSAVGTSKKSDMAEVKDWKAVRVDLVITPFEQFAYALLGWTGSGQFRRDLRRYAEEERDMLLDNHRLYDLKKGIFLSADSEEEIFGHLGLDYLEPWERNA

SEQ ID NO: 4403 - DNA, 1182 bp, synthetic construct
  misc_feature 1..1182: note = Variant of terminal deoxynucleotidyl transferase
  source 1..1182: mol_type = other DNA
atgcatcaccaccatcatcatgggggttctggtcatccggaaggtaataccccggagaaggaggtgccgagcgttatcgcccgtcatgttagtcagtacgcgtgccagcgcaagaccacgctgaataactacaacaaaaagttcaccgacgcgctggagcggatggccgagaactacaaatttaaagagaacctgcaggcgtgtctggaagccaagcgcgccgcgagtgtcctgaaaagcctgccgttcgaggttaccagcatgaaagacatccaaggtctgccgtgcattaccgacgacgtacgtgacgtgatcgaggagatcatcgaagagggcgagagcagccgtgttaaagaaatcctcaatgacgagcgctacaaggcctttaagcagttcaccagcgtgttcggtgtgggcgtgaaaacctcggaaaagtggtaccgtatgggcctccgtacggttgaagaagcaaaggccagtaagagtctgaagctgagcaagatgcagaaggcgggcttcctgtattacgaggatctggcgagcggtgttagtaaagaagaagccgatgccgttacgctcatcgtgaaggaaacggtgcgtactgttagtccggatgcgctggtgaccatcgccggcggtttccgccgtggcaaacctatgggccacgacgttgacctgctgatcacgattccgggccgtcctgaagatgacgagctgctccacaaagtggttgatctgctcaagaagcaaggtctgctgctgtacgaagacatccgtgagagcacgttcgtggaggggcaactgccaagtcctaaacctgacgccctggacaaccatcagaagtgcttcgccattctcaagctgtaccgtccgaaggtggataacagtgcggttgggacgagtaagaaaagtgacatggctgaggttaaggattggaaagcggttcgtgtggatctggtgatcacgccattcgagcagttcgcctatgcgctgctcggttggacgggcagcggccaatttcgtcgcgatctgcgtcgctatgcggaggaagagcgcgacatgctgctcgacaaccatcgtctctacgacctgaaaaagggcatctttctgagtgcggacagcgaagaagagattttcggtcatctgggtctggattatctggagccgtgggaacgcaacgcg

SEQ ID NO: 4404 - protein, 394 aa, synthetic construct
  REGION 1..394: note = Variant of terminal deoxynucleotidyl transferase
MHHHHHHGGSGHPEGNTPEKEVPSVIARHVSQYACQRKTTLNNYNKKFTDALERMAENYKFKENLQACLEAKRAASVLKSLPFEVTSMKDIQGLPCITDDVRDVIEEIIEEGESSRVKEILNDERYKAFKQFTSVFGVGVKTSEKWYRMGLRTVEEAKASKSLKLSKMQKAGFLYYEDLASGVSKEEADAVTLIVKETVRTVSPDALVTIAGGFRRGKPMGHDVDLLITIPGRPEDDELLHKVVDLLKKQGLLLYEDIRESTFVEGQLPSPKPDALDNHQKCFAILKLYRPKVDNSAVGTSKKSDMAEVKDWKAVRVDLVITPFEQFAYALLGWTGSGQFRRDLRRYAEEERDMLLDNHRLYDLKKGIFLSADSEEEIFGHLGLDYLEPWERNA

SEQ ID NO: 4405 - DNA, 1182 bp, synthetic construct
  misc_feature 1..1182: note = Variant of terminal deoxynucleotidyl transferase
  source 1..1182: mol_type = other DNA
atgcatcaccaccatcatcatgggggttctggtcatccggaaggtaataccccggagaaggaggtgccgagcgttatcgcccgtcatgttagtcagtacgcgtgccagcgcaagaccacgctgaataactacaacaaaaagttcaccgacgcgctggagatcatggccgagaactacaaatttaaagagaacctgcaggcgtgtctggaagccaagcgcgccgcgagtgtcctgaaaagcctgccgttcgaggttaccagcatgaaagacatccaaggtctgccgtgcattaccgacgacgtacgtgacgtgatcgaggagatcatcgaagagggcgagagcagccgtgttaaagaaatcctcaatgacgagcgctacaaggcctttaagcagttcaccagcgtgttcggtgtgggcgtgaaaacctcggaaaagtggtaccgtatgggcctccgtacggttgaagaagcaaaggccagtaagagtctgaagctgagcaagatgcagaaggcgggcttcctgtattacgaggatctggcgagcggtgttagtaaagaagaagccgatgccgttacgctcatcgtgaaggaaacggtgcgtactgttagtccggatgcgctggtgaccatcgccggcggtttccgccgtggcaaacctatgggccacgacgttgacctgctgatcacgattccgggccgtcctgaagatgacgagctgctccacaaagtggttgatctgctcaagaagcaaggtctgctgctgtacgaagacatccgtgagagcacgttcgtggaggggcaactgccaagtcctaaacctgacgccctggacaaccatcagaagtgcttcgccattctcaagctgtaccgtccgaaggtggataacagtgcggttgggacgagtaagaaaagtgacatggctgaggataaggattggaaagcggttcgtgtggatctggtgatcacgccattcgagcagttcgcctatgcgctgctcggttggacgggcagcggccaatttcgtcgcgatctgcgtcgctatgcggaggaagagcgcgacatgctgctcgacaaccatcgtctctacgacctgaaaaagggcatctttctgagtgcggacagcgaagaagagattttcggtcatctgggtctggattatctggagccgtgggaacgcaacgcg

SEQ ID NO: 4406 - protein, 394 aa, synthetic construct
  REGION 1..394: note = Variant of terminal deoxynucleotidyl transferase
MHHHHHHGGSGHPEGNTPEKEVPSVIARHVSQYACQRKTTLNNYNKKFTDALEIMAENYKFKENLQACLEAKRAASVLKSLPFEVTSMKDIQGLPCITDDVRDVIEEIIEEGESSRVKEILNDERYKAFKQFTSVFGVGVKTSEKWYRMGLRTVEEAKASKSLKLSKMQKAGFLYYEDLASGVSKEEADAVTLIVKETVRTVSPDALVTIAGGFRRGKPMGHDVDLLITIPGRPEDDELLHKVVDLLKKQGLLLYEDIRESTFVEGQLPSPKPDALDNHQKCFAILKLYRPKVDNSAVGTSKKSDMAEDKDWKAVRVDLVITPFEQFAYALLGWTGSGQFRRDLRRYAEEERDMLLDNHRLYDLKKGIFLSADSEEEIFGHLGLDYLEPWERNA

SEQ ID NO: 4407 - DNA, 1182 bp, synthetic construct
  misc_feature 1..1182: note = Variant of terminal deoxynucleotidyl transferase
  source 1..1182: mol_type = other DNA
atgcatcaccaccatcatcatgggggttctggtcatccggaaggtaataccccggagaaggaggtgccgagcgttgctgcccgtcatgttagtcagtacgcgtgccagcgcaagaccacgctgaataactacaacaaaaagttcaccgacgcgctggagatcatggccgagaactacaaatttaaagagaacctgcaggcgtgtctggaagccaagcgcgccgcgagtgtcctgaaaagcctgccgttcgaggttaccagcatgaaagacatccaaggtctgccgtgcattaccgacgacgtacgtgacgtgatcgaggagatcatcgaagagggcgagagcagccgtgttaaagaaatcctcaatgacgagcgctacaaggcctttaagcagttcaccagcgtgttcggtgtgggcgtgaaaacctcggaaaagtggtaccgtatgggcctccgtacggttgaagaagcaaaggccagtaagagtctgaagctgagcaagatgcagaaggcgggcttcctgtattacgaggatctggcgagcggtgttagtaaagaagaagccgatgccgttacgctcatcgtgaaggaaacggtgcgtactgttagtccggatgcgctggtgaccatcgccggcggtttccgccgtggcaaacctatgggccacgacgttgacctgctgatcacgattccgggccgtcctgaagatgacgagctgctccacaaagtggttgatctgctcaagaagcaaggtctgctgctgtacgaagacatccgtgagagcacgttcgtggaggggcaactgccaagtcctaaacctgacgccctggacaaccatcagaagtgcttcgccattctcaagctgtaccgtccgaaggtggataacagtgcggttgggacgagtaagaaaagtgacatggctgaggttaaggattggaaagcggttcgtgtggatctggtgatcacgccattcgagcagttcgcctatgcgctgctcggttggacgggcagcggccaatttcgtcgcgatctgcgtcgctatgcggaggaagagcgcgacatgctgctcgacaaccatcgtctctacgacctgaaaaagggcatctttctgagtgcggacagcgaagaagagattttcggtcatctgggtctggattatctggagccgtgggaacgcaacgcg

SEQ ID NO: 4408 - protein, 394 aa, synthetic construct
  REGION 1..394: note = Variant of terminal deoxynucleotidyl transferase
MHHHHHHGGSGHPEGNTPEKEVPSVAARHVSQYACQRKTTLNNYNKKFTDALEIMAENYKFKENLQACLEAKRAASVLKSLPFEVTSMKDIQGLPCITDDVRDVIEEIIEEGESSRVKEILNDERYKAFKQFTSVFGVGVKTSEKWYRMGLRTVEEAKASKSLKLSKMQKAGFLYYEDLASGVSKEEADAVTLIVKETVRTVSPDALVTIAGGFRRGKPMGHDVDLLITIPGRPEDDELLHKVVDLLKKQGLLLYEDIRESTFVEGQLPSPKPDALDNHQKCFAILKLYRPKVDNSAVGTSKKSDMAEVKDWKAVRVDLVITPFEQFAYALLGWTGSGQFRRDLRRYAEEERDMLLDNHRLYDLKKGIFLSADSEEEIFGHLGLDYLEPWERNA

SEQ ID NO: 4409 - DNA, 1182 bp, synthetic construct
  misc_feature 1..1182: note = Variant of terminal deoxynucleotidyl transferase
  source 1..1182: mol_type = other DNA
atgcatcaccaccatcatcatgggggttctggtcatccggaaggtaataccccggagaaggaggtgccgagcgttatcgcccgtcatgttagtcagtacgcgtgccagcgcaagaccacgctgaataactacaacaaaaagttcaccgacgcgctggagatcatggccgagaactacaaatttaaagagaacctgcaggcgtgtctggaagccaagcgcgccgcgagtgtcctgaaaagcctgccgttcgaggttaccagcatgaaagacatccaaggtctgccgtgcattaccgacgacgtacgtgacgtgatcgaggagatcatcgaagagggcgagagcagccgtgttaaagaaatcctcaatgacgagcgctacaaggcctttaagcagttcaccagcgtgttcggtgtgggcgtgaaaacctcggaaaagtggtaccgtatgggcctccgtacggttgaagaagcaaaggccagtaagagtctgaagctgagcaagatgcagaaggcgggcttcctgtattacgaggatctggcgagcggtgttagtaaagaagaagccgatgccgttacgctcatcgtgaaggaaacggtgcgtactgttagtccggatgcgctggtgaccatcgccggcggtttccgccgtggcaaacctatgggccacgacgttgacctgctgatcacgattccgggccgtcctgaagatgacgagctgctccacaaagtggttgatctgctcaagaagcaaggtctgctgctgtacgaagacatccgtgagagcacgttcgtggaggggcaactgccaagtcctaaacctgacgccctggacaaccatcagaagtgcttcgccattctcaagctgtaccgtccgaaggtggataacagtgcggttgggacgagtaagaaaagtgacatggctttggttaaggattggaaagcggttcgtgtggatctggtgatcacgccattcgagcagttcgcctatgcgctgctcggttggacgggcagcggccaatttcgtcgcgatctgcgtcgctatgcggaggaagagcgcgacatgctgctcgacaaccatcgtctctacgacctgaaaaagggcatctttctgagtgcggacagcgaagaagagattttcggtcatctgggtctggattatctggagccgtgggaacgcaacgcg

SEQ ID NO: 4410 - protein, 394 aa, synthetic construct
  REGION 1..394: note = Variant of terminal deoxynucleotidyl transferase
MHHHHHHGGSGHPEGNTPEKEVPSVIARHVSQYACQRKTTLNNYNKKFTDALEIMAENYKFKENLQACLEAKRAASVLKSLPFEVTSMKDIQGLPCITDDVRDVIEEIIEEGESSRVKEILNDERYKAFKQFTSVFGVGVKTSEKWYRMGLRTVEEAKASKSLKLSKMQKAGFLYYEDLASGVSKEEADAVTLIVKETVRTVSPDALVTIAGGFRRGKPMGHDVDLLITIPGRPEDDELLHKVVDLLKKQGLLLYEDIRESTFVEGQLPSPKPDALDNHQKCFAILKLYRPKVDNSAVGTSKKSDMALVKDWKAVRVDLVITPFEQFAYALLGWTGSGQFRRDLRRYAEEERDMLLDNHRLYDLKKGIFLSADSEEEIFGHLGLDYLEPWERNA

SEQ ID NO: 4411 - DNA, 1182 bp, synthetic construct
  misc_feature 1..1182: note = Variant of terminal deoxynucleotidyl transferase
  source 1..1182: mol_type = other DNA
atgcatcaccaccatcatcatgggggttctggtcatccggaaggtaataccccggagaaggaggtgccgagcgttatcgcccgtcatgttagtcagtacgcgtgccagcgcaagaccacgctgaataactacaacaaaaagttcaccgacgcgctggagatcatggccgagaactacaaatttaaagagaacctgcaggcgtgtctggaagccaagcgcgccgcgagtgtcctgaaaagcctgccgttcgaggttaccagcatgaaagacatccaaggtctgccgtgcattaccgacgacgtacgtgacgtgatcgaggagatcatcgaagagggcgagagcagccgtgttaaagaaatcctcaatgacgagcgctacaaggcctttaagcagttcaccagcgtgttcggtgtgggcgtgaaaacctcggaaaagtggtaccgtatgggcctccgtacggttgaagaagcaaaggccagtaaggggctgaagctgagcaagatgcagaaggcgggcttcctgtattacgaggatctggcgagcggtgttagtaaagaagaagccgatgccgttacgctcatcgtgaaggaaacggtgcgtactgttagtccggatgcgctggtgaccatcgccggcggtttccgccgtggcaaacctatgggccacgacgttgacctgctgatcacgattccgggccgtcctgaagatgacgagctgctccacaaagtggttgatctgctcaagaagcaaggtctgctgctgtacgaagacatccgtgagagcacgttcgtggaggggcaactgccaagtcctaaacctgacgccctggacaaccatcagaagtgcttcgccattctcaagctgtaccgtccgaaggtggataacagtgcggttgggacgagtaagaaaagtgacatggctgaggttaaggattggaaagcggttcgtgtggatctggtgatcacgccattcgagcagttcgcctatgcgctgctcggttggacgggcagcggccaatttcgtcgcgatctgcgtcgctatgcggaggaagagcgcgacatgctgctcgacaaccatcgtctctacgacctgaaaaagggcatctttctgagtgcggacagcgaagaagagattttcggtcatctgggtctggattatctggagccgtgggaacgcaacgcg

SEQ ID NO: 4412 - protein, 394 aa, synthetic construct
  REGION 1..394: note = Variant of terminal deoxynucleotidyl transferase
MHHHHHHGGSGHPEGNTPEKEVPSVIARHVSQYACQRKTTLNNYNKKFTDALEIMAENYKFKENLQACLEAKRAASVLKSLPFEVTSMKDIQGLPCITDDVRDVIEEIIEEGESSRVKEILNDERYKAFKQFTSVFGVGVKTSEKWYRMGLRTVEEAKASKGLKLSKMQKAGFLYYEDLASGVSKEEADAVTLIVKETVRTVSPDALVTIAGGFRRGKPMGHDVDLLITIPGRPEDDELLHKVVDLLKKQGLLLYEDIRESTFVEGQLPSPKPDALDNHQKCFAILKLYRPKVDNSAVGTSKKSDMAEVKDWKAVRVDLVITPFEQFAYALLGWTGSGQFRRDLRRYAEEERDMLLDNHRLYDLKKGIFLSADSEEEIFGHLGLDYLEPWERNA

SEQ ID NO: 4413 - DNA, 1182 bp, synthetic construct
  misc_feature 1..1182: note = Variant of terminal deoxynucleotidyl transferase
  source 1..1182: mol_type = other DNA
atgcatcaccaccatcatcatgggggttctggtcatccggaaggtaataccccggagaaggaggtgccgagcgttatcgcccgtcatgttagtcagtacgcgtgccagcgcaagaccacgctgaataactacaacaaaaagttcaccgacgcgctggagatcatggccgagaactacaaatttaaagagaacctgcaggcgtgtctggaagccaagcgcgccgcgagtgtcctgaaaagcctgccgttcgaggttaccagcatgaaagacatccaaggtctgccgtgcattaccgacgacgtacgtgacgtgatcgaggagatcatcgaagagggcgagagcagccgtgttaaagaaatcctcaatgacgagcgctacaaggcctttaagcagttcaccagcgtgttcggtgtgggcgtgaaaacctcggaaaagtggtaccgtatgggcctccgtacggttgaagaagcaaaggccagtaagagtctgaagctgagcaagatgcagaaggcgggcttcctgtattacgaggatctggcgagcggtgttagtaaagaagaagccgatgccgttacgctcatcgtgaaggaaacggtgcgtactgttagtccggatgcgctggtgaccatcgccggcggtttccgccgtggcaaacctatgggccacgacgttgacctgctgatcacgattccgggccgtcctgaagatgacgagctgctccacaaagtgtgtgatctgctcaagaagcaaggtctgctgctgtacgaagacatccgtgagagcacgttcgtggaggggcaactgccaagtcctaaacctgacgccctggacaaccatcagaagtgcttcgccattctcaagctgtaccgtccgaaggtggataacagtgcggttgggacgagtaagaaaagtgacatggctgaggttaaggattggaaagcggttcgtgtggatctggtgatcacgccattcgagcagttcgcctatgcgctgctcggttggacgggcagcggccaatttcgtcgcgatctgcgtcgctatgcggaggaagagcgcgacatgctgctcgacaaccatcgtctctacgacctgaaaaagggcatctttctgagtgcggacagcgaagaagagattttcggtcatctgggtctggattatctggagccgtgggaacgcaacgcg

SEQ ID NO: 4414 - protein, 394 aa, synthetic construct
  REGION 1..394: note = Variant of terminal deoxynucleotidyl transferase
MHHHHHHGGSGHPEGNTPEKEVPSVIARHVSQYACQRKTTLNNYNKKFTDALEIMAENYKFKENLQACLEAKRAASVLKSLPFEVTSMKDIQGLPCITDDVRDVIEEIIEEGESSRVKEILNDERYKAFKQFTSVFGVGVKTSEKWYRMGLRTVEEAKASKSLKLSKMQKAGFLYYEDLASGVSKEEADAVTLIVKETVRTVSPDALVTIAGGFRRGKPMGHDVDLLITIPGRPEDDELLHKVCDLLKKQGLLLYEDIRESTFVEGQLPSPKPDALDNHQKCFAILKLYRPKVDNSAVGTSKKSDMAEVKDWKAVRVDLVITPFEQFAYALLGWTGSGQFRRDLRRYAEEERDMLLDNHRLYDLKKGIFLSADSEEEIFGHLGLDYLEPWERNA

SEQ ID NO: 4415 - DNA, 1182 bp, synthetic construct
  misc_feature 1..1182: note = Variant of terminal deoxynucleotidyl transferase
  source 1..1182: mol_type = other DNA
atgcatcaccaccatcatcatgggggttctggtcatccggaaggtaataccccggagaaggaggtgccgagcgttatcgcccgtcatgttagtcagtacgcgtgccagcgcaagaccacgctgaataactacaacaaaaagttcaccgacgcgctggagatcatggccgagaactacaaatttaaagagaacctgcaggcgtgtctggaagccaagcgcgccgcgagtgtcctgaaaagcctgccgttcgaggttaccagcatgaaagacatccaaggtctgccgtgcattaccgacgacgtacgtgacgtgatcgaggagatcatcgaagagggcgagagcagccgtgttaaagaaatcctcaatgacgagcgctacaaggcctttaagcagttcaccagcgtgttcggtgtgggcgtgaaaacctcggaaaagtggtaccgtatgggcctccgtacggttgaagaagcaaaggccagtaagagtctgaagctgagcaagatgcagaaggcgggcttcctgtattacgaggatctggcgagcggtgttagtaaagaagaagccgatgccgttacgctcatcgtgaaggaaacggtgcgtactgttagtccggatgcgctggtgaccatcgccggcggtttccgccgtggcaaacctatgggccacgacgttgacctgctgatcacgattccgggccgtcctgaagatgacgagctgctccacaaagtggttgatctgctcaagaagcaaggtctgctgctgtacgaagacatccgtgagagcacgttcgtggaggggcaactgccaagtcctaaacctgacgccctggacaaccatcagaagtgcttcgccattctcaagctgtaccgtccgaaggtggataacagggcggttgggacgagtaagaaaagtgacatggctgaggttaaggattggaaagcggttcgtgtggatctggtgatcacgccattcgagcagttcgcctatgcgctgctcggttggacgggcagcggccaatttcgtcgcgatctgcgtcgctatgcggaggaagagcgcgacatgctgctcgacaaccatcgtctctacgacctgaaaaagggcatctttctgagtgcggacagcgaagaagagattttcggtcatctgggtctggattatctggagccgtgggaacgcaacgcg

SEQ ID NO: 4416 - protein, 394 aa, synthetic construct
  REGION 1..394: note = Variant of terminal deoxynucleotidyl transferase
MHHHHHHGGSGHPEGNTPEKEVPSVIARHVSQYACQRKTTLNNYNKKFTDALEIMAENYKFKENLQACLEAKRAASVLKSLPFEVTSMKDIQGLPCITDDVRDVIEEIIEEGESSRVKEILNDERYKAFKQFTSVFGVGVKTSEKWYRMGLRTVEEAKASKSLKLSKMQKAGFLYYEDLASGVSKEEADAVTLIVKETVRTVSPDALVTIAGGFRRGKPMGHDVDLLITIPGRPEDDELLHKVVDLLKKQGLLLYEDIRESTFVEGQLPSPKPDALDNHQKCFAILKLYRPKVDNRAVGTSKKSDMAEVKDWKAVRVDLVITPFEQFAYALLGWTGSGQFRRDLRRYAEEERDMLLDNHRLYDLKKGIFLSADSEEEIFGHLGLDYLEPWERNA

SEQ ID NO: 4417 - DNA, 1182 bp, synthetic construct
  misc_feature 1..1182: note = Variant of terminal deoxynucleotidyl transferase
  source 1..1182: mol_type = other DNA
atgcatcaccaccatcatcatgggggttctggtcatccggaaggtaataccccggagaaggaggtgccgagcgttatcgcccgtcatgttagtcagtacgcgtgccagcgcaagaccacgctgaataactacaacaaaaagttcaccgacgcgctggagatcatggccgagaactacaaatttaaagagaacctgcaggcgtgtctggaagccaagcgcgccgcgagtgtcctgaaaagcctgccgttcgaggttaccagcatgactgacatccaaggtctgccgtgcattaccgacgacgtacgtgacgtgatcgaggagatcatcgaagagggcgagagcagccgtgttaaagaaatcctcaatgacgagcgctacaaggcctttaagcagttcaccagcgtgttcggtgtgggcgtgaaaacctcggaaaagtggtaccgtatgggcctccgtacggttgaagaagcaaaggccagtaagagtctgaagctgagcaagatgcagaaggcgggcttcctgtattacgaggatctggcgagcggtgttagtaaagaagaagccgatgccgttacgctcatcgtgaaggaaacggtgcgtactgttagtccggatgcgctggtgaccatcgccggcggtttccgccgtggcaaacctatgggccacgacgttgacctgctgatcacgattccgggccgtcctgaagatgacgagctgctccacaaagtggttgatctgctcaagaagcaaggtctgctgctgtacgaagacatccgtgagagcacgttcgtggaggggcaactgccaagtcctaaacctgacgccctggacaaccatcagaagtgcttcgccattctcaagctgtaccgtccgaaggtggataacagtgcggttgggacgagtaagaaaagtgacatggctgaggttaaggattggaaagcggttcgtgtggatctggtgatcacgccattcgagcagttcgcctatgcgctgctcggttggacgggcagcggccaatttcgtcgcgatctgcgtcgctatgcggaggaagagcgcgacatgctgctcgacaaccatcgtctctacgacctgaaaaagggcatctttctgagtgcggacagcgaagaagagattttcggtcatctgggtctggattatctggagccgtgggaacgcaacgcg

SEQ ID NO: 4418 - protein, 394 aa, synthetic construct
  REGION 1..394: note = Variant of terminal deoxynucleotidyl transferase
MHHHHHHGGSGHPEGNTPEKEVPSVIARHVSQYACQRKTTLNNYNKKFTDALEIMAENYKFKENLQACLEAKRAASVLKSLPFEVTSMTDIQGLPCITDDVRDVIEEIIEEGESSRVKEILNDERYKAFKQFTSVFGVGVKTSEKWYRMGLRTVEEAKASKSLKLSKMQKAGFLYYEDLASGVSKEEADAVTLIVKETVRTVSPDALVTIAGGFRRGKPMGHDVDLLITIPGRPEDDELLHKVVDLLKKQGLLLYEDIRESTFVEGQLPSPKPDALDNHQKCFAILKLYRPKVDNSAVGTSKKSDMAEVKDWKAVRVDLVITPFEQFAYALLGWTGSGQFRRDLRRYAEEERDMLLDNHRLYDLKKGIFLSADSEEEIFGHLGLDYLEPWERNA

SEQ ID NO: 4419 - DNA, 1182 bp, synthetic construct
  misc_feature 1..1182: note = Variant of terminal deoxynucleotidyl transferase
  source 1..1182: mol_type = other DNA
atgcatcaccaccatcatcatgggggttctggtcatccggaaggtaataccccggagaaggaggtgccgagcgttatcgcccgtcatgttagtcagtacgcgtgccagcgcaagaccacgctgaataactacaacaaaaagttcaccgacgcgctggagatcatggccgagaactacaaatttaaagagaacctgcaggcgtgtctggaagccaagcgcgccgcgagtgtcctgaaaagcctgccgttcgaggttaccagcatgaaagacatccaaggtctgccgtgcattaccgacgacgtacgtgacgtgatcgaggagatcatcgaagagggcgagagcagccgtgttaaagaaatcctcaatgacgagcgctacaaggcctttaagcagttcaccagcgtgttcggtgtgggcgtgaaaacctcggaaaagtggtaccgtatgggcctccgtacggttgaagaagcaaaggccagtaagagtctgaagctgagcaagatgcagaaggcgggcttcctgtattacgaggatctggcgagcggtgttagtaaagaagaagccgatgccgttacgctcatcgtgaaggaaacggtgcgtactgttagtccggatgcgctggtgaccatcgccggcggtttccgccgtggcaaacctatgggccacgacgttgacctgctgatcacgattccgggccgtcctgaagatgacgagctgctccacaaagtggttgatctgctcaagaagcaaggtctgctgctgtacgaagacatccgtgagagcacgttcgtggaggggcaactgccaagtcctaaacctgacgccctggacaaccatcagaagtgcttcgccattctcaagctgtaccgtccgaaggtggataacagtgcggttgggacgagtaagaaaagtgactgtgctgaggttaaggattggaaagcggttcgtgtggatctggtgatcacgccattcgagcagttcgcctatgcgctgctcggttggacgggcagcggccaatttcgtcgcgatctgcgtcgctatgcggaggaagagcgcgacatgctgctcgacaaccatcgtctctacgacctgaaaaagggcatctttctgagtgcggacagcgaagaagagattttcggtcatctgggtctggattatctggagccgtgggaacgcaacgcg

SEQ ID NO: 4420 - protein, 394 aa, synthetic construct
  REGION 1..394: note = Variant of terminal deoxynucleotidyl transferase
MHHHHHHGGSGHPEGNTPEKEVPSVIARHVSQYACQRKTTLNNYNKKFTDALEIMAENYKFKENLQACLEAKRAASVLKSLPFEVTSMKDIQGLPCITDDVRDVIEEIIEEGESSRVKEILNDERYKAFKQFTSVFGVGVKTSEKWYRMGLRTVEEAKASKSLKLSKMQKAGFLYYEDLASGVSKEEADAVTLIVKETVRTVSPDALVTIAGGFRRGKPMGHDVDLLITIPGRPEDDELLHKVVDLLKKQGLLLYEDIRESTFVEGQLPSPKPDALDNHQKCFAILKLYRPKVDNSAVGTSKKSDCAEVKDWKAVRVDLVITPFEQFAYALLGWTGSGQFRRDLRRYAEEERDMLLDNHRLYDLKKGIFLSADSEEEIFGHLGLDYLEPWERNA

SEQ ID NO: 4421 - DNA, 1182 bp, synthetic construct
  misc_feature 1..1182: note = Variant of terminal deoxynucleotidyl transferase
  source 1..1182: mol_type = other DNA
atgcatcaccaccatcatcatgggggttctggtcatccggaaggtaataccccggagaaggaggtgccgagcgttatcgcccgtcatgttagtcagtacgcgtgccagcgcaagaccacgctgaataactacaacaaaaagttcaccgacgcgctggagatcatggccgagaactacaaatttaaagagaacctgcaggcgtgtctggaagccaagcgcgccgcgagtgtcctgaaaagcctgccgttcgaggttaccagcatgaaagacatccaaggtctgccgtgcattaccgacgacgtacgtgacgtgatcgaggagatcatcgaagagggcgagagcagccgtgttaaagaaatcctcaatgacgagcgctacaaggcctttaagcagttcaccagcgtgttcggtgtgggcgtgaaaacctcgattaagtggtaccgtatgggcctccgtacggttgaagaagcaaaggccagtaagagtctgaagctgagcaagatgcagaaggcgggcttcctgtattacgaggatctggcgagcggtgttagtaaagaagaagccgatgccgttacgctcatcgtgaaggaaacggtgcgtactgttagtccggatgcgctggtgaccatcgccggcggtttccgccgtggcaaacctatgggccacgacgttgacctgctgatcacgattccgggccgtcctgaagatgacgagctgctccacaaagtggttgatctgctcaagaagcaaggtctgctgctgtacgaagacatccgtgagagcacgttcgtggaggggcaactgccaagtcctaaacctgacgccctggacaaccatcagaagtgcttcgccattctcaagctgtaccgtccgaaggtggataacagtgcggttgggacgagtaagaaaagtgacatggctgaggttaaggattggaaagcggttcgtgtggatctggtgatcacgccattcgagcagttcgcctatgcgctgctcggttggacgggcagcggccaatttcgtcgcgatctgcgtcgctatgcggaggaagagcgcgacatgctgctcgacaaccatcgtctctacgacctgaaaaagggcatctttctgagtgcggacagcgaagaagagattttcggtcatctgggtctggattatctggagccgtgggaacgcaacgcg

SEQ ID NO: 4422 - protein, 394 aa, synthetic construct
  REGION 1..394: note = Variant of terminal deoxynucleotidyl transferase
MHHHHHHGGSGHPEGNTPEKEVPSVIARHVSQYACQRKTTLNNYNKKFTDALEIMAENYKFKENLQACLEAKRAASVLKSLPFEVTSMKDIQGLPCITDDVRDVIEEIIEEGESSRVKEILNDERYKAFKQFTSVFGVGVKTSIKWYRMGLRTVEEAKASKSLKLSKMQKAGFLYYEDLASGVSKEEADAVTLIVKETVRTVSPDALVTIAGGFRRGKPMGHDVDLLITIPGRPEDDELLHKVVDLLKKQGLLLYEDIRESTFVEGQLPSPKPDALDNHQKCFAILKLYRPKVDNSAVGTSKKSDMAEVKDWKAVRVDLVITPFEQFAYALLGWTGSGQFRRDLRRYAEEERDMLLDNHRLYDLKKGIFLSADSEEEIFGHLGLDYLEPWERNA

SEQ ID NO: 4423 - DNA, 1182 bp, synthetic construct
  misc_feature 1..1182: note = Variant of terminal deoxynucleotidyl transferase
  source 1..1182: mol_type = other DNA
atgcatcaccaccatcatcatgggggttctggtcatccggaaggtaataccccggagaaggaggtgccgagcgttatcgcccgtcatgttagtcagtacgcgtgccagcgcaagaccacgctgaataactacaacaaaaagttcaccgacgcgctggagatcatggccgagaactacaaatttaaagagaacctgcaggcgtgtctggaagccaagcgcgccgcgagtgtcctgaaaagcctgccgttcgaggttaccagcatgaaagacatccaaggtctgccgtgcattaccgacgacgtacgtgacgtgatcgaggagatcatcgaagagggcgagagcagccgtgttaaagaaatcctcaatgacgagcgctacaaggcctttaagcagttcaccagcgtgttcggtgtgggcgtgaaaacctcggaaaagtggtaccgtatgggcctccgtacggttgaagaagcaaaggccagtaagagtctgaagctgagcaagatgcagaaggcgggcttcctgtattacgaggatctggcgagcggtgttagtaaagaagaagccgatgccgttacgctcatcgtgaaggaaacggtgcgtactgttagtccggatgcgctggtgaccatcgccggcggtttccgccgtggcaaacctatgggccacgacgttgacctgctgatcacgattccgggccgtcctgaagatgacgagctgctccacaaagtggttgatctgctcaagaagcaaggtctgctgctgtacgaagacatccgtgagagcacgttcgtggaggggcaactgccaagtcctaaacctgactccctggacaaccatcagaagtgcttcgccattctcaagctgtaccgtaataaggtggataacagtgcggttgggacgagtaagaaaagtgacatggctgaggttaaggattggaaagcggttcgtgtggatctggtgatcacgccattcgagcagttcgcctatgcgctgctcggttggacgggcagcggccaatttcgtcgcgatctgcgtcgctatgcggaggaagagcgcgacatgctgctcgacaaccatcgtctctacgacctgaaaaagggcatctttctgagtgcggacagcgaagaagagattttcggtcatctgggtctggattatctggagccgtgggaacgcaacgcg

SEQ ID NO: 4424 - protein, 394 aa, synthetic construct
  REGION 1..394: note = Variant of terminal deoxynucleotidyl transferase
MHHHHHHGGSGHPEGNTPEKEVPSVIARHVSQYACQRKTTLNNYNKKFTDALEIMAENYKFKENLQACLEAKRAASVLKSLPFEVTSMKDIQGLPCITDDVRDVIEEIIEEGESSRVKEILNDERYKAFKQFTSVFGVGVKTSEKWYRMGLRTVEEAKASKSLKLSKMQKAGFLYYEDLASGVSKEEADAVTLIVKETVRTVSPDALVTIAGGFRRGKPMGHDVDLLITIPGRPEDDELLHKVVDLLKKQGLLLYEDIRESTFVEGQLPSPKPDSLDNHQKCFAILKLYRNKVDNSAVGTSKKSDMAEVKDWKAVRVDLVITPFEQFAYALLGWTGSGQFRRDLRRYAEEERDMLLDNHRLYDLKKGIFLSADSEEEIFGHLGLDYLEPWERNA

SEQ ID NO: 4425 - DNA, 1182 bp, synthetic construct
  misc_feature 1..1182: note = Variant of terminal deoxynucleotidyl transferase
  source 1..1182: mol_type = other DNA
atgcatcaccaccatcatcatgggggttctggtcatccggaaggtaataccccggagaaggaggtgccgagcgttatcgcccgtcatgttagtcagtacgcgtgccagcgcaagaccacgctgaataactacaacaaaaagttcaccgacgcgctggagatcatggccgagaactacaaatttaaagagaacctgcaggcgtgtctggaagccaagcgcgccgcgagtgtcctgaaaagcctgccgttcgaggttaccagcatgaaagacatccaaggtctgccgtgcattaccgacgacgtacgtgacgtgatcgaggagatcatcgaagagggcgagagcagccgtgttaaagaaatcctcaatgacgagcgctacaaggcctttaagcagttcaccagcgtgttcggtgtgggcgtgaaaacctcggaaaagtggtaccgtatgggcctccgtacggttgaagaagcaaagtggagtaagagtctgaagctgagcaagatgcagaaggcgggcttcctgtattacgaggatctggcgagcggtgttagtaaagaagaagccgatgccgttacgctcatcgtgaaggaaacggtgcgtactgttagtccggatgcgctggtgaccatcgccggcggtttccgccgtggcaaacctatgggccacgacgttgacctgctgatcacgattccgggccgtcctgaagatgacgagctgctccacaaagtggttgatctgctcaagaagcaaggtctgctgctgtacgaagacatccgtgagagcacgttcgtggaggggcaactgccaagtcctaaacctgacgccctggacaaccatcagaagtgcttcgccattctcaagctgtaccgtccgaaggtggataacagtgcggttgggacgagtaagaaaagtgacatggctgaggttaaggattggaaagcggttcgtgtggatctggtgatcacgccattcgagcagttcgcctatgcgctgctcggttggacgggcagcggccaatttcgtcgcgatctgcgtcgctatgcggaggaagagcgcgacatgctgctcgacaaccatcgtctctacgacctgaaaaagggcatctttctgagtgcggacagcgaagaagagattttcggtcatctgggtctggattatctggagccgtgggaacgcaacgcg

SEQ ID NO: 4426 - protein, 394 aa, synthetic construct
  REGION 1..394: note = Variant of terminal deoxynucleotidyl transferase
MHHHHHHGGSGHPEGNTPEKEVPSVIARHVSQYACQRKTTLNNYNKKFTDALEIMAENYKFKENLQACLEAKRAASVLKSLPFEVTSMKDIQGLPCITDDVRDVIEEIIEEGESSRVKEILNDERYKAFKQFTSVFGVGVKTSEKWYRMGLRTVEEAKWSKSLKLSKMQKAGFLYYEDLASGVSKEEADAVTLIVKETVRTVSPDALVTIAGGFRRGKPMGHDVDLLITIPGRPEDDELLHKVVDLLKKQGLLLYEDIRESTFVEGQLPSPKPDALDNHQKCFAILKLYRPKVDNSAVGTSKKSDMAEVKDWKAVRVDLVITPFEQFAYALLGWTGSGQFRRDLRRYAEEERDMLLDNHRLYDLKKGIFLSADSEEEIFGHLGLDYLEPWERNA

SEQ ID NO: 4427 - DNA, 1182 bp, synthetic construct
  misc_feature 1..1182: note = Variant of terminal deoxynucleotidyl transferase
  source 1..1182: mol_type = other DNA
atgcatcaccaccatcatcatgggggttctggtcatccggaaggtaataccccggagaaggaggtgccgagcgttatcgcccgtcatgttagtcagtacgcgtgccagcgcaagaccacgctgaataactacaacaaaaagttcaccgacgcgctggagatcatggccgagaactacaaatttaaagagaacctgcaggcgtgtctggaagccaagcgcgccgcgagtgtcctgaaaagcctgccgttcgaggttaccagcatgaaagacatccaaggtctgccgtgcattaccgacgacgtacgtgacgtgatcgaggagatcatcgaagagggcgagagcagccgtgttaaagaaatcctcaatgacgagcgctacaaggcctttaagcagttcaccagcgtgttcggtgtgggcgtgaaaacctcggaaaagtggtaccgtatgggcctccgtacggttgaagaagcaaaggccagtaagagtctgtgtctgagcaagatgcagaaggcgggcttcctgtattacgaggatctggcgagcggtgttagtaaagaagaagccgatgccgttacgctcatcgtgaaggaaacggtgcgtactgttagtccggatgcgctggtgaccatcgccggcggtttccgccgtggcaaacctatgggccacgacgttgacctgctgatcacgattccgggccgtcctgaagatgacgagctgctccacaaagtggttgatctgctcaagaagcaaggtctgctgctgtacgaagacatccgtgagagcacgttcgtggaggggcaactgccaagtcctaaacctgacgccctggacaaccatcagaagtgcttcgccattctcaagctgtaccgtccgaaggtggataacagtgcggttgggacgagtaagaaaagtgacatggctgaggttaaggattggaaagcggttcgtgtggatctggtgatcacgccattcgagcagttcgcctatgcgctgctcggttggacgggcagcggccaatttcgtcgcgatctgcgtcgctatgcggaggaagagcgcgacatgctgctcgacaaccatcgtctctacgacctgaaaaagggcatctttctgagtgcggacagcgaagaagagattttcggtcatctgggtctggattatctggagccgtgggaacgcaacgcg

SEQ ID NO: 4428 - protein, 394 aa, synthetic construct
  REGION 1..394: note = Variant of terminal deoxynucleotidyl transferase
MHHHHHHGGSGHPEGNTPEKEVPSVIARHVSQYACQRKTTLNNYNKKFTDALEIMAENYKFKENLQACLEAKRAASVLKSLPFEVTSMKDIQGLPCITDDVRDVIEEIIEEGESSRVKEILNDERYKAFKQFTSVFGVGVKTSEKWYRMGLRTVEEAKASKSLCLSKMQKAGFLYYEDLASGVSKEEADAVTLIVKETVRTVSPDALVTIAGGFRRGKPMGHDVDLLITIPGRPEDDELLHKVVDLLKKQGLLLYEDIRESTFVEGQLPSPKPDALDNHQKCFAILKLYRPKVDNSAVGTSKKSDMAEVKDWKAVRVDLVITPFEQFAYALLGWTGSGQFRRDLRRYAEEERDMLLDNHRLYDLKKGIFLSADSEEEIFGHLGLDYLEPWERNA

SEQ ID NO: 4429 - DNA, 1182 bp, synthetic construct
  misc_feature 1..1182: note = Variant of terminal deoxynucleotidyl transferase
  source 1..1182: mol_type = other DNA
atgcatcaccaccatcatcatgggggttctggtcatccggaaggtaataccccggagaaggaggtgccgagcgttatcgcccgtcatgttagtcagtacgcgtgccagcgcaagaccacgctgaataactacaacaaaaagttcaccgacgcgctggagatcatggccgagaactacaaatttaaagagaacctgcaggcgtgtctggaagccaagcgcgccgcgagtgtcctgaaaagcctgccgttcgaggttaccagcatgaaagacatccaaggtctgccgtgcattaccgacgacgtacgtgacgtgatcgaggagatcatcgaagagggcgagagcagccgtgttaaagaaatcctcaatgacgagcgctacaaggcctttaagcagttcaccagcgtgttcggtgtgggcgtgaaaacctcggaaaagtggtaccgtatgggcctccgtacggttgaagaagcaaaggccagtaagagtctgaagctgagcaagatgcagaaggcgggcttcctgtattacgaggatctggcgagcggtgttagtaaagaagaagccgatgccgttacggctatcgtgaaggaaacggtgcgtactgttagtccggatgcgctggtgaccatcgccggcggtttccgccgtggcaaacctatgggccacgacgttgacctgctgatcacgattccgggccgtcctgaagatgacgagctgctccacaaagtggttgatctgctcaagaagcaaggtctgctgctgtacgaagacatccgtgagagcacgttcgtggaggggcaactgccaagtcctaaacctgacgccctggacaaccatcagaagtgcttcgccattctcaagctgtaccgtccgaaggtggataacagtgcggttgggacgagtaagaaaagtgacatggctgaggttaaggattggaaagcggttcgtgtggatctggtgatcacgccattcgagcagttcgcctatgcgctgctcggttggacgggcagcggccaatttcgtcgcgatctgcgtcgctatgcggaggaagagcgcgacatgctgctcgacaaccatcgtctctacgacctgaaaaagggcatctttctgagtgcggacagcgaagaagagattttcggtcatctgggtctggattatctggagccgtgggaacgcaacgcg

SEQ ID NO: 4430 - protein, 394 aa, synthetic construct
  REGION 1..394: note = Variant of terminal deoxynucleotidyl transferase
MHHHHHHGGSGHPEGNTPEKEVPSVIARHVSQYACQRKTTLNNYNKKFTDALEIMAENYKFKENLQACLEAKRAASVLKSLPFEVTSMKDIQGLPCITDDVRDVIEEIIEEGESSRVKEILNDERYKAFKQFTSVFGVGVKTSEKWYRMGLRTVEEAKASKSLKLSKMQKAGFLYYEDLASGVSKEEADAVTAIVKETVRTVSPDALVTIAGGFRRGKPMGHDVDLLITIPGRPEDDELLHKVVDLLKKQGLLLYEDIRESTFVEGQLPSPKPDALDNHQKCFAILKLYRPKVDNSAVGTSKKSDMAEVKDWKAVRVDLVITPFEQFAYALLGWTGSGQFRRDLRRYAEEERDMLLDNHRLYDLKKGIFLSADSEEEIFGHLGLDYLEPWERNA

SEQ ID NO: 4431 - DNA, 1182 bp, synthetic construct
  misc_feature 1..1182: note = Variant of terminal deoxynucleotidyl transferase
  source 1..1182: mol_type = other DNA
atgcatcaccaccatcatcatgggggttctggtcatccggaaggtaataccccggagaaggaggtgccgagcgttatcgcccgtcatgttagtcagtacgcgtgccagcgcaagaccacgctgaataactacaacaaaaagttcaccgacgcgctggagatcatggccgagaactacaaatttaaagagaacctgcaggcgtgtctggaagccaagcgcgccgcgagtgtcctgaaaagcctgccgttcgaggttaccagcatgaaagacatccaaggtctgccgtgcattaccgacgacgtacgtgacgtgatcgaggagatcatcgaagagggcgagagcagccgtgttaaagaaatcctcaatgacgagcgctacaaggcctttaagcagttcaccagcgtgttcggtgtgggcgtgaaaacctcggaaaagtggtaccgtatgggcctccgtacggttgaagaagcaaaggccagtaagagtctgaagctgagcaagatgcagaaggcgggcttcctgtattacgaggatctggcgagcggtgttagtaaagaagaagccgatgccgttacgctcatcgtgaaggaaacggtgcgtactgttagtccggatgcgctggtgaccatcgccggcggtttccgccgtggcaaacctatgggccacgacgttgacctgctgatcacgattccgggccgtcctgaagatgacgagctgctccacaaagtggttgatctgctcaagaagcaaggtctgctgctgtacgaagacatccgtgagagcacgttcgtggaggggcaactgccaagtcctaaacctgacgccctggacaaccatcagaagtgcttcgccattctcaagctgtaccgtccgaaggtggataacagtgcggttgggacgagtaagaaaagtgacatggctgagaataaggattggaaagcggttcgtgtggatctggtgatcacgccattcgagcagttcgcctatgcgctgctcggttggacgggcagcggccaatttcgtcgcgatctgcgtcgctatgcggaggaagagcgcgacatgctgctcgacaaccatcgtctctacgacctgaaaaagggcatctttctgagtgcggacagcgaagaagagattttcggtcatctgggtctggattatctggagccgtgggaacgcaacgcg

SEQ ID NO: 4432 - protein, 394 aa, synthetic construct
  REGION 1..394: note = Variant of terminal deoxynucleotidyl transferase
MHHHHHHGGSGHPEGNTPEKEVPSVIARHVSQYACQRKTTLNNYNKKFTDALEIMAENYKFKENLQACLEAKRAASVLKSLPFEVTSMKDIQGLPCITDDVRDVIEEIIEEGESSRVKEILNDERYKAFKQFTSVFGVGVKTSEKWYRMGLRTVEEAKASKSLKLSKMQKAGFLYYEDLASGVSKEEADAVTLIVKETVRTVSPDALVTIAGGFRRGKPMGHDVDLLITIPGRPEDDELLHKVVDLLKKQGLLLYEDIRESTFVEGQLPSPKPDALDNHQKCFAILKLYRPKVDNSAVGTSKKSDMAENKDWKAVRVDLVITPFEQFAYALLGWTGSGQFRRDLRRYAEEERDMLLDNHRLYDLKKGIFLSADSEEEIFGHLGLDYLEPWERNA

SEQ ID NO: 4433 - DNA, 1182 bp, synthetic construct
  misc_feature 1..1182: note = Variant of terminal deoxynucleotidyl transferase
  source 1..1182: mol_type = other DNA
atgcatcaccaccatcatcatgggggttctggtcatccggaaggtaataccccggagaaggaggtgccgagcgttatcgcccgtcatgttagtcagtacgcgtgccagcgcaagaccacgctgaataactacaacaaaaagttcaccgacgcgctggagatcatggccgagaactacaaatttaaagagaacctgcaggcgtgtctggaagccaagcgcgccgcgagtgtcctgaaaagcctgccgttcgaggttaccagcatgaaagacatccaaggtctgccgtgcattaccgacgacgtacgtgacgtgatcgaggagatcatcgaagagggcgagagcagccgtgttaaagaaatcctcaatgacgagcgctacaaggcctttaagcagttcaccagcgtgttcggtgtgggcgtgaaaacctcggaaaagtggtaccgtatgggcctccgtacggttgaagaagcaaaggccagtaagagtctgaagctgagcaagatgcagaaggcgggcttcctgtattacgaggatctggcgagcggtgttagtaaagaagaagccgatgccgttacgctcatcgtgaaggaaacggtgcgtactgttagtccggatgcgctggtgaccatcgccggcggtttccgccgtggcaaacctatgggccacgacgttgacctgctgatcacgattccgggccgtcctgaagatgacgagctgctccacaaagtggttgatctgctcaagaagcaaggtctgctgctgtacgaagacatccgtgagagcacgttcgtggaggggcaactgccaagtcctaaacctgacgccctggacaaccatcagaagtgcttcgccattctcaagctgtaccgtccgaaggtggataacagtgcggttgggtctagtaagaaaagtgacatggctgaggttaaggattggaaagcggttcgtgtggatctggtgatcacgccattcgagcagttcgcctatgcgctgctcggttggacgggcagcggccaatttcgtcgcgatctgcgtcgctatgcggaggaagagcgcgacatgctgctcgacaaccatcgtctctacgacctgaaaaagggcatctttctgagtgcggacagcgaagaagagattttcggtcatctgggtctggattatctggagccgtgggaacgcaacgcg

SEQ ID NO: 4434 - protein, 394 aa, synthetic construct
  REGION 1..394: note = Variant of terminal deoxynucleotidyl transferase
MHHHHHHGGSGHPEGNTPEKEVPSVIARHVSQYACQRKTTLNNYNKKFTDALEIMAENYKFKENLQACLEAKRAASVLKSLPFEVTSMKDIQGLPCITDDVRDVIEEIIEEGESSRVKEILNDERYKAFKQFTSVFGVGVKTSEKWYRMGLRTVEEAKASKSLKLSKMQKAGFLYYEDLASGVSKEEADAVTLIVKETVRTVSPDALVTIAGGFRRGKPMGHDVDLLITIPGRPEDDELLHKVVDLLKKQGLLLYEDIRESTFVEGQLPSPKPDALDNHQKCFAILKLYRPKVDNSAVGSSKKSDMAEVKDWKAVRVDLVITPFEQFAYALLGWTGSGQFRRDLRRYAEEERDMLLDNHRLYDLKKGIFLSADSEEEIFGHLGLDYLEPWERNA

SEQ ID NO: 4435 - DNA, 1182 bp, synthetic construct
  misc_feature 1..1182: note = Variant of terminal deoxynucleotidyl transferase
  source 1..1182: mol_type = other DNA
atgcatcaccaccatcatcatgggggttctggtcatccggaaggtaataccccggagaaggaggtgccgagcgttatcgcccgtcatgttagtcagtacgcgtgccagcgcaagaccacgctgaataactacaacaaaaagttcaccgacgcgctggagatcatggccgagaactacaaatttaaagagaacctgcaggcgtgtctggaagccaagcgcgccgcgagtgtcctgaaaagcctgccgttcgaggttaccagcatgaaagacatccaaggtctgccgtgcattaccgacgacgtacgtgacgtgatcgaggagatcatcgaagagggcgagagcagccgtgttaaagaaatcctcaatgacgagcgctacaaggcctttaagcagttcaccagcgtgttcggtgtgggcgtgaaaacctcggaaaagtggtaccgtatgggcctccgtacggttgaagaagcaaaggccagtaagagtctgaagctgagcaagatgcagaaggcgggcttcctgtattacgaggatctggcgagcggtgttagtaaagaagaagccgatgccgttacgtgtatcgtgaaggaaacggtgcgtactgttagtccggatgcgctggtgaccatcgccggcggtttccgccgtggcaaacctatgggccacgacgttgacctgctgatcacgattccgggccgtcctgaagatgacgagctgctccacaaagtggttgatctgctcaagaagcaaggtctgctgctgtacgaagacatccgtgagagcacgttcgtggaggggcaactgccaagtcctaaacctgacgccctggacaaccatcagaagtgcttcgccattctcaagctgtaccgtccgaaggtggataacagtgcggttgggacgagtaagaaaagtgacatggctgaggttaaggattggaaagcggttcgtgtggatctggtgatcacgccattcgagcagttcgcctatgcgctgctcggttggacgggcagcggccaatttcgtcgcgatctgcgtcgctatgcggaggaagagcgcgacatgctgctcgacaaccatcgtctctacgacctgaaaaagggcatctttctgagtgcggacagcgaagaagagattttcggtcatctgggtctggattatctggagccgtgggaacgcaacgcg

SEQ ID NO: 4436 - protein, 394 aa, synthetic construct
  REGION 1..394: note = Variant of terminal deoxynucleotidyl transferase
MHHHHHHGGSGHPEGNTPEKEVPSVIARHVSQYACQRKTTLNNYNKKFTDALEIMAENYKFKENLQACLEAKRAASVLKSLPFEVTSMKDIQGLPCITDDVRDVIEEIIEEGESSRVKEILNDERYKAFKQFTSVFGVGVKTSEKWYRMGLRTVEEAKASKSLKLSKMQKAGFLYYEDLASGVSKEEADAVTCIVKETVRTVSPDALVTIAGGFRRGKPMGHDVDLLITIPGRPEDDELLHKVVDLLKKQGLLLYEDIRESTFVEGQLPSPKPDALDNHQKCFAILKLYRPKVDNSAVGTSKKSDMAEVKDWKAVRVDLVITPFEQFAYALLGWTGSGQFRRDLRRYAEEERDMLLDNHRLYDLKKGIFLSADSEEEIFGHLGLDYLEPWERNA

SEQ ID NO: 4437 - DNA, 1182 bp, synthetic construct
  misc_feature 1..1182: note = Variant of terminal deoxynucleotidyl transferase
  source 1..1182: mol_type = other DNA
atgcatcaccaccatcatcatgggggttctggtcatccggaaggtaataccccggagaaggaggtgccgagcgttatcgcccgtcatgttagtcagtacgcgtgccagcgcaagaccacgctgaataactacaacaaaaagttcaccgacgcgctggagatcatggccgagaactacaaatttaaagagaacctgcaggcgtgtctggaagccaagcgcgccgcgagtgtcctgaaaagcctgccgttcgaggttaccagcatgaaagacatccaaggtctgccgtgcattaccgacgacgtacgtgacgtgatcgaggagatcatcgaagagggcgagagcagccgtgttaaagaaatcctcaatgacgagcgctacaaggcctttaagcagttcaccagcgtgttcggtgtgggcgtgaaaacctcggaaaagtggtaccgtatgggcctccgtacggttgaagaagcaaaggccagtaagagtctgaagctgagcaagatgcagaaggcgggcttcctgtattacgaggatctggcgagcggtgttagtaaagaagaagccgatgccgttacgctcatcgtgaaggaaacggtgcgtactgttagtccggatgcgctggtgaccatcgccggcggtttccgccgtggcaaacctatgggccacgacgttgacctgctgatcacgattccgggccgtcctgaagatgacgagctgctccacaaagtggttgatctgctcaagaagcaaggtctgctgctgtacgaagacatccgtgagagcacgttcgtggaggggcaactgccaagtcctaaacctgacgccctggacaaccatcagaagtgcttcgccattctcaagctgtaccgtccgaaggtggttaacagtgcggttgggacgagtaagaaaagtgacatggctgaggttaaggattggaaagcggttcgtgtggatctggtgatcacgccattcgagcagttcgcctatgcgctgctcggttggacgggcagcggccaatttcgtcgcgatctgcgtcgctatgcggaggaagagcgcgacatgctgctcgacaaccatcgtctctacgacctgaaaaagggcatctttctgagtgcggacagcgaagaagagattttcggtcatctgggtctggattatctggagccgtgggaacgcaacgcg

SEQ ID NO: 4438 - protein, 394 aa, synthetic construct
  REGION 1..394: note = Variant of terminal deoxynucleotidyl transferase
MHHHHHHGGSGHPEGNTPEKEVPSVIARHVSQYACQRKTTLNNYNKKFTDALEIMAENYKFKENLQACLEAKRAASVLKSLPFEVTSMKDIQGLPCITDDVRDVIEEIIEEGESSRVKEILNDERYKAFKQFTSVFGVGVKTSEKWYRMGLRTVEEAKASKSLKLSKMQKAGFLYYEDLASGVSKEEADAVTLIVKETVRTVSPDALVTIAGGFRRGKPMGHDVDLLITIPGRPEDDELLHKVVDLLKKQGLLLYEDIRESTFVEGQLPSPKPDALDNHQKCFAILKLYRPKVVNSAVGTSKKSDMAEVKDWKAVRVDLVITPFEQFAYALLGWTGSGQFRRDLRRYAEEERDMLLDNHRLYDLKKGIFLSADSEEEIFGHLGLDYLEPWERNA

SEQ ID NO: 4439 - DNA, 1182 bp, synthetic construct
  misc_feature 1..1182: note = Variant of terminal deoxynucleotidyl transferase
  source 1..1182: mol_type = other DNA
atgcatcaccaccatcatcatgggggttctggtcatccggaaggtaataccccggagaaggaggtgccgagcgttatcgcccgtcatgttagtcagtacgcgtgccagcgcaagaccacgctgaataactacaacaaaaagttcaccgacgcgctggagatcatggccgagaactacaaatttaaagagaacctgcaggcgtgtctggaagccaagcgcgccgcgagtgtcctgaaaagcctgccgttcgaggttaccagcatgaaagacatccaaggtctgccgtgcattaccgacgacgtacgtgacgtgatcgaggagatcatcgaagagggcgagagcagccgtgttaaagaaatcctcaatgacgagcgctacaaggcctttaagcagttcaccagcgtgttcggtgtgggcgtgaaaacctcggaaaagtggtaccgtatgggcctccgtacggttgaagaagcaaaggccagtaagagtctgaagctgagcaagatgcagaaggcgggcttcctgtattacgaggatctggcgagcggtgttagtaaagaagaagccgatgccgttacgctcatcgtgaaggaaacggtgcgtactgttagtccggatgcgctggtgaccatcgccggcggtttccgccgtggcaaacctatgggccacgacgttgacctgctgatcacgattccgggccgtcctgaagatgacgagctgctccacaaagtggttgatctgctcaagaagcaaggtctgctgctgtacgaagacatccgtgagagcacgttcgtggaggggcaactgccaagtcctaaacctgacgccctggacaaccatcagaagtgcttcgccattctcaagctgtaccgtccgaagggggataacagtgcggttgggacgagtaagaaaagtgacatggctgaggttaaggattggaaagcggttcgtgtggatctggtgatcacgccattcgagcagttcgcctatgcgctgctcggttggacgggcagcggccaatttcgtcgcgatctgcgtcgctatgcggaggaagagcgcgacatgctgctcgacaaccatcgtctctacgacctgaaaaagggcatctttctgagtgcggacagcgaagaagagattttcggtcatctgggtctggattatctggagccgtgggaacgcaacgcg

SEQ ID NO: 4440 - protein, 394 aa, synthetic construct
  REGION 1..394: note = Variant of terminal deoxynucleotidyl transferase
MHHHHHHGGSGHPEGNTPEKEVPSVIARHVSQYACQRKTTLNNYNKKFTDALEIMAENYKFKENLQACLEAKRAASVLKSLPFEVTSMKDIQGLPCITDDVRDVIEEIIEEGESSRVKEILNDERYKAFKQFTSVFGVGVKTSEKWYRMGLRTVEEAKASKSLKLSKMQKAGFLYYEDLASGVSKEEADAVTLIVKETVRTVSPDALVTIAGGFRRGKPMGHDVDLLITIPGRPEDDELLHKVVDLLKKQGLLLYEDIRESTFVEGQLPSPKPDALDNHQKCFAILKLYRPKGDNSAVGTSKKSDMAEVKDWKAVRVDLVITPFEQFAYALLGWTGSGQFRRDLRRYAEEERDMLLDNHRLYDLKKGIFLSADSEEEIFGHLGLDYLEPWERNA

SEQ ID NO: 4441 - DNA, 1182 bp, synthetic construct
  misc_feature 1..1182: note = Variant of terminal deoxynucleotidyl transferase
  source 1..1182: mol_type = other DNA
atgcatcaccaccatcatcatgggggttctggtcatccggaaggtaataccccggagaaggaggtgccgagcgttatcgcccgtcatgttagtcagtacgcgtgccagcgcaagaccacgctgaataactacaacaaaaagttcaccgacgcgctggagatcatggccgagaactacaaatttaaagagaacctgcaggcgtgtctggaagccaagcgcgccgcgagtgtcctgaaaagcctgccgttcgaggttaccagcatgaaagacatccaaggtctgccgtgcattaccgacgacgtacgtgacgtgatcgaggagatcatcgaagagggcgagagcagccgtgttaaagaaatcctcaatgacgagcgctacaaggcctttaagcagttcaccagcgtgttcggtgtgggcgtgaaaacctcggaaaagtggtaccgtatgggcctccgtacggttgaagaagcaaaggccagtaagagtctgaagctgagcaagatgcagaaggcgggcttcctgtattacgaggatctggcgagcggtgttagtaaagaagaagccgatgccgttacgctcatcgtgaaggaaacggtgcgtactgttagtccggatgcgctggtgaccatcgccggcggtttccgccgtggcaaacctatgggccacgacgttgacctgctgatcacgattccgggccgtcctgaagatgacgagctgctccacaaagtggttgatctgctcaagaagcaaggtctgctgctgtacgaagacatccgtgagagcacgttcgtggaggggcaactgccaagtcctaaacctgacgccctggacaaccatcagaagtgcttcgccattctcaagctgtaccgtccgaaggtggataacagtgcggttggggttagtaagaaaagtgacatggctgaggttaaggattggaaagcggttcgtgtggatctggtgatcacgccattcgagcagttcgcctatgcgctgctcggttggacgggcagcggccaatttcgtcgcgatctgcgtcgctatgcggaggaagagcgcgacatgctgctcgacaaccatcgtctctacgacctgaaaaagggcatctttctgagtgcggacagcgaagaagagattttcggtcatctgggtctggattatctggagccgtgggaacgcaacgcg

SEQ ID NO: 4442 - protein, 394 aa, synthetic construct
  REGION 1..394: note = Variant of terminal deoxynucleotidyl transferase
MHHHHHHGGSGHPEGNTPEKEVPSVIARHVSQYACQRKTTLNNYNKKFTDALEIMAENYKFKENLQACLEAKRAASVLKSLPFEVTSMKDIQGLPCITDDVRDVIEEIIEEGESSRVKEILNDERYKAFKQFTSVFGVGVKTSEKWYRMGLRTVEEAKASKSLKLSKMQKAGFLYYEDLASGVSKEEADAVTLIVKETVRTVSPDALVTIAGGFRRGKPMGHDVDLLITIPGRPEDDELLHKVVDLLKKQGLLLYEDIRESTFVEGQLPSPKPDALDNHQKCFAILKLYRPKVDNSAVGVSKKSDMAEVKDWKAVRVDLVITPFEQFAYALLGWTGSGQFRRDLRRYAEEERDMLLDNHRLYDLKKGIFLSADSEEEIFGHLGLDYLEPWERNA

SEQ ID NO: 4443 - DNA, 1182 bp, synthetic construct
  misc_feature 1..1182: note = Variant of terminal deoxynucleotidyl transferase
  source 1..1182: mol_type = other DNA
atgcatcaccaccatcatcatgggggttctggtcatccggaaggtaataccccggagaaggaggtgccgagcgttatcgcccgtcatgttagtcagtacgcgtgccagcgcaagaccacgctgaataactacaacaaaaagttcaccgacgcgctggagatcatggccgagaactacaaatttaaagagaacctgcaggcgtgtctggaagccaagcgcgccgcgagtgtcctgaaaagcctgccgttcgaggttaccagcatgaaagacatccaaggtctgccgtgcattaccgacgacgtacgtgacgtgatcgaggagatcatcgaagagggcgagagcagccgtgttaaagaaatcctcaatgacgagcgctacaaggcctttaagcagttcaccagcgtgttcggtgtgggcgtgaaaacctcggaaaagtggtaccgtatgggcctccgtacggttgaagaagcaaaggccagtaagagtctgaagctgagcaagatgcagaaggcgggcttcctgtattacgaggatctggcgagcggtgttagtaaagaagaagccgatgccgttacgctcatcgtgaaggaaacggtgcgtactgttagtccggatgcgctggtgaccatcgccggcggtttccgccgtggcaaacctatgggccacgacgttgacctgctgatcacgattccgggccgtcctgaagatgacgagctgctccacaaagtggttgatctgctcaagaagcaaggtctgctgctgtacgaagacatccgtgagagcacgttcgtggaggggcaactgccaagtcctaaacctgacgccctggacaaccatcagaagtgcttcgccattctcaagctgtaccgtccgaaggtggataacagtgcggttgggacgagtaagaaaagtgacatggctattgttaaggattggaaagcggttcgtgtggatctggtgatcacgccattcgagcagttcgcctatgcgctgctcggttggacgggcagcggccaatttcgtcgcgatctgcgtcgctatgcggaggaagagcgcgacatgctgctcgacaaccatcgtctctacgacctgaaaaagggcatctttctgagtgcggacagcgaagaagagattttcggtcatctgggtctggattatctggagccgtgggaacgcaacgcg

SEQ ID NO: 4444 - protein, 394 aa, synthetic construct
  REGION 1..394: note = Variant of terminal deoxynucleotidyl transferase
MHHHHHHGGSGHPEGNTPEKEVPSVIARHVSQYACQRKTTLNNYNKKFTDALEIMAENYKFKENLQACLEAKRAASVLKSLPFEVTSMKDIQGLPCITDDVRDVIEEIIEEGESSRVKEILNDERYKAFKQFTSVFGVGVKTSEKWYRMGLRTVEEAKASKSLKLSKMQKAGFLYYEDLASGVSKEEADAVTLIVKETVRTVSPDALVTIAGGFRRGKPMGHDVDLLITIPGRPEDDELLHKVVDLLKKQGLLLYEDIRESTFVEGQLPSPKPDALDNHQKCFAILKLYRPKVDNSAVGTSKKSDMAIVKDWKAVRVDLVITPFEQFAYALLGWTGSGQFRRDLRRYAEEERDMLLDNHRLYDLKKGIFLSADSEEEIFGHLGLDYLEPWERNA

SEQ ID NO: 4445 - DNA, 1182 bp, synthetic construct
  misc_feature 1..1182: note = Variant of terminal deoxynucleotidyl transferase
  source 1..1182: mol_type = other DNA
atgcatcaccaccatcatcatgggggttctggtcatccggaaggtaataccccggagaaggaggtgccgagcgttatcgcccgtcatgttagtcagtacgcgtgccagcgcaagaccacgctgaataactacaacaaaaagttcaccgacgcgctggagatcatggccgagaactacaaatttaaagagaacctgcaggcgtgtctggaagccaagcgcgccgcgagtgtcctgaaaagcctgccgttcgaggttaccagcatgaaagacatccaaggtctgccgtgcattaccgacgacgtacgtgacgtgatcgaggagatcatcgaagagggcgagagcagccgtgttaaagaaatcctcaatgacgagcgctacaaggcctttaagcagttcaccagcgtgttcggtgtgggcgtgaaaacctcggaaaagtggtaccgtatgggcctccgtacggttgaagaagcaaaggccagtaagagtctgaagctgagcaagatgcagaaggcgggcttcctgtattacgaggatctggcgagcggtgttagtaaagaagaagccgatgccgttacgctcatcgtgaaggaaacggtgcgtactgttagtccggatgcgctggtgaccatcgccggcggtttccgccgtggcaaacctatgggccacgacgttgacctgctgatcacgattccgggccgtcctgaagatgacgagctgctccacaaagtgattgatctgctcaagaagcaaggtctgctgctgtacgaagacatccgtgagagcacgttcgtggaggggcaactgccaagtcctaaacctgacgccctggacaaccatcagaagtgcttcgccattctcaagctgtaccgtccgaaggtggataacagtgcggttgggacgagtaagaaaagtgacatggctgaggttaaggattggaaagcggttcgtgtggatctggtgatcacgccattcgagcagttcgcctatgcgctgctcggttggacgggcagcggccaatttcgtcgcgatctgcgtcgctatgcggaggaagagcgcgacatgctgctcgacaaccatcgtctctacgacctgaaaaagggcatctttctgagtgcggacagcgaagaagagattttcggtcatctgggtctggattatctggagccgtgggaacgcaacgcg

SEQ ID NO: 4446 - protein, 394 aa, synthetic construct
  REGION 1..394: note = Variant of terminal deoxynucleotidyl transferase
MHHHHHHGGSGHPEGNTPEKEVPSVIARHVSQYACQRKTTLNNYNKKFTDALEIMAENYKFKENLQACLEAKRAASVLKSLPFEVTSMKDIQGLPCITDDVRDVIEEIIEEGESSRVKEILNDERYKAFKQFTSVFGVGVKTSEKWYRMGLRTVEEAKASKSLKLSKMQKAGFLYYEDLASGVSKEEADAVTLIVKETVRTVSPDALVTIAGGFRRGKPMGHDVDLLITIPGRPEDDELLHKVIDLLKKQGLLLYEDIRESTFVEGQLPSPKPDALDNHQKCFAILKLYRPKVDNSAVGTSKKSDMAEVKDWKAVRVDLVITPFEQFAYALLGWTGSGQFRRDLRRYAEEERDMLLDNHRLYDLKKGIFLSADSEEEIFGHLGLDYLEPWERNA

SEQ ID NO: 4447 - DNA, 1182 bp, synthetic construct
  misc_feature 1..1182: note = Variant of terminal deoxynucleotidyl transferase
  source 1..1182: mol_type = other DNA
atgcatcaccaccatcatcatgggggttctggtcatccggaaggtaataccccggagaaggaggtgccgagcgttatcgcccgtcatgttagtcagtacgcgtgccagcgcaagaccacgctgaataactacaacaaaaagttcaccgacgcgctggagatcatggccgagaactacaaatttaaagagaacctgcaggcgtgtctggaagccaagcgcgccgcgagtgtcctgaaaagcctgccgttcgaggttaccagcatgaaagacatccaaggtctgccgtgcattaccgacgacgtacgtgacgtgatcgaggagatcatcgaagagggcgagagcagccgtgttaaagaaatcctcaatgacgagcgctacaaggcctttaagcagttcaccagcgtgttcggtgtgggcgtgaaaacctcggaaaagtggtaccgtatgggcctccgtacggttgaagaagcaaaggccagtaagagtctgaagctgagcaagatgcagaaggcgggcttcctgtattacgaggatctggcgagcggtgttagtaaagaagaagccgatgccgttacgctcatcgtgaaggaaacggtgcgtactgttagtccggatgcgctggtgaccatcgccggcggtttccgccgtggcaaacctatgggccacgacgttgacctgctgatcacgattccgggccgtcctgaagatgacgagctgctccacaaagtggttgatctgctcaagaagcaaggtctgctgctgtacgaagactgtcgtgagagcacgttcgtggaggggcaactgccaagtcctaaacctgacgccctggacaaccatcagaagtgcttcgccattctcaagctgtaccgtccgaaggtggataacagtgcggttgggacgagtaagaaaagtgacatggctgaggttaaggattggaaagcggttcgtgtggatctggtgatcacgccattcgagcagttcgcctatgcgctgctcggttggacgggcagcggccaatttcgtcgcgatctgcgtcgctatgcggaggaagagcgcgacatgctgctcgacaaccatcgtctctacgacctgaaaaagggcatctttctgagtgcggacagcgaagaagagattttcggtcatctgggtctggattatctggagccgtgggaacgcaacgcg

SEQ ID NO: 4448 - protein, 394 aa, synthetic construct
  REGION 1..394: note = Variant of terminal deoxynucleotidyl transferase
MHHHHHHGGSGHPEGNTPEKEVPSVIARHVSQYACQRKTTLNNYNKKFTDALEIMAENYKFKENLQACLEAKRAASVLKSLPFEVTSMKDIQGLPCITDDVRDVIEEIIEEGESSRVKEILNDERYKAFKQFTSVFGVGVKTSEKWYRMGLRTVEEAKASKSLKLSKMQKAGFLYYEDLASGVSKEEADAVTLIVKETVRTVSPDALVTIAGGFRRGKPMGHDVDLLITIPGRPEDDELLHKVVDLLKKQGLLLYEDCRESTFVEGQLPSPKPDALDNHQKCFAILKLYRPKVDNSAVGTSKKSDMAEVKDWKAVRVDLVITPFEQFAYALLGWTGSGQFRRDLRRYAEEERDMLLDNHRLYDLKKGIFLSADSEEEIFGHLGLDYLEPWERNA

SEQ ID NO: 4449 - DNA, 1182 bp, synthetic construct
  misc_feature 1..1182: note = Variant of terminal deoxynucleotidyl transferase
  source 1..1182: mol_type = other DNA
atgcatcaccaccatcatcatgggggttctggtcatccggaaggtaataccccggagaaggaggtgccgagcgttatcgcccgtcatgttagtcagtacgcgtgccagcgcaagaccacgctgaataactacaacaaaaagttcaccgacgcgctggagatcatggccgagaactacaaatttaaagagaacctgcaggcgtgtctggaagccaagcgcgccgcgagtgtcctgaaaagcctgccgttcgaggttaccagcatgaaagacatccaaggtctgccgtgcattaccgacgacgtacgtgacgtgatcgaggagatcatcgaagagggcgagagcagccgtgttaaagaaatcctcaatgacgagcgctacaaggcctttaagcagttcaccagcgtgttcggtgtgggcgtgaaaacctcggaaaagtggtaccgtatgggcctccgtacggttgaagaagcaaaggccagtaagagtctgaagctgagcaagatgcagaaggcgggcttcctgtattacgaggatctggcgagcggtgttagtaaagaagaagccgatgccgttacgctcatcgtgaaggaaacggtgcgtactgttagtccggatgcgctggtgaccatcgccggcggtttccgccgtggcaaacctatgggccacgacgttgacctgctgatcacgattccgggccgtcctgaagatgacgagctgctccacaaagtggttgatctgctcaagaagcaaggtctgctgctgtacgaagacatccgtgagagcacgttcgtggaggggcaactgccaagtcctaaacctgacgccctggacaaccatcagaagtgcttcgccattctcaagctgtaccgtccgaaggtggcgaacagtgcggttgggacgagtaagaaaagtgacatggctgaggttaaggattggaaagcggttcgtgtggatctggtgatcacgccattcgagcagttcgcctatgcgctgctcggttggacgggcagcggccaatttcgtcgcgatctgcgtcgctatgcggaggaagagcgcgacatgctgctcgacaaccatcgtctctacgacctgaaaaagggcatctttctgagtgcggacagcgaagaagagattttcggtcatctgggtctggattatctggagccgtgggaacgcaacgcg

SEQ ID NO: 4450 - protein, 394 aa, synthetic construct
  REGION 1..394: note = Variant of terminal deoxynucleotidyl transferase
MHHHHHHGGSGHPEGNTPEKEVPSVIARHVSQYACQRKTTLNNYNKKFTDALEIMAENYKFKENLQACLEAKRAASVLKSLPFEVTSMKDIQGLPCITDDVRDVIEEIIEEGESSRVKEILNDERYKAFKQFTSVFGVGVKTSEKWYRMGLRTVEEAKASKSLKLSKMQKAGFLYYEDLASGVSKEEADAVTLIVKETVRTVSPDALVTIAGGFRRGKPMGHDVDLLITIPGRPEDDELLHKVVDLLKKQGLLLYEDIRESTFVEGQLPSPKPDALDNHQKCFAILKLYRPKVANSAVGTSKKSDMAEVKDWKAVRVDLVITPFEQFAYALLGWTGSGQFRRDLRRYAEEERDMLLDNHRLYDLKKGIFLSADSEEEIFGHLGLDYLEPWERNA

SEQ ID NO: 4451 - DNA, 1182 bp, synthetic construct
  misc_feature 1..1182: note = Variant of terminal deoxynucleotidyl transferase
  source 1..1182: mol_type = other DNA
atgcatcaccaccatcatcatgggggttctggtcatccggaaggtaataccccggagaaggaggtgccgagcgttatcgcccgtcatgttagtcagtacgcgtgccagcgcaagaccacgctgaataactacaacaaaaagttcaccgacgcgctggagatcatggccgagaactacaaatttaaagagaacctgcaggcgtgtctggaagccaagcgcgccgcgagtgtcctgaaaagcctgccgttcgaggttaccagcatgaaagacatccaaggtctgccgtgcattaccgacgacgtacgtgacgtgatcgaggagatcatcgaagagggcgagagcagccgtgttaaagaaatcctcaatgacgagcgctacaaggcctttaagcagttcaccagcgtgttcggtgtgggcgtgaaaacctcggaaaagtggtaccgtatgggcctccgtacggttgaagaagcaaaggccagtaagagtctgaagctgagcaagatgcagaaggcgggcttcctgtattacgaggatctggcgagcggtgttagtaaagaagaagccgatgccgttacgctcatcgtgaaggaaacggtgcgtactgttagtccggatgcgctggtgaccatcgccggcggtttccgccgtggcaaacctatgggccacgacgttgacctgctgatcacgattccgggccgtcctgaagatgacgagctgctccacaaagtggttgatctgctcaagaagcaaggtctgctgctgtacgaagacatccgtgagagcacgttcgtggaggggcaactgccaagtcctaaacctgacgccctggacaaccatcagaagtgcttcgccattctcaagctgtaccgtccgaaggtggataacagtgcggttgggacgagtaagaaaagtgacatggctgagtataaggattggaaagcggttcgtgtggatctggtgatcacgccattcgagcagttcgcctatgcgctgctcggttggacgggcagcggccaatttcgtcgcgatctgcgtcgctatgcggaggaagagcgcgacatgctgctcgacaaccatcgtctctacgacctgaaaaagggcatctttctgagtgcggacagcgaagaagagattttcggtcatctgggtctggattatctggagccgtgggaacgcaacgcg

SEQ ID NO: 4452 - protein, 394 aa, synthetic construct
  REGION 1..394: note = Variant of terminal deoxynucleotidyl transferase
MHHHHHHGGSGHPEGNTPEKEVPSVIARHVSQYACQRKTTLNNYNKKFTDALEIMAENYKFKENLQACLEAKRAASVLKSLPFEVTSMKDIQGLPCITDDVRDVIEEIIEEGESSRVKEILNDERYKAFKQFTSVFGVGVKTSEKWYRMGLRTVEEAKASKSLKLSKMQKAGFLYYEDLASGVSKEEADAVTLIVKETVRTVSPDALVTIAGGFRRGKPMGHDVDLLITIPGRPEDDELLHKVVDLLKKQGLLLYEDIRESTFVEGQLPSPKPDALDNHQKCFAILKLYRPKVDNSAVGTSKKSDMAEYKDWKAVRVDLVITPFEQFAYALLGWTGSGQFRRDLRRYAEEERDMLLDNHRLYDLKKGIFLSADSEEEIFGHLGLDYLEPWERNA

SEQ ID NO: 4453 - DNA, 1182 bp, synthetic construct
  misc_feature 1..1182: note = Variant of terminal deoxynucleotidyl transferase
  source 1..1182: mol_type = other DNA
atgcatcaccaccatcatcatgggggttctggtcatccggaaggtaataccccggagaaggaggtgccgagcgttatcgcccgtcatgttagtcagtacgcgtgccagcgcaagaccacgctgaataactacaacaaaaagttcaccgacgcgctggagatcatggccgaggattacaaatttaaagagaacctgcaggcgtgtctggaagccaagcgcgccgcgagtgtcctgaaaagcctgccgttcgaggttaccagcatgaaagacatccaaggtctgccgtgcattaccgacgacgtacgtgacgtgatcgaggagatcatcgaagagggcgagagcagccgtgttaaagaaatcctcaatgacgagcgctacaaggcctttaagcagttcaccagcgtgttcggtgtgggcgtgaaaacctcggaaaagtggtaccgtatgggcctccgtacggttgaagaagcaaaggccagtaagagtctgaagctgagcaagatgcagaaggcgggcttcctgtattacgaggatctggcgagcggtgttagtaaagaagaagccgatgccgttacgctcatcgtgaaggaaacggtgcgtactgttagtccggatgcgctggtgaccatcgccggcggtttccgccgtggcaaacctatgggccacgacgttgacctgctgatcacgattccgggccgtcctgaagatgacgagctgctccacaaagtggttgatctgctcaagaagcaaggtctgctgctgtacgaagacatccgtgagagcacgttcgtggaggggcaactgccaagtcctaaacctgacgccctggacaaccatcagaagtgcttcgccattctcaagctgtaccgtccgaaggtggataacagtgcggttgggacgagtaagaaaagtgacatggctgaggttaaggattggaaagcggttcgtgtggatctggtgatcacgccattcgagcagttcgcctatgcgctgctcggttggacgggcagcggccaatttcgtcgcgatctgcgtcgctatgcggaggaagagcgcgacatgctgctcgacaaccatcgtctctacgacctgaaaaagggcatctttctgagtgcggacagcgaagaagagattttcggtcatctgggtctggattatctggagccgtgggaacgcaacgcg

SEQ ID NO: 4454 - protein, 394 aa, synthetic construct
  REGION 1..394: note = Variant of terminal deoxynucleotidyl transferase
MHHHHHHGGSGHPEGNTPEKEVPSVIARHVSQYACQRKTTLNNYNKKFTDALEIMAEDYKFKENLQACLEAKRAASVLKSLPFEVTSMKDIQGLPCITDDVRDVIEEIIEEGESSRVKEILNDERYKAFKQFTSVFGVGVKTSEKWYRMGLRTVEEAKASKSLKLSKMQKAGFLYYEDLASGVSKEEADAVTLIVKETVRTVSPDALVTIAGGFRRGKPMGHDVDLLITIPGRPEDDELLHKVVDLLKKQGLLLYEDIRESTFVEGQLPSPKPDALDNHQKCFAILKLYRPKVDNSAVGTSKKSDMAEVKDWKAVRVDLVITPFEQFAYALLGWTGSGQFRRDLRRYAEEERDMLLDNHRLYDLKKGIFLSADSEEEIFGHLGLDYLEPWERNA

SEQ ID NO: 4455 - DNA, 1182 bp, synthetic construct
  misc_feature 1..1182: note = Variant of terminal deoxynucleotidyl transferase
  source 1..1182: mol_type = other DNA
atgcatcaccaccatcatcatgggggttctggtcatccggaaggtaataccccggagaaggaggtgccgagcgttatcgcccgtcatgttagtcagtacgcgtgccagcgcaagaccacgctgaataactgcaacaaaaagttcaccgacgcgctggagatcatggccgagaactacaaatttaaagagaacctgcaggcgtgtctggaagccaagcgcgccgcgagtgtcctgaaaagcctgccgttcgaggttaccagcatgaaagacatccaaggtctgccgtgcattaccgacgacgtacgtgacgtgatcgaggagatcatcgaagagggcgagagcagccgtgttaaagaaatcctcaatgacgagcgctacaaggcctttaagcagttcaccagcgtgttcggtgtgggcgtgaaaacctcggaaaagtggtaccgtatgggcctccgtacggttgaagaagcaaaggccagtaagagtctgaagctgagcaagatgcagaaggcgggcttcctgtattacgaggatctggcgagcggtgttagtaaagaagaagccgatgccgttacggatatcgtgaaggaaacggtgcgtactgttagtccggatgcgctggtgaccatcgccggcggtttccgccgtggcaaacctatgggccacgacgttgacctgctgatcacgattccgggccgtcctgaagatgacgagctgctccacaaagtggttgatctgctcaagaagcaaggtctgctgctgtacgaagacatccgtgagagcacgttcgtggaggggcaactgccaagtcctaaacctgacgccctggacaaccatcagaagtgcttcgccattctcaagctgtaccgtccgaaggtggataacagtgcggttgggacgagtaagaaaagtgacatggctgaggttaaggattggaaagcggttcgtgtggatctggtgatcacgccattcgagcagttcgcctatgcgctgctcggttggacgggcagcggccaatttcgtcgcgatctgcgtcgctatgcggaggaagagcgcgacatgctgctcgacaaccatcgtctctacgacctgaaaaagggcatctttctgagtgcggacagcgaagaagagattttcggtcatctgggtctggattatctggagccgtgggaacgcaacgcg

SEQ ID NO: 4456 - protein, 394 aa, synthetic construct
  REGION 1..394: note = Variant of terminal deoxynucleotidyl transferase
MHHHHHHGGSGHPEGNTPEKEVPSVIARHVSQYACQRKTTLNNCNKKFTDALEIMAENYKFKENLQACLEAKRAASVLKSLPFEVTSMKDIQGLPCITDDVRDVIEEIIEEGESSRVKEILNDERYKAFKQFTSVFGVGVKTSEKWYRMGLRTVEEAKASKSLKLSKMQKAGFLYYEDLASGVSKEEADAVTDIVKETVRTVSPDALVTIAGGFRRGKPMGHDVDLLITIPGRPEDDELLHKVVDLLKKQGLLLYEDIRESTFVEGQLPSPKPDALDNHQKCFAILKLYRPKVDNSAVGTSKKSDMAEVKDWKAVRVDLVITPFEQFAYALLGWTGSGQFRRDLRRYAEEERDMLLDNHRLYDLKKGIFLSADSEEEIFGHLGLDYLEPWERNA

SEQ ID NO: 4457 - DNA, 1182 bp, synthetic construct
  misc_feature 1..1182: note = Variant of terminal deoxynucleotidyl transferase
  source 1..1182: mol_type = other DNA
atgcatcaccaccatcatcatgggggttctggtcatccggaaggtaataccccggagaaggaggtgccgagcgttatcgcccgtcatgttagtcagtacgcgtgccagcgcaagaccacgctgaataactacaacaaaaagttcaccgacgcgctggagatcatggccgagaactacaaatttaaagagaacctgcaggcgtgtctggaagccaagcgcgccgcgagtgtcctgaaaagcctgccgttcgaggttaccagcatgaaagacatccaaggtctgccgtgcattaccgacgacgtacgtgacgtgatcgaggagatcatcgaagagggcgagagcagccgtgttaaagaaatcctcaatgacgagcgctacaaggcctttaagcagttcaccagcgtgttcggtgtgggcgtgaaaacctcggaaaagtggtaccgtatgggcctccgtacggttgaagaagcaaaggccagtaagagtctgaagctgagcaagatgcagaaggcgggcttcctgtattacgaggatctggcgagcggtgttagtaaagaagaagccgatgccgttacgctcatcgtgaaggaaacggtgcgtactgttagtccggatgcgctggtgaccatcgccggcggtttccgccgtggcaaacctatgggccacgacgttgacctgctgatcacgattccgggccgtcctgaagatgacgagctgctccacaaagtggttgatctgctcaagaagcaaggtctgctgctgtacgaagacatccgtgagagcacgttcgtggaggggcaactgccaagtcctaaacctgacgccctggacaaccatcagaagtgcttcgccattctcaagctgtaccgtccgaagactgataacagtgcggttgggacgagtaagaaaagtgacatggctgaggttaaggattggaaagcggttcgtgtggatctggtgatcacgccattcgagcagttcgcctatgcgctgctcggttggacgggcagcggccaatttcgtcgcgatctgcgtcgctatgcggaggaagagcgcgacatgctgctcgacaaccatcgtctctacgacctgaaaaagggcatctttctgagtgcggacagcgaagaagagattttcggtcatctgggtctggattatctggagccgtgggaacgcaacgcg

SEQ ID NO: 4458 - protein, 394 aa, synthetic construct
  REGION 1..394: note = Variant of terminal deoxynucleotidyl transferase
MHHHHHHGGSGHPEGNTPEKEVPSVIARHVSQYACQRKTTLNNYNKKFTDALEIMAENYKFKENLQACLEAKRAASVLKSLPFEVTSMKDIQGLPCITDDVRDVIEEIIEEGESSRVKEILNDERYKAFKQFTSVFGVGVKTSEKWYRMGLRTVEEAKASKSLKLSKMQKAGFLYYEDLASGVSKEEADAVTLIVKETVRTVSPDALVTIAGGFRRGKPMGHDVDLLITIPGRPEDDELLHKVVDLLKKQGLLLYEDIRESTFVEGQLPSPKPDALDNHQKCFAILKLYRPKTDNSAVGTSKKSDMAEVKDWKAVRVDLVITPFEQFAYALLGWTGSGQFRRDLRRYAEEERDMLLDNHRLYDLKKGIFLSADSEEEIFGHLGLDYLEPWERNA

SEQ ID NO: 4459 - DNA, 1182 bp, synthetic construct
  misc_feature 1..1182: note = Variant of terminal deoxynucleotidyl transferase
  source 1..1182: mol_type = other DNA
atgcatcaccaccatcatcatgggggttctggtcatccggaaggtaataccccggagaaggaggtgccgagcgttatcgcccgtcatgttagtcagtacgcgtgccagcgcaagaccacgctgaataactacaacaaaaagttcaccgacgcgctggagatcatggccgagaactacaaatttaaagagaacctgcaggcgtgtctggaagccaagcgcgccgcgagtgtcctgaaaagcctgccgttcgaggttaccagcatgaaagacatccaaggtctgccgtgcattaccgacgacgtacgtgacgtgatcgaggagatcatcgaagagggcgagagcagccgtgttaaagaaatcctcaatgacgagcgctacaaggcctttaagcagttcaccagcgtgttcggtgtgggcgtgaaaacctcggaaaagtggtaccgtatgggcctccgtacggttgaagaagcaaaggccagtaagagtctgaagctgagcaagatgcagaaggcgggcttcctgtattacgaggatctggcgcttggtgttagtaaagaagaagccgatgccgttacgctcatcgtgaaggaaacggtgcgtactgttagtccggatgcgctggtgaccatcgccggcggtttccgccgtggcaaacctatgggccacgacgttgacctgctgatcacgattccgggccgtcctgaagatgacgagctgctccacaaagtggttgatctgctcaagaagcaaggtctgctgctgtacgaagacatccgtgagagcacgttcgtggaggggcaactgccaagtcctaaacctgacgccctggacaaccatcagaagtgcttcgccattctcaagctgtaccgtccgaaggtggataacagtgcggttgggacgagtaagaaaagtgacatggctgaggttaaggattggaaagcggttcgtgtggatctggtgatcacgccattcgagcagttcgcctatgcgctgctcggttggacgggcagcggccaatttcgtcgcgatctgcgtcgctatgcggaggaagagcgcgacatgctgctcgacaaccatcgtctctacgacctgaaaaagggcatctttctgagtgcggacagcgaagaagagattttcggtcatctgggtctggattatctggagccgtgggaacgcaacgcg

SEQ ID NO: 4460 - protein, 394 aa, synthetic construct
  REGION 1..394: note = Variant of terminal deoxynucleotidyl transferase
MHHHHHHGGSGHPEGNTPEKEVPSVIARHVSQYACQRKTTLNNYNKKFTDALEIMAENYKFKENLQACLEAKRAASVLKSLPFEVTSMKDIQGLPCITDDVRDVIEEIIEEGESSRVKEILNDERYKAFKQFTSVFGVGVKTSEKWYRMGLRTVEEAKASKSLKLSKMQKAGFLYYEDLALGVSKEEADAVTLIVKETVRTVSPDALVTIAGGFRRGKPMGHDVDLLITIPGRPEDDELLHKVVDLLKKQGLLLYEDIRESTFVEGQLPSPKPDALDNHQKCFAILKLYRPKVDNSAVGTSKKSDMAEVKDWKAVRVDLVITPFEQFAYALLGWTGSGQFRRDLRRYAEEERDMLLDNHRLYDLKKGIFLSADSEEEIFGHLGLDYLEPWERNA

SEQ ID NO: 4461 - DNA, 1182 bp, synthetic construct
  misc_feature 1..1182: note = Variant of terminal deoxynucleotidyl transferase
  source 1..1182: mol_type = other DNA
atgcatcaccaccatcatcatgggggttctggtcatccggaaggtaataccccggagaaggaggtgccgagcgttatcgcccgtcatgttagtcagtacgcgtgccagcgcaagaccacgctgaataactacaacaaaaagttcaccgacgcgctggagatcatggccgagaactacaaatttaaagagaacctgcaggcgtgtctggaagccaagcgcgccgcgagtgtcctgaaaagcctgccgttcgaggttaccagcatgaaagacatccaaggtctgccgtgcattaccgacgacgtacgtgacgtgatcgaggagatcatcgaagagggcgagagcagccgtgttaaagaaatcctcaatgacgagcgctacaaggcctttaagcagttcaccagcgtgttcggtgtgggcgtgaaaacctcggaaaagtggtaccgtatgggcctccgtacggttgaagaagcaaaggccagtaagagtctgaagctgagcaagatgcagaaggcgggcttccgttattacgaggatctggcgagcggtgttagtaaagaagaagccgatgccgttacgctcatcgtgaaggaaacggtgcgtactgttagtccggatgcgctggtgaccatcgccggcggtttccgccgtggcaaacctatgggccacgacgttgacctgctgatcacgattccgggccgtcctgaagatgacgagctgctccacaaagtggttgatctgctcaagaagcaaggtctgctgctgtacgaagacatccgtgagagcacgttcgtggaggggcaactgccaagtcctaaacctgacgccctggacaaccatcagaagtgcttcgccattctcaagctgtaccgtccgaaggtggataacagtgcggttgggacgagtaagaaaagtgacatggctgaggttaaggattggaaagcggttcgtgtggatctggtgatcacgccattcgagcagttcgcctatgcgctgctcggttggacgggcagcggccaatttcgtcgcgatctgcgtcgctatgcggaggaagagcgcgacatgctgctcgacaaccatcgtctctacgacctgaaaaagggcatctttctgagtgcggacagcgaagaagagattttcggtcatctgggtctggattatctggagccgtgggaacgcaacgcg

SEQ ID NO: 4462 - protein, 394 aa, synthetic construct
  REGION 1..394: note = Variant of terminal deoxynucleotidyl transferase
MHHHHHHGGSGHPEGNTPEKEVPSVIARHVSQYACQRKTTLNNYNKKFTDALEIMAENYKFKENLQACLEAKRAASVLKSLPFEVTSMKDIQGLPCITDDVRDVIEEIIEEGESSRVKEILNDERYKAFKQFTSVFGVGVKTSEKWYRMGLRTVEEAKASKSLKLSKMQKAGFRYYEDLASGVSKEEADAVTLIVKETVRTVSPDALVTIAGGFRRGKPMGHDVDLLITIPGRPEDDELLHKVVDLLKKQGLLLYEDIRESTFVEGQLPSPKPDALDNHQKCFAILKLYRPKVDNSAVGTSKKSDMAEVKDWKAVRVDLVITPFEQFAYALLGWTGSGQFRRDLRRYAEEERDMLLDNHRLYDLKKGIFLSADSEEEIFGHLGLDYLEPWERNA

SEQ ID NO: 4463 - DNA, 1182 bp, synthetic construct
  misc_feature 1..1182: note = Variant of terminal deoxynucleotidyl transferase
  source 1..1182: mol_type = other DNA
atgcatcaccaccatcatcatgggggttctggtcatccggaaggtaataccccggagaaggaggtgccgagcgttatcgcccgtcatgttagtcagtacgcgtgccagcgcaagaccacgctgaataactacaacaaaaagttcaccgacgcgctggagatcatggccgagaactacaaatttaaagagaacctgcaggcgtgtctggaagccaagcgcgccgcgagtgtcctgaaaagcctgccgttcgaggttaccagcatgaaagacatccaaggtctgccgtgcattaccgacgacgtacgtgacgtgatcgaggagatcatcgaagagggcgagagcagccgtgttaaagaaatcctcaatgacgagcgctacaaggcctttaagcagttcaccagcgtgttcggtgtgggcgtgaaaacctcggaaaagtggtaccgtatgggcctccgtacggttgaagaagcaaaggccagtaagagtctgaagctgagcaagatgcagaaggcgggcttcctgtattacgaggatctggcgagcggtgttagtaaagaagaagccgatgccgttacgctcatcgtgaaggaaacggtgcgtactgttagtccggatgcgctggtgaccatcgccggcggtttccgccgtggcaaacctatgggccacgacgttgacctgctgatcacgattccgggccgtcctgaagattgtgagctgctccacaaagtggttgatctgctcaagaagcaaggtctgctgctgtacgaagacatccgtgagagcacgttcgtggaggggcaactgccaagtcctaaacctgacgccctggacaaccatcagaagtgcttcgccattctcaagctgtaccgtccgaaggtggataacagtgcggttgggacgagtaagaaaagtgacatggctgaggttaaggattggaaagcggttcgtgtggatctggtgatcacgccattcgagcagttcgcctatgcgctgctcggttggacgggcagcggccaatttcgtcgcgatctgcgtcgctatgcggaggaagagcgcgacatgctgctcgacaaccatcgtctctacgacctgaaaaagggcatctttctgagtgcggacagcgaagaagagattttcggtcatctgggtctggattatctggagccgtgggaacgcaacgcg

SEQ ID NO: 4464 - protein, 394 aa, synthetic construct
  REGION 1..394: note = Variant of terminal deoxynucleotidyl transferase
MHHHHHHGGSGHPEGNTPEKEVPSVIARHVSQYACQRKTTLNNYNKKFTDALEIMAENYKFKENLQACLEAKRAASVLKSLPFEVTSMKDIQGLPCITDDVRDVIEEIIEEGESSRVKEILNDERYKAFKQFTSVFGVGVKTSEKWYRMGLRTVEEAKASKSLKLSKMQKAGFLYYEDLASGVSKEEADAVTLIVKETVRTVSPDALVTIAGGFRRGKPMGHDVDLLITIPGRPEDCELLHKVVDLLKKQGLLLYEDIRESTFVEGQLPSPKPDALDNHQKCFAILKLYRPKVDNSAVGTSKKSDMAEVKDWKAVRVDLVITPFEQFAYALLGWTGSGQFRRDLRRYAEEERDMLLDNHRLYDLKKGIFLSADSEEEIFGHLGLDYLEPWERNA

SEQ ID NO: 4465 - DNA, 1182 bp, synthetic construct
  misc_feature 1..1182: note = Variant of terminal deoxynucleotidyl transferase
  source 1..1182: mol_type = other DNA
atgcatcaccaccatcatcatgggggttctggtcatccggaaggtaataccccggagaaggaggtgccgagcgttatcgcccgtcatgttagtcagtacgcgtgccagcgcaagaccacgctgaataactacaacaaaaagttcaccgacgcgctggagatcatggccgagaactacaaatttaaagagaacctgcaggcgtgtctggaagccaagcgcgccgcgagtgtcctgaaaagcctgccgttcgaggttaccagcatgatggacatccaaggtctgccgtgcattaccgacgacgtacgtgacgtgatcgaggagatcatcgaagagggcgagagcagccgtgttaaagaaatcctcaatgacgagcgctacaaggcctttaagcagttcaccagcgtgttcggtgtgggcgtgaaaacctcggaaaagtggtaccgtatgggcctccgtacggttgaagaagcaaaggccagtaagagtctgaagctgagcaagatgcagaaggcgggcttcctgtattacgaggatctggcgagcggtgttagtaaagaagaagccgatgccgttacgctcatcgtgaaggaaacggtgcgtactgttagtccggatgcgctggtgaccatcgccggcggtttccgccgtggcaaacctatgggccacgacgttgacctgctgatcacgattccgggccgtcctgaagatgacgagctgctccacaaagtggttgatctgctcaagaagcaaggtctgctgctgtacgaagacatccgtgagagcacgttcgtggaggggcaactgccaagtcctaaacctgacgccctggacaaccatcagaagtgcttcgccattctcaagctgtaccgtccgaaggtggataacagtgcggttgggacgagtaagaaaagtgacatggctgaggttaaggattggaaagcggttcgtgtggatctggtgatcacgccattcgagcagttcgcctatgcgctgctcggttggacgggcagcggccaatttcgtcgcgatctgcgtcgctatgcggaggaagagcgcgacatgctgctcgacaaccatcgtctctacgacctgaaaaagggcatctttctgagtgcggacagcgaagaagagattttcggtcatctgggtctggattatctggagccgtgggaacgcaacgcg

SEQ ID NO: 4466 - protein, 394 aa, synthetic construct
  REGION 1..394: note = Variant of terminal deoxynucleotidyl transferase
MHHHHHHGGSGHPEGNTPEKEVPSVIARHVSQYACQRKTTLNNYNKKFTDALEIMAENYKFKENLQACLEAKRAASVLKSLPFEVTSMMDIQGLPCITDDVRDVIEEIIEEGESSRVKEILNDERYKAFKQFTSVFGVGVKTSEKWYRMGLRTVEEAKASKSLKLSKMQKAGFLYYEDLASGVSKEEADAVTLIVKETVRTVSPDALVTIAGGFRRGKPMGHDVDLLITIPGRPEDDELLHKVVDLLKKQGLLLYEDIRESTFVEGQLPSPKPDALDNHQKCFAILKLYRPKVDNSAVGTSKKSDMAEVKDWKAVRVDLVITPFEQFAYALLGWTGSGQFRRDLRRYAEEERDMLLDNHRLYDLKKGIFLSADSEEEIFGHLGLDYLEPWERNA

SEQ ID NO: 4467 - DNA, 1182 bp, synthetic construct
  misc_feature 1..1182: note = Variant of terminal deoxynucleotidyl transferase
  source 1..1182: mol_type = other DNA
atgcatcaccaccatcatcatgggggttctggtcatccggaaggtaataccccggagaaggaggtgccgagcgttatcgcccgtcatgttagtcagtacgcgtgccagcgcaagaccacgctgaataactacaacaaaaagttcaccgacgcgctggagatcatggccgagaactacaaatttaaagagaacctgcaggcgtgtctggaagccaagcgcgccgcgagtgtcctgaaaagcctgccgttcgaggttaccagcatgaaagacatccaaggtctgccgtgcattaccgacgacgtacgtgacgtgatcgaggagatcatcgaagagggcgagagcagccgtgttaaagaaatcctcaatgacgagcgctacaaggcctttaagcagttcaccagcgtgttcggtgtgggcgtgaaaacctcggaaaagtggtaccgtatgggcctccgtacggttgaagaagcaaaggccagtaagagtctgaagctgagcaagatgcagaaggcgggcttcctgtattacgaggatctggcgagcggtgttacgaaagaagaagccgatgccgttacgctcatcgtgaaggaaacggtgcgtactgttagtccggatgcgctggtgaccatcgccggcggtttccgccgtggcaaacctatgggccacgacgttgacctgctgatcacgattccgggccgtcctgaagatgacgagctgctccacaaagtggttgatctgctcaagaagcaaggtctgctgctgtacgaagacatccgtgagagcacgttcgtggaggggcaactgccaagtcctaaacctgacgccctggacaaccatcagaagtgcttcgccattctcaagctgtaccgtccgaaggtggataacagtgcggttgggacgagtaagaaaagtgacatggctgaggttaaggattggaaagcggttcgtgtggatctggtgatcacgccattcgagcagttcgcctatgcgctgctcggttggacgggcagcggccaatttcgtcgcgatctgcgtcgctatgcggaggaagagcgcgacatgctgctcgacaaccatcgtctctacgacctgaaaaagggcatctttctgagtgcggacagcgaagaagagattttcggtcatctgggtctggattatctggagccgtgggaacgcaacgcg

SEQ ID NO: 4468 - protein, 394 aa, synthetic construct
  REGION 1..394: note = Variant of terminal deoxynucleotidyl transferase
MHHHHHHGGSGHPEGNTPEKEVPSVIARHVSQYACQRKTTLNNYNKKFTDALEIMAENYKFKENLQACLEAKRAASVLKSLPFEVTSMKDIQGLPCITDDVRDVIEEIIEEGESSRVKEILNDERYKAFKQFTSVFGVGVKTSEKWYRMGLRTVEEAKASKSLKLSKMQKAGFLYYEDLASGVTKEEADAVTLIVKETVRTVSPDALVTIAGGFRRGKPMGHDVDLLITIPGRPEDDELLHKVVDLLKKQGLLLYEDIRESTFVEGQLPSPKPDALDNHQKCFAILKLYRPKVDNSAVGTSKKSDMAEVKDWKAVRVDLVITPFEQFAYALLGWTGSGQFRRDLRRYAEEERDMLLDNHRLYDLKKGIFLSADSEEEIFGHLGLDYLEPWERNA

SEQ ID NO: 4469 - DNA, 1182 bp, synthetic construct
  misc_feature 1..1182: note = Variant of terminal deoxynucleotidyl transferase
  source 1..1182: mol_type = other DNA
atgcatcaccaccatcatcatgggggttctggtcatccggaaggtaataccccggagaaggaggtgccgagcgttatcgcccgtcatgttagtcagtacgcgtgccagcgcaagaccacgctgaataactacaacaaaaagttcaccgacgcgctggagatcatggccgagaactacaaatttaaatctaacctgcaggcgtgtctggaagccaagcgcgccgcgagtgtcctgaaaagcctgccgttcgaggttaccagcatgaaagacatccaaggtctgccgtgcattaccgacgacgtacgtgacgtgatcgaggagatcatcgaagagggcgagagcagccgtgttaaagaaatcctcaatgacgagcgctacaaggcctttaagcagttcaccagcgtgttcggtgtgggcgtgaaaacctcggaaaagtggtaccgtatgggcctccgtacggttgaagaagcaaaggccagtaagagtctgaagctgagcaagatgcagaaggcgggcttcctgtattacgaggatctggcgagcggtgttagtaaagaagaagccgatgccgttacgctcatcgtgaaggaaacggtgcgtactgttagtccggatgcgctggtgaccatcgccggcggtttccgccgtggcaaacctatgggccacgacgttgacctgctgatcacgattccgggccgtcctgaagatgacgagctgctccacaaagtggttgatctgctcaagaagcaaggtctgctgctgtacgaagacatccgtgagagcacgttcgtggaggggcaactgccaagtcctaaacctgacgccctggacaaccatcagaagtgcttcgccattctcaagctgtaccgtccgaaggtggataacagtgcggttgggacgagtaagaaaagtgacatggctgaggttaaggattggaaagcggttcgtgtggatctggtgatcacgccattcgagcagttcgcctatgcgctgctcggttggacgggcagcggccaatttcgtcgcgatctgcgtcgctatgcggaggaagagcgcgacatgctgctcgacaaccatcgtctctacgacctgaaaaagggcatctttctgagtgcggacagcgaagaagagattttcggtcatctgggtctggattatctggagccgtgggaacgcaacgcg

SEQ ID NO: 4470 - protein, 394 aa, synthetic construct
  REGION 1..394: note = Variant of terminal deoxynucleotidyl transferase
MHHHHHHGGSGHPEGNTPEKEVPSVIARHVSQYACQRKTTLNNYNKKFTDALEIMAENYKFKSNLQACLEAKRAASVLKSLPFEVTSMKDIQGLPCITDDVRDVIEEIIEEGESSRVKEILNDERYKAFKQFTSVFGVGVKTSEKWYRMGLRTVEEAKASKSLKLSKMQKAGFLYYEDLASGVSKEEADAVTLIVKETVRTVSPDALVTIAGGFRRGKPMGHDVDLLITIPGRPEDDELLHKVVDLLKKQGLLLYEDIRESTFVEGQLPSPKPDALDNHQKCFAILKLYRPKVDNSAVGTSKKSDMAEVKDWKAVRVDLVITPFEQFAYALLGWTGSGQFRRDLRRYAEEERDMLLDNHRLYDLKKGIFLSADSEEEIFGHLGLDYLEPWERNA

SEQ ID NO: 4471 - DNA, 1182 bp, synthetic construct
  misc_feature 1..1182: note = Variant of terminal deoxynucleotidyl transferase
  source 1..1182: mol_type = other DNA
atgcatcaccaccatcatcatgggggttctggtcatccggaaggtaataccccggagaaggaggtgccgagcgttatcgcccgtcatgttagtcagtacgcgtgccagcgcaagaccacgctgaataactacaacaaaaagttcaccgacgcgctggagatcatggccgagaactacaaatttaaagagaacctgcaggcgtgtctggaagccaagcgcgccgcgagtgtcctgaaaagcctgccgttcgaggttaccagcatgaaagacatccaaggtctgccgtgcattaccgacgacgtacgtgacgtgatcgaggagatcatcgaagagggcgagagcagccgtgttaaagaaatcctcaatgacgagcgctacaaggcctttaagcagttcaccagcgtgttcggtgtgggcgtgaaaacctcggaaaagtggtaccgtatgggcctccgtacgctggaagaagcaaaggccagtaagagtctgaagctgagcaagatgcagaaggcgggcttcctgtattacgaggatctggcgagcggtgttagtaaagaagaagccgatgccgttacgctcatcgtgaaggaaacggtgcgtactgttagtccggatgcgctggtgaccatcgccggcggtttccgccgtggcaaacctatgggccacgacgttgacctgctgatcacgattccgggccgtcctgaagatgacgagctgctccacaaagtggttgatctgctcaagaagcaaggtctgctgctgtacgaagacatccgtgagagcacgttcgtggaggggcaactgccaagtcctaaacctgacgccctggacaaccatcagaagtgcttcgccattctcaagctgtaccgtccgaaggtggataacagtgcggttgggacgagtaagaaaagtgacatggctgaggttaaggattggaaagcggttcgtgtggatctggtgatcacgccattcgagcagttcgcctatgcgctgctcggttggacgggcagcggccaatttcgtcgcgatctgcgtcgctatgcggaggaagagcgcgacatgctgctcgacaaccatcgtctctacgacctgaaaaagggcatctttctgagtgcggacagcgaagaagagattttcggtcatctgggtctggattatctggagccgtgggaacgcaacgcg

SEQ ID NO: 4472 - protein, 394 aa, synthetic construct
  REGION 1..394: note = Variant of terminal deoxynucleotidyl transferase
MHHHHHHGGSGHPEGNTPEKEVPSVIARHVSQYACQRKTTLNNYNKKFTDALEIMAENYKFKENLQACLEAKRAASVLKSLPFEVTSMKDIQGLPCITDDVRDVIEEIIEEGESSRVKEILNDERYKAFKQFTSVFGVGVKTSEKWYRMGLRTLEEAKASKSLKLSKMQKAGFLYYEDLASGVSKEEADAVTLIVKETVRTVSPDALVTIAGGFRRGKPMGHDVDLLITIPGRPEDDELLHKVVDLLKKQGLLLYEDIRESTFVEGQLPSPKPDALDNHQKCFAILKLYRPKVDNSAVGTSKKSDMAEVKDWKAVRVDLVITPFEQFAYALLGWTGSGQFRRDLRRYAEEERDMLLDNHRLYDLKKGIFLSADSEEEIFGHLGLDYLEPWERNA

SEQ ID NO: 4473 - DNA, 1182 bp, synthetic construct
  misc_feature 1..1182: note = Variant of terminal deoxynucleotidyl transferase
  source 1..1182: mol_type = other DNA
atgcatcaccaccatcatcatgggggttctggtcatccggaaggtaataccccggagaaggaggtgccgagcgttatcgcccgtcatgttagtcagtacgcgtgccagcgcaagaccacgctgaataactacaacaaaaagttcaccgacgcgctggagatcatggccgagaactacaaatttaaagagaacctgcaggcgtgtctggaagccaagcgcgccgcgagtgtcctgaaaagcctgccgttcgaggttaccagcatgaaagacatccaaggtctgccgtgcattaccgacgacgtacgtgacgtgatcgaggagatcatcgaagagggcgagagcagccgtgttaaagaaatcctcaatgacgagcgctacaaggcctttaagcagttcaccagcgtgttcggtgtgggcgtgaaaacctcggaaaagtggtaccgtatgggcctccgtacggttgaagaagcaaaggccagtaagagtctgaagctgagcaagatgcagaaggcgggcttcctgtattacgaggatctggcgagcggtgttagtaaagaagaagccgatgccgttacgctcatcgtgaaggaaacggtgcgtactgttagtccggatgcgctggtgaccatcgccggcggtttccgccgtggcaaacctatgggccacgacgttgacctgctgatcacgattccgggccgtcctgaagatgacgagctgctccacaaagtggttgatctgctcaagaagcaaggtctgctgctgtacgaagacatccgtgagagcacgttcgtggaggggcaactgccaagtcctaaacctgacgccctggacaaccatcagaagtgcttcgccattctcaagctgtaccgtccgaaggtggataacagtgcggttgggacgagtaagaaaagttctatggctgaggttaaggattggaaagcggttcgtgtggatctggtgatcacgccattcgagcagttcgcctatgcgctgctcggttggacgggcagcggccaatttcgtcgcgatctgcgtcgctatgcggaggaagagcgcgacatgctgctcgacaaccatcgtctctacgacctgaaaaagggcatctttctgagtgcggacagcgaagaagagattttcggtcatctgggtctggattatctggagccgtgggaacgcaacgcg

SEQ ID NO: 4474 - protein, 394 aa, synthetic construct
  REGION 1..394: note = Variant of terminal deoxynucleotidyl transferase
MHHHHHHGGSGHPEGNTPEKEVPSVIARHVSQYACQRKTTLNNYNKKFTDALEIMAENYKFKENLQACLEAKRAASVLKSLPFEVTSMKDIQGLPCITDDVRDVIEEIIEEGESSRVKEILNDERYKAFKQFTSVFGVGVKTSEKWYRMGLRTVEEAKASKSLKLSKMQKAGFLYYEDLASGVSKEEADAVTLIVKETVRTVSPDALVTIAGGFRRGKPMGHDVDLLITIPGRPEDDELLHKVVDLLKKQGLLLYEDIRESTFVEGQLPSPKPDALDNHQKCFAILKLYRPKVDNSAVGTSKKSSMAEVKDWKAVRVDLVITPFEQFAYALLGWTGSGQFRRDLRRYAEEERDMLLDNHRLYDLKKGIFLSADSEEEIFGHLGLDYLEPWERNA

SEQ ID NO: 4475 - DNA, 1182 bp, synthetic construct
  misc_feature 1..1182: note = Variant of terminal deoxynucleotidyl transferase
  source 1..1182: mol_type = other DNA
atgcatcaccaccatcatcatgggggttctggtcatccggaaggtaataccccggagaaggaggtgccgagcgttatcgcccgtcatgttagtcagtacgcgtgccagcgcaagaccacgctgaataactacaacaaaaagttcaccgacgcgctggagatcatggccgagaactacaaatttaaagagaacctgcaggcgtgtctggaagccaagcgcgccgcgagtgtcctgaaaagcctgccgttcgaggttaccagcatgaaagacatccaaggtctgccgtgcattaccgacgacgtacgtgacgtgatcgaggagatcatcgaagagggcgagagcagccgtgttaaagaaatcctcaatgacgagcgctacaaggcctttaagcagttcaccagcgtgttcggtgtgggcgtgaaaacctcggaaaagtggtaccgtatgggcctccgtacggttgaagaagcaaaggccagtaagagtctgaagctgagcaagatgcagaaggcgggcttcctgtattacgaggatctggcgagcggtgttagtaaagaagaagccgatgccgttacgctcatcgtgaaggaaacggtgcgtactgttagtccggatgcgctggtgaccatcgccggcggtttccgccgtggcaaacctatgggccacgacgttgacctgctgatcacgattccgggccgtcctgaagatgacgagctgctccacaaagtggttgatctgctcaagaagcaaggtctgctgctgtacgaagacatccgtgagagcacgttcgtggaggggcaactgccaagtcctaaacctgacgccctggacaaccatcagaagtgcttcgccattctcaagctgtaccgtccgaaggtgaagaacagtgcggttgggacgagtaagaaaagtgacatggctgaggttaaggattggaaagcggttcgtgtggatctggtgatcacgccattcgagcagttcgcctatgcgctgctcggttggacgggcagcggccaatttcgtcgcgatctgcgtcgctatgcggaggaagagcgcgacatgctgctcgacaaccatcgtctctacgacctgaaaaagggcatctttctgagtgcggacagcgaagaagagattttcggtcatctgggtctggattatctggagccgtgggaacgcaacgcg

SEQ ID NO: 4476 - protein, 394 aa, synthetic construct
  REGION 1..394: note = Variant of terminal deoxynucleotidyl transferase
MHHHHHHGGSGHPEGNTPEKEVPSVIARHVSQYACQRKTTLNNYNKKFTDALEIMAENYKFKENLQACLEAKRAASVLKSLPFEVTSMKDIQGLPCITDDVRDVIEEIIEEGESSRVKEILNDERYKAFKQFTSVFGVGVKTSEKWYRMGLRTVEEAKASKSLKLSKMQKAGFLYYEDLASGVSKEEADAVTLIVKETVRTVSPDALVTIAGGFRRGKPMGHDVDLLITIPGRPEDDELLHKVVDLLKKQGLLLYEDIRESTFVEGQLPSPKPDALDNHQKCFAILKLYRPKVKNSAVGTSKKSDMAEVKDWKAVRVDLVITPFEQFAYALLGWTGSGQFRRDLRRYAEEERDMLLDNHRLYDLKKGIFLSADSEEEIFGHLGLDYLEPWERNA

SEQ ID NO: 4477 - DNA, 1182 bp, synthetic construct
  misc_feature 1..1182: note = Variant of terminal deoxynucleotidyl transferase
  source 1..1182: mol_type = other DNA
atgcatcaccaccatcatcatgggggttctggtcatccggaaggtaataccccggagaaggaggtgccgagcgttatcgcccgtcatgttagtcagtacgcgtgccagcgcaagaccacgctgaataactacaacaaaaagttcaccgacgcgctggagatcatggccgagaactacaaatttaaagagaacctgcaggcgtgtctggaagccaagcgcgccgcgagtgtcctgaaaagcctgccgttcgaggttaccagcatgaaagacatccaaggtctgccgtgcattaccgacgacgtacgtgacgtgatcgaggagatcatcgaagagggcgagagcagccgtgttaaagaaatcctcaatgacgagcgctacaaggcctttaagcagttcaccagcgtgttcggtgtgggcgtgaaaacctcggaaaagtggtaccgtatgggcctccgtacggttgaagaagcaaaggccagtaagagtctgaagctgagcaagatgcagaaggcgggcttcctgtattacgaggatctggcgagcggtgttagtaaagaagaagccgatgccgttacgctcatcgtgaaggaaacggtgcgtactgttagtccggatgcgctggtgaccatcgccggcggtttccgccgtggcaaacctatgggccacgacgttgacctgctgatcacgattccgggccgtcctgaagatgacgagctgctccacaaagtggttgatctgctcaagaagcaaggtctgctgctgtacgaagacatccgtgagagcacgttcgtggaggggcaactgccaagtcctaaacctgacgccctggacaaccatcagaagtgcttcgccattctcaagctgtaccgtccgaaggtggataacagtgcggttgggacgagtaagaaaagtgacatggctgagacgaaggattggaaagcggttcgtgtggatctggtgatcacgccattcgagcagttcgcctatgcgctgctcggttggacgggcagcggccaatttcgtcgcgatctgcgtcgctatgcggaggaagagcgcgacatgctgctcgacaaccatcgtctctacgacctgaaaaagggcatctttctgagtgcggacagcgaagaagagattttcggtcatctgggtctggattatctggagccgtgggaacgcaacgcg

SEQ ID NO: 4478 - protein, 394 aa, synthetic construct
  REGION 1..394: note = Variant of terminal deoxynucleotidyl transferase
MHHHHHHGGSGHPEGNTPEKEVPSVIARHVSQYACQRKTTLNNYNKKFTDALEIMAENYKFKENLQACLEAKRAASVLKSLPFEVTSMKDIQGLPCITDDVRDVIEEIIEEGESSRVKEILNDERYKAFKQFTSVFGVGVKTSEKWYRMGLRTVEEAKASKSLKLSKMQKAGFLYYEDLASGVSKEEADAVTLIVKETVRTVSPDALVTIAGGFRRGKPMGHDVDLLITIPGRPEDDELLHKVVDLLKKQGLLLYEDIRESTFVEGQLPSPKPDALDNHQKCFAILKLYRPKVDNSAVGTSKKSDMAETKDWKAVRVDLVITPFEQFAYALLGWTGSGQFRRDLRRYAEEERDMLLDNHRLYDLKKGIFLSADSEEEIFGHLGLDYLEPWERNA

SEQ ID NO: 4479 - DNA, 1182 bp, synthetic construct
  misc_feature 1..1182: note = Variant of terminal deoxynucleotidyl transferase
  source 1..1182: mol_type = other DNA
atgcatcaccaccatcatcatgggggttctggtcatccggaaggtaataccccggagaaggaggtgccgagcgttatcgcccgtcatgttagtcagtacgcgtgccagcgcaagaccacgctgaataactacaacaaaaagttcaccgacgcgctggagatcatggccgagaactacaaatttaaagagaacctgcaggcgtgtctggaagccaagcgcgccgcgagtgtcctgaaaagcctgccgttcgaggttaccagcatgaaagacatccaaggtctgccgtgcattaccgacgacgtacgtgacgtgatcgaggagatcatcgaagagggcgagagcagccgtgttaaagaaatcctcaatgacgagcgctacaaggcctttaagcagttcaccagcgtgttcggtgtgggcgtgaaaacctcggaaaagtggtaccgtatgggcctccgtacggttgaagaagcaaaggccagtaagagtctgaagctgagcaagatgcagaaggcgggcttcctgtattacgaggatctggcgagcggtgttagtaaagaagaagccgatgccgttacgctcatcgtgaaggaaacggtgcgtactgttagtccggatgcgctggtgaccatcgccggcggtttccgccgtggcaaacctatgggccacgacgttgacctgctgatcacgattccgggccgtcctgaagatgacgagctgctccacaaagtggttgatctgctcaagaagcaaggtctgctgctgtacgaagacatccgtgagagcacgttcgtggaggggcaactgccaagtcctaaacctgacgccctggacaaccatcagaagtgcttcgccattctcaagctgtaccgtccgaaggtggataacagtgcggttgggacgagtaagaaaagtgacactgctgaggttaaggattggaaagcggttcgtgtggatctggtgatcacgccattcgagcagttcgcctatgcgctgctcggttggacgggcagcggccaatttcgtcgcgatctgcgtcgctatgcggaggaagagcgcgacatgctgctcgacaaccatcgtctctacgacctgaaaaagggcatctttctgagtgcggacagcgaagaagagattttcggtcatctgggtctggattatctggagccgtgggaacgcaacgcg

SEQ ID NO: 4480 - protein, 394 aa, synthetic construct
  REGION 1..394: note = Variant of terminal deoxynucleotidyl transferase
MHHHHHHGGSGHPEGNTPEKEVPSVIARHVSQYACQRKTTLNNYNKKFTDALEIMAENYKFKENLQACLEAKRAASVLKSLPFEVTSMKDIQGLPCITDDVRDVIEEIIEEGESSRVKEILNDERYKAFKQFTSVFGVGVKTSEKWYRMGLRTVEEAKASKSLKLSKMQKAGFLYYEDLASGVSKEEADAVTLIVKETVRTVSPDALVTIAGGFRRGKPMGHDVDLLITIPGRPEDDELLHKVVDLLKKQGLLLYEDIRESTFVEGQLPSPKPDALDNHQKCFAILKLYRPKVDNSAVGTSKKSDTAEVKDWKAVRVDLVITPFEQFAYALLGWTGSGQFRRDLRRYAEEERDMLLDNHRLYDLKKGIFLSADSEEEIFGHLGLDYLEPWERNA

SEQ ID NO: 4481 - DNA, 1182 bp, synthetic construct
  misc_feature 1..1182: note = Variant of terminal deoxynucleotidyl transferase
  source 1..1182: mol_type = other DNA
atgcatcaccaccatcatcatgggggttctggtcatccggaaggtaataccccggagaaggaggtgccgagcgttatcgcccgtcatgttagtcagtacgcgtgccagcgcaagaccacgctgaataactacaacaaaaagttcaccgacgcgctggagatcatggccgagaactacaaatttaaagagaacctgcaggcgtgtctggaagccaagcgcgccgcgagtgtcctgaaaagcctgccgttcgaggttaccagcatgaaagacatccaaggtctgccgtgcattaccgacgacgtacgtgacgtgatcgaggagatcatcgaagagggcgagagcagccgtgttaaagaaatcctcaatgacgagcgctacaaggcctttaagcagttcaccagcgtgttcggtgtgggcgtgaaaacctcggaaaagtggtaccgtatgggcctccgtacggttgaagaagcaaaggccagtccgagtctgaagctgagcaagatgcagaaggcgggcttcctgtattacgaggatctggcgagcggtgttagtaaagaagaagccgatgccgttacgctcatcgtgaaggaaacggtgcgtactgttagtccggatgcgctggtgaccatcgccggcggtttccgccgtggcaaacctatgggccacgacgttgacctgctgatcacgattccgggccgtcctgaagatgacgagctgctccacaaagtggttgatctgctcaagaagcaaggtctgctgctgtacgaagacatccgtgagagcacgttcgtggaggggcaactgccaagtcctaaacctgacgccctggacaaccatcagaagtgcttcgccattctcaagctgtaccgtccgaaggtggataacagtgcggttgggacgagtaagaaaagtgacatggctgaggttaaggattggaaagcggttcgtgtggatctggtgatcacgccattcgagcagttcgcctatgcgctgctcggttggacgggcagcggccaatttcgtcgcgatctgcgtcgctatgcggaggaagagcgcgacatgctgctcgacaaccatcgtctctacgacctgaaaaagggcatctttctgagtgcggacagcgaagaagagattttcggtcatctgggtctggattatctggagccgtgggaacgcaacgcg

SEQ ID NO: 4482 - protein, 394 aa, synthetic construct
  REGION 1..394: note = Variant of terminal deoxynucleotidyl transferase
MHHHHHHGGSGHPEGNTPEKEVPSVIARHVSQYACQRKTTLNNYNKKFTDALEIMAENYKFKENLQACLEAKRAASVLKSLPFEVTSMKDIQGLPCITDDVRDVIEEIIEEGESSRVKEILNDERYKAFKQFTSVFGVGVKTSEKWYRMGLRTVEEAKASPSLKLSKMQKAGFLYYEDLASGVSKEEADAVTLIVKETVRTVSPDALVTIAGGFRRGKPMGHDVDLLITIPGRPEDDELLHKVVDLLKKQGLLLYEDIRESTFVEGQLPSPKPDALDNHQKCFAILKLYRPKVDNSAVGTSKKSDMAEVKDWKAVRVDLVITPFEQFAYALLGWTGSGQFRRDLRRYAEEERDMLLDNHRLYDLKKGIFLSADSEEEIFGHLGLDYLEPWERNA

SEQ ID NO: 4483 - DNA, 1182 bp, synthetic construct
  misc_feature 1..1182: note = Variant of terminal deoxynucleotidyl transferase
  source 1..1182: mol_type = other DNA
atgcatcaccaccatcatcatgggggttctggtcatccggaaggtaataccccggagaaggaggtgccgagcgttatcgcccgtcatgttagtcagtacgcgtgccagcgcaagaccacgctgaataactacaacaaaaagttcaccgacgcgctggagatcatggccgagaactacaaatttaaagagaacctgcaggcgtgtctggaagccaagcgcgccgcgagtgtcctgaaaagcctgccgttcgaggttaccagcatgaaagacatccaaggtctgccgtgcattacccaggacgtacgtgacgtgatcgaggagatcatcgaagagggcgagagcagccgtgttaaagaaatcctcaatgacgagcgctacaaggcctttaagcagttcaccagcgtgttcggtgtgggcgtgaaaacctcggaaaagtggtaccgtatgggcctccgtacggttgaagaagcaaaggccagtaagagtctgaagctgagcaagatgcagaaggcgggcttcctgtattacgaggatctggcgagcggtgttagtaaagaagaagccgatgccgttacgctcatcgtgaaggaaacggtgcgtactgttagtccggatgcgctggtgaccatcgccggcggtttccgccgtggcaaacctatgggccacgacgttgacctgctgatcacgattccgggccgtcctgaagatgacgagctgctccacaaagtggttgatctgctcaagaagcaaggtctgctgctgtacgaagacatccgtgagagcacgttcgtggaggggcaactgccaagtcctaaacctgacgccctggacaaccatcagaagtgcttcgccattctcaagctgtaccgtccgaaggtggataacagtgcggttgggacgagtaagaaaagtgacatggctgaggttaaggattggaaagcggttcgtgtggatctggtgatcacgccattcgagcagttcgcctatgcgctgctcggttggacgggcagcggccaatttcgtcgcgatctgcgtcgctatgcggaggaagagcgcgacatgctgctcgacaaccatcgtctctacgacctgaaaaagggcatctttctgagtgcggacagcgaagaagagattttcggtcatctgggtctggattatctggagccgtgggaacgcaacgcg

SEQ ID NO: 4484 - protein, 394 aa, synthetic construct
  REGION 1..394: note = Variant of terminal deoxynucleotidyl transferase
MHHHHHHGGSGHPEGNTPEKEVPSVIARHVSQYACQRKTTLNNYNKKFTDALEIMAENYKFKENLQACLEAKRAASVLKSLPFEVTSMKDIQGLPCITQDVRDVIEEIIEEGESSRVKEILNDERYKAFKQFTSVFGVGVKTSEKWYRMGLRTVEEAKASKSLKLSKMQKAGFLYYEDLASGVSKEEADAVTLIVKETVRTVSPDALVTIAGGFRRGKPMGHDVDLLITIPGRPEDDELLHKVVDLLKKQGLLLYEDIRESTFVEGQLPSPKPDALDNHQKCFAILKLYRPKVDNSAVGTSKKSDMAEVKDWKAVRVDLVITPFEQFAYALLGWTGSGQFRRDLRRYAEEERDMLLDNHRLYDLKKGIFLSADSEEEIFGHLGLDYLEPWERNA

SEQ ID NO: 4485 - DNA, 1182 bp, synthetic construct
  misc_feature 1..1182: note = Variant of terminal deoxynucleotidyl transferase
  source 1..1182: mol_type = other DNA
atgcatcaccaccatcatcatgggggttctggtcatccggaaggtaataccccggagaaggaggtgccgagcgttatcgcccgtcatgttagtcagtacgcgtgccagcgcaagaccacgctgaataactacaacaaaaagttcaccgacgcgctggagatcatggccgagaactacaaatttaaagagaacctgcaggcgtgtctggaagccaagcgcgccgcgagtgtcctgaaaagcctgccgttcgaggttaccagcatgaaagacatccaaggtctgccgtgcattaccgacgacgtacgtgacgtgatcgaggagatcatcgaagagggcgagagcagccgtgttaaagaaatcctcaatgacgagcgctacaaggcctttaagcagttcaccagcgtgttcggtgtgggcgtgaaaacctcggaaaagtggtaccgtatgggcctccgtacggttgaagaagcaaaggccagtaagagtctgaagctgagcaagatgcagaaggcgggcttcctgtattacgaggatctggcgagcggtgttagtaaagaagaagccgatgccgttacgctcatcgtgaaggaaacggtgcgtactgttagtccggatgcgctggtgaccatcgccggcggtttccgccgtggcaaaccttatggccacgacgttgacctgctgatcacgattccgggccgtcctgaagatgacgagctgctccacaaagtggttgatctgctcaagaagcaaggtctgctgctgtacgaagacatccgtgagagcacgttcgtggaggggcaactgccaagtcctaaacctgacgccctggacaaccatcagaagtgcttcgccattctcaagctgtaccgtccgaaggtggataacagtgcggttgggacgagtaagaaaagtgacatggctgaggttaaggattggaaagcggttcgtgtggatctggtgatcacgccattcgagcagttcgcctatgcgctgctcggttggacgggcagcggccaatttcgtcgcgatctgcgtcgctatgcggaggaagagcgcgacatgctgctcgacaaccatcgtctctacgacctgaaaaagggcatctttctgagtgcggacagcgaagaagagattttcggtcatctgggtctggattatctggagccgtgggaacgcaacgcg

SEQ ID NO: 4486 - protein, 394 aa, synthetic construct
  REGION 1..394: note = Variant of terminal deoxynucleotidyl transferase
MHHHHHHGGSGHPEGNTPEKEVPSVIARHVSQYACQRKTTLNNYNKKFTDALEIMAENYKFKENLQACLEAKRAASVLKSLPFEVTSMKDIQGLPCITDDVRDVIEEIIEEGESSRVKEILNDERYKAFKQFTSVFGVGVKTSEKWYRMGLRTVEEAKASKSLKLSKMQKAGFLYYEDLASGVSKEEADAVTLIVKETVRTVSPDALVTIAGGFRRGKPYGHDVDLLITIPGRPEDDELLHKVVDLLKKQGLLLYEDIRESTFVEGQLPSPKPDALDNHQKCFAILKLYRPKVDNSAVGTSKKSDMAEVKDWKAVRVDLVITPFEQFAYALLGWTGSGQFRRDLRRYAEEERDMLLDNHRLYDLKKGIFLSADSEEEIFGHLGLDYLEPWERNA

SEQ ID NO: 4487 - DNA, 1182 bp, synthetic construct
  misc_feature 1..1182: note = Variant of terminal deoxynucleotidyl transferase
  source 1..1182: mol_type = other DNA
atgcatcaccaccatcatcatgggggttctggtcatccggaaggtaataccccggagaaggaggtgccgagcgttatcgcccgtcatgttagtcagtacgcgtgccagcgcaagaccacgctgaataactacaacaaaaagttcaccgacgcgctggagatcatggccgagaactacaaatttaaagagaacctgcaggcgtgtctggaagccaagcgcgccgcgagtgtcctgaaaagcctgccgttcgaggttaccagcatgaaagacatccaaggtctgccgtgcattaccgacgacgtacgtgacgtgatcgaggagatcatcgaagagggcgagagcagccgtgttaaagaaatcctcaatgacgagcgctacaaggcctttaagcagttcaccagcgtgttcggtgtgggcgtgaaaacctcggaaaagtggtaccgtatgggcctccgtacggttgaagaagcaaaggccagtaagagtctgaagctgagcaagatgcagaaggcgggcttcctgtattacgaggatctggcgagcggtgttagtaaagaagaagccgatgccgttacgctcatcgtgaaggaaacggtgcgtactgttagtccggatgcgctggtgaccatcgccggcggtttccgccgtggcaaacctatgggccacgacgttgacctgctgatcacgattccgggccgtcctgaagatgacgagctgctccacaaagtggttgatctgctcaagaagcaaggtctgctgctgtacgaagacgttcgtgagagcacgttcgtggaggggcaactgccaagtcctaaacctgacgccctggacaaccatcagaagtgcttcgccattctcaagctgtaccgtccgaaggtggataacagtgcggttgggacgagtaagaaaagtgacatggctgaggttaaggattggaaagcggttcgtgtggatctggtgatcacgccattcgagcagttcgcctatgcgctgctcggttggacgggcagcggccaatttcgtcgcgatctgcgtcgctatgcggaggaagagcgcgacatgctgctcgacaaccatcgtctctacgacctgaaaaagggcatctttctgagtgcggacagcgaagaagagattttcggtcatctgggtctggattatctggagccgtgggaacgcaacgcg

SEQ ID NO: 4488 - protein, 394 aa, synthetic construct
  REGION 1..394: note = Variant of terminal deoxynucleotidyl transferase
MHHHHHHGGSGHPEGNTPEKEVPSVIARHVSQYACQRKTTLNNYNKKFTDALEIMAENYKFKENLQACLEAKRAASVLKSLPFEVTSMKDIQGLPCITDDVRDVIEEIIEEGESSRVKEILNDERYKAFKQFTSVFGVGVKTSEKWYRMGLRTVEEAKASKSLKLSKMQKAGFLYYEDLASGVSKEEADAVTLIVKETVRTVSPDALVTIAGGFRRGKPMGHDVDLLITIPGRPEDDELLHKVVDLLKKQGLLLYEDVRESTFVEGQLPSPKPDALDNHQKCFAILKLYRPKVDNSAVGTSKKSDMAEVKDWKAVRVDLVITPFEQFAYALLGWTGSGQFRRDLRRYAEEERDMLLDNHRLYDLKKGIFLSADSEEEIFGHLGLDYLEPWERNA

SEQ ID NO: 4489 - DNA, 1182 bp, synthetic construct
  misc_feature 1..1182: note = Variant of terminal deoxynucleotidyl transferase
  source 1..1182: mol_type = other DNA
atgcatcaccaccatcatcatgggggttctggtcatccggaaggtaataccccggagaaggaggtgccgagcgttatcgcccgtcatgttagtcagtacgcgtgccagcgcaagaccacgctgaataactacaacaaaaagttcaccgacgcgctggagatcatggccgagaactacaaatttaaagagaacctgcaggcgtgtctggaagccaagcgcgccgcgagtgtcctgaaaagcctgccgttcgaggttaccagcatgaaagacatccaaggtctgccgtgcattaccgacgacgtacgtgacgtgatcgaggagatcatcgaagagggcgagagcagccgtgttaaagaaatcctcaatgacgagcgctacaaggcctttaagcagttcaccagcgtgttcggtgtgggcgtgaaaacctcggaaaagtggtaccgtatgggcctccgtacggttgaagaagcaaaggccagtaagagtctgaagctgagcaagatgcagaaggcgggcttcctgtattacgaggatctggcgagcggtgttagtaaagaagaagccgatgccgttacgctcatcgtgaaggaaacggtgcgtactgttagtccggatgcgctggtgaccatcgccggcggtttccgccgtggcaaacctatgggccacgacgttgacctgctgatcacgattccgggccgtcctgaagatgacgagctgctccacaaagtggttgatctgctcaagaagaggggtctgctgctgtacgaagacatccgtgagagcacgttcgtggaggggcaactgccaagtcctaaacctgacgccctggacaaccatcagaagtgcttcgccattctcaagctgtaccgtccgaaggtggataacagtgcggttgggacgagtaagaaaagtgacatggctgaggttaaggattggaaagcggttcgtgtggatctggtgatcacgccattcgagcagttcgcctatgcgctgctcggttggacgggcagcggccaatttcgtcgcgatctgcgtcgctatgcggaggaagagcgcgacatgctgctcgacaaccatcgtctctacgacctgaaaaagggcatctttctgagtgcggacagcgaagaagagattttcggtcatctgggtctggattatctggagccgtgggaacgcaacgcg

SEQ ID NO: 4490 - protein, 394 aa, synthetic construct
  REGION 1..394: note = Variant of terminal deoxynucleotidyl transferase
MHHHHHHGGSGHPEGNTPEKEVPSVIARHVSQYACQRKTTLNNYNKKFTDALEIMAENYKFKENLQACLEAKRAASVLKSLPFEVTSMKDIQGLPCITDDVRDVIEEIIEEGESSRVKEILNDERYKAFKQFTSVFGVGVKTSEKWYRMGLRTVEEAKASKSLKLSKMQKAGFLYYEDLASGVSKEEADAVTLIVKETVRTVSPDALVTIAGGFRRGKPMGHDVDLLITIPGRPEDDELLHKVVDLLKKRGLLLYEDIRESTFVEGQLPSPKPDALDNHQKCFAILKLYRPKVDNSAVGTSKKSDMAEVKDWKAVRVDLVITPFEQFAYALLGWTGSGQFRRDLRRYAEEERDMLLDNHRLYDLKKGIFLSADSEEEIFGHLGLDYLEPWERNA

SEQ ID NO: 4491 - DNA, 1182 bp, synthetic construct
  misc_feature 1..1182: note = Variant of terminal deoxynucleotidyl transferase
  source 1..1182: mol_type = other DNA
atgcatcaccaccatcatcatgggggttctggtcatccggaaggtaataccccggagaaggaggtgccgagcgttatcgcccgtcatgttagtcagtacgcgtgccagcgcaagaccacgctgaataactacaacaaaaagttcaccgacgcgctggagatcatggccgagaactacaaatttaaagagaacctgcaggcgtgtctggaagccaagcgcgccgcgagtgtcctgaaaagcctgccgttcgaggttaccagcatgaaagacatccaaggtctgccgtgcattaccgacgacgtacgtgacgtgatcgaggagatcatcgaagagggcgagagcagccgtgttaaagaaatcctcaatgacgagcgctacaaggcctttaagcagttcaccagcgtgttcggtgtgggcgtgaaaacctcggaaaagtggtaccgtatgggcctccgtacggttgaagaagcaaaggccagtaagagtctgaagctgagcaagatgcagaaggcgggcttcctgtattacgaggatctggcgagcggtgttagtaaagaagaagccgatgccgttacgctcctggtgaaggaaacggtgcgtactgttagtccggatgcgctggtgaccatcgccggcggtttccgccgtggcaaacctatgggccacgacgttgacctgctgatcacgattccgggccgtcctgaagatgacgagctgctccacaaagtggttgatctgctcaagaagcaaggtctgctgctgtacgaagacatccgtgagagcacgttcgtggaggggcaactgccaagtcctaaacctgacgccctggacaaccatcagaagtgcttcgccattctcaagctgtaccgtccgaaggtggataacagtgcggttgggacgagtaagaaaagtgacatggctgaggttaaggattggaaagcggttcgtgtggatctggtgatcacgccattcgagcagttcgcctatgcgctgctcggttggacgggcagcggccaatttcgtcgcgatctgcgtcgctatgcggaggaagagcgcgacatgctgctcgacaaccatcgtctctacgacctgaaaaagggcatctttctgagtgcggacagcgaagaagagattttcggtcatctgggtctggattatctggagccgtgggaacgcaacgcg

SEQ ID NO: 4492 - protein, 394 aa, synthetic construct
  REGION 1..394: note = Variant of terminal deoxynucleotidyl transferase
MHHHHHHGGSGHPEGNTPEKEVPSVIARHVSQYACQRKTTLNNYNKKFTDALEIMAENYKFKENLQACLEAKRAASVLKSLPFEVTSMKDIQGLPCITDDVRDVIEEIIEEGESSRVKEILNDERYKAFKQFTSVFGVGVKTSEKWYRMGLRTVEEAKASKSLKLSKMQKAGFLYYEDLASGVSKEEADAVTLLVKETVRTVSPDALVTIAGGFRRGKPMGHDVDLLITIPGRPEDDELLHKVVDLLKKQGLLLYEDIRESTFVEGQLPSPKPDALDNHQKCFAILKLYRPKVDNSAVGTSKKSDMAEVKDWKAVRVDLVITPFEQFAYALLGWTGSGQFRRDLRRYAEEERDMLLDNHRLYDLKKGIFLSADSEEEIFGHLGLDYLEPWERNA

SEQ ID NO: 4493 - DNA, 1182 bp, synthetic construct
  misc_feature 1..1182: note = Variant of terminal deoxynucleotidyl transferase
  source 1..1182: mol_type = other DNA
atgcatcaccaccatcatcatgggggttctggtcatccggaaggtaataccccggagaaggaggtgccgagcgttatcgcccgtcatgttagtcagtacgcgtgccagcgcaagaccacgctgaataactacaacaaaaagttcaccgacgcgctggagatcatggccgagaactacaaatttaaagagaacctgcaggcgtgtctggaagccaagcgcgccgcgagtgtcctgaaaagcctgccgttcgaggttaccagcatgaaagacatccaaggtctgccgtgcattaccgacgacgtacgtgacgtgatcgaggagatcatcgaagagggcgagagcagccgtgttaaagaaatcctcaatgacgagcgctacaaggcctttaagcagttcaccagcgtgttcggtgtgggcgtgaaaacctcggaaaagtggtaccgtatgggcctccgtacggttgaagaagcaaaggccagtaagagtctgaagctgagcaagatgcagaaggcgggcttcctgtattacgaggatctggcgagcggtgttagtaaagaagaagccgatgccgttacgctcatcgtgaaggaaacggtgcgtactgttagtccggatgcgctggtgaccatcgccggcggtttccgccgtggcaaacctatgggccacgacgttgacctgctgatcacgattccgggccgtcctgaagatgacgagctgctccacaaagtggttgatctgctcaagaagcaaggtctgctgctgtacgaagacatccgtgagagcacgttcgtggaggggcaactgccaagtcctaaacctgacgccctggacaaccatcagaagtgcttcgccattctcaagctgtaccgtccgaaggtggataacagtgcggttgggacgagtggtaaaagtgacatggctgaggttaaggattggaaagcggttcgtgtggatctggtgatcacgccattcgagcagttcgcctatgcgctgctcggttggacgggcagcggccaatttcgtcgcgatctgcgtcgctatgcggaggaagagcgcgacatgctgctcgacaaccatcgtctctacgacctgaaaaagggcatctttctgagtgcggacagcgaagaagagattttcggtcatctgggtctggattatctggagccgtgggaacgcaacgcg

SEQ ID NO: 4494 - protein, 394 aa, synthetic construct
  REGION 1..394: note = Variant of terminal deoxynucleotidyl transferase
MHHHHHHGGSGHPEGNTPEKEVPSVIARHVSQYACQRKTTLNNYNKKFTDALEIMAENYKFKENLQACLEAKRAASVLKSLPFEVTSMKDIQGLPCITDDVRDVIEEIIEEGESSRVKEILNDERYKAFKQFTSVFGVGVKTSEKWYRMGLRTVEEAKASKSLKLSKMQKAGFLYYEDLASGVSKEEADAVTLIVKETVRTVSPDALVTIAGGFRRGKPMGHDVDLLITIPGRPEDDELLHKVVDLLKKQGLLLYEDIRESTFVEGQLPSPKPDALDNHQKCFAILKLYRPKVDNSAVGTSGKSDMAEVKDWKAVRVDLVITPFEQFAYALLGWTGSGQFRRDLRRYAEEERDMLLDNHRLYDLKKGIFLSADSEEEIFGHLGLDYLEPWERNA

SEQ ID NO: 4495 - DNA, 1182 bp, synthetic construct
  misc_feature 1..1182: note = Variant of terminal deoxynucleotidyl transferase
  source 1..1182: mol_type = other DNA
atgcatcaccaccatcatcatgggggttctggtcatccggaaggtaataccccggagaaggaggtgccgagcgttatcgcccgtcatgttagtcagtacgcgtgccagcgcaagaccacgctgaataactacaacaaaaagttcaccgacgcgctggagatcatggccgagaactacaaatttaaagagaacctgcaggcgtgtctggaagccaagcgcgccgcgagtgtcctgaaaagcctgccgttcgaggttaccagcatgaaagacatccaaggtctgccgtgcattaccgacgacgtacgtgacgtgatcgaggagatcatcgaagagggcgagagcagccgtgttaaagaaatcctcaatgacgagcgctacaaggcctttaagcagttcaccagcgtgttcggtgtgggcgtgaaaacctcggaaaagtggtaccgtatgggcctccgtacggttgaagaagcaaaggccagtaagagtctgaagctgagcaagatgcagaaggcgggcttcctgtattacgaggatctggcgagcggtgttagtaaagaagaagccgatgccgttacgctcatcgtgaaggaaacggtgcgtactgttagtccggatgcgctggtgaccatcgccggcggtttccgccgtggcaaacctatgggccacgacgttgacctgctgatcacgattccgggccgtcctgaagatgacgagctgctccacaaagtggttgatctgctcaagaagcaaggtagtctgctgtacgaagacatccgtgagagcacgttcgtggaggggcaactgccaagtcctaaacctgacgccctggacaaccatcagaagtgcttcgccattctcaagctgtaccgtccgaaggtggataacagtgcggttgggacgagtaagaaaagtgacatggctgaggttaaggattggaaagcggttcgtgtggatctggtgatcacgccattcgagcagttcgcctatgcgctgctcggttggacgggcagcggccaatttcgtcgcgatctgcgtcgctatgcggaggaagagcgcgacatgctgctcgacaaccatcgtctctacgacctgaaaaagggcatctttctgagtgcggacagcgaagaagagattttcggtcatctgggtctggattatctggagccgtgggaacgcaacgcg

SEQ ID NO: 4496 - protein, 394 aa, synthetic construct
  REGION 1..394: note = Variant of terminal deoxynucleotidyl transferase
MHHHHHHGGSGHPEGNTPEKEVPSVIARHVSQYACQRKTTLNNYNKKFTDALEIMAENYKFKENLQACLEAKRAASVLKSLPFEVTSMKDIQGLPCITDDVRDVIEEIIEEGESSRVKEILNDERYKAFKQFTSVFGVGVKTSEKWYRMGLRTVEEAKASKSLKLSKMQKAGFLYYEDLASGVSKEEADAVTLIVKETVRTVSPDALVTIAGGFRRGKPMGHDVDLLITIPGRPEDDELLHKVVDLLKKQGSLLYEDIRESTFVEGQLPSPKPDALDNHQKCFAILKLYRPKVDNSAVGTSKKSDMAEVKDWKAVRVDLVITPFEQFAYALLGWTGSGQFRRDLRRYAEEERDMLLDNHRLYDLKKGIFLSADSEEEIFGHLGLDYLEPWERNA

SEQ ID NO: 4497 - DNA, 1182 bp, synthetic construct
  misc_feature 1..1182: note = Variant of terminal deoxynucleotidyl transferase
  source 1..1182: mol_type = other DNA
atgcatcaccaccatcatcatgggggttctggtcatccggaaggtaataccccggagaaggaggtgccgagcgttcaggcccgtcatgttagtcagtacgcgtgccagcgcaagaccacgctgaataactacaacaaaaagttcaccgacgcgctggagatcatggccgagaactacaaatttaaagagaacctgcaggcgtgtctggaagccaagcgcgccgcgagtgtcctgaaaagcctgccgttcgaggttaccagcatgaaagacatccaaggtctgccgtgcattaccgacgacgtacgtgacgtgatcgaggagatcatcgaagagggcgagagcagccgtgttaaagaaatcctcaatgacgagcgctacaaggcctttaagcagttcaccagcgtgttcggtgtgggcgtgaaaacctcggaaaagtggtaccgtatgggcctccgtacggttgaagaagcaaaggccagtaagagtctgaagctgagcaagatgcagaaggcgggcttcctgtattacgaggatctggcgagcggtgttagtaaagaagaagccgatgccgttacgctcatcgtgaaggaaacggtgcgtactgttagtccggatgcgctggtgaccatcgccggcggtttccgccgtggcaaacctatgggccacgacgttgacctgctgatcacgattccgggccgtcctgaagatgacgagctgctccacaaagtggttgatctgctcaagaagcaaggtctgctgctgtacgaagacatccgtgagagcacgttcgtggaggggcaactgccaagtcctaaacctgacgccctggacaaccatcagaagtgcttcgccattctcaagctgtaccgtccgaaggtggataacagtgcggttgggacgagtaagaaaagtgacatggctgaggttaaggattggaaagcggttcgtgtggatctggtgatcacgccattcgagcagttcgcctatgcgctgctcggttggacgggcagcggccaatttcgtcgcgatctgcgtcgctatgcggaggaagagcgcgacatgctgctcgacaaccatcgtctctacgacctgaaaaagggcatctttctgagtgcggacagcgaagaagagattttcggtcatctgggtctggattatctggagccgtgggaacgcaacgcg

SEQ ID NO: 4498 - protein, 394 aa, synthetic construct
  REGION 1..394: note = Variant of terminal deoxynucleotidyl transferase
MHHHHHHGGSGHPEGNTPEKEVPSVQARHVSQYACQRKTTLNNYNKKFTDALEIMAENYKFKENLQACLEAKRAASVLKSLPFEVTSMKDIQGLPCITDDVRDVIEEIIEEGESSRVKEILNDERYKAFKQFTSVFGVGVKTSEKWYRMGLRTVEEAKASKSLKLSKMQKAGFLYYEDLASGVSKEEADAVTLIVKETVRTVSPDALVTIAGGFRRGKPMGHDVDLLITIPGRPEDDELLHKVVDLLKKQGLLLYEDIRESTFVEGQLPSPKPDALDNHQKCFAILKLYRPKVDNSAVGTSKKSDMAEVKDWKAVRVDLVITPFEQFAYALLGWTGSGQFRRDLRRYAEEERDMLLDNHRLYDLKKGIFLSADSEEEIFGHLGLDYLEPWERNA

SEQ ID NO: 4499 - DNA, 1182 bp, synthetic construct
  misc_feature 1..1182: note = Variant of terminal deoxynucleotidyl transferase
  source 1..1182: mol_type = other DNA
atgcatcaccaccatcatcatgggggttctggtcatccggaaggtaataccccggagaaggaggtgccgagcgttatcgcccgtcatgttagtcagtacgcgtgccagcgcaagaccacgctgaataactacaacaaaaagttcaccgacgcgctggagatcatggccgagaactacaaatttaaagagaacctgcaggcgtgtctggaagccaagcgcgccgcgagtgtcctgaaaagcctgccgttcgaggttaccagcatgaaagacatccaaggtctgccgtgcattaccggtgacgtacgtgacgtgatcgaggagatcatcgaagagggcgagagcagccgtgttaaagaaatcctcaatgacgagcgctacaaggcctttaagcagttcaccagcgtgttcggtgtgggcgtgaaaacctcggaaaagtggtaccgtatgggcctccgtacggttgaagaagcaaaggccagtaagagtctgaagctgagcaagatgcagaaggcgggcttcctgtattacgaggatctggcgagcggtgttagtaaagaagaagccgatgccgttacgctcatcgtgaaggaaacggtgcgtactgttagtccggatgcgctggtgaccatcgccggcggtttccgccgtggcaaacctatgggccacgacgttgacctgctgatcacgattccgggccgtcctgaagatgacgagctgctccacaaagtggttgatctgctcaagaagcaaggtctgctgctgtacgaagacatccgtgagagcacgttcgtggaggggcaactgccaagtcctaaacctgacgccctggacaaccatcagaagtgcttcgccattctcaagctgtaccgtccgaaggtggataacagtgcggttgggacgagtaagaaaagtgacatggctgaggttaaggattggaaagcggttcgtgtggatctggtgatcacgccattcgagcagttcgcctatgcgctgctcggttggacgggcagcggccaatttcgtcgcgatctgcgtcgctatgcggaggaagagcgcgacatgctgctcgacaaccatcgtctctacgacctgaaaaagggcatctttctgagtgcggacagcgaagaagagattttcggtcatctgggtctggattatctggagccgtgggaacgcaacgcg

SEQ ID NO: 4500 - protein, 394 aa, synthetic construct
  REGION 1..394: note = Variant of terminal deoxynucleotidyl transferase
MHHHHHHGGSGHPEGNTPEKEVPSVIARHVSQYACQRKTTLNNYNKKFTDALEIMAENYKFKENLQACLEAKRAASVLKSLPFEVTSMKDIQGLPCITGDVRDVIEEIIEEGESSRVKEILNDERYKAFKQFTSVFGVGVKTSEKWYRMGLRTVEEAKASKSLKLSKMQKAGFLYYEDLASGVSKEEADAVTLIVKETVRTVSPDALVTIAGGFRRGKPMGHDVDLLITIPGRPEDDELLHKVVDLLKKQGLLLYEDIRESTFVEGQLPSPKPDALDNHQKCFAILKLYRPKVDNSAVGTSKKSDMAEVKDWKAVRVDLVITPFEQFAYALLGWTGSGQFRRDLRRYAEEERDMLLDNHRLYDLKKGIFLSADSEEEIFGHLGLDYLEPWERNA

SEQ ID NO: 4501 - DNA, 1182 bp, synthetic construct
  misc_feature 1..1182: note = Variant of terminal deoxynucleotidyl transferase
  source 1..1182: mol_type = other DNA
atgcatcaccaccatcatcatgggggttctggtcatccggaaggtaataccccggagaaggaggtgccgagcgttatcgcccgtcatgttagtcagtacgcgtgccagcgcaagaccacgctgaataactacaacaaaaagttcaccgacgcgctggagatcatggccgagaactacaaatttaaagagaacctgcaggcgtgtctggaagccaagcgcgccgcgagtgtcctgaaaagcctgccgttcgaggttaccagcatgaaagacatccaaggtctgccgtgcattaccgacgacgtacgtgacgtgatcgaggagatcatcgaagagggcgagagcagccgtgttaaagaaatcctcaatgacgagcgctacaaggcctttaagcagttcaccagcgtgttcggtgtgggcgtgaaaacctcggaaaagtggtaccgtatgggcctccgtacggttgaagaagcaaaggccagtaagagtctgaagctgagcaagatgcagaaggcgggcttcctgtattacgaggatctggcgagcggtgttagtaaagaagaagccgatattgttacgctcatcgtgaaggaaacggtgcgtactgttagtccggatgcgctggtgaccatcgccggcggtttccgccgtggcaaacctatgggccacgacgttgacctgctgatcacgattccgggccgtcctgaagatgacgagctgctccacaaagtggttgatctgctcaagaagcaaggtctgctgctgtacgaagacatccgtgagagcacgttcgtggaggggcaactgccaagtcctaaacctgacgccctggacaaccatcagaagtgcttcgccattctcaagctgtaccgtccgaaggtggataacagtgcggttgggacgagtaagaaaagtgacatggctgaggttaaggattggaaagcggttcgtgtggatctggtgatcacgccattcgagcagttcgcctatgcgctgctcggttggacgggcagcggccaatttcgtcgcgatctgcgtcgctatgcggaggaagagcgcgacatgctgctcgacaaccatcgtctctacgacctgaaaaagggcatctttctgagtgcggacagcgaagaagagattttcggtcatctgggtctggattatctggagccgtgggaacgcaacgcg

SEQ ID NO: 4502 - protein, 394 aa, synthetic construct
  REGION 1..394: note = Variant of terminal deoxynucleotidyl transferase
MHHHHHHGGSGHPEGNTPEKEVPSVIARHVSQYACQRKTTLNNYNKKFTDALEIMAENYKFKENLQACLEAKRAASVLKSLPFEVTSMKDIQGLPCITDDVRDVIEEIIEEGESSRVKEILNDERYKAFKQFTSVFGVGVKTSEKWYRMGLRTVEEAKASKSLKLSKMQKAGFLYYEDLASGVSKEEADIVTLIVKETVRTVSPDALVTIAGGFRRGKPMGHDVDLLITIPGRPEDDELLHKVVDLLKKQGLLLYEDIRESTFVEGQLPSPKPDALDNHQKCFAILKLYRPKVDNSAVGTSKKSDMAEVKDWKAVRVDLVITPFEQFAYALLGWTGSGQFRRDLRRYAEEERDMLLDNHRLYDLKKGIFLSADSEEEIFGHLGLDYLEPWERNA

SEQ ID NO: 4503 - DNA, 1182 bp, synthetic construct
  misc_feature 1..1182: note = Variant of terminal deoxynucleotidyl transferase
  source 1..1182: mol_type = other DNA
atgcatcaccaccatcatcatgggggttctggtcatccggaaggtaataccccggagaaggaggtgccgagcgttatcgcccgtcatgttagtcagtacgcgtgccagcgcaagaccacgctgaataactacaacaaaaagttcaccgacgcgctggagatcatggccgagaactacaaatttaaagagaacctgcaggcgtgtctggaagccaagcgcgccgcgagtgtcctgaaaagcctgccgttcgaggttaccagcatgaaagacatccaaggtctgccgtgcattaccgacgacgtacgtgacgtgatcgaggagatcatcgaagagggcgagagcagccgtgttaaagaaatcctcaatgacgagcgctacaaggcctttaagcagttcaccagcgtgttcggtgtgggcgtgaaaacctcggaaaagtggtaccgtatgggcctccgtacggttgaagaagcaaaggccagtaaggctctgaagctgagcaagatgcagaaggcgggcttcctgtattacgaggatctggcgagcggtgttagtaaagaagaagccgatgccgttacgctcatcgtgaaggaaacggtgcgtactgttagtccggatgcgctggtgaccatcgccggcggtttccgccgtggcaaacctatgggccacgacgttgacctgctgatcacgattccgggccgtcctgaagatgacgagctgctccacaaagtggttgatctgctcaagaagcaaggtctgctgctgtacgaagacatccgtgagagcacgttcgtggaggggcaactgccaagtcctaaacctgacgccctggacaaccatcagaagtgcttcgccattctcaagctgtaccgtccgaaggtggataacagtgcggttgggacgagtaagaaaagtgacatggctgaggttaaggattggaaagcggttcgtgtggatctggtgatcacgccattcgagcagttcgcctatgcgctgctcggttggacgggcagcggccaatttcgtcgcgatctgcgtcgctatgcggaggaagagcgcgacatgctgctcgacaaccatcgtctctacgacctgaaaaagggcatctttctgagtgcggacagcgaagaagagattttcggtcatctgggtctggattatctggagccgtgggaacgcaacgcg

SEQ ID NO: 4504 - protein, 394 aa, synthetic construct
  REGION 1..394: note = Variant of terminal deoxynucleotidyl transferase
MHHHHHHGGSGHPEGNTPEKEVPSVIARHVSQYACQRKTTLNNYNKKFTDALEIMAENYKFKENLQACLEAKRAASVLKSLPFEVTSMKDIQGLPCITDDVRDVIEEIIEEGESSRVKEILNDERYKAFKQFTSVFGVGVKTSEKWYRMGLRTVEEAKASKALKLSKMQKAGFLYYEDLASGVSKEEADAVTLIVKETVRTVSPDALVTIAGGFRRGKPMGHDVDLLITIPGRPEDDELLHKVVDLLKKQGLLLYEDIRESTFVEGQLPSPKPDALDNHQKCFAILKLYRPKVDNSAVGTSKKSDMAEVKDWKAVRVDLVITPFEQFAYALLGWTGSGQFRRDLRRYAEEERDMLLDNHRLYDLKKGIFLSADSEEEIFGHLGLDYLEPWERNA

SEQ ID NO: 4505 - DNA, 1182 bp, synthetic construct
  misc_feature 1..1182: note = Variant of terminal deoxynucleotidyl transferase
  source 1..1182: mol_type = other DNA
atgcatcaccaccatcatcatgggggttctggtcatccggaaggtaataccccggagaaggaggtgccgagcgttatcgcccgtcatgttagtcagtacgcgtgccagcgcaagaccacgctgaataactacaacaaaaagttcaccgacgcgctggagatcatggccgagaactacaaatttaaagagaacctgcaggcgtgtctggaagccaagcgcgccgcgagtgtcctgaaaagcctgccgttcgaggttaccagcatgaaagacatccaaggtctgccgtgcattaccgacgacgtacgtgacgtgatcgaggagatcatcgaagagggcgagagcagccgtgttaaagaaatcctcaatgacgagcgctacaaggcctttaagcagttcaccagcgtgttcggtgtgggcgtgaaaacctcggaaaagtggtaccgtatgggcctccgtacggttgaagaagcaaaggccagtaagagtctgaagctgagcaagatgcagaaggcgggcttcctgtattacgaggatctggcgagcggtgttagtaaagaagaagccgatgccgttacgctcatcgtgaaggaaacggtgcgtactgttagtccggatgcgctggtgaccatcgccggcggtttccgccgtggcaaacctatgggccacgacgttgacctgctgatcacgattccgggccgtcctgaagatgacgagctgctccacaaagctgttgatctgctcaagaagcaaggtctgctgctgtacgaagacatccgtgagagcacgttcgtggaggggcaactgccaagtcctaaacctgacgccctggacaaccatcagaagtgcttcgccattctcaagctgtaccgtccgaaggtggataacagtgcggttgggacgagtaagaaaagtgacatggctgaggttaaggattggaaagcggttcgtgtggatctggtgatcacgccattcgagcagttcgcctatgcgctgctcggttggacgggcagcggccaatttcgtcgcgatctgcgtcgctatgcggaggaagagcgcgacatgctgctcgacaaccatcgtctctacgacctgaaaaagggcatctttctgagtgcggacagcgaagaagagattttcggtcatctgggtctggattatctggagccgtgggaacgcaacgcg

SEQ ID NO: 4506 - protein, 394 aa, synthetic construct
  REGION 1..394: note = Variant of terminal deoxynucleotidyl transferase
MHHHHHHGGSGHPEGNTPEKEVPSVIARHVSQYACQRKTTLNNYNKKFTDALEIMAENYKFKENLQACLEAKRAASVLKSLPFEVTSMKDIQGLPCITDDVRDVIEEIIEEGESSRVKEILNDERYKAFKQFTSVFGVGVKTSEKWYRMGLRTVEEAKASKSLKLSKMQKAGFLYYEDLASGVSKEEADAVTLIVKETVRTVSPDALVTIAGGFRRGKPMGHDVDLLITIPGRPEDDELLHKAVDLLKKQGLLLYEDIRESTFVEGQLPSPKPDALDNHQKCFAILKLYRPKVDNSAVGTSKKSDMAEVKDWKAVRVDLVITPFEQFAYALLGWTGSGQFRRDLRRYAEEERDMLLDNHRLYDLKKGIFLSADSEEEIFGHLGLDYLEPWERNA

SEQ ID NO: 4507 - DNA, 1182 bp, synthetic construct
  misc_feature 1..1182: note = Variant of terminal deoxynucleotidyl transferase
  source 1..1182: mol_type = other DNA
atgcatcaccaccatcatcatgggggttctggtcatccggaaggtaataccccggagaaggaggtgccgagcgttatcgcccgtcatgttagtcagtacgcgtgccagcgcaagaccacgctgaataactacaacaaaaagttcaccgacgcgctggagatcatggccgagaactacaaatttaaagagaacctgcaggcgtgtctggaagccaagcgcgccgcgagtgtcctgaaaagcctgccgttcgaggttaccagcatgaaagacatccaaggtctgccgtgcattaccgacgacgtacgtgacgtgatcgaggagatcatcgaagagggcgagagcagccgtgttaaagaaatcctcaatgacgagcgctacaaggcctttaagcagttcaccagcgtgttcggtgtgggcgtgaaaacctcggaaaagtggtaccgtatgggcctccgtacggttgaagaagcaaaggccagtaagagtctgaagctgagcaagatgcagaaggcgggcttcctgtattacgaggatctggcgagcggtgttagtaaagaagaagccgatgccgttacgctcatcgtgaaggaaacggtgcgtactgttagtccggatgcgctggtgaccatcgccggcggtttccgccgtggcaaacctatgggccacgacgttgacctgctgatcacgattccgggccgtcctgaagatgacgagctgctccacaaagtggttgatctgctcaagaagcaaggtctgctgctgtacgaagacatccgtgagagcacgttcgtggaggggcaactgccaagtcctaaacctgacgccctggacaaccatcagaagtgcttcgccattctcaagctgtaccgtccgaaggtggataacagtgcggttgggacgagtaagaaaagtgacatggctagggttaaggattggaaagcggttcgtgtggatctggtgatcacgccattcgagcagttcgcctatgcgctgctcggttggacgggcagcggccaatttcgtcgcgatctgcgtcgctatgcggaggaagagcgcgacatgctgctcgacaaccatcgtctctacgacctgaaaaagggcatctttctgagtgcggacagcgaagaagagattttcggtcatctgggtctggattatctggagccgtgggaacgcaacgcg

SEQ ID NO: 4508 - protein, 394 aa, synthetic construct
  REGION 1..394: note = Variant of terminal deoxynucleotidyl transferase
MHHHHHHGGSGHPEGNTPEKEVPSVIARHVSQYACQRKTTLNNYNKKFTDALEIMAENYKFKENLQACLEAKRAASVLKSLPFEVTSMKDIQGLPCITDDVRDVIEEIIEEGESSRVKEILNDERYKAFKQFTSVFGVGVKTSEKWYRMGLRTVEEAKASKSLKLSKMQKAGFLYYEDLASGVSKEEADAVTLIVKETVRTVSPDALVTIAGGFRRGKPMGHDVDLLITIPGRPEDDELLHKVVDLLKKQGLLLYEDIRESTFVEGQLPSPKPDALDNHQKCFAILKLYRPKVDNSAVGTSKKSDMARVKDWKAVRVDLVITPFEQFAYALLGWTGSGQFRRDLRRYAEEERDMLLDNHRLYDLKKGIFLSADSEEEIFGHLGLDYLEPWERNA

SEQ ID NO: 4509 - DNA, 1182 bp, synthetic construct
  misc_feature 1..1182: note = Variant of terminal deoxynucleotidyl transferase
  source 1..1182: mol_type = other DNA
atgcatcaccaccatcatcatggggattctggtcatccggaaggtaataccccggagaaggaggtgccgagcgttatcgcccgtcatgttagtcagtacgcgtgccagcgcaagaccacgctgaataactacaacaaaaagttcaccgacgcgctggagatcatggccgagaactacaaatttaaagagaacctgcaggcgtgtctggaagccaagcgcgccgcgagtgtcctgaaaagcctgccgttcgaggttaccagcatgaaagacatccaaggtctgccgtgcattaccgacgacgtacgtgacgtgatcgaggagatcatcgaagagggcgagagcagccgtgttaaagaaatcctcaatgacgagcgctacaaggcctttaagcagttcaccagcgtgttcggtgtgggcgtgaaaacctcggaaaagtggtaccgtatgggcctccgtacggttgaagaagcaaaggccagtaagagtctgaagctgagcaagatgcagaaggcgggcttcctgtattacgaggatctggcgagcggtgttagtaaagaagaagccgatgccgttacgctcatcgtgaaggaaacggtgcgtactgttagtccggatgcgctggtgaccatcgccggcggtttccgccgtggcaaacctatgggccacgacgttgacctgctgatcacgattccgggccgtcctgaagatgacgagctgctccacaaagtggttgatctgctcaagaagcaaggtctgctgctgtacgaagacatccgtgagagcacgttcgtggaggggcaactgccaagtcctaaacctgacgccctggacaaccatcagaagtgcttcgccattctcaagctgtaccgtccgaaggtggataacagtgcggttgggacgagttctaaaagtgacatggctgaggttaaggattggaaagcggttcgtgtggatctggtgatcacgccattcgagcagttcgcctatgcgctgctcggttggacgggcagcggccaatttcgtcgcgatctgcgtcgctatgcggaggaagagcgcgacatgctgctcgacaaccatcgtctctacgacctgaaaaagggcatctttctgagtgcggacagcgaagaagagattttcggtcatctgggtctggattatctggagccgtgggaacgcaacgcg

SEQ ID NO: 4510 - protein, 394 aa, synthetic construct
  REGION 1..394: note = Variant of terminal deoxynucleotidyl transferase
MHHHHHHGDSGHPEGNTPEKEVPSVIARHVSQYACQRKTTLNNYNKKFTDALEIMAENYKFKENLQACLEAKRAASVLKSLPFEVTSMKDIQGLPCITDDVRDVIEEIIEEGESSRVKEILNDERYKAFKQFTSVFGVGVKTSEKWYRMGLRTVEEAKASKSLKLSKMQKAGFLYYEDLASGVSKEEADAVTLIVKETVRTVSPDALVTIAGGFRRGKPMGHDVDLLITIPGRPEDDELLHKVVDLLKKQGLLLYEDIRESTFVEGQLPSPKPDALDNHQKCFAILKLYRPKVDNSAVGTSSKSDMAEVKDWKAVRVDLVITPFEQFAYALLGWTGSGQFRRDLRRYAEEERDMLLDNHRLYDLKKGIFLSADSEEEIFGHLGLDYLEPWERNA

SEQ ID NO: 4511 - DNA, 1182 bp, synthetic construct
  misc_feature 1..1182: note = Variant of terminal deoxynucleotidyl transferase
  source 1..1182: mol_type = other DNA
atgcatcaccaccatcatcatgggggttctggtcatccggaaggtaataccccggagaaggaggtgccgagcgttatcgcccgtcatgttagtcagtacgcgtgccagcgcaagaccacgctgaataactacaacaaaaagttcaccgacgcgctggagatcatggccgagaactacaaatttaaagagaacctgcaggcgtgtctggaagccaagcgcgccgcgagtgtcctgaaaagcctgccgttcgaggttaccagcatgaaagacatccaaggtctgccgtgcattaccgacgacgtacgtgacgtgatcgaggagatcatcgaagagggcgagagcagccgtgttaaagaaatcctcaatgacgagcgctacaaggcctttaagcagttcaccagcgtgttcggtgtgggcgtgaaaacctcggaaaagtggtaccgtatgggcctccgtacggttgaagaagcaaaggccagtaagagtctgaagctgagcaagatgcagaaggcgggcttcctgtattacgaggatctggcgagcggtgttagtaaagaagaagccgatgccgttacgctcatcgtgaaggaaacggtgcgtactgttagtccggatgcgctggtgaccatcgccggcggtttccgccgtggcaaacctatgggccacgacgttgacctgctgatcacgattccgggccgtcctgaagatgacgagctgctccacaaagtggttgatctgctcaagaagcaaggtctgctgctgtacgaagacatccgtgagagcacgttcgtggaggggcaactgccaagtcctaaacctgacgccctggacaaccatcagaagtgcttcgccattctcaagctgtaccgtccgaaggtggataacagtgcggttgggacgagtaagaatagtgacatggctgaggttaaggattggaaagcggttcgtgtggatctggtgatcacgccattcgagcagttcgcctatgcgctgctcggttggacgggcagcggccaatttcgtcgcgatctgcgtcgctatgcggaggaagagcgcgacatgctgctcgacaaccatcgtctctacgacctgaaaaagggcatctttctgagtgcggacagcgaagaagagattttcggtcatctgggtctggattatctggagccgtgggaacgcaacgcg

SEQ ID NO: 4512 - protein, 394 aa, synthetic construct
  REGION 1..394: note = Variant of terminal deoxynucleotidyl transferase
MHHHHHHGGSGHPEGNTPEKEVPSVIARHVSQYACQRKTTLNNYNKKFTDALEIMAENYKFKENLQACLEAKRAASVLKSLPFEVTSMKDIQGLPCITDDVRDVIEEIIEEGESSRVKEILNDERYKAFKQFTSVFGVGVKTSEKWYRMGLRTVEEAKASKSLKLSKMQKAGFLYYEDLASGVSKEEADAVTLIVKETVRTVSPDALVTIAGGFRRGKPMGHDVDLLITIPGRPEDDELLHKVVDLLKKQGLLLYEDIRESTFVEGQLPSPKPDALDNHQKCFAILKLYRPKVDNSAVGTSKNSDMAEVKDWKAVRVDLVITPFEQFAYALLGWTGSGQFRRDLRRYAEEERDMLLDNHRLYDLKKGIFLSADSEEEIFGHLGLDYLEPWERNA

SEQ ID NO: 4513 - DNA, 1182 bp, synthetic construct
  misc_feature 1..1182: note = Variant of terminal deoxynucleotidyl transferase
  source 1..1182: mol_type = other DNA
atgcatcaccaccatcatcatgggggttctggtcatccggaaggtaataccccggagaaggaggtgccgagcgttatcgcccgtcatgttagtcagtacgcgtgccagcgcaagaccacgctgaataactacaacaaaaagttcaccgacgcgctggagatcatggccgagaactacaaatttaaagagaacctgcaggcgtgtctggaagccaagcgcgccgcgagtgtcctgaaaagcctgccgttcgaggttaccagcatgaaagacatccaaggtctgccgtgcattaccgacgacgtacgtgacgtgatcgaggagatcatcgaagagggcgagagcagccgtgttaaagaaatcctcaatgacgagcgctacaaggcctttaagcagttcaccagcgtgttcggtgtgggcgtgaaaacctcggaaaagtggtaccgtatgggcctccgtacggttgaagaagcaaaggccagtaagagtctgaagctgagcaagatgcagaaggcgggcttcctgtattacgaggatctggcgagcggtgttagtaaagaagaagcccgggccgttacgctcatcgtgaaggaaacggtgcgtactgttagtccggatgcgctggtgaccatcgccggcggtttccgccgtggcaaacctatgggccacgacgttgacctgctgatcacgattccgggccgtcctgaagatgacgagctgctccacaaagtggttgatctgctcaagaagcaaggtctgctgctgtacgaagacatccgtgagagcacgttcgtggaggggcaactgccaagtcctaaacctgacgccctggacaaccatcagaagtgcttcgccattctcaagctgtaccgtccgaaggtggataacagtgcggttgggacgagtaagaaaagtgacatggctgaggttaaggattggaaagcggttcgtgtggatctggtgatcacgccattcgagcagttcgcctatgcgctgctcggttggacgggcagcggccaatttcgtcgcgatctgcgtcgctatgcggaggaagagcgcgacatgctgctcgacaaccatcgtctctacgacctgaaaaagggcatctttctgagtgcggacagcgaagaagagattttcggtcatctgggtctggattatctggagccgtgggaacgcaacgcg

SEQ ID NO: 4514 - protein, 394 aa, synthetic construct
  REGION 1..394: note = Variant of terminal deoxynucleotidyl transferase
MHHHHHHGGSGHPEGNTPEKEVPSVIARHVSQYACQRKTTLNNYNKKFTDALEIMAENYKFKENLQACLEAKRAASVLKSLPFEVTSMKDIQGLPCITDDVRDVIEEIIEEGESSRVKEILNDERYKAFKQFTSVFGVGVKTSEKWYRMGLRTVEEAKASKSLKLSKMQKAGFLYYEDLASGVSKEEARAVTLIVKETVRTVSPDALVTIAGGFRRGKPMGHDVDLLITIPGRPEDDELLHKVVDLLKKQGLLLYEDIRESTFVEGQLPSPKPDALDNHQKCFAILKLYRPKVDNSAVGTSKKSDMAEVKDWKAVRVDLVITPFEQFAYALLGWTGSGQFRRDLRRYAEEERDMLLDNHRLYDLKKGIFLSADSEEEIFGHLGLDYLEPWERNA

SEQ ID NO: 4515 - DNA, 1182 bp, synthetic construct
  misc_feature 1..1182: note = Variant of terminal deoxynucleotidyl transferase
  source 1..1182: mol_type = other DNA
atgcatcaccaccatcatcatgggggttctggtcatccggaaggtaataccccggagaaggaggtgccgagcgttatcgcccgtcatgttagtcagtacgcgtgccagcgcaagaccacgctgaataactacaacaaaaagttcaccgacgcgctggagatcatggccgagaactacaaatttggggagaacctgcaggcgtgtctggaagccaagcgcgccgcgagtgtcctgaaaagcctgccgttcgaggttaccagcatgaaagacatccaaggtctgccgtgcattaccgacgacgtacgtgacgtgatcgaggagatcatcgaagagggcgagagcagccgtgttaaagaaatcctcaatgacgagcgctacaaggcctttaagcagttcaccagcgtgttcggtgtgggcgtgaaaacctcggaaaagtggtaccgtatgggcctccgtacggttgaagaagcaaaggccagtaagagtctgaagctgagcaagatgcagaaggcgggcttcctgtattacgaggatctggcgagcggtgttagtaaagaagaagccgatgccgttacgctcatcgtgaaggaaacggtgcgtactgttagtccggatgcgctggtgaccatcgccggcggtttccgccgtggcaaacctatgggccacgacgttgacctgctgatcacgattccgggccgtcctgaagatgacgagctgctccacaaagtggttgatctgctcaagaagcaaggtctgctgctgtacgaagacatccgtgagagcacgttcgtggaggggcaactgccaagtcctaaacctgacgccctggacaaccatcagaagtgcttcgccattctcaagctgtaccgtccgaaggtggataacagtgcggttgggacgagtaagaaaagtgacatggctgaggttaaggattggaaagcggttcgtgtggatctggtgatcacgccattcgagcagttcgcctatgcgctgctcggttggacgggcagcggccaatttcgtcgcgatctgcgtcgctatgcggaggaagagcgcgacatgctgctcgacaaccatcgtctctacgacctgaaaaagggcatctttctgagtgcggacagcgaagaagagattttcggtcatctgggtctggattatctggagccgtgggaacgcaacgcg

SEQ ID NO: 4516 - protein, 394 aa, synthetic construct
  REGION 1..394: note = Variant of terminal deoxynucleotidyl transferase
MHHHHHHGGSGHPEGNTPEKEVPSVIARHVSQYACQRKTTLNNYNKKFTDALEIMAENYKFGENLQACLEAKRAASVLKSLPFEVTSMKDIQGLPCITDDVRDVIEEIIEEGESSRVKEILNDERYKAFKQFTSVFGVGVKTSEKWYRMGLRTVEEAKASKSLKLSKMQKAGFLYYEDLASGVSKEEADAVTLIVKETVRTVSPDALVTIAGGFRRGKPMGHDVDLLITIPGRPEDDELLHKVVDLLKKQGLLLYEDIRESTFVEGQLPSPKPDALDNHQKCFAILKLYRPKVDNSAVGTSKKSDMAEVKDWKAVRVDLVITPFEQFAYALLGWTGSGQFRRDLRRYAEEERDMLLDNHRLYDLKKGIFLSADSEEEIFGHLGLDYLEPWERNA

SEQ ID NO: 4517 - DNA, 1182 bp, synthetic construct
  misc_feature 1..1182: note = Variant of terminal deoxynucleotidyl transferase
  source 1..1182: mol_type = other DNA
atgcatcaccaccatcatcatgggggttctggtcatccggaaggtaataccccggagaaggaggtgccgagcgttatcgcccgtcatgttagtcagtacgcgtgccagcgcaagaccacgctgaataactacaacaaacttttcaccgacgcgctggagatcatggccgagaactacaaatttaaagagaacctgcaggcgtgtctggaagccaagcgcgccgcgagtgtcctgaaaagcctgccgttcgaggttaccagcatgaaagacatccaaggtctgccgtgcattaccgacgacgtacgtgacgtgatcgaggagatcatcgaagagggcgagagcagccgtgttaaagaaatcctcaatgacgagcgctacaaggcctttaagcagttcaccagcgtgttcggtgtgggcgtgaaaacctcggaaaagtggtaccgtatgggcctccgtacggttgaagaagcaaaggccagtaagagtctgaagctgagcaagatgcagaaggcgggcttcctgtattacgaggatctggcgagcggtgttagtaaagaagaagccgatgccgttacgctcatcgtgaaggaaacggtgcgtactgttagtccggatgcgctggtgaccatcgccggcggtttccgccgtggcaaacctatgggccacgacgttgacctgctgatcacgattccgggccgtcctgaagatgacgagctgctccacaaagtggttgatctgctcaagaagcaaggtctgctgctgtacgaagacatccgtgagagcacgttcgtggaggggcaactgccaagtcctaaacctgacgccctggacaaccatcagaagtgcttcgccattctcaagctgtaccgtccgaaggtggataacagtgcggttgggacgagtaagaaaagtgacatggctgaggttaaggattggaaagcggttcgtgtggatctggtgatcacgccattcgagcagttcgcctatgcgctgctcggttggacgggcagcggccaatttcgtcgcgatctgcgtcgctatgcggaggaagagcgcgacatgctgctcgacaaccatcgtctctacgacctgaaaaagggcatctttctgagtgcggacagcgaagaagagattttcggtcatctgggtctggattatctggagccgtgggaacgcaacgcg

SEQ ID NO: 4518 - protein, 394 aa, synthetic construct
  REGION 1..394: note = Variant of terminal deoxynucleotidyl transferase
MHHHHHHGGSGHPEGNTPEKEVPSVIARHVSQYACQRKTTLNNYNKLFTDALEIMAENYKFKENLQACLEAKRAASVLKSLPFEVTSMKDIQGLPCITDDVRDVIEEIIEEGESSRVKEILNDERYKAFKQFTSVFGVGVKTSEKWYRMGLRTVEEAKASKSLKLSKMQKAGFLYYEDLASGVSKEEADAVTLIVKETVRTVSPDALVTIAGGFRRGKPMGHDVDLLITIPGRPEDDELLHKVVDLLKKQGLLLYEDIRESTFVEGQLPSPKPDALDNHQKCFAILKLYRPKVDNSAVGTSKKSDMAEVKDWKAVRVDLVITPFEQFAYALLGWTGSGQFRRDLRRYAEEERDMLLDNHRLYDLKKGIFLSADSEEEIFGHLGLDYLEPWERNA

SEQ ID NO: 4519 - DNA, 1182 bp, synthetic construct
  misc_feature 1..1182: note = Variant of terminal deoxynucleotidyl transferase
  source 1..1182: mol_type = other DNA
atgcatcaccaccatcatcatgggggttctggtcatccggaaggtaataccccggagaaggaggtgccgagcgttatcgcccgtcatgttagtcagtacgcgtgccagcgcaagaccacgctgaataactacaacaaaaagttcaccgacgcgctggagatcatggccgagaactacaaatttaaagagaacctgcaggcgtgtctggaagccaagcgcgccgcgagtgtcctgaaaagcctgccgttcgaggttaccagcatgaaagacatccaaggtctgccgtgcattaccgacgacgtacgtgacgtgatcgaggagatcatcgaagagggcgagagcagccgtgttaaagaaatcctcaatgacgagcgctacaaggcctttaagcagttcaccagcgtgttcggtgtgggcgtgaaaacctcggaaaagtggtaccgtatgggcctccgtacggttgaagaagcaaaggccagtaagagtctgaagctgagcaagatgcagaaggcgggcttcctgtattacgaggatctggcgagcggtgttagtaaagaagaagccgatgccgttacgctcatcgtgaaggaaacggtgcgtactgttagtccggatgcgctggtgaccatcgccggcggtttccgccgtggcaaacctatgggccacgacgttgacctgctgatcacgattccgggccgtcctgaagatgacgagctgctccacaaagtggttgatctgctcaagaagcaaggtctgctgctgtacgaagacatccgtgagagcacgttcgtggaggggcaactgccaagtcctaaacctgacgccctggacaaccatcagaagtgcttcgccattctcaagctgtaccgtaataaggtggataacagtgcggttgggacgagtaagaaaagtgacatggctgaggttaaggattggaaagcggttcgtgtggatctggtgatcacgccattcgagcagttcgcctatgcgctgctcggttggacgggcagcggccaatttcgtcgcgatctgcgtcgctatgcggaggaagagcgcgacatgctgctcgacaaccatcgtctctacgacctgaaaaagggcatctttctgagtgcggacagcgaagaagagattttcggtcatctgggtctggattatctggagccgtgggaacgcaacgcg

SEQ ID NO: 4520 - protein, 394 aa, synthetic construct
  REGION 1..394: note = Variant of terminal deoxynucleotidyl transferase
MHHHHHHGGSGHPEGNTPEKEVPSVIARHVSQYACQRKTTLNNYNKKFTDALEIMAENYKFKENLQACLEAKRAASVLKSLPFEVTSMKDIQGLPCITDDVRDVIEEIIEEGESSRVKEILNDERYKAFKQFTSVFGVGVKTSEKWYRMGLRTVEEAKASKSLKLSKMQKAGFLYYEDLASGVSKEEADAVTLIVKETVRTVSPDALVTIAGGFRRGKPMGHDVDLLITIPGRPEDDELLHKVVDLLKKQGLLLYEDIRESTFVEGQLPSPKPDALDNHQKCFAILKLYRNKVDNSAVGTSKKSDMAEVKDWKAVRVDLVITPFEQFAYALLGWTGSGQFRRDLRRYAEEERDMLLDNHRLYDLKKGIFLSADSEEEIFGHLGLDYLEPWERNA

SEQ ID NO: 4521 - DNA, 1182 bp, synthetic construct
  misc_feature 1..1182: note = Variant of terminal deoxynucleotidyl transferase
  source 1..1182: mol_type = other DNA
atgcatcaccaccatcatcatgggggttctggtcatccggaaggtaataccccggagaaggaggtgccgagcgttatcgcccgtcatgttagtcagtacgcgtgccagcgcaagaccacgctgaataactacaacaaaaagttcaccgacgcgctggagatcatggccgagaactacaaatttaaagagaacctgcaggcgtgtctggaagccaagcgcgccgcgagtgtcctgaaaagcctgccgttcgaggttaccagcatgaaagacatccaaggtctgccgtgcattaccgacgacgtacgtgacgtgatcgaggagatcatcatggagggcgagagcagccgtgttaaagaaatcctcaatgacgagcgctacaaggcctttaagcagttcaccagcgtgttcggtgtgggcgtgaaaacctcggaaaagtggtaccgtatgggcctccgtacggttgaagaagcaaaggccagtaagagtctgaagctgagcaagatgcagaaggcgggcttcctgtattacgaggatctggcgagcggtgttagtaaagaagaagccgatgccgttacgctcatcgtgaaggaaacggtgcgtactgttagtccggatgcgctggtgaccatcgccggcggtttccgccgtggcaaacctatgggccacgacgttgacctgctgatcacgattccgggccgtcctgaagatgacgagctgctccacaaagtggttgatctgctcaagaagcaaggtctgctgctgtacgaagacatccgtgagagcacgttcgtggaggggcaactgccaagtcctaaacctgacgccctggacaaccatcagaagtgcttcgccattctcaagctgtaccgtccgaaggtggataacagtgcggttgggacgagtaagaaaagtgacatggctgaggttaaggattggaaagcggttcgtgtggatctggtgatcacgccattcgagcagttcgcctatgcgctgctcggttggacgggcagcggccaatttcgtcgcgatctgcgtcgctatgcggaggaagagcgcgacatgctgctcgacaaccatcgtctctacgacctgaaaaagggcatctttctgagtgcggacagcgaagaagagattttcggtcatctgggtctggattatctggagccgtgggaacgcaacgcg

SEQ ID NO: 4522 - protein, 394 aa, synthetic construct
  REGION 1..394: note = Variant of terminal deoxynucleotidyl transferase
MHHHHHHGGSGHPEGNTPEKEVPSVIARHVSQYACQRKTTLNNYNKKFTDALEIMAENYKFKENLQACLEAKRAASVLKSLPFEVTSMKDIQGLPCITDDVRDVIEEIIMEGESSRVKEILNDERYKAFKQFTSVFGVGVKTSEKWYRMGLRTVEEAKASKSLKLSKMQKAGFLYYEDLASGVSKEEADAVTLIVKETVRTVSPDALVTIAGGFRRGKPMGHDVDLLITIPGRPEDDELLHKVVDLLKKQGLLLYEDIRESTFVEGQLPSPKPDALDNHQKCFAILKLYRPKVDNSAVGTSKKSDMAEVKDWKAVRVDLVITPFEQFAYALLGWTGSGQFRRDLRRYAEEERDMLLDNHRLYDLKKGIFLSADSEEEIFGHLGLDYLEPWERNA

SEQ ID NO: 4523 - DNA, 1182 bp, synthetic construct
  misc_feature 1..1182: note = Variant of terminal deoxynucleotidyl transferase
  source 1..1182: mol_type = other DNA
atgcatcaccaccatcatcatgggggttctggtcatccggaaggtaataccccggagaaggaggtgccgagcgttatcgcccgtcatgttagtcagtacgcgtgccagcgcaagaccacgctgaataactacaacaaaaagttcaccgacgcgctggagatcatggccgagaactacaaatttaaagagaacctgcaggcgtgtctggaagccaagcgcgccgcgagtgtcctgaaaagcctgccgttcgaggttaccagcatgaaagacatccaaggtctgccgtgcattaccgacgacgtacgtgacgtgatcgaggagatcatcgaagagggcgagagcagccgtgttaaagaaatcctcaatgacgagcgctacaaggcctttaagcagttcaccagcgtgttcggtgtgggcgtgaaaacctcggaaaagtggtaccgtatgggcctccgtacggttgaagaagcaaaggccagtaagagtctgaagctgagcaagatgcagaaggcgggcttcctgtattacgaggatctggcgagcggtgttagtaaagaagaagccgatgccgttacgctcatcgtgaaggaaacggtgcgtactgttagtccggatgcgctggtgaccatcgccggcggtttccgccgtggcaaacctatgggccacgacgttgacctgctgatcacgattccgggccgtcctgaagatgacgagctgctccacaaagtggttgatctgctcaagaagcaaggtctgctgctgtacgaagacatccgtgagagcacgttcgtggaggggcaactgccaagtcctaaacctgacgccctggacaaccatcagaagtgcttcgccattctcaagctgtaccgtccgaaggcggataacagtgcggttgggacgagtaagaaaagtgacatggctgaggttaaggattggaaagcggttcgtgtggatctggtgatcacgccattcgagcagttcgcctatgcgctgctcggttggacgggcagcggccaatttcgtcgcgatctgcgtcgctatgcggaggaagagcgcgacatgctgctcgacaaccatcgtctctacgacctgaaaaagggcatctttctgagtgcggacagcgaagaagagattttcggtcatctgggtctggattatctggagccgtgggaacgcaacgcg

SEQ ID NO: 4524 - protein, 394 aa, synthetic construct
  REGION 1..394: note = Variant of terminal deoxynucleotidyl transferase
MHHHHHHGGSGHPEGNTPEKEVPSVIARHVSQYACQRKTTLNNYNKKFTDALEIMAENYKFKENLQACLEAKRAASVLKSLPFEVTSMKDIQGLPCITDDVRDVIEEIIEEGESSRVKEILNDERYKAFKQFTSVFGVGVKTSEKWYRMGLRTVEEAKASKSLKLSKMQKAGFLYYEDLASGVSKEEADAVTLIVKETVRTVSPDALVTIAGGFRRGKPMGHDVDLLITIPGRPEDDELLHKVVDLLKKQGLLLYEDIRESTFVEGQLPSPKPDALDNHQKCFAILKLYRPKADNSAVGTSKKSDMAEVKDWKAVRVDLVITPFEQFAYALLGWTGSGQFRRDLRRYAEEERDMLLDNHRLYDLKKGIFLSADSEEEIFGHLGLDYLEPWERNA

SEQ ID NO: 4525 - DNA, 1182 bp, synthetic construct
  misc_feature 1..1182: note = Variant of terminal deoxynucleotidyl transferase
  source 1..1182: mol_type = other DNA
atgcatcaccaccatcatcatgggggttctggtcatccggaaggtaataccccggagaaggaggtgccgagcgttatcgcccgtcatgttagtcagtacgcgtgccagcgcaagaccacgctgaataactacaacaaaaagttcaccgacgcgctggagatcatggccgagaactacaaatttaaagagaacctgcaggcgtgtctggaagccaagcgcgccgcgagtgtcctgaaaagcctgccgttcgaggttaccagcatgaaagacatccaaggtctgccgtgcattaccgacgacgtacgtgacgtgatcgaggagatcatcgaagagggcgagagcagccgtgttaaagaaatcctcaatgacgagcgctacaaggcctttaagcagttcaccagcgtgttcggtgtgggcgtgaaaacctcggaaaagtggtaccgtatgggcctccgtacggttgaagaagcaaaggccagtaagagtctgaagctgagcaagatgcagaaggcgggcttcctgtattacgaggatctggcgagcggtgttagtaaagaagaagccgatgccgttacgctcatcgtgaaggaaacggtgcgtactgttagtccggatgcgctggtgaccatcgccggcggtttccgccgtggcaaacctatgggccacgacgttgacctgctgatcacgattccgggccgtcctgaagatgacgagctgctccacaaagtggttgatctgctcaagaagcaaggtctgctgctgtacgaagacatccgtgagagcacgttcgtggaggggcaactgccaagtcctaaacctgacgccctggacaaccatcagaagtgcttcgccattctcaagctgtaccgtccgaaggtggataacagtgcggttgggacgagtaagaaaagtgacatggcttttgttaaggattggaaagcggttcgtgtggatctggtgatcacgccattcgagcagttcgcctatgcgctgctcggttggacgggcagcggccaatttcgtcgcgatctgcgtcgctatgcggaggaagagcgcgacatgctgctcgacaaccatcgtctctacgacctgaaaaagggcatctttctgagtgcggacagcgaagaagagattttcggtcatctgggtctggattatctggagccgtgggaacgcaacgcg

SEQ ID NO: 4526 - protein, 394 aa, synthetic construct
  REGION 1..394: note = Variant of terminal deoxynucleotidyl transferase
MHHHHHHGGSGHPEGNTPEKEVPSVIARHVSQYACQRKTTLNNYNKKFTDALEIMAENYKFKENLQACLEAKRAASVLKSLPFEVTSMKDIQGLPCITDDVRDVIEEIIEEGESSRVKEILNDERYKAFKQFTSVFGVGVKTSEKWYRMGLRTVEEAKASKSLKLSKMQKAGFLYYEDLASGVSKEEADAVTLIVKETVRTVSPDALVTIAGGFRRGKPMGHDVDLLITIPGRPEDDELLHKVVDLLKKQGLLLYEDIRESTFVEGQLPSPKPDALDNHQKCFAILKLYRPKVDNSAVGTSKKSDMAFVKDWKAVRVDLVITPFEQFAYALLGWTGSGQFRRDLRRYAEEERDMLLDNHRLYDLKKGIFLSADSEEEIFGHLGLDYLEPWERNA

SEQ ID NO: 4527 - DNA, 1182 bp, synthetic construct
  misc_feature 1..1182: note = Variant of terminal deoxynucleotidyl transferase
  source 1..1182: mol_type = other DNA
atgcatcaccaccatcatcatgggggttctggtcatccggaaggtaataccccggagaaggaggtgccgagcgttatcgcccgtcatgttagtcagtacgcgtgccagcgcaagaccacgctgaataactacaacaaaaagttcaccgacgcgctggagatcatggccgagtcttacaaatttaaagagaacctgcaggcgtgtctggaagccaagcgcgccgcgagtgtcctgaaaagcctgccgttcgaggttaccagcatgaaagacatccaaggtctgccgtgcattaccgacgacgtacgtgacgtgatcgaggagatcatcgaagagggcgagagcagccgtgttaaagaaatcctcaatgacgagcgctacaaggcctttaagcagttcaccagcgtgttcggtgtgggcgtgaaaacctcggaaaagtggtaccgtatgggcctccgtacggttgaagaagcaaaggccagtaagagtctgaagctgagcaagatgcagaaggcgggcttcctgtattacgaggatctggcgagcggtgttagtaaagaagaagccgatgccgttacgctcatcgtgaaggaaacggtgcgtactgttagtccggatgcgctggtgaccatcgccggcggtttccgccgtggcaaacctatgggccacgacgttgacctgctgatcacgattccgggccgtcctgaagatgacgagctgctccacaaagtggttgatctgctcaagaagcaaggtctgctgctgtacgaagacatccgtgagagcacgttcgtggaggggcaactgccaagtcctaaacctgacgccctggacaaccatcagaagtgcttcgccattctcaagctgtaccgtccgaaggtggataacagtgcggttgggacgagtaagaaaagtgacatggctgaggttaaggattggaaagcggttcgtgtggatctggtgatcacgccattcgagcagttcgcctatgcgctgctcggttggacgggcagcggccaatttcgtcgcgatctgcgtcgctatgcggaggaagagcgcgacatgctgctcgacaaccatcgtctctacgacctgaaaaagggcatctttctgagtgcggacagcgaagaagagattttcggtcatctgggtctggattatctggagccgtgggaacgcaacgcg

SEQ ID NO: 4528 - protein, 394 aa, synthetic construct
  REGION 1..394: note = Variant of terminal deoxynucleotidyl transferase
MHHHHHHGGSGHPEGNTPEKEVPSVIARHVSQYACQRKTTLNNYNKKFTDALEIMAESYKFKENLQACLEAKRAASVLKSLPFEVTSMKDIQGLPCITDDVRDVIEEIIEEGESSRVKEILNDERYKAFKQFTSVFGVGVKTSEKWYRMGLRTVEEAKASKSLKLSKMQKAGFLYYEDLASGVSKEEADAVTLIVKETVRTVSPDALVTIAGGFRRGKPMGHDVDLLITIPGRPEDDELLHKVVDLLKKQGLLLYEDIRESTFVEGQLPSPKPDALDNHQKCFAILKLYRPKVDNSAVGTSKKSDMAEVKDWKAVRVDLVITPFEQFAYALLGWTGSGQFRRDLRRYAEEERDMLLDNHRLYDLKKGIFLSADSEEEIFGHLGLDYLEPWERNA

SEQ ID NO: 4529 - DNA, 1182 bp, synthetic construct
  misc_feature 1..1182: note = Variant of terminal deoxynucleotidyl transferase
  source 1..1182: mol_type = other DNA
atgcatcaccaccatcatcatgggggttctggtcatccggaaggtaataccccggagaaggaggtgccgagcgttatcgcccgtcatgttagtcagtacgcgtgccagcgcaagaccacgctgaataactacaacaaaaagttcaccgacgcgctggagatcatggccgagaactacaaatttaaagagaacctgcaggcgtgtctggaagccaagcgcgccgcgagtgtcctgaaaagcctgccgttcgaggttaccagcatgaaagacatccaaggtctgccgtgcattaccgacgacgtacgtgacgtgatcgaggagatcatcgaagagggcgagagcagccgtgttaaagaaatcctcaatgacgagcgctacaaggcctttaagcagttcaccagcgtgttcggtgtgggcgtgaaaacctcggaaaagtggtaccgtatgggcctccgtacggttgaagaagcaaaggccagtaagagtgtgaagctgagcaagatgcagaaggcgggcttcctgtattacgaggatctggcgagcggtgttagtaaagaagaagccgatgccgttacgctcatcgtgaaggaaacggtgcgtactgttagtccggatgcgctggtgaccatcgccggcggtttccgccgtggcaaacctatgggccacgacgttgacctgctgatcacgattccgggccgtcctgaagatgacgagctgctccacaaagtggttgatctgctcaagaagcaaggtctgctgctgtacgaagacatccgtgagagcacgttcgtggaggggcaactgccaagtcctaaacctgacgccctggacaaccatcagaagtgcttcgccattctcaagctgtaccgtccgaaggtggataacagtgcggttgggacgagtaagaaaagtgacatggctgaggttaaggattggaaagcggttcgtgtggatctggtgatcacgccattcgagcagttcgcctatgcgctgctcggttggacgggcagcggccaatttcgtcgcgatctgcgtcgctatgcggaggaagagcgcgacatgctgctcgacaaccatcgtctctacgacctgaaaaagggcatctttctgagtgcggacagcgaagaagagattttcggtcatctgggtctggattatctggagccgtgggaacgcaacgcg

SEQ ID NO: 4530 - protein, 394 aa, synthetic construct
  REGION 1..394: note = Variant of terminal deoxynucleotidyl transferase
MHHHHHHGGSGHPEGNTPEKEVPSVIARHVSQYACQRKTTLNNYNKKFTDALEIMAENYKFKENLQACLEAKRAASVLKSLPFEVTSMKDIQGLPCITDDVRDVIEEIIEEGESSRVKEILNDERYKAFKQFTSVFGVGVKTSEKWYRMGLRTVEEAKASKSVKLSKMQKAGFLYYEDLASGVSKEEADAVTLIVKETVRTVSPDALVTIAGGFRRGKPMGHDVDLLITIPGRPEDDELLHKVVDLLKKQGLLLYEDIRESTFVEGQLPSPKPDALDNHQKCFAILKLYRPKVDNSAVGTSKKSDMAEVKDWKAVRVDLVITPFEQFAYALLGWTGSGQFRRDLRRYAEEERDMLLDNHRLYDLKKGIFLSADSEEEIFGHLGLDYLEPWERNA

SEQ ID NO: 4531 - DNA, 1182 bp, synthetic construct
  misc_feature 1..1182: note = Variant of terminal deoxynucleotidyl transferase
  source 1..1182: mol_type = other DNA
atgcatcaccaccatcatcatgggggttctggtcatccggaaggtaataccccggagaaggaggtgccgagcgttatcgcccgtcatgttagtcagtacgcgtgccagcgcaagaccacgctgaataactacaacaaaaagttcaccgacgcgctggagatcatggccgagaactacaaatttaaagagaacctgcaggcgtgtctggaagccaagcgcgccgcgagtgtcctgaaaagcctgccgttcgaggttaccagcatgaaagacatccaaggtctgccgtgcattaccgacgacgtacgtgacgtgatcgaggagatcatcgaagagggcgagagcagccgtgttaaagaaatcctcaatgacgagcgctacaaggcctttaagcagttcaccagcgtgttcggtgtgggcgtgaaaacctcggaaaagtggtaccgtatgggcctccgtacggttgaagaagcaaaggccagtaagagtctgaagctgagcaagatgcagaaggcgggcttcctgtattacgaggatctggcgagcggtgttagtaaagaagaagccgatgccgttacgctcatcgtgaaggaaacggtgcgtactgttagtccggatgcgctggtgaccatcgccggcggtttccgccgtggcaaacctatgggccacgacgttgacctgctgatcacgattccgggccgtcctgaagatgacgagctgctccacaaagtggttgatatgctcaagaagcaaggtctgctgctgtacgaagacatccgtgagagcacgttcgtggaggggcaactgccaagtcctaaacctgacgccctggacaaccatcagaagtgcttcgccattctcaagctgtaccgtccgaaggtggataacagtgcggttgggacgagtaagaaaagtgacatggctgaggttaaggattggaaagcggttcgtgtggatctggtgatcacgccattcgagcagttcgcctatgcgctgctcggttggacgggcagcggccaatttcgtcgcgatctgcgtcgctatgcggaggaagagcgcgacatgctgctcgacaaccatcgtctctacgacctgaaaaagggcatctttctgagtgcggacagcgaagaagagattttcggtcatctgggtctggattatctggagccgtgggaacgcaacgcg

SEQ ID NO: 4532 - protein, 394 aa, synthetic construct
  REGION 1..394: note = Variant of terminal deoxynucleotidyl transferase
MHHHHHHGGSGHPEGNTPEKEVPSVIARHVSQYACQRKTTLNNYNKKFTDALEIMAENYKFKENLQACLEAKRAASVLKSLPFEVTSMKDIQGLPCITDDVRDVIEEIIEEGESSRVKEILNDERYKAFKQFTSVFGVGVKTSEKWYRMGLRTVEEAKASKSLKLSKMQKAGFLYYEDLASGVSKEEADAVTLIVKETVRTVSPDALVTIAGGFRRGKPMGHDVDLLITIPGRPEDDELLHKVVDMLKKQGLLLYEDIRESTFVEGQLPSPKPDALDNHQKCFAILKLYRPKVDNSAVGTSKKSDMAEVKDWKAVRVDLVITPFEQFAYALLGWTGSGQFRRDLRRYAEEERDMLLDNHRLYDLKKGIFLSADSEEEIFGHLGLDYLEPWERNA

SEQ ID NO: 4533 - DNA, 1182 bp, synthetic construct
  misc_feature 1..1182: note = Variant of terminal deoxynucleotidyl transferase
  source 1..1182: mol_type = other DNA
atgcatcaccaccatcatcatgggggttctggtcatccggaaggtaataccccggagaaggaggtgccgagcgttatcgcccgtcatgttagtcagtacgcgtgccagcgcaagaccacgctgaataactacaacaaaaagttcaccgacgcgctggagatcatggccgagaactacaaatttaaagagaacctgcaggcgtgtctggaagccaagcgcgccgcgagtgtcctgaaaagcctgccgttcgaggttaccagcatgaaagacatccaaggtctgccgtgcattaccgacgacgtacgtgacgtgatcgaggagatcatcgaagagggcgagagcagccgtgttaaagaaatcctcaatgacgagcgctacaaggcctttaagcagttcaccagcgtgttcggtgtgggcgtgaaaacctcggaaaagtggtaccgtatgggcctccgtacggttgaagaagcaaaggccagtaagattctgaagctgagcaagatgcagaaggcgggcttcctgtattacgaggatctggcgagcggtgttagtaaagaagaagccgatgccgttacgctcatcgtgaaggaaacggtgcgtactgttagtccggatgcgctggtgaccatcgccggcggtttccgccgtggcaaacctatgggccacgacgttgacctgctgatcacgattccgggccgtcctgaagatgacgagctgctccacaaagtggttgatctgctcaagaagcaaggtctgctgctgtacgaagacatccgtgagagcacgttcgtggaggggcaactgccaagtcctaaacctgacgccctggacaaccatcagaagtgcttcgccattctcaagctgtaccgtccgaaggtggataacagtgcggttgggacgagtaagaaaagtgacatggctgaggttaaggattggaaagcggttcgtgtggatctggtgatcacgccattcgagcagttcgcctatgcgctgctcggttggacgggcagcggccaatttcgtcgcgatctgcgtcgctatgcggaggaagagcgcgacatgctgctcgacaaccatcgtctctacgacctgaaaaagggcatctttctgagtgcggacagcgaagaagagattttcggtcatctgggtctggattatctggagccgtgggaacgcaacgcg

SEQ ID NO: 4534 - protein, 394 aa, synthetic construct
  REGION 1..394: note = Variant of terminal deoxynucleotidyl transferase
MHHHHHHGGSGHPEGNTPEKEVPSVIARHVSQYACQRKTTLNNYNKKFTDALEIMAENYKFKENLQACLEAKRAASVLKSLPFEVTSMKDIQGLPCITDDVRDVIEEIIEEGESSRVKEILNDERYKAFKQFTSVFGVGVKTSEKWYRMGLRTVEEAKASKILKLSKMQKAGFLYYEDLASGVSKEEADAVTLIVKETVRTVSPDALVTIAGGFRRGKPMGHDVDLLITIPGRPEDDELLHKVVDLLKKQGLLLYEDIRESTFVEGQLPSPKPDALDNHQKCFAILKLYRPKVDNSAVGTSKKSDMAEVKDWKAVRVDLVITPFEQFAYALLGWTGSGQFRRDLRRYAEEERDMLLDNHRLYDLKKGIFLSADSEEEIFGHLGLDYLEPWERNA

SEQ ID NO: 4535 - DNA, 1182 bp, synthetic construct
  misc_feature 1..1182: note = Variant of terminal deoxynucleotidyl transferase
  source 1..1182: mol_type = other DNA
atgcatcaccaccatcatcatgggggttctggtcatccggaaggtaataccccggagaaggaggtgccgagcgttatcgcccgtcatgttagtcagtacgcgtgccagcgcaagaccacgctgaataactacaacaaaaagttcaccgacgcgctggagatcatggccgagaactacaaatttaaagagaacctgcaggcgtgtctggaagccaagcgcgccgcgagtgtcctgaaaagcctgccgttcgaggttaccagcatgaaagacatccaaggtctgccgtgcattaccgacgacgtacgtgacgtgatcgaggagatcatcaatgagggcgagagcagccgtgttaaagaaatcctcaatgacgagcgctacaaggcctttaagcagttcaccagcgtgttcggtgtgggcgtgaaaacctcggaaaagtggtaccgtatgggcctccgtacggttgaagaagcaaaggccagtaagagtctgaagctgagcaagatgcagaaggcgggcttcctgtattacgaggatctggcgagcggtgttagtaaagaagaagccgatgccgttacgctcatcgtgaaggaaacggtgcgtactgttagtccggatgcgctggtgaccatcgccggcggtttccgccgtggcaaacctatgggccacgacgttgacctgctgatcacgattccgggccgtcctgaagatgacgagctgctccacaaagtggttgatctgctcaagaagcaaggtctgctgctgtacgaagacatccgtgagagcacgttcgtggaggggcaactgccaagtcctaaacctgacgccctggacaaccatcagaagtgcttcgccattctcaagctgtaccgtccgaaggtggataacagtgcggttgggacgagtaagaaaagtgacatggctgaggttaaggattggaaagcggttcgtgtggatctggtgatcacgccattcgagcagttcgcctatgcgctgctcggttggacgggcagcggccaatttcgtcgcgatctgcgtcgctatgcggaggaagagcgcgacatgctgctcgacaaccatcgtctctacgacctgaaaaagggcatctttctgagtgcggacagcgaagaagagattttcggtcatctgggtctggattatctggagccgtgggaacgcaacgcg

SEQ ID NO: 4536 - protein, 394 aa, synthetic construct
  REGION 1..394: note = Variant of terminal deoxynucleotidyl transferase
MHHHHHHGGSGHPEGNTPEKEVPSVIARHVSQYACQRKTTLNNYNKKFTDALEIMAENYKFKENLQACLEAKRAASVLKSLPFEVTSMKDIQGLPCITDDVRDVIEEIINEGESSRVKEILNDERYKAFKQFTSVFGVGVKTSEKWYRMGLRTVEEAKASKSLKLSKMQKAGFLYYEDLASGVSKEEADAVTLIVKETVRTVSPDALVTIAGGFRRGKPMGHDVDLLITIPGRPEDDELLHKVVDLLKKQGLLLYEDIRESTFVEGQLPSPKPDALDNHQKCFAILKLYRPKVDNSAVGTSKKSDMAEVKDWKAVRVDLVITPFEQFAYALLGWTGSGQFRRDLRRYAEEERDMLLDNHRLYDLKKGIFLSADSEEEIFGHLGLDYLEPWERNA

SEQ ID NO: 4537 - DNA, 1182 bp, synthetic construct
  misc_feature 1..1182: note = Variant of terminal deoxynucleotidyl transferase
  source 1..1182: mol_type = other DNA
atgcatcaccaccatcatcatgggggttctggtcatccggaaggtaataccccggagaaggaggtgccgagcgttatcgcccgtcatgttagtcagtacgcgtgccagcgcaagaccacgctgaataactacaacaaaaagttcaccgacgcgctggagatcatggccgagaactacaaatttaaagagaacctgcaggcgtgtctggaagccaagcgcgccgcgagtgtcctgaaaagcctgccgttcgaggttaccagcatgaaagacatccaaggtctgccgtgcattaccgacgacgtacgtgacgtgatcgaggagatcatcgaagagggcgagagcagccgtgttaaagaaatcctcaatgacgagcgctacaaggcctttaagcagttcaccagcgtgttcggtgtgggcgtgaaaacctcggaaaagtggtaccgtatgggcctccgtacggttgaagaagcaaaggccagtaagagtctgaagctgagcaagatgcagaaggcgggcttcctgtattacgaggatctggcgagcggtgttagtaaagaagaagccgatgccgttacgctcatcgtgaaggaaacggtgcgtactgttagtccggatgcgctggtgaccatcgccggcggtttccgccgtggcaaacctatgggccacgacgttgacctgctgatcacgattccgggccgtcctgaagatgacgagctgctccacaaagtggttgatattctcaagaagcaaggtctgctgctgtacgaagacatccgtgagagcacgttcgtggaggggcaactgccaagtcctaaacctgacgccctggacaaccatcagaagtgcttcgccattctcaagctgtaccgtccgaaggtggataacagtgcggttgggacgagtaagaaaagtgacatggctgaggttaaggattggaaagcggttcgtgtggatctggtgatcacgccattcgagcagttcgcctatgcgctgctcggttggacgggcagcggccaatttcgtcgcgatctgcgtcgctatgcggaggaagagcgcgacatgctgctcgacaaccatcgtctctacgacctgaaaaagggcatctttctgagtgcggacagcgaagaagagattttcggtcatctgggtctggattatctggagccgtgggaacgcaacgcg

SEQ ID NO: 4538 - protein, 394 aa, synthetic construct
  REGION 1..394: note = Variant of terminal deoxynucleotidyl transferase
MHHHHHHGGSGHPEGNTPEKEVPSVIARHVSQYACQRKTTLNNYNKKFTDALEIMAENYKFKENLQACLEAKRAASVLKSLPFEVTSMKDIQGLPCITDDVRDVIEEIIEEGESSRVKEILNDERYKAFKQFTSVFGVGVKTSEKWYRMGLRTVEEAKASKSLKLSKMQKAGFLYYEDLASGVSKEEADAVTLIVKETVRTVSPDALVTIAGGFRRGKPMGHDVDLLITIPGRPEDDELLHKVVDILKKQGLLLYEDIRESTFVEGQLPSPKPDALDNHQKCFAILKLYRPKVDNSAVGTSKKSDMAEVKDWKAVRVDLVITPFEQFAYALLGWTGSGQFRRDLRRYAEEERDMLLDNHRLYDLKKGIFLSADSEEEIFGHLGLDYLEPWERNA

SEQ ID NO: 4539 - DNA, 1182 bp, synthetic construct
  misc_feature 1..1182: note = Variant of terminal deoxynucleotidyl transferase
  source 1..1182: mol_type = other DNA
atgcatcaccaccatcatcatgggggttctggtcatccggaaggtaataccccggagaaggaggtgccgagcgttatcgcccgtcatgttagtcagtacgcgtgccagcgcaagaccacgctgaataactacaacaaaaagttcaccgacgcgctggagatcatggccgagaactacaaatttaaagagaacctgcaggcgtgtctggaagccaagcgcgccgcgagtgtcctgaaaagcctgccgttcgaggttaccagcatgaaagacatccaaggtctgccgtgcattaccgacgacgtacgtgacgtgatcgaggagatcatcgaagagggcgagagcagccgtgttaaagaaatcctcaatgacgagcgctacaaggcctttaagcagttcaccagcgtgttcggtgtgggcgtgaaaacctcggaaaagtggtaccgtatgggcctccgtacggttgaagaagcaaaggccagtaagagtctgaagctgagcaagatgcagaaggcgggcttcctgtattacgaggatctggcgagcggtgttagtaaagaagaagccgatgccgttacgctcatcgtgaaggaaacggtgcgtactgttagtccggatgcgctggtgaccatcgccggcggtttccgccgtggcaaacctatgggccacgacgttgacctgctgatcacgattccgggccgtcctgaagatgacgagctgctccacaaagtggttgatctgctcaagaagcaaggtctgctgctgtacgaagacatccgtgagagcacgttcgtggaggggcaactgccaagtcctaaacctgacgccctggacaaccatcagaagtgcttcgccattctcaagctgtaccgtccgaagattgataacagtgcggttgggacgagtaagaaaagtgacatggctgaggttaaggattggaaagcggttcgtgtggatctggtgatcacgccattcgagcagttcgcctatgcgctgctcggttggacgggcagcggccaatttcgtcgcgatctgcgtcgctatgcggaggaagagcgcgacatgctgctcgacaaccatcgtctctacgacctgaaaaagggcatctttctgagtgcggacagcgaagaagagattttcggtcatctgggtctggattatctggagccgtgggaacgcaacgcg

SEQ ID NO: 4540 - protein, 394 aa, synthetic construct
  REGION 1..394: note = Variant of terminal deoxynucleotidyl transferase
MHHHHHHGGSGHPEGNTPEKEVPSVIARHVSQYACQRKTTLNNYNKKFTDALEIMAENYKFKENLQACLEAKRAASVLKSLPFEVTSMKDIQGLPCITDDVRDVIEEIIEEGESSRVKEILNDERYKAFKQFTSVFGVGVKTSEKWYRMGLRTVEEAKASKSLKLSKMQKAGFLYYEDLASGVSKEEADAVTLIVKETVRTVSPDALVTIAGGFRRGKPMGHDVDLLITIPGRPEDDELLHKVVDLLKKQGLLLYEDIRESTFVEGQLPSPKPDALDNHQKCFAILKLYRPKIDNSAVGTSKKSDMAEVKDWKAVRVDLVITPFEQFAYALLGWTGSGQFRRDLRRYAEEERDMLLDNHRLYDLKKGIFLSADSEEEIFGHLGLDYLEPWERNA

SEQ ID NO: 4541 - DNA, 1182 bp, synthetic construct
  misc_feature 1..1182: note = Variant of terminal deoxynucleotidyl transferase
  source 1..1182: mol_type = other DNA
atgcatcaccaccatcatcatgggggttctggtcatccggaaggtaataccccggagaaggaggtgccgagcgttatcgcccgtcatgttagtcagtacgcgtgccagcgcaagaccacgctgaataactacaacaaaaagttcaccgacgcgctggagatcatggccgagaactacaaatttaaagagaacctgcaggcgtgtctggaagccaagcgcgccgcgagtgtcctgaaaagcctgccgttcgaggttaccagcatgaaagacatccaaggtctgccgtgcattaccgacgacgtacgtgacgtgatcgaggagatcatcgaagagggcgagagcagccgtgttaaagaaatcctcaatgacgagcgctacaaggcctttaagcagttcaccagcgtgttcggtgtgggcgtgaaaacctcggaaaagtggtaccgtatgggcctccgtacggttgaagaagcaaaggccagtaagagtctgaagctgagcaagatgcagaaggcgggcttcctgtattacgaggatctggcgagcggtgttagtaaagaagaagccgatgccgttacgctcatcgtgaaggaaacggtgcgtactgttagtccggatgcgctggtgaccatcgccggcggtttccgccgtggcaaacctatgggccacgacgttgacctgctgatcacgattccgggccgtcctgaagatgacgagctgctccacaaagtggttgatctgctcaagaagcaaggtctgctgctgtacgaagacatccgtgagagcacgttcgtggaggggcaactgccaagtcctaaacctgacgccctggacaaccatcagaagtgcttcgccattctcaagctgtaccgtccgaaggtggataacagtgcggttgggacgagtaagaaaagtgacatgcgggaggttaaggattggaaagcggttcgtgtggatctggtgatcacgccattcgagcagttcgcctatgcgctgctcggttggacgggcagcggccaatttcgtcgcgatctgcgtcgctatgcggaggaagagcgcgacatgctgctcgacaaccatcgtctctacgacctgaaaaagggcatctttctgagtgcggacagcgaagaagagattttcggtcatctgggtctggattatctggagccgtgggaacgcaacgcg

SEQ ID NO: 4542 - protein, 394 aa, synthetic construct
  REGION 1..394: note = Variant of terminal deoxynucleotidyl transferase
MHHHHHHGGSGHPEGNTPEKEVPSVIARHVSQYACQRKTTLNNYNKKFTDALEIMAENYKFKENLQACLEAKRAASVLKSLPFEVTSMKDIQGLPCITDDVRDVIEEIIEEGESSRVKEILNDERYKAFKQFTSVFGVGVKTSEKWYRMGLRTVEEAKASKSLKLSKMQKAGFLYYEDLASGVSKEEADAVTLIVKETVRTVSPDALVTIAGGFRRGKPMGHDVDLLITIPGRPEDDELLHKVVDLLKKQGLLLYEDIRESTFVEGQLPSPKPDALDNHQKCFAILKLYRPKVDNSAVGTSKKSDMREVKDWKAVRVDLVITPFEQFAYALLGWTGSGQFRRDLRRYAEEERDMLLDNHRLYDLKKGIFLSADSEEEIFGHLGLDYLEPWERNA

SEQ ID NO: 4543 - DNA, 1182 bp, synthetic construct
  misc_feature 1..1182: note = Variant of terminal deoxynucleotidyl transferase
  source 1..1182: mol_type = other DNA
atgcatcaccaccatcatcatgggggttctggtcatccggaaggtaataccccggagaaggaggtgccgagcgttatcgcccgtcatgttagtcagtacgcgtgccagcgcaagaccacgctgaataactacaacaaaaagttcaccgacgcgctggagatcatggccgagaactacaaatttaaagagaacctgcaggcgtgtctggaagccaagcgcgccgcgagtgtcctgaaaagcctgccgttcgaggttaccagcatgaaagacatccaaggtctgccgtgcattaccgacgacgtacgtgacgtgatcgaggagatcatcgaagagggcgagagcagccgtgttaaagaaatcctcaatgacgagcgctacaaggcctttaagcagttcaccagcgtgttcggtgtgggcgtgaaaacctcggaaaagtggtaccgtatgggcctccgtacggttgaagaagcaaaggccagtaagagtctgaagctgagcaagatgcagaaggcgggcttcctgtattacgaggatctggcgagcggtgttagtaaagaagaagccgatgccgttacgctcatcgtgaaggaaacggtgcgtactgttagtccggatgcgctggtgaccatcgccggcggtttccgccgtggcaaacctatgggccacgacgttgacctgctgatcacgattccgggccgtcctgaagatgacgagctgctccacaaagtggttgatctgctccgtaagcaaggtctgctgctgtacgaagacatccgtgagagcacgttcgtggaggggcaactgccaagtcctaaacctgacgccctggacaaccatcagaagtgcttcgccattctcaagctgtaccgtccgaaggtggataacagtgcggttgggacgagtaagaaaagtgacatggctgaggttaaggattggaaagcggttcgtgtggatctggtgatcacgccattcgagcagttcgcctatgcgctgctcggttggacgggcagcggccaatttcgtcgcgatctgcgtcgctatgcggaggaagagcgcgacatgctgctcgacaaccatcgtctctacgacctgaaaaagggcatctttctgagtgcggacagcgaagaagagattttcggtcatctgggtctggattatctggagccgtgggaacgcaacgcg

SEQ ID NO: 4544 - protein, 394 aa, synthetic construct
  REGION 1..394: note = Variant of terminal deoxynucleotidyl transferase
MHHHHHHGGSGHPEGNTPEKEVPSVIARHVSQYACQRKTTLNNYNKKFTDALEIMAENYKFKENLQACLEAKRAASVLKSLPFEVTSMKDIQGLPCITDDVRDVIEEIIEEGESSRVKEILNDERYKAFKQFTSVFGVGVKTSEKWYRMGLRTVEEAKASKSLKLSKMQKAGFLYYEDLASGVSKEEADAVTLIVKETVRTVSPDALVTIAGGFRRGKPMGHDVDLLITIPGRPEDDELLHKVVDLLRKQGLLLYEDIRESTFVEGQLPSPKPDALDNHQKCFAILKLYRPKVDNSAVGTSKKSDMAEVKDWKAVRVDLVITPFEQFAYALLGWTGSGQFRRDLRRYAEEERDMLLDNHRLYDLKKGIFLSADSEEEIFGHLGLDYLEPWERNA

SEQ ID NO: 4545 - DNA, 1182 bp, synthetic construct
  misc_feature 1..1182: note = Variant of terminal deoxynucleotidyl transferase
  source 1..1182: mol_type = other DNA
atgcatcaccaccatcatcatgggggttctggtcatccggaaggtaataccccggagaaggaggtgccgagcgttatcgcccgtcatgttagtcagtacgcgtgccagcgcaagaccacgctgaataactacaacaaaaagttcaccgacgcgctggagatcatggccgagaactacaaatttaaagagaacctgcaggcgtgtctggaagccaagcgcgccgcgagtgtcctgaaaagcctgccgttcgaggttaccagcatgaaagacatccaaggtctgccgtgcattaccgacgacgtacgtgacgtgatcgaggagatcatcgaagagggcgagagcagccgtgttaaagaaatcctcaatgacgagcgctacaaggcctttaagcagttcaccagcgtgttcggtgtgggcgtgaaaacctcggaaaagtggtaccgtatgggcctccgtacggttgaagaagcaaaggccagtaagagtctgaagctgagcaagatgcagaaggcgggcttcctgtattacgaggatctggcgagcggtgttagtaaagaagaagccgatgccgttacgctcatcgtgaaggaaacggtgcgtactgttagtccggatgcgctggtgaccatcgccggcggtttccgccgtggcaaacctatgggccacgacgttgacctgctgatcacgattccgggccgtcctgaagatgacgagctgctccacaaagtggttgatctgctcaagaagcaaggtctgctgctgtacgaagacatccgtgagagcacgttcgtggaggggcaactgccaagtcctaaacctgacgccctggacaaccatcagaagtgcttcgccattctcaagctgtaccgtccgaaggtggattctagtgcggttgggacgagtaagaaaagtgacatggctgaggttaaggattggaaagcggttcgtgtggatctggtgatcacgccattcgagcagttcgcctatgcgctgctcggttggacgggcagcggccaatttcgtcgcgatctgcgtcgctatgcggaggaagagcgcgacatgctgctcgacaaccatcgtctctacgacctgaaaaagggcatctttctgagtgcggacagcgaagaagagattttcggtcatctgggtctggattatctggagccgtgggaacgcaacgcg

SEQ ID NO: 4546 - protein, 394 aa, synthetic construct
  REGION 1..394: note = Variant of terminal deoxynucleotidyl transferase
MHHHHHHGGSGHPEGNTPEKEVPSVIARHVSQYACQRKTTLNNYNKKFTDALEIMAENYKFKENLQACLEAKRAASVLKSLPFEVTSMKDIQGLPCITDDVRDVIEEIIEEGESSRVKEILNDERYKAFKQFTSVFGVGVKTSEKWYRMGLRTVEEAKASKSLKLSKMQKAGFLYYEDLASGVSKEEADAVTLIVKETVRTVSPDALVTIAGGFRRGKPMGHDVDLLITIPGRPEDDELLHKVVDLLKKQGLLLYEDIRESTFVEGQLPSPKPDALDNHQKCFAILKLYRPKVDSSAVGTSKKSDMAEVKDWKAVRVDLVITPFEQFAYALLGWTGSGQFRRDLRRYAEEERDMLLDNHRLYDLKKGIFLSADSEEEIFGHLGLDYLEPWERNA

SEQ ID NO: 4547 - DNA, 1182 bp, synthetic construct
  misc_feature 1..1182: note = Variant of terminal deoxynucleotidyl transferase
  source 1..1182: mol_type = other DNA
atgcatcaccaccatcatcatgggggttctggtcatccggaaggtaataccccggagaaggaggtgccgagcgttatcgcccgtcatgttagtcagtacgcgtgccagcgcaagaccacgctgaataactacaacaaaaagttcaccgacgcgctggagatcatggccgagaactacaaatttaaagagaacctgcaggcgtgtctggaagccaagcgcgccgcgagtgtcctgaaaagcctgccgttcgaggttaccagcatgaaagacatccaaggtctgccgtgcattaccgacgacgtacgtgacgtgatcgaggagatcatcgtggagggcgagagcagccgtgttaaagaaatcctcaatgacgagcgctacaaggcctttaagcagttcaccagcgtgttcggtgtgggcgtgaaaacctcggaaaagtggtaccgtatgggcctccgtacggttgaagaagcaaaggccagtaagagtctgaagctgagcaagatgcagaaggcgggcttcctgtattacgaggatctggcgagcggtgttagtaaagaagaagccgatgccgttacgctcatcgtgaaggaaacggtgcgtactgttagtccggatgcgctggtgaccatcgccggcggtttccgccgtggcaaacctatgggccacgacgttgacctgctgatcacgattccgggccgtcctgaagatgacgagctgctccacaaagtggttgatctgctcaagaagcaaggtctgctgctgtacgaagacatccgtgagagcacgttcgtggaggggcaactgccaagtcctaaacctgacgccctggacaaccatcagaagtgcttcgccattctcaagctgtaccgtccgaaggtggataacagtgcggttgggacgagtaagaaaagtgacatggctgaggttaaggattggaaagcggttcgtgtggatctggtgatcacgccattcgagcagttcgcctatgcgctgctcggttggacgggcagcggccaatttcgtcgcgatctgcgtcgctatgcggaggaagagcgcgacatgctgctcgacaaccatcgtctctacgacctgaaaaagggcatctttctgagtgcggacagcgaagaagagattttcggtcatctgggtctggattatctggagccgtgggaacgcaacgcg

SEQ ID NO: 4548 - protein, 394 aa, synthetic construct
  REGION 1..394: note = Variant of terminal deoxynucleotidyl transferase
MHHHHHHGGSGHPEGNTPEKEVPSVIARHVSQYACQRKTTLNNYNKKFTDALEIMAENYKFKENLQACLEAKRAASVLKSLPFEVTSMKDIQGLPCITDDVRDVIEEIIVEGESSRVKEILNDERYKAFKQFTSVFGVGVKTSEKWYRMGLRTVEEAKASKSLKLSKMQKAGFLYYEDLASGVSKEEADAVTLIVKETVRTVSPDALVTIAGGFRRGKPMGHDVDLLITIPGRPEDDELLHKVVDLLKKQGLLLYEDIRESTFVEGQLPSPKPDALDNHQKCFAILKLYRPKVDNSAVGTSKKSDMAEVKDWKAVRVDLVITPFEQFAYALLGWTGSGQFRRDLRRYAEEERDMLLDNHRLYDLKKGIFLSADSEEEIFGHLGLDYLEPWERNA

SEQ ID NO: 4549 - DNA, 1182 bp, synthetic construct
  misc_feature 1..1182: note = Variant of terminal deoxynucleotidyl transferase
  source 1..1182: mol_type = other DNA
atgcatcaccaccatcatcatgggggttctggtcatccggaaggtaataccccggagaaggaggtgccgagcgttatcgcccgtcatgttagtcagtacgcgtgccagcgcaagaccacgctgaataactacaacaaaaagttcaccgacgcgctggagatcatggccgagaactacaaatttaaagagaacctgcaggcgtgtctgagtgccaagcgcgccgcgagtgtcctgaaaagcctgccgttcgaggttaccagcatgaaagacatccaaggtctgccgtgcattaccgacgacgtacgtgacgtgatcgaggagatcatcgaagagggcgagagcagccgtgttaaagaaatcctcaatgacgagcgctacaaggcctttaagcagttcaccagcgtgttcggtgtgggcgtgaaaacctcggaaaagtggtaccgtatgggcctccgtacggttgaagaagcaaaggccagtaagagtctgaagctgagcaagatgcagaaggcgggcttcctgtattacgaggatctggcgagcggtgttagtaaagaagaagccgatgccgttacgctcatcgtgaaggaaacggtgcgtactgttagtccggatgcgctggtgaccatcgccggcggtttccgccgtggcaaacctatgggccacgacgttgacctgctgatcacgattccgggccgtcctgaagatgacgagctgctccacaaagtggttgatctgctcaagaagcaaggtctgctgctgtacgaagacatccgtgagagcacgttcgtggaggggcaactgccaagtcctaaacctgacgccctggacaaccatcagaagtgcttcgccattctcaagctgtaccgtccgaaggtggataacagtgcggttgggacgagtaagaaaagtgacatggctgaggttaaggattggaaagcggttcgtgtggatctggtgatcacgccattcgagcagttcgcctatgcgctgctcggttggacgggcagcggccaatttcgtcgcgatctgcgtcgctatgcggaggaagagcgcgacatgctgctcgacaaccatcgtctctacgacctgaaaaagggcatctttctgagtgcggacagcgaagaagagattttcggtcatctgggtctggattatctggagccgtgggaacgcaacgcg

SEQ ID NO: 4550 - protein, 394 aa, synthetic construct
  REGION 1..394: note = Variant of terminal deoxynucleotidyl transferase
MHHHHHHGGSGHPEGNTPEKEVPSVIARHVSQYACQRKTTLNNYNKKFTDALEIMAENYKFKENLQACLSAKRAASVLKSLPFEVTSMKDIQGLPCITDDVRDVIEEIIEEGESSRVKEILNDERYKAFKQFTSVFGVGVKTSEKWYRMGLRTVEEAKASKSLKLSKMQKAGFLYYEDLASGVSKEEADAVTLIVKETVRTVSPDALVTIAGGFRRGKPMGHDVDLLITIPGRPEDDELLHKVVDLLKKQGLLLYEDIRESTFVEGQLPSPKPDALDNHQKCFAILKLYRPKVDNSAVGTSKKSDMAEVKDWKAVRVDLVITPFEQFAYALLGWTGSGQFRRDLRRYAEEERDMLLDNHRLYDLKKGIFLSADSEEEIFGHLGLDYLEPWERNA

SEQ ID NO: 4551 - DNA, 1182 bp, synthetic construct
  misc_feature 1..1182: note = Variant of terminal deoxynucleotidyl transferase
  source 1..1182: mol_type = other DNA
atgcatcaccaccatcatcatgggggttctggtcatccggaaggtaataccccggagaaggaggtgccgagcgttatcgcccgtcatgttagtcagtacgcgtgccagcgcaagaccacgctgaataactacaacaaaaagttcaccgacgcgctggagatcatggccgagaactacaaatttaaagagaacctgcaggcgtgtctggaagccaagcgcgccgcgagtgtcctgaaaagcctgccgttcgaggttaccagcatgaaagacatccaaggtctgccgtgcattaccgacgacgtacgtgacgtgatcgaggagatcatcgaagagggcgagagcagccgtgttaaagaaatcctcaatgacgagcgctacaaggcctttaagcagttcaccagcgtgttcggtgtgggcgtgaaaacctcggaaaagtggtaccgtatgggcctccgtacggttgaagaagcaaaggccagtaagagtctgaagctgagcaagatgcagaaggcgggcttcctgtattacgaggatctggcgagcggtgttagtaaagaagaagccgatgccgttacgctcatcgtgaaggaaacggtgcgtactgttagtccggatgcgctggtgaccatcgccggcggtttccgccgtggcaaacctatgggccacgacgttgacctgctgatcacgattccgggccgtcctgaagatgacgagctgctccacaaagtggttgatctgctcaagaagcaaggtctgctgctgtacgaagacatccgtgagagcacgttcgtggaggggcaactgccaagtcctaaacctgacgccctggacaaccatcagaagtgcttcgccattctcaagctgtaccgtccgaagagtgataacagtgcggttgggacgagtaagaaaagtgacatggctgaggttaaggattggaaagcggttcgtgtggatctggtgatcacgccattcgagcagttcgcctatgcgctgctcggttggacgggcagcggccaatttcgtcgcgatctgcgtcgctatgcggaggaagagcgcgacatgctgctcgacaaccatcgtctctacgacctgaaaaagggcatctttctgagtgcggacagcgaagaagagattttcggtcatctgggtctggattatctggagccgtgggaacgcaacgcg

SEQ ID NO: 4552 - protein, 394 aa, synthetic construct
  REGION 1..394: note = Variant of terminal deoxynucleotidyl transferase
MHHHHHHGGSGHPEGNTPEKEVPSVIARHVSQYACQRKTTLNNYNKKFTDALEIMAENYKFKENLQACLEAKRAASVLKSLPFEVTSMKDIQGLPCITDDVRDVIEEIIEEGESSRVKEILNDERYKAFKQFTSVFGVGVKTSEKWYRMGLRTVEEAKASKSLKLSKMQKAGFLYYEDLASGVSKEEADAVTLIVKETVRTVSPDALVTIAGGFRRGKPMGHDVDLLITIPGRPEDDELLHKVVDLLKKQGLLLYEDIRESTFVEGQLPSPKPDALDNHQKCFAILKLYRPKSDNSAVGTSKKSDMAEVKDWKAVRVDLVITPFEQFAYALLGWTGSGQFRRDLRRYAEEERDMLLDNHRLYDLKKGIFLSADSEEEIFGHLGLDYLEPWERNA

SEQ ID NO: 4553 - DNA, 1182 bp, synthetic construct
  misc_feature 1..1182: note = Variant of terminal deoxynucleotidyl transferase
  source 1..1182: mol_type = other DNA
atgcatcaccaccatcatcatgggggttctggtcatccggaaggtaataccccggagaaggaggtgccgagcgttatcgcccgtcatgttagtcagtacgcgtgccagcgcaagaccacgctgaataactacaacaaaaagttcaccgacgcgctggagatcatggccgagaactacaaatttaaagagaacctgcaggcgtgtctggaagccaagcgcgccgcgagtgtcctgaaaagcctgccgttcgaggttaccagcatgaaagacatccaaggtctgccgtgcattaccgacgacgtacgtgacgtgatcgaggagatcatcgaagagggcgagagcagccgtgttaaagaaatcctcaatgacgagcgctacaaggcctttaagcagttcaccagcgtgttcggtgtgggcgtgaaaacctcggaaaagtggtaccgtatgggcctccgtacggttgaagaagcaaaggccagtaagagtctgaagctgagcaagatgcagaaggcgggcttcctgtattacgaggatctggcgagcggtgttagtaaagaagaagccgatgccgttacgctcatcgtgaaggaaacggtgcgtactgttagtccggatgcgctggtgaccatcgccggcggtttccgccgtggcaaacctatgggccacgacgttgacctgctgatcacgattccgggccgtcctgaagatgacgagctgctccacaaagtggttgatctgctcaagaagcaaggtctgctgctgtacgaagacatccgtgagagcacgttcgtggaggggcaactgccaagtcctaaacctgacgccctggacaaccatcagaagtgcttcgccattctcaagctgtaccgtccgaaggtggataacagtgcggttgggacgacgaagaaaagtgacatggctgaggttaaggattggaaagcggttcgtgtggatctggtgatcacgccattcgagcagttcgcctatgcgctgctcggttggacgggcagcggccaatttcgtcgcgatctgcgtcgctatgcggaggaagagcgcgacatgctgctcgacaaccatcgtctctacgacctgaaaaagggcatctttctgagtgcggacagcgaagaagagattttcggtcatctgggtctggattatctggagccgtgggaacgcaacgcg

SEQ ID NO: 4554 - protein, 394 aa, synthetic construct
  REGION 1..394: note = Variant of terminal deoxynucleotidyl transferase
MHHHHHHGGSGHPEGNTPEKEVPSVIARHVSQYACQRKTTLNNYNKKFTDALEIMAENYKFKENLQACLEAKRAASVLKSLPFEVTSMKDIQGLPCITDDVRDVIEEIIEEGESSRVKEILNDERYKAFKQFTSVFGVGVKTSEKWYRMGLRTVEEAKASKSLKLSKMQKAGFLYYEDLASGVSKEEADAVTLIVKETVRTVSPDALVTIAGGFRRGKPMGHDVDLLITIPGRPEDDELLHKVVDLLKKQGLLLYEDIRESTFVEGQLPSPKPDALDNHQKCFAILKLYRPKVDNSAVGTTKKSDMAEVKDWKAVRVDLVITPFEQFAYALLGWTGSGQFRRDLRRYAEEERDMLLDNHRLYDLKKGIFLSADSEEEIFGHLGLDYLEPWERNA

SEQ ID NO: 4555 - DNA, 1182 bp, synthetic construct
  misc_feature 1..1182: note = Variant of terminal deoxynucleotidyl transferase
  source 1..1182: mol_type = other DNA
atgcatcaccaccatcatcatgggggttctggtcatccggaaggtaataccccggagaaggaggtgccgagcgttatcgcccgtcatgttagtcagtacgcgtgccagcgcaagaccacgctgaataactacaacaaaaagttcaccgacgcgctggagatcatggccgagaactacaaatttaaagagaacctgcaggcgtgtctggaagccaagcgcgccgcgagtgtcctgaaaagcctgccgttcgaggttaccagcatgaaagacatccaaggtctgccgtgcattaccgacgacgtacgtgacgtgatcgaggagatcatcgaagagggcgagagcagccgtgttaaagaaatcctcaatgacgagcgctacaaggcctttaagcagttcaccagcgtgttcggtgtgggcgtgaaaacctcggaaaagtggtaccgtatgggcctccgtacggttgaagaagcaaaggccagtaagagtctgaagctgagcaagatgcagtttgcgggcttcctgtattacgaggatctggcgagcggtgttagtaaagaagaagccgatgccgttacgctcatcgtgaaggaaacggtgcgtactgttagtccggatgcgctggtgaccatcgccggcggtttccgccgtggcaaacctatgggccacgacgttgacctgctgatcacgattccgggccgtcctgaagatgacgagctgctccacaaagtggttgatctgctcaagaagcaaggtctgctgctgtacgaagacatccgtgagagcacgttcgtggaggggcaactgccaagtcctaaacctgacgccctggacaaccatcagaagtgcttcgccattctcaagctgtaccgtccgaaggtggataacagtgcggttgggacgagtaagaaaagtgacatggctgaggttaaggattggaaagcggttcgtgtggatctggtgatcacgccattcgagcagttcgcctatgcgctgctcggttggacgggcagcggccaatttcgtcgcgatctgcgtcgctatgcggaggaagagcgcgacatgctgctcgacaaccatcgtctctacgacctgaaaaagggcatctttctgagtgcggacagcgaagaagagattttcggtcatctgggtctggattatctggagccgtgggaacgcaacgcg

SEQ ID NO: 4556 - protein, 394 aa, synthetic construct
  REGION 1..394: note = Variant of terminal deoxynucleotidyl transferase
MHHHHHHGGSGHPEGNTPEKEVPSVIARHVSQYACQRKTTLNNYNKKFTDALEIMAENYKFKENLQACLEAKRAASVLKSLPFEVTSMKDIQGLPCITDDVRDVIEEIIEEGESSRVKEILNDERYKAFKQFTSVFGVGVKTSEKWYRMGLRTVEEAKASKSLKLSKMQFAGFLYYEDLASGVSKEEADAVTLIVKETVRTVSPDALVTIAGGFRRGKPMGHDVDLLITIPGRPEDDELLHKVVDLLKKQGLLLYEDIRESTFVEGQLPSPKPDALDNHQKCFAILKLYRPKVDNSAVGTSKKSDMAEVKDWKAVRVDLVITPFEQFAYALLGWTGSGQFRRDLRRYAEEERDMLLDNHRLYDLKKGIFLSADSEEEIFGHLGLDYLEPWERNA

SEQ ID NO: 4557 - DNA, 1182 bp, synthetic construct
  misc_feature 1..1182: note = Variant of terminal deoxynucleotidyl transferase
  source 1..1182: mol_type = other DNA
atgcatcaccaccatcatcatgggggttctggtcatccggaaggtaataccccggagaaggaggtgccgagcgttatcgcccgtcatgttagtcagtacgcgtgccagcgcaagaccacgctgaataactacaacaaaaagttcaccgacgcgctggagatcatggccgagaactacaaatttaaagagaacctgcaggcgtgtctggaagccaagcgcgccgcgagtgtcctgaaaagcctgccgttcgaggttaccagcatgaaagacatccaaggtctgccgtgcattaccgacgacgtacgtgacgtgatcgaggagatcatcgaagagggcgagagcagccgtgttaaagaaatcctcaatgacgagcgctacaaggcctttaagcagttcaccagcgtgttcggtgtgggcgtgaaaacctcggaaaagtggtaccgtatgggcctccgtacggttgaagaagcaaaggccagtaagagtctgaagctgagcaagatgcagaaggcgggcttcctgtattacgaggatctggcgagcggtgttagtaaagaagaagccggtgccgttacgctcatcgtgaaggaaacggtgcgtactgttagtccggatgcgctggtgaccatcgccggcggtttccgccgtggcaaacctatgggccacgacgttgacctgctgatcacgattccgggccgtcctgaagatgacgagctgctccacaaagtggttgatctgctcaagaagcaaggtctgctgctgtacgaagacatccgtgagagcacgttcgtggaggggcaactgccaagtcctaaacctgacgccctggacaaccatcagaagtgcttcgccattctcaagctgtaccgtccgaaggtggataacagtgcggttgggacgagtaagaaaagtgacatggctgaggttaaggattggaaagcggttcgtgtggatctggtgatcacgccattcgagcagttcgcctatgcgctgctcggttggacgggcagcggccaatttcgtcgcgatctgcgtcgctatgcggaggaagagcgcgacatgctgctcgacaaccatcgtctctacgacctgaaaaagggcatctttctgagtgcggacagcgaagaagagattttcggtcatctgggtctggattatctggagccgtgggaacgcaacgcg

SEQ ID NO: 4558 - protein, 394 aa, synthetic construct
  REGION 1..394: note = Variant of terminal deoxynucleotidyl transferase
MHHHHHHGGSGHPEGNTPEKEVPSVIARHVSQYACQRKTTLNNYNKKFTDALEIMAENYKFKENLQACLEAKRAASVLKSLPFEVTSMKDIQGLPCITDDVRDVIEEIIEEGESSRVKEILNDERYKAFKQFTSVFGVGVKTSEKWYRMGLRTVEEAKASKSLKLSKMQKAGFLYYEDLASGVSKEEAGAVTLIVKETVRTVSPDALVTIAGGFRRGKPMGHDVDLLITIPGRPEDDELLHKVVDLLKKQGLLLYEDIRESTFVEGQLPSPKPDALDNHQKCFAILKLYRPKVDNSAVGTSKKSDMAEVKDWKAVRVDLVITPFEQFAYALLGWTGSGQFRRDLRRYAEEERDMLLDNHRLYDLKKGIFLSADSEEEIFGHLGLDYLEPWERNA

SEQ ID NO: 4559 - DNA, 1182 bp, synthetic construct
  misc_feature 1..1182: note = Variant of terminal deoxynucleotidyl transferase
  source 1..1182: mol_type = other DNA
atgcatcaccaccatcatcatgggggttctggtcatccggaaggtaataccccggagaaggaggtgccgagcgttatcgcccgtcatgttagtcagtacgcgtgccagcgcaagaccacgctgaataactacaacaaaaagttcaccgacgcgctggagatcatggccgagaactacaaatttaaagagaacctgcaggcgtgtctggaagccaagcgcgccgcgagtgtcctgaaaagcctgccgttcgaggttaccagcatgaaagacatccaaggtctgccgtgcattaccgacgacgtacgtgacgtgatcgaggagatcatcgaagagggcgagagcagccgtgttaaagaaatcctcaatgacgagcgctacaaggcctttaagcagttcaccagcgtgttcggtgtgggcgtgaaaacctcggaaaagtggtaccgtatgggcctccgtacggttgaagaagcaaaggccagtaagagtctgaagctgagcaagatgcagaaggcgggcttcctgtattacgaggatctggcgagcggtgttagtaaagaagaagccgatgccgttacgctcatcgtgaaggaaacggtgcgtactgttagtccggatgcgctggtgaccatcgccggcggtttccgccgtggcaaacctatgggccacgacgttgacctgctgatcacgattccgggccgtcctgaagatgacgagctgctccacaaagtggttgatctgctcaagaatcaaggtctgctgctgtacgaagacatccgtgagagcacgttcgtggaggggcaactgccaagtcctaaacctgacgccctggacaaccatcagaagtgcttcgccattctcaagctgtaccgtccgaaggtggataacagtgcggttgggacgagtaagaaaagtgacatggctgaggttaaggattggaaagcggttcgtgtggatctggtgatcacgccattcgagcagttcgcctatgcgctgctcggttggacgggcagcggccaatttcgtcgcgatctgcgtcgctatgcggaggaagagcgcgacatgctgctcgacaaccatcgtctctacgacctgaaaaagggcatctttctgagtgcggacagcgaagaagagattttcggtcatctgggtctggattatctggagccgtgggaacgcaacgcg

SEQ ID NO: 4560 - protein, 394 aa, synthetic construct
  REGION 1..394: note = Variant of terminal deoxynucleotidyl transferase
MHHHHHHGGSGHPEGNTPEKEVPSVIARHVSQYACQRKTTLNNYNKKFTDALEIMAENYKFKENLQACLEAKRAASVLKSLPFEVTSMKDIQGLPCITDDVRDVIEEIIEEGESSRVKEILNDERYKAFKQFTSVFGVGVKTSEKWYRMGLRTVEEAKASKSLKLSKMQKAGFLYYEDLASGVSKEEADAVTLIVKETVRTVSPDALVTIAGGFRRGKPMGHDVDLLITIPGRPEDDELLHKVVDLLKNQGLLLYEDIRESTFVEGQLPSPKPDALDNHQKCFAILKLYRPKVDNSAVGTSKKSDMAEVKDWKAVRVDLVITPFEQFAYALLGWTGSGQFRRDLRRYAEEERDMLLDNHRLYDLKKGIFLSADSEEEIFGHLGLDYLEPWERNA

SEQ ID NO: 4561 - DNA, 1182 bp, synthetic construct
  misc_feature 1..1182: note = Variant of terminal deoxynucleotidyl transferase
  source 1..1182: mol_type = other DNA
atgcatcaccaccatcatcatgggggttctggtcatccggaaggtaataccccggagaaggaggtgccgagcgttatcgcccgtcatgttagtcagtacgcgtgccagcgcaagaccacgctgaataactacaacaaaaagttcaccgacgcgctggagatcatggccgagaactacaaatttaaagagaacctgcaggcgtgtctggaagccaagcgcgccgcgagtgtcctgaaaagcctgccgttcgaggttaccagcatgaaagacatccaaggtctgccgtgcattaccgacgacgtacgtgacgtgatcgaggagatcatcgaagagggcgagagcagccgtgttaaagaaatcctcaatgacgagcgctacaaggcctttaagcagttcaccagcgtgttcggtgtgggcgtgaaaacctcggaaaagtggtaccgtatgggcctccgtacggttgaagaagcaaaggccagtaagagtctgaagctgagcaagatgcagaaggcgggcttcctgtattacgaggatctggcgagcggtgttagtaaagaagaagccgatgccgttacgctcatcgtgaaggaaacggtgcgtactgttagtccggatgcgctggtgaccatcgccggcggtttccgccgtggcaaacctatgggccacgacgttgacctgctgatcacgattccgggccgtcctgaagattatgagctgctccacaaagtggttgatctgctcaagaagcaaggtctgctgctgtacgaagacatccgtgagagcacgttcgtggaggggcaactgccaagtcctaaacctgacgccctggacaaccatcagaagtgcttcgccattctcaagctgtaccgtccgaaggtggataacagtgcggttgggacgagtaagaaaagtgacatggctgaggttaaggattggaaagcggttcgtgtggatctggtgatcacgccattcgagcagttcgcctatgcgctgctcggttggacgggcagcggccaatttcgtcgcgatctgcgtcgctatgcggaggaagagcgcgacatgctgctcgacaaccatcgtctctacgacctgaaaaagggcatctttctgagtgcggacagcgaagaagagattttcggtcatctgggtctggattatctggagccgtgggaacgcaacgcg

SEQ ID NO: 4562 - protein, 394 aa, synthetic construct
  REGION 1..394: note = Variant of terminal deoxynucleotidyl transferase
MHHHHHHGGSGHPEGNTPEKEVPSVIARHVSQYACQRKTTLNNYNKKFTDALEIMAENYKFKENLQACLEAKRAASVLKSLPFEVTSMKDIQGLPCITDDVRDVIEEIIEEGESSRVKEILNDERYKAFKQFTSVFGVGVKTSEKWYRMGLRTVEEAKASKSLKLSKMQKAGFLYYEDLASGVSKEEADAVTLIVKETVRTVSPDALVTIAGGFRRGKPMGHDVDLLITIPGRPEDYELLHKVVDLLKKQGLLLYEDIRESTFVEGQLPSPKPDALDNHQKCFAILKLYRPKVDNSAVGTSKKSDMAEVKDWKAVRVDLVITPFEQFAYALLGWTGSGQFRRDLRRYAEEERDMLLDNHRLYDLKKGIFLSADSEEEIFGHLGLDYLEPWERNA

SEQ ID NO: 4563 - DNA, 1182 bp, synthetic construct
  misc_feature 1..1182: note = Variant of terminal deoxynucleotidyl transferase
  source 1..1182: mol_type = other DNA
atgcatcaccaccatcatcatgggggttctggtcatccggaaggtaataccccggagaaggaggtgccgagcgttatcgcccgtcatgttagtcagtacgcgtgccagcgcaagaccacgctgaataactacaacaaaaagttcaccgacgcgctggagatcatggccgagaactacaaatttaaagagaacctgcaggcgtgtctggaagccaagcgcgccgcgagtgtcctgaaaagcctgccgttcgaggttaccagcatgaaagacatccaaggtctgccgtgcattaccgacgacgtacgtgacgtgatcgaggagatcatcgaagagggcgagagcagccgtgttaaagaaatcctcaatgacgagcgctacaaggcctttaagcagttcaccagcgtgttcggtgtgggcgtgaaaacctcggaaaagtggtaccgtatgggcctccgtacggttgaagaagcaaaggccagtaagagtctgaagctgagcaagatgcagaaggcgggcttcctgtattacgaggatctggcgagcggtgttagtaaagaagaagccgatgccgttacgctcatcgtgaaggaaacggtgcgtactgttagtccggatgcgctggtgaccatcgccggcggtttccgccgtggcaaacctagtggccacgacgttgacctgctgatcacgattccgggccgtcctgaagatgacgagctgctccacaaagtggttgatctgctcaagaagcaaggtctgctgctgtacgaagacatccgtgagagcacgttcgtggaggggcaactgccaagtcctaaacctgacgccctggacaaccatcagaagtgcttcgccattctcaagctgtaccgtccgaaggtggataacagtgcggttgggacgagtaagaaaagtgacatggctgaggttaaggattggaaagcggttcgtgtggatctggtgatcacgccattcgagcagttcgcctatgcgctgctcggttggacgggcagcggccaatttcgtcgcgatctgcgtcgctatgcggaggaagagcgcgacatgctgctcgacaaccatcgtctctacgacctgaaaaagggcatctttctgagtgcggacagcgaagaagagattttcggtcatctgggtctggattatctggagccgtgggaacgcaacgcg

SEQ ID NO: 4564 - protein, 394 aa, synthetic construct
  REGION 1..394: note = Variant of terminal deoxynucleotidyl transferase
MHHHHHHGGSGHPEGNTPEKEVPSVIARHVSQYACQRKTTLNNYNKKFTDALEIMAENYKFKENLQACLEAKRAASVLKSLPFEVTSMKDIQGLPCITDDVRDVIEEIIEEGESSRVKEILNDERYKAFKQFTSVFGVGVKTSEKWYRMGLRTVEEAKASKSLKLSKMQKAGFLYYEDLASGVSKEEADAVTLIVKETVRTVSPDALVTIAGGFRRGKPSGHDVDLLITIPGRPEDDELLHKVVDLLKKQGLLLYEDIRESTFVEGQLPSPKPDALDNHQKCFAILKLYRPKVDNSAVGTSKKSDMAEVKDWKAVRVDLVITPFEQFAYALLGWTGSGQFRRDLRRYAEEERDMLLDNHRLYDLKKGIFLSADSEEEIFGHLGLDYLEPWERNA

SEQ ID NO: 4565 - DNA, 1182 bp, synthetic construct
  misc_feature 1..1182: note = Variant of terminal deoxynucleotidyl transferase
  source 1..1182: mol_type = other DNA
atgcatcaccaccatcatcatgggggttctggtcatccggaaggtaataccccggagaaggaggtgccgagcgttatcgcccgtcatgttagtcagtacgcgtgccagcgcaagaccacgctgaataactacaacaaaaagttcaccgacgcgctggagatcatggccgagaactacaaatttaaagagaacctgcaggcgtgtctggaagccaagcgcgccgcgagtgtcctgaaaagcctgccgttcgaggttaccagcatgaaagacatccaaggtctgccgtgcattaccgacgacgtacgtgacgtgatcgaggagatcatcgaagagggcgagagcagccgtgttaaagaaatcctcaatgacgagcgctacaaggcctttaagcagttcaccagcgtgttcggtgtgggcgtgaaaacctcggaaaagtggtaccgtatgggcctccgtacggttgaagaagcaaaggccagtaagagtctgaagctgagcaagatgcagaaggcgggcttcctgtattacgaggatctggcgagcggtgttagtaaagaagaagccgatgccgttacgctcatcgtgaaggaaacggtgcgtactgttagtccggatgcgctggtgaccatcgccggcggtttccgccgtggcaaacctatgggccacgacgttgacctgctgatcacgattccgggccgtcctgaagatgacgagctgctccacaaagtggttggtctgctcaagaagcaaggtctgctgctgtacgaagacatccgtgagagcacgttcgtggaggggcaactgccaagtcctaaacctgacgccctggacaaccatcagaagtgcttcgccattctcaagctgtaccgtccgaaggtggataacagtgcggttgggacgagtaagaaaagtgacatggctgaggttaaggattggaaagcggttcgtgtggatctggtgatcacgccattcgagcagttcgcctatgcgctgctcggttggacgggcagcggccaatttcgtcgcgatctgcgtcgctatgcggaggaagagcgcgacatgctgctcgacaaccatcgtctctacgacctgaaaaagggcatctttctgagtgcggacagcgaagaagagattttcggtcatctgggtctggattatctggagccgtgggaacgcaacgcg

SEQ ID NO: 4566 - protein, 394 aa, synthetic construct
  REGION 1..394: note = Variant of terminal deoxynucleotidyl transferase
MHHHHHHGGSGHPEGNTPEKEVPSVIARHVSQYACQRKTTLNNYNKKFTDALEIMAENYKFKENLQACLEAKRAASVLKSLPFEVTSMKDIQGLPCITDDVRDVIEEIIEEGESSRVKEILNDERYKAFKQFTSVFGVGVKTSEKWYRMGLRTVEEAKASKSLKLSKMQKAGFLYYEDLASGVSKEEADAVTLIVKETVRTVSPDALVTIAGGFRRGKPMGHDVDLLITIPGRPEDDELLHKVVGLLKKQGLLLYEDIRESTFVEGQLPSPKPDALDNHQKCFAILKLYRPKVDNSAVGTSKKSDMAEVKDWKAVRVDLVITPFEQFAYALLGWTGSGQFRRDLRRYAEEERDMLLDNHRLYDLKKGIFLSADSEEEIFGHLGLDYLEPWERNA

SEQ ID NO: 4567 - DNA, 1182 bp, synthetic construct
  misc_feature 1..1182: note = Variant of terminal deoxynucleotidyl transferase
  source 1..1182: mol_type = other DNA
atgcatcaccaccatcatcatgggggttctggtcatccggaaggtaataccccggagaaggaggtgccgagcgttatcgcccgtcatgttagtcagtacgcgtgccagcgcaagaccacgctgaataactacaacaaaaagttcaccgacgcgctggagatcatggccgagaactacaaatttaaagagaacctgcaggcgtgtctggaagccaagcgcgccgcgagtgtcctgaaaagcctgccgttcgaggttaccagcatgaaagacatccaaggtctgccgtgcattaccgacgacgtacgtgacgtgatcgaggagatcatcgaagagggcgagagcagccgtgttaaagaaatcctcaatgacgagcgctacaaggcctttaagcagttcaccagcgtgttcggtgtgggcgtgaaaacctcggaaaagtggtaccgtatgggcctccgtacggttgaagaagcaaaggccagtaagagtctgaagctgagcaagatgcagaaggcgggcttcctgtattacgaggatctggcgagcggtgttagtaaagaagaagccgatgccgttacgctcatcgtgaaggaaacggtgcgtactgttagtccggatgcgctggtgaccatcgccggcggtttccgccgtggcaaacctatgggccacgacgttgacctgctgatcacgattccgggccgtcctgaagatgacgagctgctccacaaagtggttgatctgctcaagaagcaaggtctgctgctgtacgaagacatccgtgagagcacgttcgtggaggggcaactgccaagtcctaaacctgacgccctggacaaccatcagaagtgcttcgccattctcaagctgtaccgtccgaaggtggataacagtgcggttgggacgagtaagaaaagtgacatggaggaggttaaggattggaaagcggttcgtgtggatctggtgatcacgccattcgagcagttcgcctatgcgctgctcggttggacgggcagcggccaatttcgtcgcgatctgcgtcgctatgcggaggaagagcgcgacatgctgctcgacaaccatcgtctctacgacctgaaaaagggcatctttctgagtgcggacagcgaagaagagattttcggtcatctgggtctggattatctggagccgtgggaacgcaacgcg

SEQ ID NO: 4568 - protein, 394 aa, synthetic construct
  REGION 1..394: note = Variant of terminal deoxynucleotidyl transferase
MHHHHHHGGSGHPEGNTPEKEVPSVIARHVSQYACQRKTTLNNYNKKFTDALEIMAENYKFKENLQACLEAKRAASVLKSLPFEVTSMKDIQGLPCITDDVRDVIEEIIEEGESSRVKEILNDERYKAFKQFTSVFGVGVKTSEKWYRMGLRTVEEAKASKSLKLSKMQKAGFLYYEDLASGVSKEEADAVTLIVKETVRTVSPDALVTIAGGFRRGKPMGHDVDLLITIPGRPEDDELLHKVVDLLKKQGLLLYEDIRESTFVEGQLPSPKPDALDNHQKCFAILKLYRPKVDNSAVGTSKKSDMEEVKDWKAVRVDLVITPFEQFAYALLGWTGSGQFRRDLRRYAEEERDMLLDNHRLYDLKKGIFLSADSEEEIFGHLGLDYLEPWERNA

SEQ ID NO: 4569 - DNA, 1182 bp, synthetic construct
  misc_feature 1..1182: note = Variant of terminal deoxynucleotidyl transferase
  source 1..1182: mol_type = other DNA
atgcatcaccaccatcatcatgggggttctggtcatccggaaggtaataccccggagaaggaggtgccgagcgttatcgcccgtcatgttagtcagtacgcgtgccagcgcaagaccacgctgaataactacaacaaaaagttcaccgacgcgctggagatcatggccgagaactacaaatttaaagagaacctgcaggcgtgtctggaagccaagcgcgccgcgagtgtcctgaaaagcctgccgttcgaggttaccagcatgaaagacatccaaggtctgccgtgcattaccgacgacgtacgtgacgtgatcgaggagatcatcgaagagggcgagagcagccgtgttaaagaaatcctcaatgacgagcgctacaaggcctttaagcagttcaccagcgtgttcggtgtgggcgtgaaaacctcggaaaagtggtaccgtatgggcctccgtacggttgaagaagcaaaggccagtaagagtctgaagctgagcaagatgcagaaggcgggcttcctgtattacgaggatctggcgagcggtgttagtaaagaagaagccgatgccgttacgctcatcgtgaaggaaacggtgcgtactgttagtccggatgcgctggtgaccatcgccggcggtttccgccgtggcaaacctatgggccacgacgttgacctgctgatcacgattccgggccgtcctgaagatgacgagctgctccacaaagtggttgatctgctcaagaagcaaggtctgctgctgtacgaagacatccgtgagagcacgttcgtggaggggcaactgccaagtcctaaacctgacgccctggacaaccatcagaagtgcttcgccattctcaagctgtaccgtcgtaaggtggataacagtgcggttgggacgagtaagaaaagtgacatggctgaggttaaggattggaaagcggttcgtgtggatctggtgatcacgccattcgagcagttcgcctatgcgctgctcggttggacgggcagcggccaatttcgtcgcgatctgcgtcgctatgcggaggaagagcgcgacatgctgctcgacaaccatcgtctctacgacctgaaaaagggcatctttctgagtgcggacagcgaagaagagattttcggtcatctgggtctggattatctggagccgtgggaacgcaacgcg

SEQ ID NO: 4570 - protein, 394 aa, synthetic construct
  REGION 1..394: note = Variant of terminal deoxynucleotidyl transferase
MHHHHHHGGSGHPEGNTPEKEVPSVIARHVSQYACQRKTTLNNYNKKFTDALEIMAENYKFKENLQACLEAKRAASVLKSLPFEVTSMKDIQGLPCITDDVRDVIEEIIEEGESSRVKEILNDERYKAFKQFTSVFGVGVKTSEKWYRMGLRTVEEAKASKSLKLSKMQKAGFLYYEDLASGVSKEEADAVTLIVKETVRTVSPDALVTIAGGFRRGKPMGHDVDLLITIPGRPEDDELLHKVVDLLKKQGLLLYEDIRESTFVEGQLPSPKPDALDNHQKCFAILKLYRRKVDNSAVGTSKKSDMAEVKDWKAVRVDLVITPFEQFAYALLGWTGSGQFRRDLRRYAEEERDMLLDNHRLYDLKKGIFLSADSEEEIFGHLGLDYLEPWERNA

SEQ ID NO: 4571 - DNA, 1182 bp, synthetic construct
  misc_feature 1..1182: note = Variant of terminal deoxynucleotidyl transferase
  source 1..1182: mol_type = other DNA
atgcatcaccaccatcatcatgggggttctggtcatccggaaggtaataccccggagaaggaggtgccgagcgttatcgcccgtcatgttagtcagtacgcgtgccagcgcaagaccacgctgaataactacaacaaaaagttcaccgacgcgctggagatcatggccgagaactacaaatttaaagagaacctgcaggcgtgtctggaagccaagcgcgccgcgagtgtcctgaaaagcctgccgttcgaggttaccagcatgaaagacatccaaggtctgccgtgcattaccgacgacgtacgtgacgtgatcgaggagatcatcgaagagggcgagagcagccgtgttaaagaaatcctcaatgacgagcgctacaaggcctttaagcagttcaccagcgtgttcggtgtgggcgtgaaaacctcggaaaagtggtaccgtatgggcctccgtacggttgaagaagcaaaggccagtaagagtctgaagctgagcaagatgcagaaggcgggcttcctgtattacgaggatctggcgagcggtgttagtaaagaagaagccgatgccgttacgctcatcgtgaaggaaacggtgcgtactgttagtccggatgcgctggtgaccatcgccggcggtttccgccgtggcaaacctatgggccacgacgttgacctgctgatcacgattccgggccgtcctgaagatgacgagctgctccacaaagtggttgatctgctcaagaagcaaggtctgctgctgtacgaagacatccgtgagagcacgttcgtggaggggcaactgccaagtcctaaacctgacgccctggacaaccatcagaagtgcttcgccattctcaagctgtaccgtccgaaggtggataacagtgcggttgggacgagtaagaaaagtccgatggctgaggttaaggattggaaagcggttcgtgtggatctggtgatcacgccattcgagcagttcgcctatgcgctgctcggttggacgggcagcggccaatttcgtcgcgatctgcgtcgctatgcggaggaagagcgcgacatgctgctcgacaaccatcgtctctacgacctgaaaaagggcatctttctgagtgcggacagcgaagaagagattttcggtcatctgggtctggattatctggagccgtgggaacgcaacgcg

SEQ ID NO: 4572 - protein, 394 aa, synthetic construct
  REGION 1..394: note = Variant of terminal deoxynucleotidyl transferase
MHHHHHHGGSGHPEGNTPEKEVPSVIARHVSQYACQRKTTLNNYNKKFTDALEIMAENYKFKENLQACLEAKRAASVLKSLPFEVTSMKDIQGLPCITDDVRDVIEEIIEEGESSRVKEILNDERYKAFKQFTSVFGVGVKTSEKWYRMGLRTVEEAKASKSLKLSKMQKAGFLYYEDLASGVSKEEADAVTLIVKETVRTVSPDALVTIAGGFRRGKPMGHDVDLLITIPGRPEDDELLHKVVDLLKKQGLLLYEDIRESTFVEGQLPSPKPDALDNHQKCFAILKLYRPKVDNSAVGTSKKSPMAEVKDWKAVRVDLVITPFEQFAYALLGWTGSGQFRRDLRRYAEEERDMLLDNHRLYDLKKGIFLSADSEEEIFGHLGLDYLEPWERNA

SEQ ID NO: 4573 - DNA, 1182 bp, synthetic construct
  misc_feature 1..1182: note = Variant of terminal deoxynucleotidyl transferase
  source 1..1182: mol_type = other DNA
atgcatcaccaccatcatcatgggggttctggtcatccggaaggtaataccccggagaaggaggtgccgagcgttatcgcccgtcatgttagtcagtacgcgtgccagcgcaagaccacgctgaataactacaacaaaaagttcaccgacgcgctggagatcatggccgagaactacaaatttaaagagaacctgcaggcgtgtctggaagccaagcgcgccgcgagtgtcctgaaaagcctgccgttcgaggttaccagcatgaaagacatccaaggtctgccgtgcattaccgacgacgtacgtgacgtgatcgaggagatcatcgaagagggcgagagcagccgtgttaaagaaatcctcaatgacgagcgctacaaggcctttaagcagttcaccagcgtgttcggtgtgggcgtgaaaacctcggaaaagtggtaccgtatgggcctccgttgtgttgaagaagcaaaggccagtaagagtctgaagctgagcaagatgcagaaggcgggcttcctgtattacgaggatctggcgagcggtgttagtaaagaagaagccgatgccgttacgctcatcgtgaaggaaacggtgcgtactgttagtccggatgcgctggtgaccatcgccggcggtttccgccgtggcaaacctatgggccacgacgttgacctgctgatcacgattccgggccgtcctgaagatgacgagctgctccacaaagtggttgatctgctcaagaagcaaggtctgctgctgtacgaagacatccgtgagagcacgttcgtggaggggcaactgccaagtcctaaacctgacgccctggacaaccatcagaagtgcttcgccattctcaagctgtaccgtccgaaggtggataacagtgcggttgggacgagtaagaaaagtgacatggctgaggttaaggattggaaagcggttcgtgtggatctggtgatcacgccattcgagcagttcgcctatgcgctgctcggttggacgggcagcggccaatttcgtcgcgatctgcgtcgctatgcggaggaagagcgcgacatgctgctcgacaaccatcgtctctacgacctgaaaaagggcatctttctgagtgcggacagcgaagaagagattttcggtcatctgggtctggattatctggagccgtgggaacgcaacgcg

SEQ ID NO: 4574 - protein, 394 aa, synthetic construct
  REGION 1..394: note = Variant of terminal deoxynucleotidyl transferase
MHHHHHHGGSGHPEGNTPEKEVPSVIARHVSQYACQRKTTLNNYNKKFTDALEIMAENYKFKENLQACLEAKRAASVLKSLPFEVTSMKDIQGLPCITDDVRDVIEEIIEEGESSRVKEILNDERYKAFKQFTSVFGVGVKTSEKWYRMGLRCVEEAKASKSLKLSKMQKAGFLYYEDLASGVSKEEADAVTLIVKETVRTVSPDALVTIAGGFRRGKPMGHDVDLLITIPGRPEDDELLHKVVDLLKKQGLLLYEDIRESTFVEGQLPSPKPDALDNHQKCFAILKLYRPKVDNSAVGTSKKSDMAEVKDWKAVRVDLVITPFEQFAYALLGWTGSGQFRRDLRRYAEEERDMLLDNHRLYDLKKGIFLSADSEEEIFGHLGLDYLEPWERNA

SEQ ID NO: 4575 - DNA, 1182 bp, synthetic construct
  misc_feature 1..1182: note = Variant of terminal deoxynucleotidyl transferase
  source 1..1182: mol_type = other DNA
atgcatcaccaccatcatcatgggggttctggtcatccggaaggtaataccccggagaaggaggtgccgagcgttatcgcccgtcatgttagtcagtacgcgtgccagcgcaagaccacgctgaataactacaacaaaaagttcaccgacgcgctggagatcatggccgagaactacaaatttaaagagaacctgcaggcgtgtctggaagccaagcgcgccgcgagtgtcctgaaaagcctgccgttcgaggttaccagcatgaaagacatccaaggtctgccgtgcattaccgacgacgtacgtgacgtgatcgaggagatcatcgaagagggcgagagcagccgtgttaaagaaatcctcaatgacgagcgctacaaggcctttaagcagttcaccagcgtgttcggtgtgggcgtgaaaacctcggaaaagtggtaccgtatgggcctccgtacggttgaagaagcaaaggccagtaagagtctgaagctgagcaagatgcagaaggcgggcttcctgtattacgaggatctggcgagcggtgttagtaaagaagaagccgatgccgttacgctcatcgtgaaggaaacggtgcgtactgttagtccggatgcgctggtgaccatcgccggcggtttccgccgtggcaaacctatgggccacgacgttgacctgctgatcacgattccgggccgtcctgaagatgacgagctgctccacaaagtggttgatctgctcaagaagcaaggtctgctgctgtacgaagacatccgtgagagcacgttcgtggaggggcaactgccaagtcctaaacctgacgccctggacaaccatcagaagtgcttcgccattctcaagctgtaccgtccgaaggtggataacagtgcggttgggacgagtaagaaaagtgacatggctgagcgtaaggattggaaagcggttcgtgtggatctggtgatcacgccattcgagcagttcgcctatgcgctgctcggttggacgggcagcggccaatttcgtcgcgatctgcgtcgctatgcggaggaagagcgcgacatgctgctcgacaaccatcgtctctacgacctgaaaaagggcatctttctgagtgcggacagcgaagaagagattttcggtcatctgggtctggattatctggagccgtgggaacgcaacgcg

SEQ ID NO: 4576 - protein, 394 aa, synthetic construct
  REGION 1..394: note = Variant of terminal deoxynucleotidyl transferase
MHHHHHHGGSGHPEGNTPEKEVPSVIARHVSQYACQRKTTLNNYNKKFTDALEIMAENYKFKENLQACLEAKRAASVLKSLPFEVTSMKDIQGLPCITDDVRDVIEEIIEEGESSRVKEILNDERYKAFKQFTSVFGVGVKTSEKWYRMGLRTVEEAKASKSLKLSKMQKAGFLYYEDLASGVSKEEADAVTLIVKETVRTVSPDALVTIAGGFRRGKPMGHDVDLLITIPGRPEDDELLHKVVDLLKKQGLLLYEDIRESTFVEGQLPSPKPDALDNHQKCFAILKLYRPKVDNSAVGTSKKSDMAERKDWKAVRVDLVITPFEQFAYALLGWTGSGQFRRDLRRYAEEERDMLLDNHRLYDLKKGIFLSADSEEEIFGHLGLDYLEPWERNA

SEQ ID NO: 4577 - DNA, 1182 bp, synthetic construct
  misc_feature 1..1182: note = Variant of terminal deoxynucleotidyl transferase
  source 1..1182: mol_type = other DNA
atgcatcaccaccatcatcatgggggttctggtcatccggaaggtaataccccggagaaggaggtgccgagcgtttttgcccgtcatgttagtcagtacgcgtgccagcgcaagaccacgctgaataactacaacaaaaagttcaccgacgcgctggagatcatggccgagaactacaaatttaaagagaacctgcaggcgtgtctggaagccaagcgcgccgcgagtgtcctgaaaagcctgccgttcgaggttaccagcatgaaagacatccaaggtctgccgtgcattaccgacgacgtacgtgacgtgatcgaggagatcatcgaagagggcgagagcagccgtgttaaagaaatcctcaatgacgagcgctacaaggcctttaagcagttcaccagcgtgttcggtgtgggcgtgaaaacctcggaaaagtggtaccgtatgggcctccgtacggttgaagaagcaaaggccagtaagagtctgaagctgagcaagatgcagaaggcgggcttcctgtattacgaggatctggcgagcggtgttagtaaagaagaagccgatgccgttacgctcatcgtgaaggaaacggtgcgtactgttagtccggatgcgctggtgaccatcgccggcggtttccgccgtggcaaacctatgggccacgacgttgacctgctgatcacgattccgggccgtcctgaagatgacgagctgctccacaaagtggttgatctgctcaagaagcaaggtctgctgctgtacgaagacatccgtgagagcacgttcgtggaggggcaactgccaagtcctaaacctgacgccctggacaaccatcagaagtgcttcgccattctcaagctgtaccgtccgaaggtggataacagtgcggttgggacgagtaagaaaagtgacatggctgaggttaaggattggaaagcggttcgtgtggatctggtgatcacgccattcgagcagttcgcctatgcgctgctcggttggacgggcagcggccaatttcgtcgcgatctgcgtcgctatgcggaggaagagcgcgacatgctgctcgacaaccatcgtctctacgacctgaaaaagggcatctttctgagtgcggacagcgaagaagagattttcggtcatctgggtctggattatctggagccgtgggaacgcaacgcg

SEQ ID NO: 4578 - protein, 394 aa, synthetic construct
  REGION 1..394: note = Variant of terminal deoxynucleotidyl transferase
MHHHHHHGGSGHPEGNTPEKEVPSVFARHVSQYACQRKTTLNNYNKKFTDALEIMAENYKFKENLQACLEAKRAASVLKSLPFEVTSMKDIQGLPCITDDVRDVIEEIIEEGESSRVKEILNDERYKAFKQFTSVFGVGVKTSEKWYRMGLRTVEEAKASKSLKLSKMQKAGFLYYEDLASGVSKEEADAVTLIVKETVRTVSPDALVTIAGGFRRGKPMGHDVDLLITIPGRPEDDELLHKVVDLLKKQGLLLYEDIRESTFVEGQLPSPKPDALDNHQKCFAILKLYRPKVDNSAVGTSKKSDMAEVKDWKAVRVDLVITPFEQFAYALLGWTGSGQFRRDLRRYAEEERDMLLDNHRLYDLKKGIFLSADSEEEIFGHLGLDYLEPWERNA

SEQ ID NO: 4579 - DNA, 1182 bp, synthetic construct
  misc_feature 1..1182: note = Variant of terminal deoxynucleotidyl transferase
  source 1..1182: mol_type = other DNA
atgcatcaccaccatcatcatgggggttctggtcatccggaaggtaataccccggagaaggaggtgccgagcgttatcgcccgtcatgttagtcagtacgcgtgccagcgcaagaccacgctgaataactacaacaaaaagttcaccgacgcgctggagatcatggccgagaactacaaatttaaagagaacctgcaggcgtgtctggaagccaagcgcgccgcgagtgtcctgaaaagcctgccgttcgaggttaccagcatgaaagacatccaaggtctgccgtgcattaccgacgacgtacgtgacgtgatcgaggagatcatcgaagagggcgagagcagccgtgttaaagaaatcctcaatgacgagcgctacaaggcctttaagcagttcaccagcgtgttcggtgtgggcgtgaaaacctcggaaaagtggtaccgtatgggcctccgtacggttgaagaagcaaaggccagtaagagtctgaagctgagcaagatgcagaaggcgggcttcctgtattacgaggatctggcgagcggtgttagtaaagaagaagccgatgccgttacgctcatcgtgaaggaaacggtgcgtactgttagtccggatgcgctggtgaccatcgccggcggtttccgccgtggcaaacctatgggccacgacgttgacctgctgatcacgattccgggccgtcctgaagatgacgagctgctccacaaagtggttgatctgctcaagaagcaaggtctgctgctgtacgaagacatccgtgagagcacgttcgtggaggggcaactgccaagtcctaaacctgacgccctggacaaccatcagaagtgcttcgccattctcaagctgtaccgtccgaaggtggataacagtgcggttgggacgagtaagaaaagtactatggctgaggttaaggattggaaagcggttcgtgtggatctggtgatcacgccattcgagcagttcgcctatgcgctgctcggttggacgggcagcggccaatttcgtcgcgatctgcgtcgctatgcggaggaagagcgcgacatgctgctcgacaaccatcgtctctacgacctgaaaaagggcatctttctgagtgcggacagcgaagaagagattttcggtcatctgggtctggattatctggagccgtgggaacgcaacgcg

SEQ ID NO: 4580 - protein, 394 aa, synthetic construct
  REGION 1..394: note = Variant of terminal deoxynucleotidyl transferase
MHHHHHHGGSGHPEGNTPEKEVPSVIARHVSQYACQRKTTLNNYNKKFTDALEIMAENYKFKENLQACLEAKRAASVLKSLPFEVTSMKDIQGLPCITDDVRDVIEEIIEEGESSRVKEILNDERYKAFKQFTSVFGVGVKTSEKWYRMGLRTVEEAKASKSLKLSKMQKAGFLYYEDLASGVSKEEADAVTLIVKETVRTVSPDALVTIAGGFRRGKPMGHDVDLLITIPGRPEDDELLHKVVDLLKKQGLLLYEDIRESTFVEGQLPSPKPDALDNHQKCFAILKLYRPKVDNSAVGTSKKSTMAEVKDWKAVRVDLVITPFEQFAYALLGWTGSGQFRRDLRRYAEEERDMLLDNHRLYDLKKGIFLSADSEEEIFGHLGLDYLEPWERNA

SEQ ID NO: 4581 - DNA, 1182 bp, synthetic construct
  misc_feature 1..1182: note = Variant of terminal deoxynucleotidyl transferase
  source 1..1182: mol_type = other DNA
atgcatcaccaccatcatcatgggggttctggtcatccggaaggtaataccccggagaaggaggtgccgagcgttatcgcccgtcatgttagtcagtacgcgtgccagcgcaagaccacgctgaataactacaacaaaaagttcaccgacgcgctggagatcatggccgagaactacaaatttgcggagaacctgcaggcgtgtctggaagccaagcgcgccgcgagtgtcctgaaaagcctgccgttcgaggttaccagcatgaaagacatccaaggtctgccgtgcattaccgacgacgtacgtgacgtgatcgaggagatcatcgaagagggcgagagcagccgtgttaaagaaatcctcaatgacgagcgctacaaggcctttaagcagttcaccagcgtgttcggtgtgggcgtgaaaacctcggaaaagtggtaccgtatgggcctccgtacggttgaagaagcaaaggccagtaagagtctgaagctgagcaagatgcagaaggcgggcttcctgtattacgaggatctggcgagcggtgttagtaaagaagaagccgatgccgttacgctcatcgtgaaggaaacggtgcgtactgttagtccggatgcgctggtgaccatcgccggcggtttccgccgtggcaaacctatgggccacgacgttgacctgctgatcacgattccgggccgtcctgaagatgacgagctgctccacaaagtggttgatctgctcaagaagcaaggtctgctgctgtacgaagacatccgtgagagcacgttcgtggaggggcaactgccaagtcctaaacctgacgccctggacaaccatcagaagtgcttcgccattctcaagctgtaccgtccgaaggtggataacagtgcggttgggacgagtaagaaaagtgacatggctgaggttaaggattggaaagcggttcgtgtggatctggtgatcacgccattcgagcagttcgcctatgcgctgctcggttggacgggcagcggccaatttcgtcgcgatctgcgtcgctatgcggaggaagagcgcgacatgctgctcgacaaccatcgtctctacgacctgaaaaagggcatctttctgagtgcggacagcgaagaagagattttcggtcatctgggtctggattatctggagccgtgggaacgcaacgcg

SEQ ID NO: 4582 - protein, 394 aa, synthetic construct
  REGION 1..394: note = Variant of terminal deoxynucleotidyl transferase
MHHHHHHGGSGHPEGNTPEKEVPSVIARHVSQYACQRKTTLNNYNKKFTDALEIMAENYKFAENLQACLEAKRAASVLKSLPFEVTSMKDIQGLPCITDDVRDVIEEIIEEGESSRVKEILNDERYKAFKQFTSVFGVGVKTSEKWYRMGLRTVEEAKASKSLKLSKMQKAGFLYYEDLASGVSKEEADAVTLIVKETVRTVSPDALVTIAGGFRRGKPMGHDVDLLITIPGRPEDDELLHKVVDLLKKQGLLLYEDIRESTFVEGQLPSPKPDALDNHQKCFAILKLYRPKVDNSAVGTSKKSDMAEVKDWKAVRVDLVITPFEQFAYALLGWTGSGQFRRDLRRYAEEERDMLLDNHRLYDLKKGIFLSADSEEEIFGHLGLDYLEPWERNA

SEQ ID NO: 4583 - DNA, 1182 bp, synthetic construct
  misc_feature 1..1182: note = Variant of terminal deoxynucleotidyl transferase
  source 1..1182: mol_type = other DNA
atgcatcaccaccatcatcatgggggttctggtcatccggaaggtaataccccggagaaggaggtgccgagcgttatcgcccgtcatgttagtcagtacgcgtgccagcgcaagaccacgctgaataactacaacaaaaagttcaccgacgcgctggagatcatggccgagaactacaaatttaaagagaacctgcaggcgtgtctggaagccaagcgcgccgcgagtgtcctgaaaagcctgccgttcgaggttaccagcatgaaagacatccaaggtctgccgtgcattaccgacgacgtacgtgacgtgatcgaggagatcatcgaagagggcgagagcagccgtgttaaagaaatcctcaatgacgagcgctacaaggcctttaagcagttcaccagcgtgttcggtgtgggcgtgaaaacctcggaaaagtggtaccgtatgggcctccgtacggttgaagaagcaaaggccagtaagagtctgaagctgagcaagatgcagaaggcgggcttcctgtattacgaggatctggcgagcggtgttagtaaagaagaagccgatgccgttacgctcatcgtgaaggaaacggtgcgtactgttagtccggatgcgctggtgaccatcgccggcggtttccgccgtggcaaacctatgggccacgacgttgacctgctgatcacgattccgggccgtcctgaagatgacgagctgctccacaaagtggttgatctgctcaagaagcaaggtctgctgctgtacgaagacatccgtgagagcacgttcgtggaggggcaactgccaagtcctaaacctgacgccctggacaaccatcagaagtgcttcgccattctcaagctgtaccgtccgaaggtggataacagtgcggttgggacgagtaagaaaagtgacatggctgagcttaaggattggaaagcggttcgtgtggatctggtgatcacgccattcgagcagttcgcctatgcgctgctcggttggacgggcagcggccaatttcgtcgcgatctgcgtcgctatgcggaggaagagcgcgacatgctgctcgacaaccatcgtctctacgacctgaaaaagggcatctttctgagtgcggacagcgaagaagagattttcggtcatctgggtctggattatctggagccgtgggaacgcaacgcg

SEQ ID NO: 4584 - protein, 394 aa, synthetic construct
  REGION 1..394: note = Variant of terminal deoxynucleotidyl transferase
MHHHHHHGGSGHPEGNTPEKEVPSVIARHVSQYACQRKTTLNNYNKKFTDALEIMAENYKFKENLQACLEAKRAASVLKSLPFEVTSMKDIQGLPCITDDVRDVIEEIIEEGESSRVKEILNDERYKAFKQFTSVFGVGVKTSEKWYRMGLRTVEEAKASKSLKLSKMQKAGFLYYEDLASGVSKEEADAVTLIVKETVRTVSPDALVTIAGGFRRGKPMGHDVDLLITIPGRPEDDELLHKVVDLLKKQGLLLYEDIRESTFVEGQLPSPKPDALDNHQKCFAILKLYRPKVDNSAVGTSKKSDMAELKDWKAVRVDLVITPFEQFAYALLGWTGSGQFRRDLRRYAEEERDMLLDNHRLYDLKKGIFLSADSEEEIFGHLGLDYLEPWERNA

SEQ ID NO: 4585 - DNA, 1182 bp, synthetic construct
  misc_feature 1..1182: note = Variant of terminal deoxynucleotidyl transferase
  source 1..1182: mol_type = other DNA
atgcatcaccaccatcatcatgggggttctggtcatccggaaggtaataccccggagaaggaggtgccgagcgttatcgcccgtcatgttagtcagtacgcgtgccagcgcaagaccacgctgaataactacaacaaaaagttcaccgacgcgctggagatcatggccgagaactacaaatttaaagagaacctgcaggcgtgtctggaagccaagcgcgccgcgagtgtcctgaaaagcctgccgttcgaggttaccagcatgaaagacatccaaggtctgccgtgcattaccgacgacgtacgtgacgtgatcgaggagatcatcgaagagggcgagagcagccgtgttaaagaaatcctcaatgacgagcgctacaaggcctttaagcagttcaccagcgtgttcggtgtgggcgtgaaaacctcggaaaagtggtaccgtatgggcctccgtacggttgaagaagcaaaggccagtaagagtctgaagctgagcaagatgcagaaggcgggcttcctgtattacgaggatctggcgagcggtgttagtaaagaagaagccgatgccgttacgctcatcgtgaaggaaacggtgcgtactgttagtccggatgcgctggtgaccatcgccggcggtttccgccgtggcaaacctatgggccacgacgttgacctgctgatcacgattccgggccgtcctgaagatacggagctgctccacaaagtggttgatctgctcaagaagcaaggtctgctgctgtacgaagacatccgtgagagcacgttcgtggaggggcaactgccaagtcctaaacctgacgccctggacaaccatcagaagtgcttcgccattctcaagctgtaccgtccgaaggtggataacagtgcggttgggacgagtaagaaaagtgacatggctgaggttaaggattggaaagcggttcgtgtggatctggtgatcacgccattcgagcagttcgcctatgcgctgctcggttggacgggcagcggccaatttcgtcgcgatctgcgtcgctatgcggaggaagagcgcgacatgctgctcgacaaccatcgtctctacgacctgaaaaagggcatctttctgagtgcggacagcgaagaagagattttcggtcatctgggtctggattatctggagccgtgggaacgcaacgcg

SEQ ID NO: 4586 - protein, 394 aa, synthetic construct
  REGION 1..394: note = Variant of terminal deoxynucleotidyl transferase
MHHHHHHGGSGHPEGNTPEKEVPSVIARHVSQYACQRKTTLNNYNKKFTDALEIMAENYKFKENLQACLEAKRAASVLKSLPFEVTSMKDIQGLPCITDDVRDVIEEIIEEGESSRVKEILNDERYKAFKQFTSVFGVGVKTSEKWYRMGLRTVEEAKASKSLKLSKMQKAGFLYYEDLASGVSKEEADAVTLIVKETVRTVSPDALVTIAGGFRRGKPMGHDVDLLITIPGRPEDTELLHKVVDLLKKQGLLLYEDIRESTFVEGQLPSPKPDALDNHQKCFAILKLYRPKVDNSAVGTSKKSDMAEVKDWKAVRVDLVITPFEQFAYALLGWTGSGQFRRDLRRYAEEERDMLLDNHRLYDLKKGIFLSADSEEEIFGHLGLDYLEPWERNA

SEQ ID NO: 4587 - DNA, 1182 bp, synthetic construct
  misc_feature 1..1182: note = Variant of terminal deoxynucleotidyl transferase
  source 1..1182: mol_type = other DNA
atgcatcaccaccatcatcatgggggttctggtcatccggaaggtaataccccggagaaggaggtgccgagcgttatcgcccgtcatgttagtcagtacgcgtgccagcgcaagaccacgctgaataactacaacaaaaagttcaccgacgcgctggagatcatggccgagaactacaaatttaaagagaacctgcaggcgtgtctggaagccaagcgcgccgcgagtgtcctgaaaagcctgccgttcgaggttaccagcatgaaagacatccaaggtctgccgtgcattaccgacgacgtacgtgacgtgatcgaggagatcatcgaagagggcgagagcagccgtgttaaagaaatcctcaatgacgagcgctacaaggcctttaagcagttcaccagcgtgttcggtgtgggcgtgaaaacctcggaaaagtggtaccgtatgggcctccgtacggttgaagaagcaaaggccagtaagagtctgaagctgagcaagatgcagaaggcgggcttcctgtattacgaggatctggcgagcggtgttagtaaagaagaagccgatgccgttacgctcatcgtgaaggaaacggtgcgtactgttagtccggatgcgctggtgaccatcgccggcggtttccgccgtggcaaacctatgggccacgacgttgacctgctgatcacgattccgggccgtcctgaagatgacgagctgctccacaaagtggttgatctgctcaagaagcaaggtctgctgctgtacgaagacatccgtgagagcacgttcgtggaggggcaactgccaagtcctaaacctgacgccctggacaaccatcagaagtgcttcgccattctcaagctgtaccgtccgaaggtggataacagtgcggttgggacgagttgtaaaagtgacatggctgaggttaaggattggaaagcggttcgtgtggatctggtgatcacgccattcgagcagttcgcctatgcgctgctcggttggacgggcagcggccaatttcgtcgcgatctgcgtcgctatgcggaggaagagcgcgacatgctgctcgacaaccatcgtctctacgacctgaaaaagggcatctttctgagtgcggacagcgaagaagagattttcggtcatctgggtctggattatctggagccgtgggaacgcaacgcg

SEQ ID NO: 4588 - protein, 394 aa, synthetic construct
  REGION 1..394: note = Variant of terminal deoxynucleotidyl transferase
MHHHHHHGGSGHPEGNTPEKEVPSVIARHVSQYACQRKTTLNNYNKKFTDALEIMAENYKFKENLQACLEAKRAASVLKSLPFEVTSMKDIQGLPCITDDVRDVIEEIIEEGESSRVKEILNDERYKAFKQFTSVFGVGVKTSEKWYRMGLRTVEEAKASKSLKLSKMQKAGFLYYEDLASGVSKEEADAVTLIVKETVRTVSPDALVTIAGGFRRGKPMGHDVDLLITIPGRPEDDELLHKVVDLLKKQGLLLYEDIRESTFVEGQLPSPKPDALDNHQKCFAILKLYRPKVDNSAVGTSCKSDMAEVKDWKAVRVDLVITPFEQFAYALLGWTGSGQFRRDLRRYAEEERDMLLDNHRLYDLKKGIFLSADSEEEIFGHLGLDYLEPWERNA

SEQ ID NO: 4589 - DNA, 1182 bp, synthetic construct
  misc_feature 1..1182: note = Variant of terminal deoxynucleotidyl transferase
  source 1..1182: mol_type = other DNA
atgcatcaccaccatcatcatgggggttctggtcatccggaaggtaataccccggagaaggaggtgccgagcgttatcgcccgtcatgttagtcagtacgcgtgccagcgcaagaccacgctgaataactacaacaaaaagttcaccgacgcgctggagatcatggccgagaactacaaatttaaagagaacctgcaggcgtgtctggaagccaagcgcgccgcgagtgtcctgaaaagcctgccgttcgaggttaccagcatgaaagacatccaaggtctgccgtgcattaccgacgacgtacgtgacgtgatcgaggagatcatcgaagagggcgagagcagccgtgttaaagaaatcctcaatgacgagcgctacaaggcctttaagcagttcaccagcgtgttcggtgtgggcgtgaaaacctcggaaaagtggtaccgtatgggcctccgtacggttgaagaagcaaaggccagtaagagtctgaagctgagcaagatgcagaaggcgggcttcctgtattacgaggatctggcgagcggtgttagtaaagaagaagccgatgccgttacgctcatcgtgaaggaaacggtgcgtactgttagtccggatgcgctggtgaccatcgccggcggtttccgccgtggcaaacctatgggccacgacgttgacctgctgatcacgattccgggccgtcctgaagatgacgagctgctccacaaagtggttgatctgctcaagaagcaaggtctgctgctgtacgaagacatccgtgagagcacgttcgtggaggggcaactgccaagtcctaaacctgacgccctggacaaccatcagaagtgcttcgccattctcaagctgtaccgtccgaaggtggataacagtgcggttgggacgagtaagaaaagtgttatggctgaggttaaggattggaaagcggttcgtgtggatctggtgatcacgccattcgagcagttcgcctatgcgctgctcggttggacgggcagcggccaatttcgtcgcgatctgcgtcgctatgcggaggaagagcgcgacatgctgctcgacaaccatcgtctctacgacctgaaaaagggcatctttctgagtgcggacagcgaagaagagattttcggtcatctgggtctggattatctggagccgtgggaacgcaacgcg

SEQ ID NO: 4590 - protein, 394 aa, synthetic construct
  REGION 1..394: note = Variant of terminal deoxynucleotidyl transferase
MHHHHHHGGSGHPEGNTPEKEVPSVIARHVSQYACQRKTTLNNYNKKFTDALEIMAENYKFKENLQACLEAKRAASVLKSLPFEVTSMKDIQGLPCITDDVRDVIEEIIEEGESSRVKEILNDERYKAFKQFTSVFGVGVKTSEKWYRMGLRTVEEAKASKSLKLSKMQKAGFLYYEDLASGVSKEEADAVTLIVKETVRTVSPDALVTIAGGFRRGKPMGHDVDLLITIPGRPEDDELLHKVVDLLKKQGLLLYEDIRESTFVEGQLPSPKPDALDNHQKCFAILKLYRPKVDNSAVGTSKKSVMAEVKDWKAVRVDLVITPFEQFAYALLGWTGSGQFRRDLRRYAEEERDMLLDNHRLYDLKKGIFLSADSEEEIFGHLGLDYLEPWERNA

SEQ ID NO: 4591 - DNA, 1182 bp, synthetic construct
  misc_feature 1..1182: note = Variant of terminal deoxynucleotidyl transferase
  source 1..1182: mol_type = other DNA
atgcatcaccaccatcatcatgggggttctggtcatccggaaggtaataccccggagaaggaggtgccgagcgttatcgcccgtcatgttagtcagtacgcgtgccagcgcaagaccacgctgaataactacaacaaaaagttcaccgacgcgctggagatcatggccgagaactacaaatttaaagagaacctgcaggcgtgtctggaagccaagcgcgccgcgagtgtcctgaaaagcctgccgttcgaggttaccagcatgaaagacatccaaggtctgccgtgcattaccgacgacgtacgtgacgtgatcgaggagatcatcgaagagggcgagagcagccgtgttaaagaaatcctcaatgacgagcgctacaaggcctttaagcagttcaccagcgtgttcggtgtgggcgtgaaaacctcggaaaagtggtaccgtatgggcctccgtacggttgaagaagcaaaggccagtaagagtctgaagctgagcaagatgcagaaggcgggcttcctgtattacgaggatctggcgagcggtgttagtaaagaagaagccgatgccgttacgctcatcgtgaaggaaacggtgcgtactgttagtccggatgcgctggtgaccatcgccggcggtttccgccgtggcaaacctatgggccacgacgttgacctgctgatcacgattccgggccgtcctgaagatgactcgctgctccacaaagtggttgatctgctcaagaagcaaggtctgctgctgtacgaagacatccgtgagagcacgttcgtggaggggcaactgccaagtcctaaacctgacgccctggacaaccatcagaagtgcttcgccattctcaagctgtaccgtccgaaggtggataacagtgcggttgggacgagtaagaaaagtgacatggctgaggttaaggattggaaagcggttcgtgtggatctggtgatcacgccattcgagcagttcgcctatgcgctgctcggttggacgggcagcggccaatttcgtcgcgatctgcgtcgctatgcggaggaagagcgcgacatgctgctcgacaaccatcgtctctacgacctgaaaaagggcatctttctgagtgcggacagcgaagaagagattttcggtcatctgggtctggattatctggagccgtgggaacgcaacgcg

SEQ ID NO: 4592 - protein, 394 aa, synthetic construct
  REGION 1..394: note = Variant of terminal deoxynucleotidyl transferase
MHHHHHHGGSGHPEGNTPEKEVPSVIARHVSQYACQRKTTLNNYNKKFTDALEIMAENYKFKENLQACLEAKRAASVLKSLPFEVTSMKDIQGLPCITDDVRDVIEEIIEEGESSRVKEILNDERYKAFKQFTSVFGVGVKTSEKWYRMGLRTVEEAKASKSLKLSKMQKAGFLYYEDLASGVSKEEADAVTLIVKETVRTVSPDALVTIAGGFRRGKPMGHDVDLLITIPGRPEDDSLLHKVVDLLKKQGLLLYEDIRESTFVEGQLPSPKPDALDNHQKCFAILKLYRPKVDNSAVGTSKKSDMAEVKDWKAVRVDLVITPFEQFAYALLGWTGSGQFRRDLRRYAEEERDMLLDNHRLYDLKKGIFLSADSEEEIFGHLGLDYLEPWERNA

SEQ ID NO: 4593 - DNA, 1182 bp, synthetic construct
  misc_feature 1..1182: note = Variant of terminal deoxynucleotidyl transferase
  source 1..1182: mol_type = other DNA
atgcatcaccaccatcatcatgggggttctggtcatccggaaggtaataccccggagaaggaggtgccgagcgttatcgcccgtcatgttagtcagtacgcgtgccagcgcaagaccacgctgaataactacaacaaaaagttcaccgacgcgctggagatcatggccgagaactacaaatttaaagagaacctgcaggcgtgtctggaagccaagcgcgccgcgagtgtcctgaaaagcctgccgttcgaggttaccagcatgaaagacatccaaggtctgccgtgcattaccaatgacgtacgtgacgtgatcgaggagatcatcgaagagggcgagagcagccgtgttaaagaaatcctcaatgacgagcgctacaaggcctttaagcagttcaccagcgtgttcggtgtgggcgtgaaaacctcggaaaagtggtaccgtatgggcctccgtacggttgaagaagcaaaggccagtaagagtctgaagctgagcaagatgcagaaggcgggcttcctgtattacgaggatctggcgagcggtgttagtaaagaagaagccgatgccgttacgctcatcgtgaaggaaacggtgcgtactgttagtccggatgcgctggtgaccatcgccggcggtttccgccgtggcaaacctatgggccacgacgttgacctgctgatcacgattccgggccgtcctgaagatgacgagctgctccacaaagtggttgatctgctcaagaagcaaggtctgctgctgtacgaagacatccgtgagagcacgttcgtggaggggcaactgccaagtcctaaacctgacgccctggacaaccatcagaagtgcttcgccattctcaagctgtaccgtccgaaggtggataacagtgcggttgggacgagtaagaaaagtgacatggctgaggttaaggattggaaagcggttcgtgtggatctggtgatcacgccattcgagcagttcgcctatgcgctgctcggttggacgggcagcggccaatttcgtcgcgatctgcgtcgctatgcggaggaagagcgcgacatgctgctcgacaaccatcgtctctacgacctgaaaaagggcatctttctgagtgcggacagcgaagaagagattttcggtcatctgggtctggattatctggagccgtgggaacgcaacgcg

SEQ ID NO: 4594 - protein, 394 aa, synthetic construct
  REGION 1..394: note = Variant of terminal deoxynucleotidyl transferase
MHHHHHHGGSGHPEGNTPEKEVPSVIARHVSQYACQRKTTLNNYNKKFTDALEIMAENYKFKENLQACLEAKRAASVLKSLPFEVTSMKDIQGLPCITNDVRDVIEEIIEEGESSRVKEILNDERYKAFKQFTSVFGVGVKTSEKWYRMGLRTVEEAKASKSLKLSKMQKAGFLYYEDLASGVSKEEADAVTLIVKETVRTVSPDALVTIAGGFRRGKPMGHDVDLLITIPGRPEDDELLHKVVDLLKKQGLLLYEDIRESTFVEGQLPSPKPDALDNHQKCFAILKLYRPKVDNSAVGTSKKSDMAEVKDWKAVRVDLVITPFEQFAYALLGWTGSGQFRRDLRRYAEEERDMLLDNHRLYDLKKGIFLSADSEEEIFGHLGLDYLEPWERNA

SEQ ID NO: 4595 - DNA, 1182 bp, synthetic construct
  misc_feature 1..1182: note = Variant of terminal deoxynucleotidyl transferase
  source 1..1182: mol_type = other DNA
atgcatcaccaccatcatcatgggggttctggtcatccggaaggtaataccccggagaaggaggtgccgagcgttatcgcccgtcatgttagtcagtacgcgtgccagcgcaagaccacgctgaataactacaacaaaaagttcaccgacgcgctggaggtgatggccgagaactacaaatttaaagagaacctgcaggcgtgtctggaagccaagcgcgccgcgagtgtcctgaaaagcctgccgttcgaggttaccagcatgaaagacatccaaggtctgccgtgcattaccgacgacgtacgtgacgtgatcgaggagatcatcgaagagggcgagagcagccgtgttaaagaaatcctcaatgacgagcgctacaaggcctttaagcagttcaccagcgtgttcggtgtgggcgtgaaaacctcggaaaagtggtaccgtatgggcctccgtacggttgaagaagcaaaggccagtaagagtctgaagctgagcaagatgcagaaggcgggcttcctgtattacgaggatctggcgagcggtgttagtaaagaagaagccgatgccgttacgctcatcgtgaaggaaacggtgcgtactgttagtccggatgcgctggtgaccatcgccggcggtttccgccgtggcaaacctatgggccacgacgttgacctgctgatcacgattccgggccgtcctgaagatgacgagctgctccacaaagtggttgatctgctcaagaagcaaggtctgctgctgtacgaagacatccgtgagagcacgttcgtggaggggcaactgccaagtcctaaacctgacgccctggacaaccatcagaagtgcttcgccattctcaagctgtaccgtccgaaggtggataacagtgcggttgggacgagtaagaaaagtgacatggctgaggttaaggattggaaagcggttcgtgtggatctggtgatcacgccattcgagcagttcgcctatgcgctgctcggttggacgggcagcggccaatttcgtcgcgatctgcgtcgctatgcggaggaagagcgcgacatgctgctcgacaaccatcgtctctacgacctgaaaaagggcatctttctgagtgcggacagcgaagaagagattttcggtcatctgggtctggattatctggagccgtgggaacgcaacgcg

SEQ ID NO: 4596 - protein, 394 aa, synthetic construct
  REGION 1..394: note = Variant of terminal deoxynucleotidyl transferase
MHHHHHHGGSGHPEGNTPEKEVPSVIARHVSQYACQRKTTLNNYNKKFTDALEVMAENYKFKENLQACLEAKRAASVLKSLPFEVTSMKDIQGLPCITDDVRDVIEEIIEEGESSRVKEILNDERYKAFKQFTSVFGVGVKTSEKWYRMGLRTVEEAKASKSLKLSKMQKAGFLYYEDLASGVSKEEADAVTLIVKETVRTVSPDALVTIAGGFRRGKPMGHDVDLLITIPGRPEDDELLHKVVDLLKKQGLLLYEDIRESTFVEGQLPSPKPDALDNHQKCFAILKLYRPKVDNSAVGTSKKSDMAEVKDWKAVRVDLVITPFEQFAYALLGWTGSGQFRRDLRRYAEEERDMLLDNHRLYDLKKGIFLSADSEEEIFGHLGLDYLEPWERNA

SEQ ID NO: 4597 - DNA, 1182 bp, synthetic construct
  misc_feature 1..1182: note = Variant of terminal deoxynucleotidyl transferase
  source 1..1182: mol_type = other DNA
atgcatcaccaccatcatcatgggggttctggtcatccggaaggtaataccccggagaaggaggtgccgagcgttatcgcccgtcatgttagtcagtacgcgtgccagcgcaagaccacgctgaataactacaacaaaaagttcaccgacgcgctggagatcatggccgagaactacaaatttaaagagaacctgcaggcgtgtctggaagccaagcgcgccgcgagtgtcctgaaaagcctgccgttcgaggttaccagcatgaaagacatccaaggtctgccgtgcattaccgacgacgtacgtgacgtgatcgaggagatcatcgaagagggcgagagcagccgtgttaaagaaatcctcaatgacgagcgctacaaggcctttaagcagttcaccagcgtgttcggtgtgggcgtgaaaacctcggaaaagtggtaccgtatgggcctccgtacggttgaagaagcaaaggccagtaagagtctgaagctgagcaagatgcagaaggcgggcttcctgtattacgaggatctggcgagcggtgttagtaaagaagaagccgatgccgttctgctcatcgtgaaggaaacggtgcgtactgttagtccggatgcgctggtgaccatcgccggcggtttccgccgtggcaaacctatgggccacgacgttgacctgctgatcacgattccgggccgtcctgaagatgacgagctgctccacaaagtggttgatctgctcaagaagcaaggtctgctgctgtacgaagacatccgtgagagcacgttcgtggaggggcaactgccaagtcctaaacctgacgccctggacaaccatcagaagtgcttcgccattctcaagctgtaccgtccgaaggtggataacagtgcggttgggacgagtaagaaaagtgacatggctgaggttaaggattggaaagcggttcgtgtggatctggtgatcacgccattcgagcagttcgcctatgcgctgctcggttggacgggcagcggccaatttcgtcgcgatctgcgtcgctatgcggaggaagagcgcgacatgctgctcgacaaccatcgtctctacgacctgaaaaagggcatctttctgagtgcggacagcgaagaagagattttcggtcatctgggtctggattatctggagccgtgggaacgcaacgcg

SEQ ID NO: 4598 - protein, 394 aa, synthetic construct
  REGION 1..394: note = Variant of terminal deoxynucleotidyl transferase
MHHHHHHGGSGHPEGNTPEKEVPSVIARHVSQYACQRKTTLNNYNKKFTDALEIMAENYKFKENLQACLEAKRAASVLKSLPFEVTSMKDIQGLPCITDDVRDVIEEIIEEGESSRVKEILNDERYKAFKQFTSVFGVGVKTSEKWYRMGLRTVEEAKASKSLKLSKMQKAGFLYYEDLASGVSKEEADAVLLIVKETVRTVSPDALVTIAGGFRRGKPMGHDVDLLITIPGRPEDDELLHKVVDLLKKQGLLLYEDIRESTFVEGQLPSPKPDALDNHQKCFAILKLYRPKVDNSAVGTSKKSDMAEVKDWKAVRVDLVITPFEQFAYALLGWTGSGQFRRDLRRYAEEERDMLLDNHRLYDLKKGIFLSADSEEEIFGHLGLDYLEPWERNA

SEQ ID NO: 4599 - DNA, 1182 bp, synthetic construct
  misc_feature 1..1182: note = Variant of terminal deoxynucleotidyl transferase
  source 1..1182: mol_type = other DNA
atgcatcaccaccatcatcatgggggttctggtcatccggaaggtaataccccggagaaggaggtgccgagcgttatcgcccgtcatgttagtcagtacgcgtgccagcgcaagaccacgctgaataactacaacaaaaagttcaccgacgcgctggagatcatggccgagaactacaaatttaaagagaacctgcaggcgtgtctggaagccaagcgcgccgcgagtgtcctgaaaagcctgccgttcgaggttaccagcatgaaagacatccaaggtctgccgtgcattaccgacgacgtacgtgacgtgatcgaggagatcatcgaagagggcgagagcagccgtgttaaagaaatcctcaatgacgagcgctacaaggcctttaagcagttcaccagcgtgttcggtgtgggcgtgaaaacctcggaaaagtggtaccgtatgggcctccgtacggttgaagaagcaaaggccagtaagagtctgaagctgagcaagatgcagaaggcgggcttcctgtattacgaggatctggcgagcggtgttagtaaagaagaagccgatgccgttacgctcatcgtgaaggaaacggtgcgtactgttagtccggatgcgctggtgaccatcgccggcggtttccgccgtggcaaacctatgggccacgacgttgacctgctgatcacgattccgggccgtcctgaagatgacgagctgctccacaaagtggttgatctgctcaagaagcaaggtctgctgctgtacgaagacatccgtgagagcacgttcgtggaggggcaactgccaagtcctaaacctgacgccctggacaaccatcagaagtgcttcgccattctcaagctgtaccgtccgaaggtggataacagtgcggttgggacggggaagaaaagtgacatggctgaggttaaggattggaaagcggttcgtgtggatctggtgatcacgccattcgagcagttcgcctatgcgctgctcggttggacgggcagcggccaatttcgtcgcgatctgcgtcgctatgcggaggaagagcgcgacatgctgctcgacaaccatcgtctctacgacctgaaaaagggcatctttctgagtgcggacagcgaagaagagattttcggtcatctgggtctggattatctggagccgtgggaacgcaacgcg

SEQ ID NO: 4600 - protein, 394 aa, synthetic construct
  REGION 1..394: note = Variant of terminal deoxynucleotidyl transferase
MHHHHHHGGSGHPEGNTPEKEVPSVIARHVSQYACQRKTTLNNYNKKFTDALEIMAENYKFKENLQACLEAKRAASVLKSLPFEVTSMKDIQGLPCITDDVRDVIEEIIEEGESSRVKEILNDERYKAFKQFTSVFGVGVKTSEKWYRMGLRTVEEAKASKSLKLSKMQKAGFLYYEDLASGVSKEEADAVTLIVKETVRTVSPDALVTIAGGFRRGKPMGHDVDLLITIPGRPEDDELLHKVVDLLKKQGLLLYEDIRESTFVEGQLPSPKPDALDNHQKCFAILKLYRPKVDNSAVGTGKKSDMAEVKDWKAVRVDLVITPFEQFAYALLGWTGSGQFRRDLRRYAEEERDMLLDNHRLYDLKKGIFLSADSEEEIFGHLGLDYLEPWERNA

SEQ ID NO: 4601 - DNA, 1182 bp, synthetic construct
  misc_feature 1..1182: note = Variant of terminal deoxynucleotidyl transferase
  source 1..1182: mol_type = other DNA
atgcatcaccaccatcatcatgggggttctggtcatccggaaggtaataccccggagaaggaggtgccgagcgttatcgcccgtcatgttagtcagtacgcgtgccagcgcaagaccacgctgaataactacaacaaaaagttcaccgacgcgctggagatcatggccgagaactacaaatttaaagagaacctgcaggcgtgtctggaagccaagcgcgccgcgagtgtcctgaaaagcctgccgttcgaggttaccagcatgaaagacatccaaggtctgccgtgcattaccgacgacgtacgtgacgtgatcgaggagatcatcgaagagggcgagagcagccgtgttaaagaaatcctcaatgacgagcgctacaaggcctttaagcagttcaccagcgtgttcggtgtgggcgtgaaaacctcggaaaagtggtaccgtatgggcctccgtacggttgaagaagcaaaggccagtaagagtctgaagctgagcaagatgcagaaggcgggcttcctgtattacgaggatctggcgagcggtgttagtaaagaagaagccgatgccgttacgctcatcgtgaaggaaacggtgcgtactgttagtccggatgcgctggtgaccatcgccggcggtttccgccgtggcaaacctatgggccacgacgttgacctgctgatcacgattccgggccgtcctgaagatgacgagctgctccacaaagtggttgatctgctcaagaagcaaggtctgctgctgtacgaagacatccgtgagagcacgttcgtggaggggcaactgccaagtcctaaacctgacgccctggacaaccatcagaagtgcttcgccattctcaagctgtaccgtccgaaggtggataacagtgcggttgggacgagtaagcagagtgacatggctgaggttaaggattggaaagcggttcgtgtggatctggtgatcacgccattcgagcagttcgcctatgcgctgctcggttggacgggcagcggccaatttcgtcgcgatctgcgtcgctatgcggaggaagagcgcgacatgctgctcgacaaccatcgtctctacgacctgaaaaagggcatctttctgagtgcggacagcgaagaagagattttcggtcatctgggtctggattatctggagccgtgggaacgcaacgcg

SEQ ID NO: 4602 - protein, 394 aa, synthetic construct
  REGION 1..394: note = Variant of terminal deoxynucleotidyl transferase
MHHHHHHGGSGHPEGNTPEKEVPSVIARHVSQYACQRKTTLNNYNKKFTDALEIMAENYKFKENLQACLEAKRAASVLKSLPFEVTSMKDIQGLPCITDDVRDVIEEIIEEGESSRVKEILNDERYKAFKQFTSVFGVGVKTSEKWYRMGLRTVEEAKASKSLKLSKMQKAGFLYYEDLASGVSKEEADAVTLIVKETVRTVSPDALVTIAGGFRRGKPMGHDVDLLITIPGRPEDDELLHKVVDLLKKQGLLLYEDIRESTFVEGQLPSPKPDALDNHQKCFAILKLYRPKVDNSAVGTSKQSDMAEVKDWKAVRVDLVITPFEQFAYALLGWTGSGQFRRDLRRYAEEERDMLLDNHRLYDLKKGIFLSADSEEEIFGHLGLDYLEPWERNA

SEQ ID NO: 4603 - DNA, 1182 bp, synthetic construct
  misc_feature 1..1182: note = Variant of terminal deoxynucleotidyl transferase
  source 1..1182: mol_type = other DNA
atgcatcaccaccatcatcatgggggttctggtcatccggaaggtaataccccggagaaggaggtgccgagcgttatcgcccgtcatgttagtcagtacgcgtgccagcgcaagaccacgctgaataactacaacaaaaagttcaccgacgcgctggagatcatggccgagaactacaaatttaaagagaacctgcaggcgtgtctggaagccaagcgcgccgcgagtgtcctgaaaagcctgccgttcgaggttaccagcatgaaagacatccaaggtctgccgtgcattaccgacgacgtacgtgacgtgatcgaggagatcatcgaagagggcgagagcagccgtgttaaagaaatcctcaatgacgagcgctacaaggcctttaagcagttcaccagcgtgttcggtgtgggcgtgaaaacctcggaaaagtggtaccgtatgggcctccgtacggttgaagaagcaaaggccagtaagagtctgaagctgagcaagatgcagaaggcgggcttcctgtattacgaggatctggcgagcggtgttagtaaagaagaagccgatgccgttacgctcatcgtgaaggaaacggtgcgtactgttagtccggatgcgctggtgaccatcgccggcggtttccgccgtggcaaacctatgggccacgacgttgacctgctgatcacgattccgggccgtcctgaagatgacgagctgctccacaaagtggttgatctgctcaagaagcaaggtctgctgctgtacgaagacatccgtgagagcacgttcgtggaggggcaactgccaagtcctaaacctgacgccctggacaaccatcagaagtgcttcgccattctcaagctgtaccgtccgaaggtggataacagtgcggttgggacgagtaagaaaagtgacatggcttctgttaaggattggaaagcggttcgtgtggatctggtgatcacgccattcgagcagttcgcctatgcgctgctcggttggacgggcagcggccaatttcgtcgcgatctgcgtcgctatgcggaggaagagcgcgacatgctgctcgacaaccatcgtctctacgacctgaaaaagggcatctttctgagtgcggacagcgaagaagagattttcggtcatctgggtctggattatctggagccgtgggaacgcaacgcg

SEQ ID NO: 4604 - protein, 394 aa, synthetic construct
  REGION 1..394: note = Variant of terminal deoxynucleotidyl transferase
MHHHHHHGGSGHPEGNTPEKEVPSVIARHVSQYACQRKTTLNNYNKKFTDALEIMAENYKFKENLQACLEAKRAASVLKSLPFEVTSMKDIQGLPCITDDVRDVIEEIIEEGESSRVKEILNDERYKAFKQFTSVFGVGVKTSEKWYRMGLRTVEEAKASKSLKLSKMQKAGFLYYEDLASGVSKEEADAVTLIVKETVRTVSPDALVTIAGGFRRGKPMGHDVDLLITIPGRPEDDELLHKVVDLLKKQGLLLYEDIRESTFVEGQLPSPKPDALDNHQKCFAILKLYRPKVDNSAVGTSKKSDMASVKDWKAVRVDLVITPFEQFAYALLGWTGSGQFRRDLRRYAEEERDMLLDNHRLYDLKKGIFLSADSEEEIFGHLGLDYLEPWERNA

SEQ ID NO: 4605 - DNA, 1182 bp, synthetic construct
  misc_feature 1..1182: note = Variant of terminal deoxynucleotidyl transferase
  source 1..1182: mol_type = other DNA
atgcatcaccaccatcatcatgggggttctggtcatccggaaggtaataccccggagaaggaggtgccgagcgttatcgcccgtcatgttagtcagtacgcgtgccagcgcaagaccacgctgaataactacaacaaaaagttcaccgacgcgctggagatcatggccgagaactacaaatttaaagagaacctgcaggcgtgtctggaagccaagcgcgccgcgagtgtcctgaaaagcctgccgttcgaggttaccagcatgaaagacatccaaggtctgccgtgcattaccgacgacgtacgtgacgtgatcgaggagatcatcgaagagggcgagagcagccgtgttaaagaaatcctcaatgacgagcgctacaaggcctttaagcagttcaccagcgtgttcggtgtgggcgtgaaaacctcggaaaagtggtaccgtatgggcctccgtatggttgaagaagcaaaggccagtaagagtctgaagctgagcaagatgcagaaggcgggcttcctgtattacgaggatctggcgagcggtgttagtaaagaagaagccgatgccgttacgctcatcgtgaaggaaacggtgcgtactgttagtccggatgcgctggtgaccatcgccggcggtttccgccgtggcaaacctatgggccacgacgttgacctgctgatcacgattccgggccgtcctgaagatgacgagctgctccacaaagtggttgatctgctcaagaagcaaggtctgctgctgtacgaagacatccgtgagagcacgttcgtggaggggcaactgccaagtcctaaacctgacgccctggacaaccatcagaagtgcttcgccattctcaagctgtaccgtccgaaggtggataacagtgcggttgggacgagtaagaaaagtgacatggctgaggttaaggattggaaagcggttcgtgtggatctggtgatcacgccattcgagcagttcgcctatgcgctgctcggttggacgggcagcggccaatttcgtcgcgatctgcgtcgctatgcggaggaagagcgcgacatgctgctcgacaaccatcgtctctacgacctgaaaaagggcatctttctgagtgcggacagcgaagaagagattttcggtcatctgggtctggattatctggagccgtgggaacgcaacgcg

SEQ ID NO: 4606 - protein, 394 aa, synthetic construct
  REGION 1..394: note = Variant of terminal deoxynucleotidyl transferase
MHHHHHHGGSGHPEGNTPEKEVPSVIARHVSQYACQRKTTLNNYNKKFTDALEIMAENYKFKENLQACLEAKRAASVLKSLPFEVTSMKDIQGLPCITDDVRDVIEEIIEEGESSRVKEILNDERYKAFKQFTSVFGVGVKTSEKWYRMGLRMVEEAKASKSLKLSKMQKAGFLYYEDLASGVSKEEADAVTLIVKETVRTVSPDALVTIAGGFRRGKPMGHDVDLLITIPGRPEDDELLHKVVDLLKKQGLLLYEDIRESTFVEGQLPSPKPDALDNHQKCFAILKLYRPKVDNSAVGTSKKSDMAEVKDWKAVRVDLVITPFEQFAYALLGWTGSGQFRRDLRRYAEEERDMLLDNHRLYDLKKGIFLSADSEEEIFGHLGLDYLEPWERNA

SEQ ID NO: 4607 - DNA, 1182 bp, synthetic construct
  misc_feature 1..1182: note = Variant of terminal deoxynucleotidyl transferase
  source 1..1182: mol_type = other DNA
atgcatcaccaccatcatcatgggggttctggtcatccggaaggtaataccccggagaaggaggtgccgagcgttatcgcccgtcatgttagtcagtacgcgtgccagcgcaagaccacgctgaataactacaacaaaaagttcaccgacgcgctggagatcatggccgagaactacaaatttaaagagaacctgcaggcgtgtctggaagccaagcgcgccgcgagtgtcctgaaaagcctgccgttcgaggttaccagcatgaaagacatccaaggtctgccgtgcattaccgttgacgtacgtgacgtgatcgaggagatcatcgaagagggcgagagcagccgtgttaaagaaatcctcaatgacgagcgctacaaggcctttaagcagttcaccagcgtgttcggtgtgggcgtgaaaacctcggaaaagtggtaccgtatgggcctccgtacggttgaagaagcaaaggccagtaagagtctgaagctgagcaagatgcagaaggcgggcttcctgtattacgaggatctggcgagcggtgttagtaaagaagaagccgatgccgttacgctcatcgtgaaggaaacggtgcgtactgttagtccggatgcgctggtgaccatcgccggcggtttccgccgtggcaaacctatgggccacgacgttgacctgctgatcacgattccgggccgtcctgaagatgacgagctgctccacaaagtggttgatctgctcaagaagcaaggtctgctgctgtacgaagacatccgtgagagcacgttcgtggaggggcaactgccaagtcctaaacctgacgccctggacaaccatcagaagtgcttcgccattctcaagctgtaccgtccgaaggtggataacagtgcggttgggacgagtaagaaaagtgacatggctgaggttaaggattggaaagcggttcgtgtggatctggtgatcacgccattcgagcagttcgcctatgcgctgctcggttggacgggcagcggccaatttcgtcgcgatctgcgtcgctatgcggaggaagagcgcgacatgctgctcgacaaccatcgtctctacgacctgaaaaagggcatctttctgagtgcggacagcgaagaagagattttcggtcatctgggtctggattatctggagccgtgggaacgcaacgcg

SEQ ID NO: 4608 - protein, 394 aa, synthetic construct
  REGION 1..394: note = Variant of terminal deoxynucleotidyl transferase
MHHHHHHGGSGHPEGNTPEKEVPSVIARHVSQYACQRKTTLNNYNKKFTDALEIMAENYKFKENLQACLEAKRAASVLKSLPFEVTSMKDIQGLPCITVDVRDVIEEIIEEGESSRVKEILNDERYKAFKQFTSVFGVGVKTSEKWYRMGLRTVEEAKASKSLKLSKMQKAGFLYYEDLASGVSKEEADAVTLIVKETVRTVSPDALVTIAGGFRRGKPMGHDVDLLITIPGRPEDDELLHKVVDLLKKQGLLLYEDIRESTFVEGQLPSPKPDALDNHQKCFAILKLYRPKVDNSAVGTSKKSDMAEVKDWKAVRVDLVITPFEQFAYALLGWTGSGQFRRDLRRYAEEERDMLLDNHRLYDLKKGIFLSADSEEEIFGHLGLDYLEPWERNA

SEQ ID NO: 4609 - DNA, 1182 bp, synthetic construct
  misc_feature 1..1182: note = Variant of terminal deoxynucleotidyl transferase
  source 1..1182: mol_type = other DNA
atgcatcaccaccatcatcatgggggttctggtcatccggaaggtaataccccggagaaggaggtgccgagcgttatcgcccgtcatgttagtcagtacgcgtgccagcgcaagaccacgctgaataactacaacaaaaagttcaccgacgcgctggagatcatggccgagaactacaaatttaaagagaacctgcaggcgtgtctggaagccaagcgcgccgcgagtgtcctgaaaagcctgccgttcgaggttaccagcatgaaagacatccaaggtctgccgtgcattaccgacgacgtacgtgacgtgatcgaggagatcatcgaagagggcgagagcagccgtgttaaagaaatcctcaatgacgagcgctacaaggcctttaagcagttcaccagcgtgttcggtgtgggcgtgaaaacctcggaaaagtggtaccgtatgggcctccgtacggttgaagaagcaaaggccagtaagagtctgaagctgagcaagatgcagaaggcgggcttcctgtattacgaggatctggcgagcggtgttagtaaagaagaagccgatgccgttacgtatatcgtgaaggaaacggtgcgtactgttagtccggatgcgctggtgaccatcgccggcggtttccgccgtggcaaacctatgggccacgacgttgacctgctgatcacgattccgggccgtcctgaagatgacgagctgctccacaaagtggttgatctgctcaagaagcaaggtctgctgctgtacgaagacatccgtgagagcacgttcgtggaggggcaactgccaagtcctaaacctgacgccctggacaaccatcagaagtgcttcgccattctcaagctgtaccgtccgaaggtggataacagtgcggttgggacgagtaagaaaagtgacatggctgaggttaaggattggaaagcggttcgtgtggatctggtgatcacgccattcgagcagttcgcctatgcgctgctcggttggacgggcagcggccaatttcgtcgcgatctgcgtcgctatgcggaggaagagcgcgacatgctgctcgacaaccatcgtctctacgacctgaaaaagggcatctttctgagtgcggacagcgaagaagagattttcggtcatctgggtctggattatctggagccgtgggaacgcaacgcg

SEQ ID NO: 4610 - protein, 394 aa, synthetic construct
  REGION 1..394: note = Variant of terminal deoxynucleotidyl transferase
MHHHHHHGGSGHPEGNTPEKEVPSVIARHVSQYACQRKTTLNNYNKKFTDALEIMAENYKFKENLQACLEAKRAASVLKSLPFEVTSMKDIQGLPCITDDVRDVIEEIIEEGESSRVKEILNDERYKAFKQFTSVFGVGVKTSEKWYRMGLRTVEEAKASKSLKLSKMQKAGFLYYEDLASGVSKEEADAVTYIVKETVRTVSPDALVTIAGGFRRGKPMGHDVDLLITIPGRPEDDELLHKVVDLLKKQGLLLYEDIRESTFVEGQLPSPKPDALDNHQKCFAILKLYRPKVDNSAVGTSKKSDMAEVKDWKAVRVDLVITPFEQFAYALLGWTGSGQFRRDLRRYAEEERDMLLDNHRLYDLKKGIFLSADSEEEIFGHLGLDYLEPWERNA

SEQ ID NO: 4611 - DNA, 1182 bp, synthetic construct
  misc_feature 1..1182: note = Variant of terminal deoxynucleotidyl transferase
  source 1..1182: mol_type = other DNA
atgcatcaccaccatcatcatgggggttctggtcatccggaaggtaataccccggagaaggaggtgccgagcgttatcgcccgtcatgttagtcagtacgcgtgccagcgcaagaccacgctgaataactacaacaaaaagttcaccgacgcgctggagatcatggccgagaactacaaatttaaagagaacctgcaggcgtgtctggaagccaagcgcgccgcgagtgtcctgaaaagcctgccgttcgaggttaccagcatgaaagacatccaaggtctgccgtgcattaccgacgacgtacgtgacgtgatcgaggagatcatcgaagagggcgagagcagccgtgttaaagaaatcctcaatgacgagcgctacaaggcctttaagcagttcaccagcgtgttcggtgtgggcgtgaaaacctcggaaaagtggtaccgtatgggcctccgtacggttgaagaagcaaaggccagtaagagtctgaagctgagcaagatgcagaaggcgggcttcctgtattacgaggatctggcgagcggtgttagtaaagaagaagccgatgccgttacgctcatcgtgaaggaaacggtgcgtactgttagtccggatgcgctggtgaccatcgccggcggtttccgccgtggcaaacctatgggccacgacgttgacctgctgatcacgattccgggccgtcctgaagatgacgagctgctccacaaagtggttgatctgctcaagaagcaaggtctgctgctgtacgaagacatccgtgagagcacgttcgtggaggggcaactgccaagtcctaaacctgacgccctggacaaccatcagaagtgcttcagtattctcaagctgtaccgtccgaaggtggataacagtgcggttgggacgagtaagaaaagtgacatggctgaggttaaggattggaaagcggttcgtgtggatctggtgatcacgccattcgagcagttcgcctatgcgctgctcggttggacgggcagcggccaatttcgtcgcgatctgcgtcgctatgcggaggaagagcgcgacatgctgctcgacaaccatcgtctctacgacctgaaaaagggcatctttctgagtgcggacagcgaagaagagattttcggtcatctgggtctggattatctggagccgtgggaacgcaacgcg

SEQ ID NO: 4612 - protein, 394 aa, synthetic construct
  REGION 1..394: note = Variant of terminal deoxynucleotidyl transferase
MHHHHHHGGSGHPEGNTPEKEVPSVIARHVSQYACQRKTTLNNYNKKFTDALEIMAENYKFKENLQACLEAKRAASVLKSLPFEVTSMKDIQGLPCITDDVRDVIEEIIEEGESSRVKEILNDERYKAFKQFTSVFGVGVKTSEKWYRMGLRTVEEAKASKSLKLSKMQKAGFLYYEDLASGVSKEEADAVTLIVKETVRTVSPDALVTIAGGFRRGKPMGHDVDLLITIPGRPEDDELLHKVVDLLKKQGLLLYEDIRESTFVEGQLPSPKPDALDNHQKCFSILKLYRPKVDNSAVGTSKKSDMAEVKDWKAVRVDLVITPFEQFAYALLGWTGSGQFRRDLRRYAEEERDMLLDNHRLYDLKKGIFLSADSEEEIFGHLGLDYLEPWERNA

SEQ ID NO: 4613 - DNA, 1182 bp, synthetic construct
  misc_feature 1..1182: note = Variant of terminal deoxynucleotidyl transferase
  source 1..1182: mol_type = other DNA
atgcatcaccaccatcatcatgggggttctggtcatccggaaggtaataccccggagaaggaggtgccgagcgttatcgcccgtcatgttagtcagtacgcgtgccagcgcaagaccacgctgaataactacaacaaaaagttcaccgacgcgctggagatcatggccgagaactacaaatttaaagagaacctgcaggcgtgtctggaagccaagcgcgccgcgagtgtcctgaaaagcctgccgttcgaggttaccagcatgaaagacatccaaggtctgccgtgcattaccgacgacgtacgtgacgtgatcgaggagatcatcgaagagggcgagagcagccgtgttaaagaaatcctcaatgacgagcgctacaaggcctttaagcagttcaccagcgtgttcggtgtgggcgtgaaaacctcggaaaagtggtaccgtatgggcctccgtacggttgaagaagcaaaggccagtaagagtctgaagctgagcaagatgcagaaggcgggcttcctgtattacgaggatctggcgagcggtgttagtaaagaagaagccgatgccgttacgctcatcgtgaaggaaacggtgcgtactgttagtccggatgcgctggtgaccatcgccggcggtttccgccgtggcaaacctatgggccacgacgttgacctgctgatcacgattccgggccgtcctgaagatgacgagctgctccacaaagtggttgatctgctcaagaagcaaggtctgctgctgtacgaagacatccgtgagagcacgttcgtggaggggcaactgccaagtcctaaacctgacgccctggacaaccatcagaagtgcttcgccattctcaagctgtaccgtccgaaggtggatcctagtgcggttgggacgagtaagaaaagtgacatggctgaggttaaggattggaaagcggttcgtgtggatctggtgatcacgccattcgagcagttcgcctatgcgctgctcggttggacgggcagcggccaatttcgtcgcgatctgcgtcgctatgcggaggaagagcgcgacatgctgctcgacaaccatcgtctctacgacctgaaaaagggcatctttctgagtgcggacagcgaagaagagattttcggtcatctgggtctggattatctggagccgtgggaacgcaacgcg

SEQ ID NO: 4614 - protein, 394 aa, synthetic construct
  REGION 1..394: note = Variant of terminal deoxynucleotidyl transferase
MHHHHHHGGSGHPEGNTPEKEVPSVIARHVSQYACQRKTTLNNYNKKFTDALEIMAENYKFKENLQACLEAKRAASVLKSLPFEVTSMKDIQGLPCITDDVRDVIEEIIEEGESSRVKEILNDERYKAFKQFTSVFGVGVKTSEKWYRMGLRTVEEAKASKSLKLSKMQKAGFLYYEDLASGVSKEEADAVTLIVKETVRTVSPDALVTIAGGFRRGKPMGHDVDLLITIPGRPEDDELLHKVVDLLKKQGLLLYEDIRESTFVEGQLPSPKPDALDNHQKCFAILKLYRPKVDPSAVGTSKKSDMAEVKDWKAVRVDLVITPFEQFAYALLGWTGSGQFRRDLRRYAEEERDMLLDNHRLYDLKKGIFLSADSEEEIFGHLGLDYLEPWERNA

SEQ ID NO: 4615 - DNA, 1182 bp, synthetic construct
  misc_feature 1..1182: note = Variant of terminal deoxynucleotidyl transferase
  source 1..1182: mol_type = other DNA
atgcatcaccaccatcatcatgggggttctggtcatccggaaggtaataccccggagaaggaggtgccgagcgttatcgcccgtcatgttagtcagtacgcgtgccagcgcaagaccacgctgaataactacaacaaaaagttcaccgacgcgctggagatcatggccgagaactacaaatttaaagagaacctgcaggcgtgtctggaagccaagcgcgccgcgagtgtcctgaaaagcctgccgttcgaggttaccagcatgaaagacatccaaggtctgccgtgcattaccgacgacgtacgtgacgtgatcgaggagatcatcgaagagggcgagagcagccgtgttaaagaaatcctcaatgacgagcgctacaaggcctttaagcagttcaccagcgtgttcggtgtgggcgtgaaaacctcggaaaagtggtaccgtatgggcctccgtacggttgaagaagcaaaggccagtaagagtctgaagctgagcaagatgcagaaggcgggcttcctgtattacgaggatctggcgagcggtgttagtaaagaagaagccgatgccgttacgctcatcgtggcggaaacggtgcgtactgttagtccggatgcgctggtgaccatcgccggcggtttccgccgtggcaaacctatgggccacgacgttgacctgctgatcacgattccgggccgtcctgaagatgacgagctgctccacaaagtggttgatctgctcaagaagcaaggtctgctgctgtacgaagacatccgtgagagcacgttcgtggaggggcaactgccaagtcctaaacctgacgccctggacaaccatcagaagtgcttcgccattctcaagctgtaccgtccgaaggtggataacagtgcggttgggacgagtaagaaaagtgacatggctgaggttaaggattggaaagcggttcgtgtggatctggtgatcacgccattcgagcagttcgcctatgcgctgctcggttggacgggcagcggccaatttcgtcgcgatctgcgtcgctatgcggaggaagagcgcgacatgctgctcgacaaccatcgtctctacgacctgaaaaagggcatctttctgagtgcggacagcgaagaagagattttcggtcatctgggtctggattatctggagccgtgggaacgcaacgcg

SEQ ID NO: 4616 - protein, 394 aa, synthetic construct
  REGION 1..394: note = Variant of terminal deoxynucleotidyl transferase
MHHHHHHGGSGHPEGNTPEKEVPSVIARHVSQYACQRKTTLNNYNKKFTDALEIMAENYKFKENLQACLEAKRAASVLKSLPFEVTSMKDIQGLPCITDDVRDVIEEIIEEGESSRVKEILNDERYKAFKQFTSVFGVGVKTSEKWYRMGLRTVEEAKASKSLKLSKMQKAGFLYYEDLASGVSKEEADAVTLIVAETVRTVSPDALVTIAGGFRRGKPMGHDVDLLITIPGRPEDDELLHKVVDLLKKQGLLLYEDIRESTFVEGQLPSPKPDALDNHQKCFAILKLYRPKVDNSAVGTSKKSDMAEVKDWKAVRVDLVITPFEQFAYALLGWTGSGQFRRDLRRYAEEERDMLLDNHRLYDLKKGIFLSADSEEEIFGHLGLDYLEPWERNA

SEQ ID NO: 4617 - DNA, 1182 bp, synthetic construct
  misc_feature 1..1182: note = Variant of terminal deoxynucleotidyl transferase
  source 1..1182: mol_type = other DNA
atgcatcaccaccatcatcatgggggttctggtcatccggaaggtaataccccggagaaggaggtgccgagcgttatcgcccgtcatgttagtcagtacgcgtgccagcgcaagaccacgctgaataactacaacaaaaagttcaccgacgcgctggagatcatggccgagaactacaaatttaaagagaacctgcaggcgtgtctggaagccaagcgcgccgcgagtgtcctgaaaagcctgccgttcgaggttaccagcatgaaagacatccaaggtctgccgtgcattaccgacgacgtacgtgacgtgatcgaggagatcatcgaagagggcgagagcagccgtgttaaagaaatcctcaatgacgagcgctacaaggcctttaagcagttcaccagcgtgttcggtgtgggcgtgaaaacctcggaaaagtggtaccgtatgggcctccgtacggttgaagaagcaaaggccagtaagagtctgaagctgagcaagatgcagaaggcgggcttcctgtattacgaggatctggcgagcggtgttagtaaagaagaagccgatgccgttacgctcatcgtgaaggaaacggtgcgtactgttagtccggatgcgctggtgaccatcgccggcggtttccgccgtggcaaacctatgggccacgacgttgacctgctgatcacgattccgggccgtcctgaagatgacgagctgctccacaaagtggttgatctgctcaagaagcaaggtctgctgctgtacgaagacatccgtgagagcacgttcgtggaggggcaactgccaagtcctaaacctgacgccctggacaaccatcagaagtgcttcgccattctcaagctgtaccgtccgaaggtggataacagtgcggttgggacgagtgcgaaaagtgacatggctgaggttaaggattggaaagcggttcgtgtggatctggtgatcacgccattcgagcagttcgcctatgcgctgctcggttggacgggcagcggccaatttcgtcgcgatctgcgtcgctatgcggaggaagagcgcgacatgctgctcgacaaccatcgtctctacgacctgaaaaagggcatctttctgagtgcggacagcgaagaagagattttcggtcatctgggtctggattatctggagccgtgggaacgcaacgcg

SEQ ID NO: 4618 - protein, 394 aa, synthetic construct
  REGION 1..394: note = Variant of terminal deoxynucleotidyl transferase
MHHHHHHGGSGHPEGNTPEKEVPSVIARHVSQYACQRKTTLNNYNKKFTDALEIMAENYKFKENLQACLEAKRAASVLKSLPFEVTSMKDIQGLPCITDDVRDVIEEIIEEGESSRVKEILNDERYKAFKQFTSVFGVGVKTSEKWYRMGLRTVEEAKASKSLKLSKMQKAGFLYYEDLASGVSKEEADAVTLIVKETVRTVSPDALVTIAGGFRRGKPMGHDVDLLITIPGRPEDDELLHKVVDLLKKQGLLLYEDIRESTFVEGQLPSPKPDALDNHQKCFAILKLYRPKVDNSAVGTSAKSDMAEVKDWKAVRVDLVITPFEQFAYALLGWTGSGQFRRDLRRYAEEERDMLLDNHRLYDLKKGIFLSADSEEEIFGHLGLDYLEPWERNA

SEQ ID NO: 4619 - DNA, 1182 bp, synthetic construct
  misc_feature 1..1182: note = Variant of terminal deoxynucleotidyl transferase
  source 1..1182: mol_type = other DNA
atgcatcaccaccatcatcatgggggttctggtcatccggaaggtaataccccggagaaggaggtgccgagcgttatcgcccgtcatgttagtcagtacgcgtgccagcgcaagaccacgctgaataactacaacaaaaagttcaccgacgcgctggagatcatggccgagaactacaaatttaaagagaacctgcaggcgtgtctggaagccaagcgcgccgcgagtgtcctgaaaagcctgccgttcgaggttaccagcatgaaagacatccaaggtctgccgtgcattaccgacgacgtacgtgacgtgatcgaggagatcatcgaagagggcgagagcagccgtgttaaagaaatcctcaatgacgagcgctacaaggcctttaagcagttcaccagcgtgttcggtgtgggcgtgaaaaccgcggaaaagtggtaccgtatgggcctccgtacggttgaagaagcaaaggccagtaagagtctgaagctgagcaagatgcagaaggcgggcttcctgtattacgaggatctggcgagcggtgttagtaaagaagaagccgatgccgttacgctcatcgtgaaggaaacggtgcgtactgttagtccggatgcgctggtgaccatcgccggcggtttccgccgtggcaaacctatgggccacgacgttgacctgctgatcacgattccgggccgtcctgaagatgacgagctgctccacaaagtggttgatctgctcaagaagcaaggtctgctgctgtacgaagacatccgtgagagcacgttcgtggaggggcaactgccaagtcctaaacctgacgccctggacaaccatcagaagtgcttcgccattctcaagctgtaccgtccgaaggtggataacagtgcggttgggacgagtaagaaaagtgacatggctgaggttaaggattggaaagcggttcgtgtggatctggtgatcacgccattcgagcagttcgcctatgcgctgctcggttggacgggcagcggccaatttcgtcgcgatctgcgtcgctatgcggaggaagagcgcgacatgctgctcgacaaccatcgtctctacgacctgaaaaagggcatctttctgagtgcggacagcgaagaagagattttcggtcatctgggtctggattatctggagccgtgggaacgcaacgcg

SEQ ID NO: 4620 - protein, 394 aa, synthetic construct
  REGION 1..394: note = Variant of terminal deoxynucleotidyl transferase
MHHHHHHGGSGHPEGNTPEKEVPSVIARHVSQYACQRKTTLNNYNKKFTDALEIMAENYKFKENLQACLEAKRAASVLKSLPFEVTSMKDIQGLPCITDDVRDVIEEIIEEGESSRVKEILNDERYKAFKQFTSVFGVGVKTAEKWYRMGLRTVEEAKASKSLKLSKMQKAGFLYYEDLASGVSKEEADAVTLIVKETVRTVSPDALVTIAGGFRRGKPMGHDVDLLITIPGRPEDDELLHKVVDLLKKQGLLLYEDIRESTFVEGQLPSPKPDALDNHQKCFAILKLYRPKVDNSAVGTSKKSDMAEVKDWKAVRVDLVITPFEQFAYALLGWTGSGQFRRDLRRYAEEERDMLLDNHRLYDLKKGIFLSADSEEEIFGHLGLDYLEPWERNA

SEQ ID NO: 4621 - DNA, 1182 bp, synthetic construct
  misc_feature 1..1182: note = Variant of terminal deoxynucleotidyl transferase
  source 1..1182: mol_type = other DNA
atgcatcaccaccatcatcatgggggttctggtcatccggaaggtaataccccggagaaggaggtgccgagcgttatcgcccgtcatgttagtcagtacgcgtgccagcgcaagaccacgctgaataactacaacaaaaagttcaccgacgcgctggagatcatggccgagaactacaaatttaaagagaacctgcaggcgtgtctggaagccaagcgcgccgcgagtgtcctgaaaagcctgccgttcgaggttaccagcatgaaagacatccaaggtctgccgtgcattaccgacgacgtacgtgacgtgatcgaggagatcatcgaagagggcgagagcagccgtgttaaagaaatcctcaatgacgagcgctacaaggcctttaagcagttcaccagcgtgttcggtgtgggcgtgaaaacctcggaaaagtggtaccgtatgggcctccgtacggttgaagaagcaaaggccagtaagagtctgaagctgagcaagatgcagaaggcgggcttcctgtattacgaggatctggcgagcggtgttagtaaagaagaagccgatgccgttacgctcatcgtgaaggaaacggtgcgtactgttagtccggatgcgctggtgaccatcgccggcggtttccgccgtggcaaacctatgggccacgacgttgacctgctgatcacgattccgggccgtcctgaagatgacgagctgctccacaaagtggttgatctgctcaagaagcaaggtctgctgctgtacgaagacatccgtgagagcacgttcgtggaggggcaactgccaagtcctaaacctgacgccctggacaaccatcagaagtgcttcgccattctcaagctgtaccgtccgaaggtggataacagtgcggttgggacggcgaagaaaagtgacatggctgaggttaaggattggaaagcggttcgtgtggatctggtgatcacgccattcgagcagttcgcctatgcgctgctcggttggacgggcagcggccaatttcgtcgcgatctgcgtcgctatgcggaggaagagcgcgacatgctgctcgacaaccatcgtctctacgacctgaaaaagggcatctttctgagtgcggacagcgaagaagagattttcggtcatctgggtctggattatctggagccgtgggaacgcaacgcg

SEQ ID NO: 4622 - protein, 394 aa, synthetic construct
  REGION 1..394: note = Variant of terminal deoxynucleotidyl transferase
MHHHHHHGGSGHPEGNTPEKEVPSVIARHVSQYACQRKTTLNNYNKKFTDALEIMAENYKFKENLQACLEAKRAASVLKSLPFEVTSMKDIQGLPCITDDVRDVIEEIIEEGESSRVKEILNDERYKAFKQFTSVFGVGVKTSEKWYRMGLRTVEEAKASKSLKLSKMQKAGFLYYEDLASGVSKEEADAVTLIVKETVRTVSPDALVTIAGGFRRGKPMGHDVDLLITIPGRPEDDELLHKVVDLLKKQGLLLYEDIRESTFVEGQLPSPKPDALDNHQKCFAILKLYRPKVDNSAVGTAKKSDMAEVKDWKAVRVDLVITPFEQFAYALLGWTGSGQFRRDLRRYAEEERDMLLDNHRLYDLKKGIFLSADSEEEIFGHLGLDYLEPWERNA

SEQ ID NO: 4623 - DNA, 1182 bp, synthetic construct
  misc_feature 1..1182: note = Variant of terminal deoxynucleotidyl transferase
  source 1..1182: mol_type = other DNA
atgcatcaccaccatcatcatgggggttctggtcatccggaaggtaataccccggagaaggaggtgccgagcgttatcgcccgtcatgttagtcagtacgcgtgccagcgcaagaccacgctgaataactacaacaaaaagttcaccgacgcgctggagatcatggccgagaactacaaatttaaagagaacctgcaggcgtgtctggaagccaagcgcgccgcgagtgtcctgaaaagcctgccgttcgaggttaccagcatgaaagacatccaaggtctgccgtgcattaccgacgacgtacgtgacgtgatcgaggagatcatcgaagagggcgagagcagccgtgttaaagaaatcctcaatgacgagcgctacaaggcctttaagcagttcaccagcgtgttcggtgtgggcgtgaaaacctcggaaaagtggtaccgtatgggcctccgtacggttgaagaagcaaaggccagtaagactctgaagctgagcaagatgcagaaggcgggcttcctgtattacgaggatctggcgagcggtgttagtaaagaagaagccgatgccgttacgctcatcgtgaaggaaacggtgcgtactgttagtccggatgcgctggtgaccatcgccggcggtttccgccgtggcaaacctatgggccacgacgttgacctgctgatcacgattccgggccgtcctgaagatgacgagctgctccacaaagtggttgatctgctcaagaagcaaggtctgctgctgtacgaagacatccgtgagagcacgttcgtggaggggcaactgccaagtcctaaacctgacgccctggacaaccatcagaagtgcttcgccattctcaagctgtaccgtccgaaggtggataacagtgcggttgggacgagtaagaaaagtgacatggctgaggttaaggattggaaagcggttcgtgtggatctggtgatcacgccattcgagcagttcgcctatgcgctgctcggttggacgggcagcggccaatttcgtcgcgatctgcgtcgctatgcggaggaagagcgcgacatgctgctcgacaaccatcgtctctacgacctgaaaaagggcatctttctgagtgcggacagcgaagaagagattttcggtcatctgggtctggattatctggagccgtgggaacgcaacgcg

SEQ ID NO: 4624 - protein, 394 aa, synthetic construct
  REGION 1..394: note = Variant of terminal deoxynucleotidyl transferase
MHHHHHHGGSGHPEGNTPEKEVPSVIARHVSQYACQRKTTLNNYNKKFTDALEIMAENYKFKENLQACLEAKRAASVLKSLPFEVTSMKDIQGLPCITDDVRDVIEEIIEEGESSRVKEILNDERYKAFKQFTSVFGVGVKTSEKWYRMGLRTVEEAKASKTLKLSKMQKAGFLYYEDLASGVSKEEADAVTLIVKETVRTVSPDALVTIAGGFRRGKPMGHDVDLLITIPGRPEDDELLHKVVDLLKKQGLLLYEDIRESTFVEGQLPSPKPDALDNHQKCFAILKLYRPKVDNSAVGTSKKSDMAEVKDWKAVRVDLVITPFEQFAYALLGWTGSGQFRRDLRRYAEEERDMLLDNHRLYDLKKGIFLSADSEEEIFGHLGLDYLEPWERNA

SEQ ID NO: 4625 - DNA, 1182 bp, synthetic construct
  misc_feature 1..1182: note = Variant of terminal deoxynucleotidyl transferase
  source 1..1182: mol_type = other DNA
atgcatcaccaccatcatcatgggggttctggtcatccggaaggtaataccccggagaaggaggtgccgagcgttatcgcccgtcatgttagtcagtacgcgtgccagcgcaagaccacgctgaataactacaacaaaaagttcaccgacgcgctggagatcatggccgagaactacaaatttaaagagaacctgcaggcgtgtctggaagccaagcgcgccgcgagtgtcctgaaaagcctgccgttcgaggttaccagcatgaaagacatccaaggtctgccgtgcattaccgacgacgtacgtgacgtgatcgaggagatcatcgaagagggcgagagcagccgtgttaaagaaatcctcaatgacgagcgctacaaggcctttaagcagttcaccagcgtgttcggtgtgggcgtgaaaacctcggaaaagtggtaccgtatgggcctccgtacggttgaagaagcaaaggccagtaagtgtctgaagctgagcaagatgcagaaggcgggcttcctgtattacgaggatctggcgagcggtgttagtaaagaagaagccgatgccgttacgctcatcgtgaaggaaacggtgcgtactgttagtccggatgcgctggtgaccatcgccggcggtttccgccgtggcaaacctatgggccacgacgttgacctgctgatcacgattccgggccgtcctgaagatgacgagctgctccacaaagtggttgatctgctcaagaagcaaggtctgctgctgtacgaagacatccgtgagagcacgttcgtggaggggcaactgccaagtcctaaacctgacgccctggacaaccatcagaagtgcttcgccattctcaagctgtaccgtccgaaggtggataacagtgcggttgggacgagtaagaaaagtgacatggctgaggttaaggattggaaagcggttcgtgtggatctggtgatcacgccattcgagcagttcgcctatgcgctgctcggttggacgggcagcggccaatttcgtcgcgatctgcgtcgctatgcggaggaagagcgcgacatgctgctcgacaaccatcgtctctacgacctgaaaaagggcatctttctgagtgcggacagcgaagaagagattttcggtcatctgggtctggattatctggagccgtgggaacgcaacgcg

SEQ ID NO: 4626 - protein, 394 aa, synthetic construct
  REGION 1..394: note = Variant of terminal deoxynucleotidyl transferase
MHHHHHHGGSGHPEGNTPEKEVPSVIARHVSQYACQRKTTLNNYNKKFTDALEIMAENYKFKENLQACLEAKRAASVLKSLPFEVTSMKDIQGLPCITDDVRDVIEEIIEEGESSRVKEILNDERYKAFKQFTSVFGVGVKTSEKWYRMGLRTVEEAKASKCLKLSKMQKAGFLYYEDLASGVSKEEADAVTLIVKETVRTVSPDALVTIAGGFRRGKPMGHDVDLLITIPGRPEDDELLHKVVDLLKKQGLLLYEDIRESTFVEGQLPSPKPDALDNHQKCFAILKLYRPKVDNSAVGTSKKSDMAEVKDWKAVRVDLVITPFEQFAYALLGWTGSGQFRRDLRRYAEEERDMLLDNHRLYDLKKGIFLSADSEEEIFGHLGLDYLEPWERNA

SEQ ID NO: 4627 - DNA, 1182 bp, synthetic construct
  misc_feature 1..1182: note = Variant of terminal deoxynucleotidyl transferase
  source 1..1182: mol_type = other DNA
atgcatcaccaccatcatcatgggggttctggtcatccggaaggtaataccccggagaaggaggtgccgagcgttatcgcccgtcatgttagtcagtacgcgtgccagcgcaagaccacgctgaataactacaacaaaaagttcaccgacgcgctggagatcatggccgagaactacaaatttaaagagaacctgcaggcgtgtctggaagccaagcgcgccgcgagtgtcctgaaaagcctgccgttcgaggttaccagcatgaaagacatccaaggtctgccgtgcattaccgacgacgtacgtgacgtgatcgaggagatcatcgaagagggcgagagcagccgtgttaaagaaatcctcaatgacgagcgctacaaggcctttaagcagttcaccagcgtgttcggtgtgggcgtgaaaacctcggaaaagtggtaccgtatgggcctccgtacggttgaagaagcaaaggccagtaagagtctgaagctgagcaagatgcagaaggcgggcttcctgtattacgaggatctggcgagcggtgttttgaaagaagaagccgatgccgttacgctcatcgtgaaggaaacggtgcgtactgttagtccggatgcgctggtgaccatcgccggcggtttccgccgtggcaaacctatgggccacgacgttgacctgctgatcacgattccgggccgtcctgaagatgacgagctgctccacaaagtggttgatctgctcaagaagcaaggtctgctgctgtacgaagacatccgtgagagcacgttcgtggaggggcaactgccaagtcctaaacctgacgccctggacaaccatcagaagtgcttcgccattctcaagctgtaccgtccgaaggtggataacagtgcggttgggacgagtaagaaaagtgacatggctgaggttaaggattggaaagcggttcgtgtggatctggtgatcacgccattcgagcagttcgcctatgcgctgctcggttggacgggcagcggccaatttcgtcgcgatctgcgtcgctatgcggaggaagagcgcgacatgctgctcgacaaccatcgtctctacgacctgaaaaagggcatctttctgagtgcggacagcgaagaagagattttcggtcatctgggtctggattatctggagccgtgggaacgcaacgcg

SEQ ID NO: 4628 - protein, 394 aa, synthetic construct
  REGION 1..394: note = Variant of terminal deoxynucleotidyl transferase
MHHHHHHGGSGHPEGNTPEKEVPSVIARHVSQYACQRKTTLNNYNKKFTDALEIMAENYKFKENLQACLEAKRAASVLKSLPFEVTSMKDIQGLPCITDDVRDVIEEIIEEGESSRVKEILNDERYKAFKQFTSVFGVGVKTSEKWYRMGLRTVEEAKASKSLKLSKMQKAGFLYYEDLASGVLKEEADAVTLIVKETVRTVSPDALVTIAGGFRRGKPMGHDVDLLITIPGRPEDDELLHKVVDLLKKQGLLLYEDIRESTFVEGQLPSPKPDALDNHQKCFAILKLYRPKVDNSAVGTSKKSDMAEVKDWKAVRVDLVITPFEQFAYALLGWTGSGQFRRDLRRYAEEERDMLLDNHRLYDLKKGIFLSADSEEEIFGHLGLDYLEPWERNA

SEQ ID NO: 4629 - DNA, 1182 bp, synthetic construct
  misc_feature 1..1182: note = Variant of terminal deoxynucleotidyl transferase
  source 1..1182: mol_type = other DNA
atgcatcaccaccatcatcatgggggttctggtcatccggaaggtaataccccggagaaggaggtgccgagcgttatcgcccgtcatgttagtcagtacgcgtgccagcgcaagaccacgctgaataactacaacaaaaagttcaccgacgcgctggagatcatggccgagaactacaaatttaaagagaacctgcaggcgtgtctggaagccaagcgcgccgcgagtgtcctgaaaagcctgccgttcgaggttaccagcatgaaagacatccaaggtctgccgtgcattaccgacgacgtacgtgacgtgatcgaggagatcatcgaagagggcgagagcagccgtgttaaagaaatcctcaatgacgagcgctacaaggcctttaagcagttcaccagcgtgttcggtgtgggcgtgaaaacctcggaaaagtggtaccgtatgggcctccgtacggttgaagaagcaaaggccagtaagagtctgaagctgagcaagatgcagaaggcgggcttcctgtattacgaggatctggcgagcggtgttagtaaagaagaagccgatgccgttacgctcatcgtgaaggaaacggtgcgtactgttagtccggatgcgctggtgaccatcgccggcggtttccgccgtggcaaacctatgggccacgacgttgacctgctgatcacgattccgggccgtcctgaagatgacgagctgctccacaaagtggttgatctgctcaagaagcaaggtctgctgctgtacgaagacatccgtgagagcacgttcgtggaggggcaactgccaagtcctaaacctgacgccctggacaaccatcagaagtgcttcgccattctcaagctgatgcgtccgaaggtggataacagtgcggttgggacgagtaagaaaagtgacatggctgaggttaaggattggaaagcggttcgtgtggatctggtgatcacgccattcgagcagttcgcctatgcgctgctcggttggacgggcagcggccaatttcgtcgcgatctgcgtcgctatgcggaggaagagcgcgacatgctgctcgacaaccatcgtctctacgacctgaaaaagggcatctttctgagtgcggacagcgaagaagagattttcggtcatctgggtctggattatctggagccgtgggaacgcaacgcg

SEQ ID NO: 4630 - protein, 394 aa, synthetic construct
  REGION 1..394: note = Variant of terminal deoxynucleotidyl transferase
MHHHHHHGGSGHPEGNTPEKEVPSVIARHVSQYACQRKTTLNNYNKKFTDALEIMAENYKFKENLQACLEAKRAASVLKSLPFEVTSMKDIQGLPCITDDVRDVIEEIIEEGESSRVKEILNDERYKAFKQFTSVFGVGVKTSEKWYRMGLRTVEEAKASKSLKLSKMQKAGFLYYEDLASGVSKEEADAVTLIVKETVRTVSPDALVTIAGGFRRGKPMGHDVDLLITIPGRPEDDELLHKVVDLLKKQGLLLYEDIRESTFVEGQLPSPKPDALDNHQKCFAILKLMRPKVDNSAVGTSKKSDMAEVKDWKAVRVDLVITPFEQFAYALLGWTGSGQFRRDLRRYAEEERDMLLDNHRLYDLKKGIFLSADSEEEIFGHLGLDYLEPWERNA

SEQ ID NO: 4631 - DNA, 1182 bp, synthetic construct
  misc_feature 1..1182: note = Variant of terminal deoxynucleotidyl transferase
  source 1..1182: mol_type = other DNA
atgcatcaccaccatcatcatgggggttctggtcatccggaaggtaataccccggagaaggaggtgccgagcgttatcgcccgtcatgttagtcagtacgcgtgccagcgcaagaccacgctgaataactacaacaaaaagttcaccgacgcgctggagatcatggccgagaactacaaatttaaagagaacctgcaggcgtgtctggaagccaagcgcgccgcgagtgtcctgaaaagcctgccgttcgaggttaccagcatgaaagacatccaaggtctgccgtgcattaccgacgacgtacgtgacgtgatcgaggagatcatcgaagagggcgagagcagccgtgttaaagaaatcctcaatgacgagcgctacaaggcctttaagcagttcaccagcgtgttcggtgtgggcgtgaaaacctcggaaaagtggtaccgtatgggcctccgtacggttgaagaagcaaaggccagtaagagtctgaagctgagcaagatgcagaaggcgggcttcctgtattacgaggatctggcgagcggtgttagtaaagaagaagccgatgccgttgatctcatcgtgaaggaaacggtgcgtactgttagtccggatgcgctggtgaccatcgccggcggtttccgccgtggcaaacctatgggccacgacgttgacctgctgatcacgattccgggccgtcctgaagatgacgagctgctccacaaagtggttgatctgctcaagaagcaaggtctgctgctgtacgaagacatccgtgagagcacgttcgtggaggggcaactgccaagtcctaaacctgacgccctggacaaccatcagaagtgcttcgccattctcaagctgtaccgtccgaaggtggataacagtgcggttgggacgagtaagaaaagtgacatggctgaggttaaggattggaaagcggttcgtgtggatctggtgatcacgccattcgagcagttcgcctatgcgctgctcggttggacgggcagcggccaatttcgtcgcgatctgcgtcgctatgcggaggaagagcgcgacatgctgctcgacaaccatcgtctctacgacctgaaaaagggcatctttctgagtgcggacagcgaagaagagattttcggtcatctgggtctggattatctggagccgtgggaacgcaacgcg

SEQ ID NO: 4632 - protein, 394 aa, synthetic construct
  REGION 1..394: note = Variant of terminal deoxynucleotidyl transferase
MHHHHHHGGSGHPEGNTPEKEVPSVIARHVSQYACQRKTTLNNYNKKFTDALEIMAENYKFKENLQACLEAKRAASVLKSLPFEVTSMKDIQGLPCITDDVRDVIEEIIEEGESSRVKEILNDERYKAFKQFTSVFGVGVKTSEKWYRMGLRTVEEAKASKSLKLSKMQKAGFLYYEDLASGVSKEEADAVDLIVKETVRTVSPDALVTIAGGFRRGKPMGHDVDLLITIPGRPEDDELLHKVVDLLKKQGLLLYEDIRESTFVEGQLPSPKPDALDNHQKCFAILKLYRPKVDNSAVGTSKKSDMAEVKDWKAVRVDLVITPFEQFAYALLGWTGSGQFRRDLRRYAEEERDMLLDNHRLYDLKKGIFLSADSEEEIFGHLGLDYLEPWERNA

SEQ ID NO: 4633 - DNA, 1182 bp, synthetic construct
  misc_feature 1..1182: note = Variant of terminal deoxynucleotidyl transferase
  source 1..1182: mol_type = other DNA
atgcatcaccaccatcatcatgggggttctggtcatccggaaggtaataccccggagaaggaggtgccgagcgttatcgcccgtcatgttagtcagtacgcgtgccagcgcaagaccacgctgaataactacaacaaaaagttcaccgacgcgctggagatcatggccgagaactacaaatttaaagagaacctgcaggcgtgtctggaagccaagcgcgccgcgagtgtcctgaaaagcctgccgttcgaggttaccagcatgaaagacatccaaggtctgccgtgcattaccgacgacgtacgtgacgtgatcgaggagatcatcgaagagggcgagagcagccgtgttaaagaaatcctcaatgacgagcgctacaaggcctttaagcagttcaccagcgtgttcggtgtgggcgtgaaaacctcggaaaagtggtaccgtatgggcctccgtacggttgaagaagcaaaggccagtaagagtctgaagctgagcaagatgcagaaggcgggcttcctgtattacgaggatctggcgagcggtgttagtaaagaagaagccgatgccgttacgctcatcgtgaaggaaacggtgcgtactgttagtccggatgcgctggtgaccatcgccggcggtttccgccgtggcaaacctatgggccacgacgttgacctgctgatcacgattccgggccgtcctgaagatgacgagctgctccacaaagtggttgatctgctcaagaagcaaggtctgctgctgtacgaagacatccgtgagagcacgttcgtggaggggcaactgccaagtcctaaacctgacgccctggacaaccatcagaagtgcttcgccattctcaagctgtaccgtccgaaggtggataacagtgcggttgggacgagtaagaaaagtgacatggctgaggcgaaggattggaaagcggttcgtgtggatctggtgatcacgccattcgagcagttcgcctatgcgctgctcggttggacgggcagcggccaatttcgtcgcgatctgcgtcgctatgcggaggaagagcgcgacatgctgctcgacaaccatcgtctctacgacctgaaaaagggcatctttctgagtgcggacagcgaagaagagattttcggtcatctgggtctggattatctggagccgtgggaacgcaacgcg

SEQ ID NO: 4634 - protein, 394 aa, synthetic construct
  REGION 1..394: note = Variant of terminal deoxynucleotidyl transferase
MHHHHHHGGSGHPEGNTPEKEVPSVIARHVSQYACQRKTTLNNYNKKFTDALEIMAENYKFKENLQACLEAKRAASVLKSLPFEVTSMKDIQGLPCITDDVRDVIEEIIEEGESSRVKEILNDERYKAFKQFTSVFGVGVKTSEKWYRMGLRTVEEAKASKSLKLSKMQKAGFLYYEDLASGVSKEEADAVTLIVKETVRTVSPDALVTIAGGFRRGKPMGHDVDLLITIPGRPEDDELLHKVVDLLKKQGLLLYEDIRESTFVEGQLPSPKPDALDNHQKCFAILKLYRPKVDNSAVGTSKKSDMAEAKDWKAVRVDLVITPFEQFAYALLGWTGSGQFRRDLRRYAEEERDMLLDNHRLYDLKKGIFLSADSEEEIFGHLGLDYLEPWERNA

SEQ ID NO: 4635 - DNA, 1182 bp, synthetic construct
  misc_feature 1..1182: note = Variant of terminal deoxynucleotidyl transferase
  source 1..1182: mol_type = other DNA
atgcatcaccaccatcatcatgggggttctggtcatccggaaggtaataccccggagaaggaggtgccgagcgttatcgcccgtcatgttagtcagtacgcgtgccagcgcaagaccacgctgaataactacaacaaaaagttcaccgacgcgctggagatcatggccgagaactacaaatttaaagagaacctgcaggcgtgtctggaagccaagcgcgccgcgagtgtcctgaaaagcctgccgttcgaggttaccagcatgaaagacatccaaggtctgccgtgcattaccgacgacgtacgtgacgtgatcgaggagatcatcttggagggcgagagcagccgtgttaaagaaatcctcaatgacgagcgctacaaggcctttaagcagttcaccagcgtgttcggtgtgggcgtgaaaacctcggaaaagtggtaccgtatgggcctccgtacggttgaagaagcaaaggccagtaagagtctgaagctgagcaagatgcagaaggcgggcttcctgtattacgaggatctggcgagcggtgttagtaaagaagaagccgatgccgttacgctcatcgtgaaggaaacggtgcgtactgttagtccggatgcgctggtgaccatcgccggcggtttccgccgtggcaaacctatgggccacgacgttgacctgctgatcacgattccgggccgtcctgaagatgacgagctgctccacaaagtggttgatctgctcaagaagcaaggtctgctgctgtacgaagacatccgtgagagcacgttcgtggaggggcaactgccaagtcctaaacctgacgccctggacaaccatcagaagtgcttcgccattctcaagctgtaccgtccgaaggtggataacagtgcggttgggacgagtaagaaaagtgacatggctgaggttaaggattggaaagcggttcgtgtggatctggtgatcacgccattcgagcagttcgcctatgcgctgctcggttggacgggcagcggccaatttcgtcgcgatctgcgtcgctatgcggaggaagagcgcgacatgctgctcgacaaccatcgtctctacgacctgaaaaagggcatctttctgagtgcggacagcgaagaagagattttcggtcatctgggtctggattatctggagccgtgggaacgcaacgcg

SEQ ID NO: 4636 - protein, 394 aa, synthetic construct
  REGION 1..394: note = Variant of terminal deoxynucleotidyl transferase
MHHHHHHGGSGHPEGNTPEKEVPSVIARHVSQYACQRKTTLNNYNKKFTDALEIMAENYKFKENLQACLEAKRAASVLKSLPFEVTSMKDIQGLPCITDDVRDVIEEIILEGESSRVKEILNDERYKAFKQFTSVFGVGVKTSEKWYRMGLRTVEEAKASKSLKLSKMQKAGFLYYEDLASGVSKEEADAVTLIVKETVRTVSPDALVTIAGGFRRGKPMGHDVDLLITIPGRPEDDELLHKVVDLLKKQGLLLYEDIRESTFVEGQLPSPKPDALDNHQKCFAILKLYRPKVDNSAVGTSKKSDMAEVKDWKAVRVDLVITPFEQFAYALLGWTGSGQFRRDLRRYAEEERDMLLDNHRLYDLKKGIFLSADSEEEIFGHLGLDYLEPWERNA

SEQ ID NO: 4637 - DNA, 1182 bp, synthetic construct
  misc_feature 1..1182: note = Variant of terminal deoxynucleotidyl transferase
  source 1..1182: mol_type = other DNA
atgcatcaccaccatcatcatgggggttctggtcatccggaaggtaataccccggagaaggaggtgccgagcgttatcgcccgtcatgttagtcagtacgcgtgccagcgcaagaccacgctgaataactacaacaaaaagttcaccgacgcgctggagatcatggccgagaactacaaatttaaagagaacctgcaggcgtgtctggaagccaagcgcgccgcgagtgtcctgaaaagcctgccgttcgaggttaccagcatgaaagacatccaaggtctgccgtgcattaccgacgacgtacgtgacgtgatcgaggagatcatcgaagagggcgagagcagccgtgttaaagaaatcctcaatgacgagcgctacaaggcctttaagcagttcaccagcgtgttcggtgtgggcgtgaaaacctcggaaaagtggtaccgtatgggcctccgtacggttgaagaagcaaaggccagtaagagtctgaagctgagcaagatgcagaaggcgggcttcctgtattacgaggatctggcgagcggtgttagtaaagaagaagccgatgccgttacgctcatcgtgaaggaaacggtgcgtactgttagtccggatgcgctggtgaccatcgccggcggtttccgccgtggcaaacctatgggccacgacgttgacctgctgatcacgattccgggccgtcctgaagatgacgagctgctccacaaagtggttgatctgctcaagaagcaaggtctgctgctgtacgaagacatccgtgagagcacgttcgtggaggggcaactgccaagtcctaaacctgacgccctggacaaccatcagaagtgcttcgccattctcaagctgtaccgtccgaaggtggataacagtgcggttgggacggtgaagaaaagtgacatggctgaggttaaggattggaaagcggttcgtgtggatctggtgatcacgccattcgagcagttcgcctatgcgctgctcggttggacgggcagcggccaatttcgtcgcgatctgcgtcgctatgcggaggaagagcgcgacatgctgctcgacaaccatcgtctctacgacctgaaaaagggcatctttctgagtgcggacagcgaagaagagattttcggtcatctgggtctggattatctggagccgtgggaacgcaacgcg

SEQ ID NO: 4638 - protein, 394 aa, synthetic construct
  REGION 1..394: note = Variant of terminal deoxynucleotidyl transferase
MHHHHHHGGSGHPEGNTPEKEVPSVIARHVSQYACQRKTTLNNYNKKFTDALEIMAENYKFKENLQACLEAKRAASVLKSLPFEVTSMKDIQGLPCITDDVRDVIEEIIEEGESSRVKEILNDERYKAFKQFTSVFGVGVKTSEKWYRMGLRTVEEAKASKSLKLSKMQKAGFLYYEDLASGVSKEEADAVTLIVKETVRTVSPDALVTIAGGFRRGKPMGHDVDLLITIPGRPEDDELLHKVVDLLKKQGLLLYEDIRESTFVEGQLPSPKPDALDNHQKCFAILKLYRPKVDNSAVGTVKKSDMAEVKDWKAVRVDLVITPFEQFAYALLGWTGSGQFRRDLRRYAEEERDMLLDNHRLYDLKKGIFLSADSEEEIFGHLGLDYLEPWERNA

SEQ ID NO: 4639 - DNA, 1182 bp, synthetic construct
  misc_feature 1..1182: note = Variant of terminal deoxynucleotidyl transferase
  source 1..1182: mol_type = other DNA
atgcatcaccaccatcatcatgggggttctggtcatccggaaggtaataccccggagaaggaggtgccgagcgttatcgcccgtcatgttagtcagtacgcgtgccagcgcaagaccacgctgaataactacaacaaaaagttcaccgacgcgctggagatcatggccgagaactacaaatttaaagagaacctgcaggcgtgtctggaagccaagcgcgccgcgagtgtcctgaaaagcctgccgttcgaggttaccagcatgaaagacatccaaggtctgccgtgcattaccgacgacgtacgtgacgtgatcgaggagatcatcgaagagggcgagagcagccgtgttaaagaaatcctcaatgacgagcgctacaaggcctttaagcagttcaccagcgtgttcggtgtgggcgtgaaaacctcggaaaagtggtaccgtatgggcctccgtacggttgaagaagcaaaggccagtaagagtctgaagctgagcaagatgcagaaggcgggcttcctgtattacgaggatctggcgagcggtgttagtaaagaagaagccgatgccgttacgctcatcgtgaaggaaacggtgcgtactgttagtccggatgcgctggtgaccatcgccggcggtttccgccgtggcaaacctatgggccacgacgttgacctgctgatcacgattccgggccgtcctgaagatgacgagctgctccacaaagtggttgatctgctcaagaagcaaggtctgctgctgtacgaagacatccgtgagagcacgttcgtggaggggcaactgccaagtcctaaacctgacgccctggacaaccatcagaagtgcttcgccattctcaagctgtaccgtccgaaggtggataacagtgcggttgggtttagtaagaaaagtgacatggctgaggttaaggattggaaagcggttcgtgtggatctggtgatcacgccattcgagcagttcgcctatgcgctgctcggttggacgggcagcggccaatttcgtcgcgatctgcgtcgctatgcggaggaagagcgcgacatgctgctcgacaaccatcgtctctacgacctgaaaaagggcatctttctgagtgcggacagcgaagaagagattttcggtcatctgggtctggattatctggagccgtgggaacgcaacgcg

SEQ ID NO: 4640 - protein, 394 aa, synthetic construct
  REGION 1..394: note = Variant of terminal deoxynucleotidyl transferase
MHHHHHHGGSGHPEGNTPEKEVPSVIARHVSQYACQRKTTLNNYNKKFTDALEIMAENYKFKENLQACLEAKRAASVLKSLPFEVTSMKDIQGLPCITDDVRDVIEEIIEEGESSRVKEILNDERYKAFKQFTSVFGVGVKTSEKWYRMGLRTVEEAKASKSLKLSKMQKAGFLYYEDLASGVSKEEADAVTLIVKETVRTVSPDALVTIAGGFRRGKPMGHDVDLLITIPGRPEDDELLHKVVDLLKKQGLLLYEDIRESTFVEGQLPSPKPDALDNHQKCFAILKLYRPKVDNSAVGFSKKSDMAEVKDWKAVRVDLVITPFEQFAYALLGWTGSGQFRRDLRRYAEEERDMLLDNHRLYDLKKGIFLSADSEEEIFGHLGLDYLEPWERNA

SEQ ID NO: 4641 - DNA, 1182 bp, synthetic construct
  misc_feature 1..1182: note = Variant of terminal deoxynucleotidyl transferase
  source 1..1182: mol_type = other DNA
atgcatcaccaccatcatcatgggggttctggtcatccggaaggtaataccccggagaaggaggtgccgagcgttatcgcccgtcatgttagtcagtacgcgtgccagcgcaagaccacgctgaataactacaacaaaaagttcaccgacgcgctggagatcatggccgagaactacaaatttaaagagaacctgcaggcgtgtctggaagccaagcgcgccgcgagtgtcctgaaaagcctgccgttcgaggttaccagcatgaaagacatccaaggtctgccgtgcattaccgacgacgtacgtgacgtgatcgaggagatcatcgaagagggcgagagcagccgtgttaaagaaatcctcaatgacgagcgctacaaggcctttaagcagttcaccagcgtgttcggtgtgggcgtgaaaacctcggaaaagtggtaccgtatgggcctccgtacggttgaagaagcaaaggccagtaagagtctgaagctgagcaagatgcagaaggcgggcttcctgtattacgaggatctggcgagcggtgttagtaaagaagaagccgatgccgttacgctcatcgtgaaggaaacggtgcgtactgttagtccggatgcgctggtgaccatcgccggcggtttccgccgtggcaaacctatgggccacgacgttgacctgctgatcacgattccgggccgtcctgaagatgacgagctgctccacaaagtggttgatctgctcaagaagcaaggtctgctgctgtacgaagacatccgtgagagcacgttcgtggaggggcaactgccaagtcctaaacctgacgccctggacaaccatcagaagtgcttcgccattctcaagctgtaccgttataaggtggataacagtgcggttgggacgagtaagaaaagtgacatggctgaggttaaggattggaaagcggttcgtgtggatctggtgatcacgccattcgagcagttcgcctatgcgctgctcggttggacgggcagcggccaatttcgtcgcgatctgcgtcgctatgcggaggaagagcgcgacatgctgctcgacaaccatcgtctctacgacctgaaaaagggcatctttctgagtgcggacagcgaagaagagattttcggtcatctgggtctggattatctggagccgtgggaacgcaacgcg

SEQ ID NO: 4642 - protein, 394 aa, synthetic construct
  REGION 1..394: note = Variant of terminal deoxynucleotidyl transferase
MHHHHHHGGSGHPEGNTPEKEVPSVIARHVSQYACQRKTTLNNYNKKFTDALEIMAENYKFKENLQACLEAKRAASVLKSLPFEVTSMKDIQGLPCITDDVRDVIEEIIEEGESSRVKEILNDERYKAFKQFTSVFGVGVKTSEKWYRMGLRTVEEAKASKSLKLSKMQKAGFLYYEDLASGVSKEEADAVTLIVKETVRTVSPDALVTIAGGFRRGKPMGHDVDLLITIPGRPEDDELLHKVVDLLKKQGLLLYEDIRESTFVEGQLPSPKPDALDNHQKCFAILKLYRYKVDNSAVGTSKKSDMAEVKDWKAVRVDLVITPFEQFAYALLGWTGSGQFRRDLRRYAEEERDMLLDNHRLYDLKKGIFLSADSEEEIFGHLGLDYLEPWERNA

SEQ ID NO: 4643 - DNA, 1182 bp, synthetic construct
  misc_feature 1..1182: note = Variant of terminal deoxynucleotidyl transferase
  source 1..1182: mol_type = other DNA
atgcatcaccaccatcatcatgggggttctggtcatccggaaggtaataccccggagaaggaggtgccgagcgttatcgcccgtcatgttagtcagtacgcgtgccagcgcaagaccacgctgaataactacaacaaaaagttcaccgacgcgctggagatcatggccgagaactacaaatttaaagagaacctgcaggcgtgtctggaagccaagcgcgccgcgagtgtcctgaaaagcctgccgttcgaggttaccagcatgaaagacatccaaggtctgccgtgcattaccgacgacgtacgtgacgtgatcgaggagatcatcgaagagggcgagagcagccgtgttaaagaaatcctcaatgacgagcgctacaaggcctttaagcagttcaccagcgtgttcggtgtgggcgtgaaaacctcggaaaagtggtaccgtatgggcctccgtacggttgaagaagcaaaggccagtaagagtctgaagctgagcaagatgcagaaggcgggcttcctgtattacgaggatctggcgagcggtgttagtaaagaagaagccgatgccgttacgctcatcgtgaaggaaacggtgcgtactgttagtccggatgcgctggtgaccatcgccggcggtttccgccgtggcaaacctatgggccacgacgttgacctgctgatcacgattccgggccgtcctgaagatgacgagctgctccacaaagtggttgatctgctcaagtctcaaggtctgctgctgtacgaagacatccgtgagagcacgttcgtggaggggcaactgccaagtcctaaacctgacgccctggacaaccatcagaagtgcttcgccattctcaagctgtaccgtccgaaggtggataacagtgcggttgggacgagtaagaaaagtgacatggctgaggttaaggattggaaagcggttcgtgtggatctggtgatcacgccattcgagcagttcgcctatgcgctgctcggttggacgggcagcggccaatttcgtcgcgatctgcgtcgctatgcggaggaagagcgcgacatgctgctcgacaaccatcgtctctacgacctgaaaaagggcatctttctgagtgcggacagcgaagaagagattttcggtcatctgggtctggattatctggagccgtgggaacgcaacgcg

SEQ ID NO: 4644 - protein, 394 aa, synthetic construct
  REGION 1..394: note = Variant of terminal deoxynucleotidyl transferase
MHHHHHHGGSGHPEGNTPEKEVPSVIARHVSQYACQRKTTLNNYNKKFTDALEIMAENYKFKENLQACLEAKRAASVLKSLPFEVTSMKDIQGLPCITDDVRDVIEEIIEEGESSRVKEILNDERYKAFKQFTSVFGVGVKTSEKWYRMGLRTVEEAKASKSLKLSKMQKAGFLYYEDLASGVSKEEADAVTLIVKETVRTVSPDALVTIAGGFRRGKPMGHDVDLLITIPGRPEDDELLHKVVDLLKSQGLLLYEDIRESTFVEGQLPSPKPDALDNHQKCFAILKLYRPKVDNSAVGTSKKSDMAEVKDWKAVRVDLVITPFEQFAYALLGWTGSGQFRRDLRRYAEEERDMLLDNHRLYDLKKGIFLSADSEEEIFGHLGLDYLEPWERNA

SEQ ID NO: 4645 - DNA, 1182 bp, synthetic construct
  misc_feature 1..1182: note = Variant of terminal deoxynucleotidyl transferase
  source 1..1182: mol_type = other DNA
atgcatcaccaccatcatcatgggggttctggtcatccggaaggtaataccccggagaaggaggtgccgagcgttatcgcccgtcatgttagtcagtacgcgtgccagcgcaagaccacgctgaataactacaacaaaaagttcaccgacgcgctggagatcatggccgagaactacaaatttaaagagaacctgcaggcgtgtctggaagccaagcgcgccgcgagtgtcctgaaaagcctgccgttcgaggttaccagcatgaaagacatccaaggtctgccgtgcattaccgacgacgtacgtgacgtgatcgaggagatcatcgaagagggcgagagcagccgtgttaaagaaatcctcaatgacgagcgctacaaggcctttaagcagttcaccagcgtgttcggtgtgggcgtgaaaacctcggaaaagtggtaccgtatgggcctccgtacggttgaagaagcaaaggccagtaagagtctgaagctgagcaagatgcagaaggcgggcttcctgtattacgaggatctggcgagcggtgttcagaaagaagaagccgatgccgttacgctcatcgtgaaggaaacggtgcgtactgttagtccggatgcgctggtgaccatcgccggcggtttccgccgtggcaaacctatgggccacgacgttgacctgctgatcacgattccgggccgtcctgaagatgacgagctgctccacaaagtggttgatctgctcaagaagcaaggtctgctgctgtacgaagacatccgtgagagcacgttcgtggaggggcaactgccaagtcctaaacctgacgccctggacaaccatcagaagtgcttcgccattctcaagctgtaccgtccgaaggtggataacagtgcggttgggacgagtaagaaaagtgacatggctgaggttaaggattggaaagcggttcgtgtggatctggtgatcacgccattcgagcagttcgcctatgcgctgctcggttggacgggcagcggccaatttcgtcgcgatctgcgtcgctatgcggaggaagagcgcgacatgctgctcgacaaccatcgtctctacgacctgaaaaagggcatctttctgagtgcggacagcgaagaagagattttcggtcatctgggtctggattatctggagccgtgggaacgcaacgcg

SEQ ID NO: 4646 - protein, 394 aa, synthetic construct
  REGION 1..394: note = Variant of terminal deoxynucleotidyl transferase
MHHHHHHGGSGHPEGNTPEKEVPSVIARHVSQYACQRKTTLNNYNKKFTDALEIMAENYKFKENLQACLEAKRAASVLKSLPFEVTSMKDIQGLPCITDDVRDVIEEIIEEGESSRVKEILNDERYKAFKQFTSVFGVGVKTSEKWYRMGLRTVEEAKASKSLKLSKMQKAGFLYYEDLASGVQKEEADAVTLIVKETVRTVSPDALVTIAGGFRRGKPMGHDVDLLITIPGRPEDDELLHKVVDLLKKQGLLLYEDIRESTFVEGQLPSPKPDALDNHQKCFAILKLYRPKVDNSAVGTSKKSDMAEVKDWKAVRVDLVITPFEQFAYALLGWTGSGQFRRDLRRYAEEERDMLLDNHRLYDLKKGIFLSADSEEEIFGHLGLDYLEPWERNA

SEQ ID NO: 4647 - DNA, 1182 bp, synthetic construct
  misc_feature 1..1182: note = Variant of terminal deoxynucleotidyl transferase
  source 1..1182: mol_type = other DNA
atgcatcaccaccatcatcatgggggttctggtcatccggaaggtaataccccggagaaggaggtgccgagcgttatcgcccgtcatgttagtcagtacgcgtgccagcgcaagaccacgctgaataactacaacaaaaagttcaccgacgcgctggagatcatggccgagaactacaaatttagggagaacctgcaggcgtgtctggaagccaagcgcgccgcgagtgtcctgaaaagcctgccgttcgaggttaccagcatgaaagacatccaaggtctgccgtgcattaccgacgacgtacgtgacgtgatcgaggagatcatcgaagagggcgagagcagccgtgttaaagaaatcctcaatgacgagcgctacaaggcctttaagcagttcaccagcgtgttcggtgtgggcgtgaaaacctcggaaaagtggtaccgtatgggcctccgtacggttgaagaagcaaaggccagtaagagtctgaagctgagcaagatgcagaaggcgggcttcctgtattacgaggatctggcgagcggtgttagtaaagaagaagccgatgccgttacgctcatcgtgaaggaaacggtgcgtactgttagtccggatgcgctggtgaccatcgccggcggtttccgccgtggcaaacctatgggccacgacgttgacctgctgatcacgattccgggccgtcctgaagatgacgagctgctccacaaagtggttgatctgctcaagaagcaaggtctgctgctgtacgaagacatccgtgagagcacgttcgtggaggggcaactgccaagtcctaaacctgacgccctggacaaccatcagaagtgcttcgccattctcaagctgtaccgtccgaaggtggataacagtgcggttgggacgagtaagaaaagtgacatggctgaggttaaggattggaaagcggttcgtgtggatctggtgatcacgccattcgagcagttcgcctatgcgctgctcggttggacgggcagcggccaatttcgtcgcgatctgcgtcgctatgcggaggaagagcgcgacatgctgctcgacaaccatcgtctctacgacctgaaaaagggcatctttctgagtgcggacagcgaagaagagattttcggtcatctgggtctggattatctggagccgtgggaacgcaacgcg

SEQ ID NO: 4648 - protein, 394 aa, synthetic construct
  REGION 1..394: note = Variant of terminal deoxynucleotidyl transferase
MHHHHHHGGSGHPEGNTPEKEVPSVIARHVSQYACQRKTTLNNYNKKFTDALEIMAENYKFRENLQACLEAKRAASVLKSLPFEVTSMKDIQGLPCITDDVRDVIEEIIEEGESSRVKEILNDERYKAFKQFTSVFGVGVKTSEKWYRMGLRTVEEAKASKSLKLSKMQKAGFLYYEDLASGVSKEEADAVTLIVKETVRTVSPDALVTIAGGFRRGKPMGHDVDLLITIPGRPEDDELLHKVVDLLKKQGLLLYEDIRESTFVEGQLPSPKPDALDNHQKCFAILKLYRPKVDNSAVGTSKKSDMAEVKDWKAVRVDLVITPFEQFAYALLGWTGSGQFRRDLRRYAEEERDMLLDNHRLYDLKKGIFLSADSEEEIFGHLGLDYLEPWERNA

SEQ ID NO: 4649 - DNA, 1182 bp, synthetic construct
  misc_feature 1..1182: note = Variant of terminal deoxynucleotidyl transferase
  source 1..1182: mol_type = other DNA
atgcatcaccaccatcatcatgggggttctggtcatccggaaggtaataccccggagaaggaggtgccgagcgttatcgcccgtcatgttagtcagtacgcgtgccagcgcaagaccacgctgaataactacaacaaaaagttcaccgacgcgctggagatcatggccgagaactacaaattttgggagaacctgcaggcgtgtctggaagccaagcgcgccgcgagtgtcctgaaaagcctgccgttcgaggttaccagcatgaaagacatccaaggtctgccgtgcattaccgacgacgtacgtgacgtgatcgaggagatcatcgaagagggcgagagcagccgtgttaaagaaatcctcaatgacgagcgctacaaggcctttaagcagttcaccagcgtgttcggtgtgggcgtgaaaacctcggaaaagtggtaccgtatgggcctccgtacggttgaagaagcaaaggccagtaagagtctgaagctgagcaagatgcagaaggcgggcttcctgtattacgaggatctggcgagcggtgttagtaaagaagaagccgatgccgttacgctcatcgtgaaggaaacggtgcgtactgttagtccggatgcgctggtgaccatcgccggcggtttccgccgtggcaaacctatgggccacgacgttgacctgctgatcacgattccgggccgtcctgaagatgacgagctgctccacaaagtggttgatctgctcaagaagcaaggtctgctgctgtacgaagacatccgtgagagcacgttcgtggaggggcaactgccaagtcctaaacctgacgccctggacaaccatcagaagtgcttcgccattctcaagctgtaccgtccgaaggtggataacagtgcggttgggacgagtaagaaaagtgacatggctgaggttaaggattggaaagcggttcgtgtggatctggtgatcacgccattcgagcagttcgcctatgcgctgctcggttggacgggcagcggccaatttcgtcgcgatctgcgtcgctatgcggaggaagagcgcgacatgctgctcgacaaccatcgtctctacgacctgaaaaagggcatctttctgagtgcggacagcgaagaagagattttcggtcatctgggtctggattatctggagccgtgggaacgcaacgcg

SEQ ID NO: 4650 - protein, 394 aa, synthetic construct
  REGION 1..394: note = Variant of terminal deoxynucleotidyl transferase
MHHHHHHGGSGHPEGNTPEKEVPSVIARHVSQYACQRKTTLNNYNKKFTDALEIMAENYKFWENLQACLEAKRAASVLKSLPFEVTSMKDIQGLPCITDDVRDVIEEIIEEGESSRVKEILNDERYKAFKQFTSVFGVGVKTSEKWYRMGLRTVEEAKASKSLKLSKMQKAGFLYYEDLASGVSKEEADAVTLIVKETVRTVSPDALVTIAGGFRRGKPMGHDVDLLITIPGRPEDDELLHKVVDLLKKQGLLLYEDIRESTFVEGQLPSPKPDALDNHQKCFAILKLYRPKVDNSAVGTSKKSDMAEVKDWKAVRVDLVITPFEQFAYALLGWTGSGQFRRDLRRYAEEERDMLLDNHRLYDLKKGIFLSADSEEEIFGHLGLDYLEPWERNA

SEQ ID NO: 4651 - DNA, 1182 bp, synthetic construct
  misc_feature 1..1182: note = Variant of terminal deoxynucleotidyl transferase
  source 1..1182: mol_type = other DNA
atgcatcaccaccatcatcatgggggttctggtcatccggaaggtaataccccggagaaggaggtgccgagcgttatcgcccgtcatgttagtcagtacgcgtgccagcgcaagaccacgctgaataactacaacaaaaagttcaccgacgcgctggagatcatggccgagaactacaaatttaaagagaacctgcaggcgtgtctggaagccaagcgcgccgcgagtgtcctgaaaagcctgccgttcgaggttaccagcatgaaagacatccaaggtctgccgtgcattaccgacgacgtacgtgacgtgatcgaggagatcatcgaagagggcgagagcagccgtgttaaagaaatcctcaatgacgagcgctacaaggcctttaagcagttcaccagcgtgttcggtgtgggcgtgaaaacctcggaaaagtggtaccgtatgggcctccgtacggttgaagaagcaaaggccagtaagagtctgaagctgagcaagatgcagaaggcgggcttcctgtattacgaggatctggcgagcggtgttagtaaagaagaagccgatgccgttacgctcatcgtgaaggaaacggtgcgtactgttagtccggatgcgctggtgaccatcgccggcggtttccgccgtggcaaacctatgggccacgacgttgacctgctgatcacgattccgggccgtcctgaagatgacgagctgctccacaaagtggttgatctgctcaagaagcaaggtctgctgctgtacgaagacatccgtgagagcacgttcgtggaggggcaactgccaagtcctaaacctgacgccctggacaaccatcagaagtgcttcgccattctcaagctgtaccgtccgaaggtggataacagtgcggttgggacgagtaagaaaggggacatggctgaggttaaggattggaaagcggttcgtgtggatctggtgatcacgccattcgagcagttcgcctatgcgctgctcggttggacgggcagcggccaatttcgtcgcgatctgcgtcgctatgcggaggaagagcgcgacatgctgctcgacaaccatcgtctctacgacctgaaaaagggcatctttctgagtgcggacagcgaagaagagattttcggtcatctgggtctggattatctggagccgtgggaacgcaacgcg

SEQ ID NO: 4652 - protein, 394 aa, synthetic construct
  REGION 1..394: note = Variant of terminal deoxynucleotidyl transferase
MHHHHHHGGSGHPEGNTPEKEVPSVIARHVSQYACQRKTTLNNYNKKFTDALEIMAENYKFKENLQACLEAKRAASVLKSLPFEVTSMKDIQGLPCITDDVRDVIEEIIEEGESSRVKEILNDERYKAFKQFTSVFGVGVKTSEKWYRMGLRTVEEAKASKSLKLSKMQKAGFLYYEDLASGVSKEEADAVTLIVKETVRTVSPDALVTIAGGFRRGKPMGHDVDLLITIPGRPEDDELLHKVVDLLKKQGLLLYEDIRESTFVEGQLPSPKPDALDNHQKCFAILKLYRPKVDNSAVGTSKKGDMAEVKDWKAVRVDLVITPFEQFAYALLGWTGSGQFRRDLRRYAEEERDMLLDNHRLYDLKKGIFLSADSEEEIFGHLGLDYLEPWERNA

SEQ ID NO: 4653 - DNA, 1182 bp, synthetic construct
  misc_feature 1..1182: note = Variant of terminal deoxynucleotidyl transferase
  source 1..1182: mol_type = other DNA
atgcatcaccaccatcatcatgggggttctggtcatccggaaggtaataccccggagaaggaggtgccgagcgttatcgcccgtcatgttagtcagtacgcgtgccagcgcaagaccacgctgaataactacaacaaaaagttcaccgacgcgctggagatcatggccgagaactacaaatttaaagagaacctgcaggcgtgtctggaagccaagcgcgccgcgagtgtcctgaaaagcctgccgttcgaggttaccagcatgaaagacatccaaggtctgccgtgcattaccgacgacgtacgtgacgtgatcgaggagatcatcgaagagggcgagagcagccgtgttaaagaaatcctcaatgacgagcgctacaaggcctttaagcagttcaccagcgtgttcggtgtgggcgtgaaaacctcggaaaagtggtaccgtatgggcctccgtacggttgaagaagcaaaggccagtaagagtctgaagctgagcaagatgcagaaggcgggcttcctgtattacgaggatctggcgagcggtgttagtaaagaagaagccgatgccgttacgctcatcgtgaaggaaacggtgcgtactgttagtccggatgcgctggtgaccatcgccggcggtttccgccgtggcaaacctatgggccacgacgttgacctgctgatcacgattccgggccgtcctgaagatgacgagctgctccacaaagtggttgatctgctcaagaagcaaggtctgctgctgtacgaagacatccgtgagagcacgttcgtggaggggcaactgccaagtcctaaacctgacgccctggacaaccatcagaagtgcttcgccattctcaagctgtaccgtccgaaggtggataacagtgcggttgggacgagtaagaaaagtgacgcggctgaggttaaggattggaaagcggttcgtgtggatctggtgatcacgccattcgagcagttcgcctatgcgctgctcggttggacgggcagcggccaatttcgtcgcgatctgcgtcgctatgcggaggaagagcgcgacatgctgctcgacaaccatcgtctctacgacctgaaaaagggcatctttctgagtgcggacagcgaagaagagattttcggtcatctgggtctggattatctggagccgtgggaacgcaacgcg

SEQ ID NO: 4654 - protein, 394 aa, synthetic construct
  REGION 1..394: note = Variant of terminal deoxynucleotidyl transferase
MHHHHHHGGSGHPEGNTPEKEVPSVIARHVSQYACQRKTTLNNYNKKFTDALEIMAENYKFKENLQACLEAKRAASVLKSLPFEVTSMKDIQGLPCITDDVRDVIEEIIEEGESSRVKEILNDERYKAFKQFTSVFGVGVKTSEKWYRMGLRTVEEAKASKSLKLSKMQKAGFLYYEDLASGVSKEEADAVTLIVKETVRTVSPDALVTIAGGFRRGKPMGHDVDLLITIPGRPEDDELLHKVVDLLKKQGLLLYEDIRESTFVEGQLPSPKPDALDNHQKCFAILKLYRPKVDNSAVGTSKKSDAAEVKDWKAVRVDLVITPFEQFAYALLGWTGSGQFRRDLRRYAEEERDMLLDNHRLYDLKKGIFLSADSEEEIFGHLGLDYLEPWERNA

SEQ ID NO: 4655 - DNA, 1182 bp, synthetic construct
  misc_feature 1..1182: note = Variant of terminal deoxynucleotidyl transferase
  source 1..1182: mol_type = other DNA
atgcatcaccaccatcatcatgggggttctggtcatccggaaggtaataccccggagaaggaggtgccgagcgttatcgcccgtcatgttagtcagtacgcgtgccagcgcaagaccacgctgaataactacaacaaaaagttcaccgacgcgctggagatcatggccgagaactacaaatttaaagagaacctgcaggcgtgtctggaagccaagcgcgccgcgagtgtcctgaaaagcctgccgttcgaggttaccagcatgaaagacatccaaggtctgccgtgcattaccgacgacgtacgtgacgtgatcgaggagatcatcgaagagggcgagagcagccgtgttaaagaaatcctcaatgacgagcgctacaaggcctttaagcagttcaccagcgtgttcggtgtgggcgtgaaaacctcggaaaagtggtaccgtatgggcctccgtacggttgaagaagcaaaggccagtaagagtctgaagctgagcaagatgcagaaggcgggcttcctgtattacgaggatctggcgagcggtgttagtaaagaagaagccgatgccgttacgctcatcgtgaaggaaacggtgcgtactgttagtccggatgcgctggtgaccatcgccggcggtttccgccgtggcaaacctatgggccacgacgttgacctgctgatcacgattccgggccgtcctgaagatgacgagctgctccacaaagtggttgatctgctcaagaagcaaggtctgatgctgtacgaagacatccgtgagagcacgttcgtggaggggcaactgccaagtcctaaacctgacgccctggacaaccatcagaagtgcttcgccattctcaagctgtaccgtccgaaggtggataacagtgcggttgggacgagtaagaaaagtgacatggctgaggttaaggattggaaagcggttcgtgtggatctggtgatcacgccattcgagcagttcgcctatgcgctgctcggttggacgggcagcggccaatttcgtcgcgatctgcgtcgctatgcggaggaagagcgcgacatgctgctcgacaaccatcgtctctacgacctgaaaaagggcatctttctgagtgcggacagcgaagaagagattttcggtcatctgggtctggattatctggagccgtgggaacgcaacgcg

SEQ ID NO: 4656 - protein, 394 aa, synthetic construct
  REGION 1..394: note = Variant of terminal deoxynucleotidyl transferase
MHHHHHHGGSGHPEGNTPEKEVPSVIARHVSQYACQRKTTLNNYNKKFTDALEIMAENYKFKENLQACLEAKRAASVLKSLPFEVTSMKDIQGLPCITDDVRDVIEEIIEEGESSRVKEILNDERYKAFKQFTSVFGVGVKTSEKWYRMGLRTVEEAKASKSLKLSKMQKAGFLYYEDLASGVSKEEADAVTLIVKETVRTVSPDALVTIAGGFRRGKPMGHDVDLLITIPGRPEDDELLHKVVDLLKKQGLMLYEDIRESTFVEGQLPSPKPDALDNHQKCFAILKLYRPKVDNSAVGTSKKSDMAEVKDWKAVRVDLVITPFEQFAYALLGWTGSGQFRRDLRRYAEEERDMLLDNHRLYDLKKGIFLSADSEEEIFGHLGLDYLEPWERNA

SEQ ID NO: 4657 - DNA, 1182 bp, synthetic construct
  misc_feature 1..1182: note = Variant of terminal deoxynucleotidyl transferase
  source 1..1182: mol_type = other DNA
atgcatcaccaccatcatcatgggggttctggtcatccggaaggtaataccccggagaaggaggtgccgagcgttatcgcccgtcatgttagtcagtacgcgtgccagcgcaagaccacgctgaataactacaacaaaaagttcaccgacgcgctggagatcatggccgagaactacaaatttaaagagaacctgcaggcgtgtctggaagccaagcgcgccgcgagtgtcctgaaaagcctgccgttcgaggttaccagcatgaaagacatccaaggtctgccgtgcattaccgacgacgtacgtgacgtgatcgaggagatcatctatgagggcgagagcagccgtgttaaagaaatcctcaatgacgagcgctacaaggcctttaagcagttcaccagcgtgttcggtgtgggcgtgaaaacctcggaaaagtggtaccgtatgggcctccgtacggttgaagaagcaaaggccagtaagagtctgaagctgagcaagatgcagaaggcgggcttcctgtattacgaggatctggcgagcggtgttagtaaagaagaagccgatgccgttacgctcatcgtgaaggaaacggtgcgtactgttagtccggatgcgctggtgaccatcgccggcggtttccgccgtggcaaacctatgggccacgacgttgacctgctgatcacgattccgggccgtcctgaagatgacgagctgctccacaaagtggttgatctgctcaagaagcaaggtctgctgctgtacgaagacatccgtgagagcacgttcgtggaggggcaactgccaagtcctaaacctgacgccctggacaaccatcagaagtgcttcgccattctcaagctgtaccgtccgaaggtggataacagtgcggttgggacgagtaagaaaagtgacatggctgaggttaaggattggaaagcggttcgtgtggatctggtgatcacgccattcgagcagttcgcctatgcgctgctcggttggacgggcagcggccaatttcgtcgcgatctgcgtcgctatgcggaggaagagcgcgacatgctgctcgacaaccatcgtctctacgacctgaaaaagggcatctttctgagtgcggacagcgaagaagagattttcggtcatctgggtctggattatctggagccgtgggaacgcaacgcg

SEQ ID NO: 4658 - protein, 394 aa, synthetic construct
  REGION 1..394: note = Variant of terminal deoxynucleotidyl transferase
MHHHHHHGGSGHPEGNTPEKEVPSVIARHVSQYACQRKTTLNNYNKKFTDALEIMAENYKFKENLQACLEAKRAASVLKSLPFEVTSMKDIQGLPCITDDVRDVIEEIIYEGESSRVKEILNDERYKAFKQFTSVFGVGVKTSEKWYRMGLRTVEEAKASKSLKLSKMQKAGFLYYEDLASGVSKEEADAVTLIVKETVRTVSPDALVTIAGGFRRGKPMGHDVDLLITIPGRPEDDELLHKVVDLLKKQGLLLYEDIRESTFVEGQLPSPKPDALDNHQKCFAILKLYRPKVDNSAVGTSKKSDMAEVKDWKAVRVDLVITPFEQFAYALLGWTGSGQFRRDLRRYAEEERDMLLDNHRLYDLKKGIFLSADSEEEIFGHLGLDYLEPWERNA

SEQ ID NO: 4659 - DNA, 1182 bp, synthetic construct
  misc_feature 1..1182: note = Variant of terminal deoxynucleotidyl transferase
  source 1..1182: mol_type = other DNA
atgcatcaccaccatcatcatgggggttctggtcatccggaaggtaataccccggagaaggaggtgccgagcgttatcgcccgtcatgttagtcagtacgcgtgccagcgcaagaccacgctgaataactacaacaaaaagttcaccgacgcgctggagatcatggccgagaactacaaatttaaagagaacctgcaggcgtgtctggaagccaagcgcgccgcgagtgtcctgaaaagcctgccgttcgaggttaccagcatgaaagacatccaaggtctgccgtgcattaccgacgacgtacgtgacgtgatcgaggagatcatcgaagagggcgagagcagccgtgttaaagaaatcctcaatgacgagcgctacaaggcctttaagcagttcaccagcgtgttcggtgtgggcgtgaaaacctcggaaaagtggtaccgtatgggcctccgtacggttgaagaagcaaaggccagtaagagtctgaagctgagcaagatgcagaaggcgggcttcctgtattacgaggatctggcgagcggtgttagtaaagaagaagccgatgccgttacgctcatcgtgaaggaaacggtgcgtactgttagtccggatccgctggtgaccatcgccggcggtttccgccgtggcaaacctatgggccacgacgttgacctgctgatcacgattccgggccgtcctgaagatgacgagctgctccacaaagtggttgatctgctcaagaagcaaggtctgctgctgtacgaagacatccgtgagagcacgttcgtggaggggcaactgccaagtcctaaacctgacgccctggacaaccatcagaagtgcttcgccattctcaagctgtaccgtccgaaggtggataacagtgcggttgggacgagtaagaaaagtgacatggctgaggttaaggattggaaagcggttcgtgtggatctggtgatcacgccattcgagcagttcgcctatgcgctgctcggttggacgggcagcggccaatttcgtcgcgatctgcgtcgctatgcggaggaagagcgcgacatgctgctcgacaaccatcgtctctacgacctgaaaaagggcatctttctgagtgcggacagcgaagaagagattttcggtcatctgggtctggattatctggagccgtgggaacgcaacgcg

SEQ ID NO: 4660 - protein, 394 aa, synthetic construct
  REGION 1..394: note = Variant of terminal deoxynucleotidyl transferase
MHHHHHHGGSGHPEGNTPEKEVPSVIARHVSQYACQRKTTLNNYNKKFTDALEIMAENYKFKENLQACLEAKRAASVLKSLPFEVTSMKDIQGLPCITDDVRDVIEEIIEEGESSRVKEILNDERYKAFKQFTSVFGVGVKTSEKWYRMGLRTVEEAKASKSLKLSKMQKAGFLYYEDLASGVSKEEADAVTLIVKETVRTVSPDPLVTIAGGFRRGKPMGHDVDLLITIPGRPEDDELLHKVVDLLKKQGLLLYEDIRESTFVEGQLPSPKPDALDNHQKCFAILKLYRPKVDNSAVGTSKKSDMAEVKDWKAVRVDLVITPFEQFAYALLGWTGSGQFRRDLRRYAEEERDMLLDNHRLYDLKKGIFLSADSEEEIFGHLGLDYLEPWERNA

SEQ ID NO: 4661 - DNA, 1182 bp, synthetic construct
  misc_feature 1..1182: note = Variant of terminal deoxynucleotidyl transferase
  source 1..1182: mol_type = other DNA
atgcatcaccaccatcatcatgggggttctggtcatccggaaggtaataccccggagaaggaggtgccgagcgttatcgcccgtcatgttagtcagtacgcgtgccagcgcaagaccacgctgaataactacaacaaaaagttcaccgacgcgctggagatcatggccgagaactacaaatttaaagagaacctgcaggcgtgtctggaagccaagcgcgccgcgagtgtcctgaaaagcctgccgttcgaggttaccagcatgaaagacatccaaggtctgccgtgcattaccgacgacgtacgtgacgtgatcgaggagatcatcgaagagggcgagagcagccgtgttaaagaaatcctcaatgacgagcgctacaaggcctttaagcagttcaccagcgtgttcggtgtgggcgtgaaaacctcggaaaagtggtaccgtatgggcctccgtacggttgaagaagcaaaggccagtaagagtctgaagctgagcaagatgcagaaggcgggcttcctgtattacgaggatctggcgagcggtgttagtaaagaagaagccgatgccgttacgctcatcgtgaaggaaacggtgcgtactgttagtccggatgcgctggtgaccatcgccggcggtttccgccgtggcaaacctatgggccacgacgttgacctgctgatcacgattccgggccgtcctgaagatgacgagctgctccacaaagtggttgatctgctcaagaagcaaggtctgctgctgtacgaagacatccgtgagagcacgttcgtggaggggcaactgccaagtcctaaacctgacgccctggacaaccatcagaagtgcttcgccattctcaagctgtaccgtccgaaggtggataacagtgcggttgggacgagtaagaaaagtgacggggctgaggttaaggattggaaagcggttcgtgtggatctggtgatcacgccattcgagcagttcgcctatgcgctgctcggttggacgggcagcggccaatttcgtcgcgatctgcgtcgctatgcggaggaagagcgcgacatgctgctcgacaaccatcgtctctacgacctgaaaaagggcatctttctgagtgcggacagcgaagaagagattttcggtcatctgggtctggattatctggagccgtgggaacgcaacgcg

SEQ ID NO: 4662 - protein, 394 aa, synthetic construct
  REGION 1..394: note = Variant of terminal deoxynucleotidyl transferase
MHHHHHHGGSGHPEGNTPEKEVPSVIARHVSQYACQRKTTLNNYNKKFTDALEIMAENYKFKENLQACLEAKRAASVLKSLPFEVTSMKDIQGLPCITDDVRDVIEEIIEEGESSRVKEILNDERYKAFKQFTSVFGVGVKTSEKWYRMGLRTVEEAKASKSLKLSKMQKAGFLYYEDLASGVSKEEADAVTLIVKETVRTVSPDALVTIAGGFRRGKPMGHDVDLLITIPGRPEDDELLHKVVDLLKKQGLLLYEDIRESTFVEGQLPSPKPDALDNHQKCFAILKLYRPKVDNSAVGTSKKSDGAEVKDWKAVRVDLVITPFEQFAYALLGWTGSGQFRRDLRRYAEEERDMLLDNHRLYDLKKGIFLSADSEEEIFGHLGLDYLEPWERNA

SEQ ID NO: 4663 - DNA, 1182 bp, synthetic construct
  misc_feature 1..1182: note = Variant of terminal deoxynucleotidyl transferase
  source 1..1182: mol_type = other DNA
atgcatcaccaccatcatcatgggggttctggtcatccggaaggtaataccccggagaaggaggtgccgagcgttatcgcccgtcatgttagtcagtacgcgtgccagcgcaagaccacgctgaataactacaacaaaaagttcaccgacgcgctggagatcatggccgagaactacaaatttaaagagaacctgcaggcgtgtctggaagccaagcgcgccgcgagtgtcctgaaaagcctgccgttcgaggttaccagcatgaaagacatccaaggtctgccgtgcattaccgacgacgtacgtgacgtgatcgaggagatcatcgaagagggcgagagcagccgtgttaaagaaatcctcaatgacgagcgctacaaggcctttaagcagttcaccagcgtgttcggtgtgggcgtgaaaacctcggaaaagtggtaccgtatgggcctccgtacggttgaagaagcaaaggccagtaagagtctgaagctgagcaagatgcagaaggcgggcttcctgtattacgaggatctggcgagcggtgttagtaaagaagaagccgatgccgttacgctcatcgtgaaggaaacggtgcgtactgttagtccggatgcgctggtgaccatcgccggcggtttccgccgtggcaaacctatgggccacgacgttgacctgctgatcacgattccgggccgtcctgaagatgacgagctgctccacaaagtggttgatctgctcaagaagcaaggtctgctgctgtacgaagacatccgtgagagcacgttcgtggaggggcaactgccaagtcctaaacctgacgccctggacaaccatcagaagtgcttcgccattctcaagctgtaccgtccgaaggtggataacagtgcggttgggacgagtaagaaaagtgacatggctgagtttaaggattggaaagcggttcgtgtggatctggtgatcacgccattcgagcagttcgcctatgcgctgctcggttggacgggcagcggccaatttcgtcgcgatctgcgtcgctatgcggaggaagagcgcgacatgctgctcgacaaccatcgtctctacgacctgaaaaagggcatctttctgagtgcggacagcgaagaagagattttcggtcatctgggtctggattatctggagccgtgggaacgcaacgcg

SEQ ID NO: 4664 - protein, 394 aa, synthetic construct
  REGION 1..394: note = Variant of terminal deoxynucleotidyl transferase
MHHHHHHGGSGHPEGNTPEKEVPSVIARHVSQYACQRKTTLNNYNKKFTDALEIMAENYKFKENLQACLEAKRAASVLKSLPFEVTSMKDIQGLPCITDDVRDVIEEIIEEGESSRVKEILNDERYKAFKQFTSVFGVGVKTSEKWYRMGLRTVEEAKASKSLKLSKMQKAGFLYYEDLASGVSKEEADAVTLIVKETVRTVSPDALVTIAGGFRRGKPMGHDVDLLITIPGRPEDDELLHKVVDLLKKQGLLLYEDIRESTFVEGQLPSPKPDALDNHQKCFAILKLYRPKVDNSAVGTSKKSDMAEFKDWKAVRVDLVITPFEQFAYALLGWTGSGQFRRDLRRYAEEERDMLLDNHRLYDLKKGIFLSADSEEEIFGHLGLDYLEPWERNA

SEQ ID NO: 4665 - DNA, 1182 bp, synthetic construct
  misc_feature 1..1182: note = Variant of terminal deoxynucleotidyl transferase
  source 1..1182: mol_type = other DNA
atgcatcaccaccatcatcatgggggttctggtcatccggaaggtaataccccggagaaggaggtgccgagcgttatcgcccgtcatgttagtcagtacgcgtgccagcgcaagaccacgctgaataactacaacaaaaagttcaccgacgcgctggagatcatggccgagaactacaaatttaaagagaacctgcaggcgtgtctggaagccaagcgcgccgcgagtgtcctgaaaagcctgccgttcgaggttaccagcatgaaagacatccaaggtctgccgtgcattaccgacgacgtacgtgacgtgatcgaggagatcatcgaagagggcgagagcagccgtgttaaagaaatcctcaatgacgagcgctacaaggcctttaagcagttcaccagcgtgttcggtgtgggcgtgaaaacctcggaaaagtggtaccgtatgggcctccgtacggttgaagaagcaaaggccagtaagagtctgaagctgagcaagatgcagaaggcgggcttcctgtattacgaggatctggcgagcggtgttagtaaagaagaagccgatgccgttacgctcatcgtgaaggaaacggtgcgtactgttagtccggatgcgctggtgaccatcgccggcggtttccgccgtggcaaacctatgggccacgacgttgacctgctgatcacgattccgggccgtcctgaagatgacgagctgctccacaaagtggtttgtctgctcaagaagcaaggtctgctgctgtacgaagacatccgtgagagcacgttcgtggaggggcaactgccaagtcctaaacctgacgccctggacaaccatcagaagtgcttcgccattctcaagctgtaccgtccgaaggtggataacagtgcggttgggacgagtaagaaaagtgacatggctgaggttaaggattggaaagcggttcgtgtggatctggtgatcacgccattcgagcagttcgcctatgcgctgctcggttggacgggcagcggccaatttcgtcgcgatctgcgtcgctatgcggaggaagagcgcgacatgctgctcgacaaccatcgtctctacgacctgaaaaagggcatctttctgagtgcggacagcgaagaagagattttcggtcatctgggtctggattatctggagccgtgggaacgcaacgcg

SEQ ID NO: 4666 - protein, 394 aa, synthetic construct
  REGION 1..394: note = Variant of terminal deoxynucleotidyl transferase
MHHHHHHGGSGHPEGNTPEKEVPSVIARHVSQYACQRKTTLNNYNKKFTDALEIMAENYKFKENLQACLEAKRAASVLKSLPFEVTSMKDIQGLPCITDDVRDVIEEIIEEGESSRVKEILNDERYKAFKQFTSVFGVGVKTSEKWYRMGLRTVEEAKASKSLKLSKMQKAGFLYYEDLASGVSKEEADAVTLIVKETVRTVSPDALVTIAGGFRRGKPMGHDVDLLITIPGRPEDDELLHKVVCLLKKQGLLLYEDIRESTFVEGQLPSPKPDALDNHQKCFAILKLYRPKVDNSAVGTSKKSDMAEVKDWKAVRVDLVITPFEQFAYALLGWTGSGQFRRDLRRYAEEERDMLLDNHRLYDLKKGIFLSADSEEEIFGHLGLDYLEPWERNA

SEQ ID NO: 4667 - DNA, 1182 bp, synthetic construct
  misc_feature 1..1182: note = Variant of terminal deoxynucleotidyl transferase
  source 1..1182: mol_type = other DNA
atgcatcaccaccatcatcatgggggttctggtcatccggaaggtaataccccggagaaggaggtgccgagcgttatcgcccgtcatgttagtcagtacgcgtgccagcgcaagaccacgctgaataactacaacaaaaagttcaccgacgcgctggagatcatggccgagaactacaaatttaaagagaacctgcaggcgtgtctggaagccaagcgcgccgcgagtgtcctgaaaagcctgccgttcgaggttaccagcatgaaagacatccaaggtctgccgtgcattaccgacgacgtacgtgacgtgatcgaggagatcatcgaagagggcgagagcagccgtgttaaagaaatcctcaatgacgagcgctacaaggcctttaagcagttcaccagcgtgttcggtgtgggcgtgaaaacctcggaaaagtggtaccgtatgggcctccgtacggttgaagaagcaaaggccagtaagagtctgaagctgagcaagatgcagaaggcgggcttcctgtattacgaggatctggcgagcggtgttagtaaagaagaagccgatgccgttacgctctgtgtgaaggaaacggtgcgtactgttagtccggatgcgctggtgaccatcgccggcggtttccgccgtggcaaacctatgggccacgacgttgacctgctgatcacgattccgggccgtcctgaagatgacgagctgctccacaaagtggttgatctgctcaagaagcaaggtctgctgctgtacgaagacatccgtgagagcacgttcgtggaggggcaactgccaagtcctaaacctgacgccctggacaaccatcagaagtgcttcgccattctcaagctgtaccgtccgaaggtggataacagtgcggttgggacgagtaagaaaagtgacatggctgaggttaaggattggaaagcggttcgtgtggatctggtgatcacgccattcgagcagttcgcctatgcgctgctcggttggacgggcagcggccaatttcgtcgcgatctgcgtcgctatgcggaggaagagcgcgacatgctgctcgacaaccatcgtctctacgacctgaaaaagggcatctttctgagtgcggacagcgaagaagagattttcggtcatctgggtctggattatctggagccgtgggaacgcaacgcg

SEQ ID NO: 4668 - protein, 394 aa, synthetic construct
  REGION 1..394: note = Variant of terminal deoxynucleotidyl transferase
MHHHHHHGGSGHPEGNTPEKEVPSVIARHVSQYACQRKTTLNNYNKKFTDALEIMAENYKFKENLQACLEAKRAASVLKSLPFEVTSMKDIQGLPCITDDVRDVIEEIIEEGESSRVKEILNDERYKAFKQFTSVFGVGVKTSEKWYRMGLRTVEEAKASKSLKLSKMQKAGFLYYEDLASGVSKEEADAVTLCVKETVRTVSPDALVTIAGGFRRGKPMGHDVDLLITIPGRPEDDELLHKVVDLLKKQGLLLYEDIRESTFVEGQLPSPKPDALDNHQKCFAILKLYRPKVDNSAVGTSKKSDMAEVKDWKAVRVDLVITPFEQFAYALLGWTGSGQFRRDLRRYAEEERDMLLDNHRLYDLKKGIFLSADSEEEIFGHLGLDYLEPWERNA

SEQ ID NO: 4669 - DNA, 1182 bp, synthetic construct
  misc_feature 1..1182: note = Variant of terminal deoxynucleotidyl transferase
  source 1..1182: mol_type = other DNA
atgcatcaccaccatcatcatgggggttctggtcatccggaaggtaataccccggagaaggaggtgccgagcgttatcgcccgtcatgttagtcagtacgcgtgccagcgcaagaccacgctgaataactacaacaaaaagttcaccgacgcgctggagatcatggccgagaactacaaatttaaagagaacctgcaggcgtgtctggaagccaagcgcgccgcgagtgtcctgaaaagcctgccgttcgaggttaccagcatgaaagacatccaaggtctgccgtgcattaccgacgacgtacgtgacgtgatcgaggagatcatcacggagggcgagagcagccgtgttaaagaaatcctcaatgacgagcgctacaaggcctttaagcagttcaccagcgtgttcggtgtgggcgtgaaaacctcggaaaagtggtaccgtatgggcctccgtacggttgaagaagcaaaggccagtaagagtctgaagctgagcaagatgcagaaggcgggcttcctgtattacgaggatctggcgagcggtgttagtaaagaagaagccgatgccgttacgctcatcgtgaaggaaacggtgcgtactgttagtccggatgcgctggtgaccatcgccggcggtttccgccgtggcaaacctatgggccacgacgttgacctgctgatcacgattccgggccgtcctgaagatgacgagctgctccacaaagtggttgatctgctcaagaagcaaggtctgctgctgtacgaagacatccgtgagagcacgttcgtggaggggcaactgccaagtcctaaacctgacgccctggacaaccatcagaagtgcttcgccattctcaagctgtaccgtccgaaggtggataacagtgcggttgggacgagtaagaaaagtgacatggctgaggttaaggattggaaagcggttcgtgtggatctggtgatcacgccattcgagcagttcgcctatgcgctgctcggttggacgggcagcggccaatttcgtcgcgatctgcgtcgctatgcggaggaagagcgcgacatgctgctcgacaaccatcgtctctacgacctgaaaaagggcatctttctgagtgcggacagcgaagaagagattttcggtcatctgggtctggattatctggagccgtgggaacgcaacgcg

SEQ ID NO: 4670 - protein, 394 aa, synthetic construct
  REGION 1..394: note = Variant of terminal deoxynucleotidyl transferase
MHHHHHHGGSGHPEGNTPEKEVPSVIARHVSQYACQRKTTLNNYNKKFTDALEIMAENYKFKENLQACLEAKRAASVLKSLPFEVTSMKDIQGLPCITDDVRDVIEEIITEGESSRVKEILNDERYKAFKQFTSVFGVGVKTSEKWYRMGLRTVEEAKASKSLKLSKMQKAGFLYYEDLASGVSKEEADAVTLIVKETVRTVSPDALVTIAGGFRRGKPMGHDVDLLITIPGRPEDDELLHKVVDLLKKQGLLLYEDIRESTFVEGQLPSPKPDALDNHQKCFAILKLYRPKVDNSAVGTSKKSDMAEVKDWKAVRVDLVITPFEQFAYALLGWTGSGQFRRDLRRYAEEERDMLLDNHRLYDLKKGIFLSADSEEEIFGHLGLDYLEPWERNA

SEQ ID NO: 4671 - DNA, 1182 bp, synthetic construct
  misc_feature 1..1182: note = Variant of terminal deoxynucleotidyl transferase
  source 1..1182: mol_type = other DNA
atgcatcaccaccatcatcatgggggttctggtcatccggaaggtaataccccggagaaggaggtgccgagcgttatcgcccgtcatgttagtcagtacgcgtgccagcgcaagaccacgctgaataactacaacaaaaagttcaccgacgcgctggagatcatggccgagaactacaaatttaaagagaacctgcaggcgtgtctggaagccaagcgcgccgcgagtgtcctgaaaagcctgccgttcgaggttaccagcatgaaagacatccaaggtctgccgtgcattaccgacgacgtacgtgacgtgatcgaggagatcatcgaagagggcgagagcagccgtgttaaagaaatcctcaatgacgagcgctacaaggcctttaagcagttcaccagcgtgttcggtgtgggcgtgaaaacctcggaaaagtggtaccgtatgggcctccgtacggttgaagaagcaaaggccagtaagagtctgaagctgagcaagatgcagaaggcgggcttcctgtattacgaggatctggcgagcggtgttagtaaagaagaagccgatggtgttacgctcatcgtgaaggaaacggtgcgtactgttagtccggatgcgctggtgaccatcgccggcggtttccgccgtggcaaacctatgggccacgacgttgacctgctgatcacgattccgggccgtcctgaagatgacgagctgctccacaaagtggttgatctgctcaagaagcaaggtctgctgctgtacgaagacatccgtgagagcacgttcgtggaggggcaactgccaagtcctaaacctgacgccctggacaaccatcagaagtgcttcgccattctcaagctgtaccgtccgaaggtggataacagtgcggttgggacgagtaagaaaagtgacatggctgaggttaaggattggaaagcggttcgtgtggatctggtgatcacgccattcgagcagttcgcctatgcgctgctcggttggacgggcagcggccaatttcgtcgcgatctgcgtcgctatgcggaggaagagcgcgacatgctgctcgacaaccatcgtctctacgacctgaaaaagggcatctttctgagtgcggacagcgaagaagagattttcggtcatctgggtctggattatctggagccgtgggaacgcaacgcg

SEQ ID NO: 4672 - protein, 394 aa, synthetic construct
  REGION 1..394: note = Variant of terminal deoxynucleotidyl transferase
MHHHHHHGGSGHPEGNTPEKEVPSVIARHVSQYACQRKTTLNNYNKKFTDALEIMAENYKFKENLQACLEAKRAASVLKSLPFEVTSMKDIQGLPCITDDVRDVIEEIIEEGESSRVKEILNDERYKAFKQFTSVFGVGVKTSEKWYRMGLRTVEEAKASKSLKLSKMQKAGFLYYEDLASGVSKEEADGVTLIVKETVRTVSPDALVTIAGGFRRGKPMGHDVDLLITIPGRPEDDELLHKVVDLLKKQGLLLYEDIRESTFVEGQLPSPKPDALDNHQKCFAILKLYRPKVDNSAVGTSKKSDMAEVKDWKAVRVDLVITPFEQFAYALLGWTGSGQFRRDLRRYAEEERDMLLDNHRLYDLKKGIFLSADSEEEIFGHLGLDYLEPWERNA

SEQ ID NO: 4673 - DNA, 1182 bp, synthetic construct
  misc_feature 1..1182: note = Variant of terminal deoxynucleotidyl transferase
  source 1..1182: mol_type = other DNA
atgcatcaccaccatcatcatgggggttctggtcatccggaaggtaataccccggagaaggaggtgccgagcgttatcgcccgtcatgttagtcagtacgcgtgccagcgcaagaccacgctgaataactacaacaaaaagttcaccgacgcgctggagatcatggccgagaactacaaatttaaagagaacctgcaggcgtgtctggaagccaagcgcgccgcgagtgtcctgaaaagcctgccgttcgaggttaccagcatgaaagacatccaaggtctgccgtgcattaccgacgacgtacgtgacgtgatcgaggagatcatcgaagagggcgagagcagccgtgttaaagaaatcctcaatgacgagcgctacaaggcctttaagcagttcaccagcgtgttcggtgtgggcgtgaaaacctcggaaaagtggtaccgtatgggcctccgtacggttgaagaagcaaaggccagtaagagtctgaagctgagcaagatgcagaaggcgggcttcctgtattacgaggatctggcgagcggtgttagtaaagaagaagccgatgccgttacgctcatcgtgaaggaaacggtgcgtactgttagtccggctgcgctggtgaccatcgccggcggtttccgccgtggcaaacctatgggccacgacgttgacctgctgatcacgattccgggccgtcctgaagatgacgagctgctccacaaagtggttgatctgctcaagaagcaaggtctgctgctgtacgaagacatccgtgagagcacgttcgtggaggggcaactgccaagtcctaaacctgacgccctggacaaccatcagaagtgcttcgccattctcaagctgtaccgtccgaaggtggataacagtgcggttgggacgagtaagaaaagtgacatggctgaggttaaggattggaaagcggttcgtgtggatctggtgatcacgccattcgagcagttcgcctatgcgctgctcggttggacgggcagcggccaatttcgtcgcgatctgcgtcgctatgcggaggaagagcgcgacatgctgctcgacaaccatcgtctctacgacctgaaaaagggcatctttctgagtgcggacagcgaagaagagattttcggtcatctgggtctggattatctggagccgtgggaacgcaacgcg

SEQ ID NO: 4674 - protein, 394 aa, synthetic construct
  REGION 1..394: note = Variant of terminal deoxynucleotidyl transferase
MHHHHHHGGSGHPEGNTPEKEVPSVIARHVSQYACQRKTTLNNYNKKFTDALEIMAENYKFKENLQACLEAKRAASVLKSLPFEVTSMKDIQGLPCITDDVRDVIEEIIEEGESSRVKEILNDERYKAFKQFTSVFGVGVKTSEKWYRMGLRTVEEAKASKSLKLSKMQKAGFLYYEDLASGVSKEEADAVTLIVKETVRTVSPAALVTIAGGFRRGKPMGHDVDLLITIPGRPEDDELLHKVVDLLKKQGLLLYEDIRESTFVEGQLPSPKPDALDNHQKCFAILKLYRPKVDNSAVGTSKKSDMAEVKDWKAVRVDLVITPFEQFAYALLGWTGSGQFRRDLRRYAEEERDMLLDNHRLYDLKKGIFLSADSEEEIFGHLGLDYLEPWERNA

SEQ ID NO: 4675 - DNA, 1182 bp, synthetic construct
  misc_feature 1..1182: note = Variant of terminal deoxynucleotidyl transferase
  source 1..1182: mol_type = other DNA
atgcatcaccaccatcatcatgggggttctggtcatccggaaggtaataccccggagaaggaggtgccgagcgttatcgcccgtcatgttagtcagtacgcgtgccagcgcaagaccacgctgaataactacaacaaaaagttcaccgacgcgctggagatcatggccgagaactacaaatttaaagagaacctgcaggcgtgtctggaagccaagcgcgccgcgagtgtcctgaaaagcctgccgttcgaggttaccagcatgaaagacatccaaggtctgccgtgcattaccgacgacgtacgtgacgtgatcgaggagatcatcgaagagggcgagagcagccgtgttaaagaaatcctcaatgacgagcgctacaaggcctttaagcagttcaccagcgtgttcggtgtgggcgtgaaaacctcggaaaagtggtacatgatgggcctccgtacggttgaagaagcaaaggccagtaagagtctgaagctgagcaagatgcagaaggcgggcttcctgtattacgaggatctggcgagcggtgttagtaaagaagaagccgatgccgttacgctcatcgtgaaggaaacggtgcgtactgttagtccggatgcgctggtgaccatcgccggcggtttccgccgtggcaaacctatgggccacgacgttgacctgctgatcacgattccgggccgtcctgaagatgacgagctgctccacaaagtggttgatctgctcaagaagcaaggtctgctgctgtacgaagacatccgtgagagcacgttcgtggaggggcaactgccaagtcctaaacctgacgccctggacaaccatcagaagtgcttcgccattctcaagctgtaccgtccgaaggtggataacagtgcggttgggacgagtaagaaaagtgacatggctgaggttaaggattggaaagcggttcgtgtggatctggtgatcacgccattcgagcagttcgcctatgcgctgctcggttggacgggcagcggccaatttcgtcgcgatctgcgtcgctatgcggaggaagagcgcgacatgctgctcgacaaccatcgtctctacgacctgaaaaagggcatctttctgagtgcggacagcgaagaagagattttcggtcatctgggtctggattatctggagccgtgggaacgcaacgcg

SEQ ID NO: 4676 - protein, 394 aa, synthetic construct
  REGION 1..394: note = Variant of terminal deoxynucleotidyl transferase
MHHHHHHGGSGHPEGNTPEKEVPSVIARHVSQYACQRKTTLNNYNKKFTDALEIMAENYKFKENLQACLEAKRAASVLKSLPFEVTSMKDIQGLPCITDDVRDVIEEIIEEGESSRVKEILNDERYKAFKQFTSVFGVGVKTSEKWYMMGLRTVEEAKASKSLKLSKMQKAGFLYYEDLASGVSKEEADAVTLIVKETVRTVSPDALVTIAGGFRRGKPMGHDVDLLITIPGRPEDDELLHKVVDLLKKQGLLLYEDIRESTFVEGQLPSPKPDALDNHQKCFAILKLYRPKVDNSAVGTSKKSDMAEVKDWKAVRVDLVITPFEQFAYALLGWTGSGQFRRDLRRYAEEERDMLLDNHRLYDLKKGIFLSADSEEEIFGHLGLDYLEPWERNA

SEQ ID NO: 4677 - DNA, 1182 bp, synthetic construct
  misc_feature 1..1182: note = Variant of terminal deoxynucleotidyl transferase
  source 1..1182: mol_type = other DNA
atgcatcaccaccatcatcatgggggttctggtcatccggaaggtaataccccggagaaggaggtgccgagcgttatcgcccgtcatgttagtcagtacgcgtgccagcgcaagaccacgctgaataactacaacaaaaagttcaccgacgcgctggagatcatggccgagaactacaaatttaaagagaacctgcaggcgtgtctggaagccaagcgcgccgcgagtgtcctgaaaagcctgccgttcgaggttaccagcatgaaagacatccaaggtctgccgtgcattaccgacgacgtacgtgacgtgatcgaggagatcatcgaagagggcgagagcagccgtgttaaagaaatcctcaatgacgagcgctacaaggcctttaagcagttcaccagcgtgttcggtgtgggcgtgaaaacctcggaaaagtggtaccgtatgggcctccgtacggttgaagaagcaaaggccagtaagagtctgaagctgagcaagatgcagaaggcgggcttcctgtattacgaggatctggcgagcggtgttagtaaagaagaagccgatgccgttacgctcatcgtgaaggaaacggtgcgtactgttagtccggatgcgctggtgaccatcgccggcggtttccgccgtggcaaacctatgggccacgacgttgacctgctgatcacgattccgggccgtcctgaagatgacgagctgctccacaaagtggttgatctgctcaagaagcaaggtctgctgctgtacgaagacatccgtgagagcacgttcgtggaggggcaactgccaagtcctaaacctgacgccctggacaaccatcagaagtgcttcgccattctcaagctgtaccgtccgaaggtggataacagtgcggttgggacgagtaagcctagtgacatggctgaggttaaggattggaaagcggttcgtgtggatctggtgatcacgccattcgagcagttcgcctatgcgctgctcggttggacgggcagcggccaatttcgtcgcgatctgcgtcgctatgcggaggaagagcgcgacatgctgctcgacaaccatcgtctctacgacctgaaaaagggcatctttctgagtgcggacagcgaagaagagattttcggtcatctgggtctggattatctggagccgtgggaacgcaacgcg

SEQ ID NO: 4678 - protein, 394 aa, synthetic construct
  REGION 1..394: note = Variant of terminal deoxynucleotidyl transferase
MHHHHHHGGSGHPEGNTPEKEVPSVIARHVSQYACQRKTTLNNYNKKFTDALEIMAENYKFKENLQACLEAKRAASVLKSLPFEVTSMKDIQGLPCITDDVRDVIEEIIEEGESSRVKEILNDERYKAFKQFTSVFGVGVKTSEKWYRMGLRTVEEAKASKSLKLSKMQKAGFLYYEDLASGVSKEEADAVTLIVKETVRTVSPDALVTIAGGFRRGKPMGHDVDLLITIPGRPEDDELLHKVVDLLKKQGLLLYEDIRESTFVEGQLPSPKPDALDNHQKCFAILKLYRPKVDNSAVGTSKPSDMAEVKDWKAVRVDLVITPFEQFAYALLGWTGSGQFRRDLRRYAEEERDMLLDNHRLYDLKKGIFLSADSEEEIFGHLGLDYLEPWERNA

SEQ ID NO: 4679 - DNA, 1182 bp, synthetic construct
  misc_feature 1..1182: note = Variant of terminal deoxynucleotidyl transferase
  source 1..1182: mol_type = other DNA
atgcatcaccaccatcatcatgggggttctggtcatccggaaggtaataccccggagaaggaggtgccgagcgttatcgcccgtcatgttagtcagtacgcgtgccagcgcaagaccacgctgaataactacaacaaaaagttcaccgacgcgctggagatcatggccgagaactacaaatttaaagagaacctgcaggcgtgtctggaagccaagcgcgccgcgagtgtcctgaaaagcctgccgttcgaggttaccagcatgaaagacatccaaggtctgccgtgcattaccgacgacgtacgtgacgtgatcgaggagatcatcgaagagggcgagagcagccgtgttaaagaaatcctcaatgacgagcgctacaaggcctttaagcagttcaccagcgtgttcggtgtgggcgtgaaaacctcggaaaagtggtaccgtatgggcctccgtacggttgaagaagcaaaggccagtaagagtctgaagctgagcaagatgcagaaggcgggcttcctgtattacgaggatctggcgagcggtgttagtaaagaagaagccgatgccgttacgctcatcgtgaaggaaacggtgcgtactgttagtccggatgcgctggtgaccatcgccggcggtttccgccgtggcaaacctatgggccacgacgttgacctgctgatcacgattccgggccgtcctgaagatgacgagctgctccacaaagtggttgatctgctcaagaagcaaggtctgctgctgtacgaagacatccgtgagagcacgttcgtggaggggcaactgccaagtcctaaacctgacgccctggacaaccatcagaagtgcttcgccattctcaagctgtaccgtccgaaggtggataacagtgcggttgggacgagtaagaaaagtgacccggctgaggttaaggattggaaagcggttcgtgtggatctggtgatcacgccattcgagcagttcgcctatgcgctgctcggttggacgggcagcggccaatttcgtcgcgatctgcgtcgctatgcggaggaagagcgcgacatgctgctcgacaaccatcgtctctacgacctgaaaaagggcatctttctgagtgcggacagcgaagaagagattttcggtcatctgggtctggattatctggagccgtgggaacgcaacgcg

SEQ ID NO: 4680 - protein, 394 aa, synthetic construct
  REGION 1..394: note = Variant of terminal deoxynucleotidyl transferase
MHHHHHHGGSGHPEGNTPEKEVPSVIARHVSQYACQRKTTLNNYNKKFTDALEIMAENYKFKENLQACLEAKRAASVLKSLPFEVTSMKDIQGLPCITDDVRDVIEEIIEEGESSRVKEILNDERYKAFKQFTSVFGVGVKTSEKWYRMGLRTVEEAKASKSLKLSKMQKAGFLYYEDLASGVSKEEADAVTLIVKETVRTVSPDALVTIAGGFRRGKPMGHDVDLLITIPGRPEDDELLHKVVDLLKKQGLLLYEDIRESTFVEGQLPSPKPDALDNHQKCFAILKLYRPKVDNSAVGTSKKSDPAEVKDWKAVRVDLVITPFEQFAYALLGWTGSGQFRRDLRRYAEEERDMLLDNHRLYDLKKGIFLSADSEEEIFGHLGLDYLEPWERNA

SEQ ID NO: 4681 - DNA, 1182 bp, synthetic construct
  misc_feature 1..1182: note = Variant of terminal deoxynucleotidyl transferase
  source 1..1182: mol_type = other DNA
atgcatcaccaccatcatcatgggggttctggtcatccggaaggtaataccccggagaaggaggtgccgagcgttatcgcccgtcatgttagtcagtacgcgtgccagcgcaagaccacgctgaataactacaacaaaaagttcaccgacgcgctggagatcatggccgagaactacaaatttaaagagaacctgcaggcgtgtctggaagccaagcgcgccgcgagtgtcctgaaaagcctgccgttcgaggttaccagcatgaaagacatccaaggtctgccgtgcattaccgacgacgtacgtgacgtgatcgaggagatcatcgaagagggcgagagcagccgtgttaaagaaatcctcaatgacgagcgctacaaggcctttaagcagttcaccagcgtgttcggtgtgggcgtgaaaacctcggaaaagtggtaccgtatgggcctccgtacggttgaagaagcaaaggccagtaagagtctgaagctgagcaagatgcagaaggcgggcttcctgtattacgaggatctggcgagcggtgttagtaaagaagaagccgatgccgttacgctcatcgtgaaggaaacggtgcgtactgttagtccggatgcgctggtgaccatcgccggcggtttccgccgtggcaaacctatgggccacgacgttgacctgctgatcacgattccgggccgtcctgaagatgacgagctgctccacaaagtggttgatctgctcaagaagcaaggtctgctgctgtacgaagacatccgtgagagcacgttcgtggaggggcaactgccaagtcctaaacctgacgccctggacaaccatcagaagtgcttcgccattctcaagctgtaccgtccgaaggtggataacagtgcggttgggacgagtaagaaactggacatggctgaggttaaggattggaaagcggttcgtgtggatctggtgatcacgccattcgagcagttcgcctatgcgctgctcggttggacgggcagcggccaatttcgtcgcgatctgcgtcgctatgcggaggaagagcgcgacatgctgctcgacaaccatcgtctctacgacctgaaaaagggcatctttctgagtgcggacagcgaagaagagattttcggtcatctgggtctggattatctggagccgtgggaacgcaacgcg

SEQ ID NO: 4682 - protein, 394 aa, synthetic construct
  REGION 1..394: note = Variant of terminal deoxynucleotidyl transferase
MHHHHHHGGSGHPEGNTPEKEVPSVIARHVSQYACQRKTTLNNYNKKFTDALEIMAENYKFKENLQACLEAKRAASVLKSLPFEVTSMKDIQGLPCITDDVRDVIEEIIEEGESSRVKEILNDERYKAFKQFTSVFGVGVKTSEKWYRMGLRTVEEAKASKSLKLSKMQKAGFLYYEDLASGVSKEEADAVTLIVKETVRTVSPDALVTIAGGFRRGKPMGHDVDLLITIPGRPEDDELLHKVVDLLKKQGLLLYEDIRESTFVEGQLPSPKPDALDNHQKCFAILKLYRPKVDNSAVGTSKKLDMAEVKDWKAVRVDLVITPFEQFAYALLGWTGSGQFRRDLRRYAEEERDMLLDNHRLYDLKKGIFLSADSEEEIFGHLGLDYLEPWERNA

SEQ ID NO: 4683 - DNA, 1182 bp, synthetic construct
  misc_feature 1..1182: note = Variant of terminal deoxynucleotidyl transferase
  source 1..1182: mol_type = other DNA
atgcatcaccaccatcatcatgggggttctggtcatccggaaggtaataccccggagaaggaggtgccgagcgttatcgcccgtcatgttagtcagtacgcgtgccagcgcaagaccacgctgaataactacaacaaaaagttcaccgacgcgctggagatcatggccgagaactacaaatttaaagagaacctgcaggcgtgtctggaagccaagcgcgccgcgagtgtcctgaaaagcctgccgttcgaggttaccagcatgaaagacatccaaggtctgccgtgcattaccgacgacgtacgtgacgtgatcgaggagatcatcgaagagggcgagagcagccgtgttaaagaaatcctcaatgacgagcgctacaaggcctttaagcagttcaccagcgtgttcggtgtgggcgtgaaaacctcggaaaagtggtaccgtatgggcctccgtacggttgaagaagcaaaggccagtaagagtctgaagctgagcaagatgcagaaggcgggcatgctgtattacgaggatctggcgagcggtgttagtaaagaagaagccgatgccgttacgctcatcgtgaaggaaacggtgcgtactgttagtccggatgcgctggtgaccatcgccggcggtttccgccgtggcaaacctatgggccacgacgttgacctgctgatcacgattccgggccgtcctgaagatgacgagctgctccacaaagtggttgatctgctcaagaagcaaggtctgctgctgtacgaagacatccgtgagagcacgttcgtggaggggcaactgccaagtcctaaacctgacgccctggacaaccatcagaagtgcttcgccattctcaagctgtaccgtccgaaggtggataacagtgcggttgggacgagtaagaaaagtgacatggctgaggttaaggattggaaagcggttcgtgtggatctggtgatcacgccattcgagcagttcgcctatgcgctgctcggttggacgggcagcggccaatttcgtcgcgatctgcgtcgctatgcggaggaagagcgcgacatgctgctcgacaaccatcgtctctacgacctgaaaaagggcatctttctgagtgcggacagcgaagaagagattttcggtcatctgggtctggattatctggagccgtgggaacgcaacgcg

SEQ ID NO: 4684 - protein, 394 aa, synthetic construct
  REGION 1..394: note = Variant of terminal deoxynucleotidyl transferase
MHHHHHHGGSGHPEGNTPEKEVPSVIARHVSQYACQRKTTLNNYNKKFTDALEIMAENYKFKENLQACLEAKRAASVLKSLPFEVTSMKDIQGLPCITDDVRDVIEEIIEEGESSRVKEILNDERYKAFKQFTSVFGVGVKTSEKWYRMGLRTVEEAKASKSLKLSKMQKAGMLYYEDLASGVSKEEADAVTLIVKETVRTVSPDALVTIAGGFRRGKPMGHDVDLLITIPGRPEDDELLHKVVDLLKKQGLLLYEDIRESTFVEGQLPSPKPDALDNHQKCFAILKLYRPKVDNSAVGTSKKSDMAEVKDWKAVRVDLVITPFEQFAYALLGWTGSGQFRRDLRRYAEEERDMLLDNHRLYDLKKGIFLSADSEEEIFGHLGLDYLEPWERNA

SEQ ID NO: 4685 - DNA, 1182 bp, synthetic construct
  misc_feature 1..1182: note = Variant of terminal deoxynucleotidyl transferase
  source 1..1182: mol_type = other DNA
atgcatcaccaccatcatcatgggggttctggtcatccggaaggtaataccccggagaaggaggtgccgagcgttatcgcccgtcatgttagtcagtacgcgtgccagcgcaagaccacgctgaataactacaacaaaaagttcaccgacgcgctggagatcatggccgagaactacaaatttaaagagaacctgcaggcgtgtctggaagccaagcgcgccgcgagtgtcctgaaaagcctgccgttcgaggttaccagcatgaaagacatccaaggtctgccgtgcattaccgacgacgtacgtgacgtgatcgaggagatcatcgaagagggcgagagcagccgtgttaaagaaatcctcaatgacgagcgctacaaggcctttaagcagttcaccagcgtgttcggtgtgggcgtgaaaacctcggaaaagtggtaccgtatgggcctccgtacggttgaagaagcaaaggccagtaagagtctgaagctgagcaagatgcagaaggcgggcttcctgtattacgaggatctggcgagcggtgttagtaaagaagaagccgatgccgttacgctcatcgtgaaggaaacggtgcgtactgttagtccggatgcgctggtgaccatcgccggcggtttccgccgtggcaaacctatgggccacgacgttgacctgctgatcacgattccgggccgtcctgaagatgacgagctgctccacaaagtggttgatctgctcaagttgcaaggtctgctgctgtacgaagacatccgtgagagcacgttcgtggaggggcaactgccaagtcctaaacctgacgccctggacaaccatcagaagtgcttcgccattctcaagctgtaccgtccgaaggtggataacagtgcggttgggacgagtaagaaaagtgacatggctgaggttaaggattggaaagcggttcgtgtggatctggtgatcacgccattcgagcagttcgcctatgcgctgctcggttggacgggcagcggccaatttcgtcgcgatctgcgtcgctatgcggaggaagagcgcgacatgctgctcgacaaccatcgtctctacgacctgaaaaagggcatctttctgagtgcggacagcgaagaagagattttcggtcatctgggtctggattatctggagccgtgggaacgcaacgcg

SEQ ID NO: 4686 - protein, 394 aa, synthetic construct
  REGION 1..394: note = Variant of terminal deoxynucleotidyl transferase
MHHHHHHGGSGHPEGNTPEKEVPSVIARHVSQYACQRKTTLNNYNKKFTDALEIMAENYKFKENLQACLEAKRAASVLKSLPFEVTSMKDIQGLPCITDDVRDVIEEIIEEGESSRVKEILNDERYKAFKQFTSVFGVGVKTSEKWYRMGLRTVEEAKASKSLKLSKMQKAGFLYYEDLASGVSKEEADAVTLIVKETVRTVSPDALVTIAGGFRRGKPMGHDVDLLITIPGRPEDDELLHKVVDLLKLQGLLLYEDIRESTFVEGQLPSPKPDALDNHQKCFAILKLYRPKVDNSAVGTSKKSDMAEVKDWKAVRVDLVITPFEQFAYALLGWTGSGQFRRDLRRYAEEERDMLLDNHRLYDLKKGIFLSADSEEEIFGHLGLDYLEPWERNA

SEQ ID NO: 4687 - DNA, 1182 bp, synthetic construct
  misc_feature 1..1182: note = Variant of terminal deoxynucleotidyl transferase
  source 1..1182: mol_type = other DNA
atgcatcaccaccatcatcatgggggttctggtcatccggaaggtaataccccggagaaggaggtgccgagcgttatcgcccgtcatgttagtcagtacgcgtgccagcgcaagaccacgctgaataactacaacaaaaagttcaccgacgcgctggagatcatggccgagaactacaaatttaaagagaacctgcaggcgtgtctggaagccaagcgcgccgcgagtgtcctgaaaagcctgccgttcgaggttaccagcatgaaagacatccaaggtctgccgtgcattaccgacgacgtacgtgacgtgatcgaggagatcatcgaagagggcgagagcagccgtgttaaagaaatcctcaatgacgagcgctacaaggcctttaagcagttcaccagcgtgttcggtgtgggcgtgaaaacctcggaaaagtggtaccgtatgggcctccgtacggttgaagaagcaaaggccagtaagagtattaagctgagcaagatgcagaaggcgggcttcctgtattacgaggatctggcgagcggtgttagtaaagaagaagccgatgccgttacgctcatcgtgaaggaaacggtgcgtactgttagtccggatgcgctggtgaccatcgccggcggtttccgccgtggcaaacctatgggccacgacgttgacctgctgatcacgattccgggccgtcctgaagatgacgagctgctccacaaagtggttgatctgctcaagaagcaaggtctgctgctgtacgaagacatccgtgagagcacgttcgtggaggggcaactgccaagtcctaaacctgacgccctggacaaccatcagaagtgcttcgccattctcaagctgtaccgtccgaaggtggataacagtgcggttgggacgagtaagaaaagtgacatggctgaggttaaggattggaaagcggttcgtgtggatctggtgatcacgccattcgagcagttcgcctatgcgctgctcggttggacgggcagcggccaatttcgtcgcgatctgcgtcgctatgcggaggaagagcgcgacatgctgctcgacaaccatcgtctctacgacctgaaaaagggcatctttctgagtgcggacagcgaagaagagattttcggtcatctgggtctggattatctggagccgtgggaacgcaacgcg

SEQ ID NO: 4688 - protein, 394 aa, synthetic construct
  REGION 1..394: note = Variant of terminal deoxynucleotidyl transferase
MHHHHHHGGSGHPEGNTPEKEVPSVIARHVSQYACQRKTTLNNYNKKFTDALEIMAENYKFKENLQACLEAKRAASVLKSLPFEVTSMKDIQGLPCITDDVRDVIEEIIEEGESSRVKEILNDERYKAFKQFTSVFGVGVKTSEKWYRMGLRTVEEAKASKSIKLSKMQKAGFLYYEDLASGVSKEEADAVTLIVKETVRTVSPDALVTIAGGFRRGKPMGHDVDLLITIPGRPEDDELLHKVVDLLKKQGLLLYEDIRESTFVEGQLPSPKPDALDNHQKCFAILKLYRPKVDNSAVGTSKKSDMAEVKDWKAVRVDLVITPFEQFAYALLGWTGSGQFRRDLRRYAEEERDMLLDNHRLYDLKKGIFLSADSEEEIFGHLGLDYLEPWERNA

SEQ ID NO: 4689 - DNA, 1182 bp, synthetic construct
  misc_feature 1..1182: note = Variant of terminal deoxynucleotidyl transferase
  source 1..1182: mol_type = other DNA
atgcatcaccaccatcatcatgggggttctggtcatccggaaggtaataccccggagaaggaggtgccgagcgttatcgcccgtcatgttagtcagtacgcgtgccagcgcaagaccacgctgaataactacaacaaaaagttcaccgacgcgctggagatcatggccgagaactacaaatttaaagagaacctgcaggcgtgtctggaagccaagcgcgccgcgagtgtcctgaaaagcctgccgttcgaggttaccagcatgaaagacatccaaggtctgccgtgcattaccgacgacgtacgtgacgtgatcgaggagatcatcgaagagggcgagagcagccgtgttaaagaaatcctcaatgacgagcgctacaaggcctttaagcagttcaccagcgtgttcggtgtgggcgtgaaaacctcggaaaagtggtaccgtatgggcctccgtacggttgaagaagcaaaggccagtaaggtgctgaagctgagcaagatgcagaaggcgggcttcctgtattacgaggatctggcgagcggtgttagtaaagaagaagccgatgccgttacgctcatcgtgaaggaaacggtgcgtactgttagtccggatgcgctggtgaccatcgccggcggtttccgccgtggcaaacctatgggccacgacgttgacctgctgatcacgattccgggccgtcctgaagatgacgagctgctccacaaagtggttgatctgctcaagaagcaaggtctgctgctgtacgaagacatccgtgagagcacgttcgtggaggggcaactgccaagtcctaaacctgacgccctggacaaccatcagaagtgcttcgccattctcaagctgtaccgtccgaaggtggataacagtgcggttgggacgagtaagaaaagtgacatggctgaggttaaggattggaaagcggttcgtgtggatctggtgatcacgccattcgagcagttcgcctatgcgctgctcggttggacgggcagcggccaatttcgtcgcgatctgcgtcgctatgcggaggaagagcgcgacatgctgctcgacaaccatcgtctctacgacctgaaaaagggcatctttctgagtgcggacagcgaagaagagattttcggtcatctgggtctggattatctggagccgtgggaacgcaacgcg

SEQ ID NO: 4690 - protein, 394 aa, synthetic construct
  REGION 1..394: note = Variant of terminal deoxynucleotidyl transferase
MHHHHHHGGSGHPEGNTPEKEVPSVIARHVSQYACQRKTTLNNYNKKFTDALEIMAENYKFKENLQACLEAKRAASVLKSLPFEVTSMKDIQGLPCITDDVRDVIEEIIEEGESSRVKEILNDERYKAFKQFTSVFGVGVKTSEKWYRMGLRTVEEAKASKVLKLSKMQKAGFLYYEDLASGVSKEEADAVTLIVKETVRTVSPDALVTIAGGFRRGKPMGHDVDLLITIPGRPEDDELLHKVVDLLKKQGLLLYEDIRESTFVEGQLPSPKPDALDNHQKCFAILKLYRPKVDNSAVGTSKKSDMAEVKDWKAVRVDLVITPFEQFAYALLGWTGSGQFRRDLRRYAEEERDMLLDNHRLYDLKKGIFLSADSEEEIFGHLGLDYLEPWERNA

SEQ ID NO: 4691 - DNA, 1182 bp, synthetic construct
  misc_feature 1..1182: note = Variant of terminal deoxynucleotidyl transferase
  source 1..1182: mol_type = other DNA
atgcatcaccaccatcatcatgggggttctggtcatccggaaggtaataccccggagaaggaggtgccgagcgttatcgcccgtcatgttagtcagtacgcgtgccagcgcaagaccacgctgaataactacaacaaaaagttcaccgacgcgctggagatcatggccgagaactacaaatttaaagagaacctgcaggcgtgtctggaagccaagcgcgccgcgagtgtcctgaaaagcctgccgttcgaggttaccagcatgaaagacatccaaggtctgccgtgcattaccgacgacgtacgtgacgtgatcgaggagatcatcgaagagggcgagagcagccgtgttaaagaaatcctcaatgacgagcgctacaaggcctttaagcagttcaccagcgtgttcggtgtgggcgtgaaaacctcggaaaagtggtaccgtatgggcctccgtacggttgaagaagcaaaggccagtaagagtctgaagctgagcaagatgcagaaggcgggcttcctgtattacgaggatctggcgagcggtgttagtaaagaagaagccgatgccgttacgctcatcgtgaaggaaacggtgcgtactgttagtccggatgcgctggtgaccatcgccggcggtttccgccgtggcaaacctatgggccacgacgttgacctgctgatcacgattccgggccgtcctgaagatgacgagctgctccacaaagtggttgatctgctcaagaagcaaggtctgctgctgtacgaagacatccgtgagagcacgttcgtggaggggcaactgccaagtcctaaacctgacgccctggacaaccatcagaagtgcttcgccattctcaagctgtaccgtccgaaggtggataacagtgcggttgggacgagtaagatgagtgacatggctgaggttaaggattggaaagcggttcgtgtggatctggtgatcacgccattcgagcagttcgcctatgcgctgctcggttggacgggcagcggccaatttcgtcgcgatctgcgtcgctatgcggaggaagagcgcgacatgctgctcgacaaccatcgtctctacgacctgaaaaagggcatctttctgagtgcggacagcgaagaagagattttcggtcatctgggtctggattatctggagccgtgggaacgcaacgcg

SEQ ID NO: 4692 - protein, 394 aa, synthetic construct
  REGION 1..394: note = Variant of terminal deoxynucleotidyl transferase
MHHHHHHGGSGHPEGNTPEKEVPSVIARHVSQYACQRKTTLNNYNKKFTDALEIMAENYKFKENLQACLEAKRAASVLKSLPFEVTSMKDIQGLPCITDDVRDVIEEIIEEGESSRVKEILNDERYKAFKQFTSVFGVGVKTSEKWYRMGLRTVEEAKASKSLKLSKMQKAGFLYYEDLASGVSKEEADAVTLIVKETVRTVSPDALVTIAGGFRRGKPMGHDVDLLITIPGRPEDDELLHKVVDLLKKQGLLLYEDIRESTFVEGQLPSPKPDALDNHQKCFAILKLYRPKVDNSAVGTSKMSDMAEVKDWKAVRVDLVITPFEQFAYALLGWTGSGQFRRDLRRYAEEERDMLLDNHRLYDLKKGIFLSADSEEEIFGHLGLDYLEPWERNA

SEQ ID NO: 4693 - DNA, 1182 bp, synthetic construct
  misc_feature 1..1182: note = Variant of terminal deoxynucleotidyl transferase
  source 1..1182: mol_type = other DNA
atgcatcaccaccatcatcatgggggttctggtcatccggaaggtaataccccggagaaggaggtgccgagcgttatcgcccgtcatgttagtcagtacgcgtgccagcgcaagaccacgctgaataactacaacaaaaagttcaccgacgcgctggagatcatggccgagaactacaaatttaaagagaacctgcaggcgtgtctggaagccaagcgcgccgcgagtgtcctgaaaagcctgccgttcgaggttaccagcatgaaagacttgcaaggtctgccgtgcattaccgacgacgtacgtgacgtgatcgaggagatcatcgaagagggcgagagcagccgtgttaaagaaatcctcaatgacgagcgctacaaggcctttaagcagttcaccagcgtgttcggtgtgggcgtgaaaacctcggaaaagtggtaccgtatgggcctccgtacggttgaagaagcaaaggccagtaagagtctgaagctgagcaagatgcagaaggcgggcttcctgtattacgaggatctggcgagcggtgttagtaaagaagaagccgatgccgttacgctcatcgtgaaggaaacggtgcgtactgttagtccggatgcgctggtgaccatcgccggcggtttccgccgtggcaaacctatgggccacgacgttgacctgctgatcacgattccgggccgtcctgaagatgacgagctgctccacaaagtggttgatctgctcaagaagcaaggtctgctgctgtacgaagacatccgtgagagcacgttcgtggaggggcaactgccaagtcctaaacctgacgccctggacaaccatcagaagtgcttcgccattctcaagctgtaccgtccgaaggtggataacagtgcggttgggacgagtaagaaaagtgacatggctgaggttaaggattggaaagcggttcgtgtggatctggtgatcacgccattcgagcagttcgcctatgcgctgctcggttggacgggcagcggccaatttcgtcgcgatctgcgtcgctatgcggaggaagagcgcgacatgctgctcgacaaccatcgtctctacgacctgaaaaagggcatctttctgagtgcggacagcgaagaagagattttcggtcatctgggtctggattatctggagccgtgggaacgcaacgcg

SEQ ID NO: 4694 - protein, 394 aa, synthetic construct
  REGION 1..394: note = Variant of terminal deoxynucleotidyl transferase
MHHHHHHGGSGHPEGNTPEKEVPSVIARHVSQYACQRKTTLNNYNKKFTDALEIMAENYKFKENLQACLEAKRAASVLKSLPFEVTSMKDLQGLPCITDDVRDVIEEIIEEGESSRVKEILNDERYKAFKQFTSVFGVGVKTSEKWYRMGLRTVEEAKASKSLKLSKMQKAGFLYYEDLASGVSKEEADAVTLIVKETVRTVSPDALVTIAGGFRRGKPMGHDVDLLITIPGRPEDDELLHKVVDLLKKQGLLLYEDIRESTFVEGQLPSPKPDALDNHQKCFAILKLYRPKVDNSAVGTSKKSDMAEVKDWKAVRVDLVITPFEQFAYALLGWTGSGQFRRDLRRYAEEERDMLLDNHRLYDLKKGIFLSADSEEEIFGHLGLDYLEPWERNA

SEQ ID NO: 4695 - DNA, 1182 bp, synthetic construct
  misc_feature 1..1182: note = Variant of terminal deoxynucleotidyl transferase
  source 1..1182: mol_type = other DNA
atgcatcaccaccatcatcatgggggttctggtcatccggaaggtaataccccggagaaggaggtgccgagcgttatcgcccgtcatgttagtcagtacgcgtgccagcgcaagaccacgctgaataactacaacaaaaagttcaccgacgcgctggagatcatggccgagaactacaaatttaaagagaacctgcaggcgtgtctggaagccaagcgcgccgcgagtgtcctgaaaagcctgccgttcgaggttaccagcatgaaagacatccaaggtctgccgtgcattaccgacgacgtacgtgacgtgatcgaggagatcatcgaagagggcgagagcagccgtgttaaagaaatcctcaatgacgagcgctacaaggcctttaagcagttcaccagcgtgttcggtgtgggcgtgaaaacctcggaaaagtggtaccgtatgggcctccgtacggttgaagaagcaaaggccagtaagagtctgaagctgagcaagatgcagaaggcgggcttcctgtattacgaggatctggcgagcggtgttagtaaagaagaagccgatgccgttacgctcatcgtgaaggaaacggtgcgtactgttagtccggatgcgctggtgaccatcgccggcggtttccgccgtggcaaacctatgggccacgacgttgacctgctgatcacgattccgggccgtcctgaagatgacgagctgctccacaaagtggttgatctgctcaagaagcaaggtctgctgctgtacgaagacatccgtgagagcacgttcgtggaggggcaactgccaagtcctaaacctgacgccctggacaaccatcagaagtgcttcgccattctcaagctgtaccgtccgaaggtggataacagtgcggttgggacgagtaagaaaagtgggatggctgaggttaaggattggaaagcggttcgtgtggatctggtgatcacgccattcgagcagttcgcctatgcgctgctcggttggacgggcagcggccaatttcgtcgcgatctgcgtcgctatgcggaggaagagcgcgacatgctgctcgacaaccatcgtctctacgacctgaaaaagggcatctttctgagtgcggacagcgaagaagagattttcggtcatctgggtctggattatctggagccgtgggaacgcaacgcg

SEQ ID NO: 4696 - protein, 394 aa, synthetic construct
  REGION 1..394: note = Variant of terminal deoxynucleotidyl transferase
MHHHHHHGGSGHPEGNTPEKEVPSVIARHVSQYACQRKTTLNNYNKKFTDALEIMAENYKFKENLQACLEAKRAASVLKSLPFEVTSMKDIQGLPCITDDVRDVIEEIIEEGESSRVKEILNDERYKAFKQFTSVFGVGVKTSEKWYRMGLRTVEEAKASKSLKLSKMQKAGFLYYEDLASGVSKEEADAVTLIVKETVRTVSPDALVTIAGGFRRGKPMGHDVDLLITIPGRPEDDELLHKVVDLLKKQGLLLYEDIRESTFVEGQLPSPKPDALDNHQKCFAILKLYRPKVDNSAVGTSKKSGMAEVKDWKAVRVDLVITPFEQFAYALLGWTGSGQFRRDLRRYAEEERDMLLDNHRLYDLKKGIFLSADSEEEIFGHLGLDYLEPWERNA

SEQ ID NO: 4697 - DNA, 1182 bp, synthetic construct
  misc_feature 1..1182: note = Variant of terminal deoxynucleotidyl transferase
  source 1..1182: mol_type = other DNA
atgcatcaccaccatcatcatgggggttctggtcatccggaaggtaataccccggagaaggaggtgccgagcgttggggcccgtcatgttagtcagtacgcgtgccagcgcaagaccacgctgaataactacaacaaaaagttcaccgacgcgctggagatcatggccgagaactacaaatttaaagagaacctgcaggcgtgtctggaagccaagcgcgccgcgagtgtcctgaaaagcctgccgttcgaggttaccagcatgaaagacatccaaggtctgccgtgcattaccgacgacgtacgtgacgtgatcgaggagatcatcgaagagggcgagagcagccgtgttaaagaaatcctcaatgacgagcgctacaaggcctttaagcagttcaccagcgtgttcggtgtgggcgtgaaaacctcggaaaagtggtaccgtatgggcctccgtacggttgaagaagcaaaggccagtaagagtctgaagctgagcaagatgcagaaggcgggcttcctgtattacgaggatctggcgagcggtgttagtaaagaagaagccgatgccgttacgctcatcgtgaaggaaacggtgcgtactgttagtccggatgcgctggtgaccatcgccggcggtttccgccgtggcaaacctatgggccacgacgttgacctgctgatcacgattccgggccgtcctgaagatgacgagctgctccacaaagtggttgatctgctcaagaagcaaggtctgctgctgtacgaagacatccgtgagagcacgttcgtggaggggcaactgccaagtcctaaacctgacgccctggacaaccatcagaagtgcttcgccattctcaagctgtaccgtccgaaggtggataacagtgcggttgggacgagtaagaaaagtgacatggctgaggttaaggattggaaagcggttcgtgtggatctggtgatcacgccattcgagcagttcgcctatgcgctgctcggttggacgggcagcggccaatttcgtcgcgatctgcgtcgctatgcggaggaagagcgcgacatgctgctcgacaaccatcgtctctacgacctgaaaaagggcatctttctgagtgcggacagcgaagaagagattttcggtcatctgggtctggattatctggagccgtgggaacgcaacgcg

SEQ ID NO: 4698 - protein, 394 aa, synthetic construct
  REGION 1..394: note = Variant of terminal deoxynucleotidyl transferase
MHHHHHHGGSGHPEGNTPEKEVPSVGARHVSQYACQRKTTLNNYNKKFTDALEIMAENYKFKENLQACLEAKRAASVLKSLPFEVTSMKDIQGLPCITDDVRDVIEEIIEEGESSRVKEILNDERYKAFKQFTSVFGVGVKTSEKWYRMGLRTVEEAKASKSLKLSKMQKAGFLYYEDLASGVSKEEADAVTLIVKETVRTVSPDALVTIAGGFRRGKPMGHDVDLLITIPGRPEDDELLHKVVDLLKKQGLLLYEDIRESTFVEGQLPSPKPDALDNHQKCFAILKLYRPKVDNSAVGTSKKSDMAEVKDWKAVRVDLVITPFEQFAYALLGWTGSGQFRRDLRRYAEEERDMLLDNHRLYDLKKGIFLSADSEEEIFGHLGLDYLEPWERNA

SEQ ID NO: 4699 - DNA, 1182 bp, synthetic construct
  misc_feature 1..1182: note = Variant of terminal deoxynucleotidyl transferase
  source 1..1182: mol_type = other DNA
atgcatcaccaccatcatcatgggggttctggtcatccggaaggtaataccccggagaaggaggtgccgagcgttatcgcccgtcatgttagtcagtacgcgtgccagcgcaagaccacgctgaataactacaacaaaaagttcaccgacgcgctggagatcatggccgagaactacaaatttaaagagaacctgcaggcgtgtctggaagccaagcgcgccgcgagtgtcctgaaaagcctgccgttcgaggttaccagcatgaaagacatccaaggtctgccgtgcattaccgacgacgtacgtgacgtgatcgaggagatcatcgaagagggcgagagcagccgtgttaaagaaatcctcaatgacgagcgctacaaggcctttaagcagttcaccagcgtgttcggtgtgggcgtgaaaacctcggaaaagtggtaccgtatgggcctccgtacggttgaagaagcaaaggccagtaagagtctgaagctgagcaagatgcagaaggcgggcttcctgtattacgaggatctggcgagcggtgttagtaaagaagaagccgatgccgttacgctcatcgtgaaggaaacggtgcgtactgttagtccggatgcgctggtgaccatcgccggcggtttccgccgtggcaaacctatgggccacgacgttgacctgctgatcacgattccgggccgtcctgaagatgacgagctgctccacaaagtggtttctctgctcaagaagcaaggtctgctgctgtacgaagacatccgtgagagcacgttcgtggaggggcaactgccaagtcctaaacctgacgccctggacaaccatcagaagtgcttcgccattctcaagctgtaccgtccgaaggtggataacagtgcggttgggacgagtaagaaaagtgacatggctgaggttaaggattggaaagcggttcgtgtggatctggtgatcacgccattcgagcagttcgcctatgcgctgctcggttggacgggcagcggccaatttcgtcgcgatctgcgtcgctatgcggaggaagagcgcgacatgctgctcgacaaccatcgtctctacgacctgaaaaagggcatctttctgagtgcggacagcgaagaagagattttcggtcatctgggtctggattatctggagccgtgggaacgcaacgcg

SEQ ID NO: 4700 - protein, 394 aa, synthetic construct
  REGION 1..394: note = Variant of terminal deoxynucleotidyl transferase
MHHHHHHGGSGHPEGNTPEKEVPSVIARHVSQYACQRKTTLNNYNKKFTDALEIMAENYKFKENLQACLEAKRAASVLKSLPFEVTSMKDIQGLPCITDDVRDVIEEIIEEGESSRVKEILNDERYKAFKQFTSVFGVGVKTSEKWYRMGLRTVEEAKASKSLKLSKMQKAGFLYYEDLASGVSKEEADAVTLIVKETVRTVSPDALVTIAGGFRRGKPMGHDVDLLITIPGRPEDDELLHKVVSLLKKQGLLLYEDIRESTFVEGQLPSPKPDALDNHQKCFAILKLYRPKVDNSAVGTSKKSDMAEVKDWKAVRVDLVITPFEQFAYALLGWTGSGQFRRDLRRYAEEERDMLLDNHRLYDLKKGIFLSADSEEEIFGHLGLDYLEPWERNA

SEQ ID NO: 4701 - DNA, 1182 bp, synthetic construct
  misc_feature 1..1182: note = Variant of terminal deoxynucleotidyl transferase
  source 1..1182: mol_type = other DNA
atgcatcaccaccatcatcatgggggttctggtcatccggaaggtaataccccggagaaggaggtgccgagcgttatcgcccgtcatgttagtcagtacgcgtgccagcgcaagaccacgctgaataactacaacaaaaagttcaccgacgcgctggagatcatggccgagaactacaaatttaaagagaacctgcaggcgtgtctggaagccaagcgcgccgcgagtgtcctgaaaagcctgccgttcgaggttaccagcatgaaagacatccaaggtctgccgtgcattaccgacgacgtacgtgacgtgatcgaggagatcatcgaagagggcgagagcagccgtgttaaagaaatcctcaatgacgagcgctacaaggcctttaagcagttcaccagcgtgttcggtgtgggcgtgaaaacctcggaaaagtggtaccgtatgggcctccgtacggttgaagaagcaaaggccagtaagagtctgaagctgagcaagatgcagaaggcgggcttcctgtattacgaggatctggcgagcggtgttagtaaagaagaagccgatgccgttacggttatcgtgaaggaaacggtgcgtactgttagtccggatgcgctggtgaccatcgccggcggtttccgccgtggcaaacctatgggccacgacgttgacctgctgatcacgattccgggccgtcctgaagatgacgagctgctccacaaagtggttgatctgctcaagaagcaaggtctgctgctgtacgaagacatccgtgagagcacgttcgtggaggggcaactgccaagtcctaaacctgacgccctggacaaccatcagaagtgcttcgccattctcaagctgtaccgtccgaaggtggataacagtgcggttgggacgagtaagaaaagtgacatggctgaggttaaggattggaaagcggttcgtgtggatctggtgatcacgccattcgagcagttcgcctatgcgctgctcggttggacgggcagcggccaatttcgtcgcgatctgcgtcgctatgcggaggaagagcgcgacatgctgctcgacaaccatcgtctctacgacctgaaaaagggcatctttctgagtgcggacagcgaagaagagattttcggtcatctgggtctggattatctggagccgtgggaacgcaacgcg

SEQ ID NO: 4702 - protein, 394 aa, synthetic construct
  REGION 1..394: note = Variant of terminal deoxynucleotidyl transferase
MHHHHHHGGSGHPEGNTPEKEVPSVIARHVSQYACQRKTTLNNYNKKFTDALEIMAENYKFKENLQACLEAKRAASVLKSLPFEVTSMKDIQGLPCITDDVRDVIEEIIEEGESSRVKEILNDERYKAFKQFTSVFGVGVKTSEKWYRMGLRTVEEAKASKSLKLSKMQKAGFLYYEDLASGVSKEEADAVTVIVKETVRTVSPDALVTIAGGFRRGKPMGHDVDLLITIPGRPEDDELLHKVVDLLKKQGLLLYEDIRESTFVEGQLPSPKPDALDNHQKCFAILKLYRPKVDNSAVGTSKKSDMAEVKDWKAVRVDLVITPFEQFAYALLGWTGSGQFRRDLRRYAEEERDMLLDNHRLYDLKKGIFLSADSEEEIFGHLGLDYLEPWERNA

SEQ ID NO: 4703 - DNA, 1182 bp, synthetic construct
  misc_feature 1..1182: note = Variant of terminal deoxynucleotidyl transferase
  source 1..1182: mol_type = other DNA
atgcatcaccaccatcatcatgggggttctggtcatccggaaggtaataccccggagaaggaggtgccgagcgttatcgcccgtcatgttagtcagtacgcgtgccagcgcaagaccacgctgaataactacaacaaaaagttcaccgacgcgctggagatcatggccgagaactacaaatttaaagagaacctgcaggcgtgtctggaagccaagcgcgccgcgagtgtcctgaaaagcctgccgttcgaggttaccagcatgaaagacatccaaggtctgccgtgcattaccgacgacgtacgtgacgtgatcgaggagatcatcgaagagggcgagagcagccgtgttaaagaaatcctcaatgacgagcgctacaaggcctttaagcagttcaccagcgtgttcggtgtgggcgtgaaaacctcggaaaagtggtaccgtatgggcctccgtacggttgaagaagcaaaggccagtaagagtctgaagctgagcaagatgcagaaggcgggcttcctgtattacgaggatctggcgagcggtgttagtaaagaagaagccgatgccgttacgctcatcgtgaaggaaacggtgcgtactgttagtccggatgcgctggtgaccatcgccggcggtttccgccgtggcaaacctatgggccacgacgttgacctgctgatcacgattccgggccgtcctgaagatgacgagctgctccacaaagtggttgatctgctcaagaagcaaggtctgctgctgtacgaagacatccgtgagagcacgttcgtggaggggcaactgccaagtcctaaacctgacgccctggacaaccatcagaagtgcttcgccattctcaagctgtaccgtccgaaggtggataacagtgcggttgggacgagtaagaaaagtgacctggctgaggttaaggattggaaagcggttcgtgtggatctggtgatcacgccattcgagcagttcgcctatgcgctgctcggttggacgggcagcggccaatttcgtcgcgatctgcgtcgctatgcggaggaagagcgcgacatgctgctcgacaaccatcgtctctacgacctgaaaaagggcatctttctgagtgcggacagcgaagaagagattttcggtcatctgggtctggattatctggagccgtgggaacgcaacgcg

SEQ ID NO: 4704 - protein, 394 aa, synthetic construct
  REGION 1..394: note = Variant of terminal deoxynucleotidyl transferase
MHHHHHHGGSGHPEGNTPEKEVPSVIARHVSQYACQRKTTLNNYNKKFTDALEIMAENYKFKENLQACLEAKRAASVLKSLPFEVTSMKDIQGLPCITDDVRDVIEEIIEEGESSRVKEILNDERYKAFKQFTSVFGVGVKTSEKWYRMGLRTVEEAKASKSLKLSKMQKAGFLYYEDLASGVSKEEADAVTLIVKETVRTVSPDALVTIAGGFRRGKPMGHDVDLLITIPGRPEDDELLHKVVDLLKKQGLLLYEDIRESTFVEGQLPSPKPDALDNHQKCFAILKLYRPKVDNSAVGTSKKSDLAEVKDWKAVRVDLVITPFEQFAYALLGWTGSGQFRRDLRRYAEEERDMLLDNHRLYDLKKGIFLSADSEEEIFGHLGLDYLEPWERNA

SEQ ID NO: 4705 - DNA, 1182 bp, synthetic construct
  misc_feature 1..1182: note = Variant of terminal deoxynucleotidyl transferase
  source 1..1182: mol_type = other DNA
atgcatcaccaccatcatcatgggggttctggtcatccggaaggtaataccccggagaaggaggtgccgagcgttatcgcccgtcatgttagtcagtacgcgtgccagcgcaagaccacgctgaataactacaacaaaaagttcaccgacgcgctggagatcatggccgagaactacaaatttaaagagaacctgcaggcgtgtctggaagccaagcgcgccgcgagtgtcctgaaaagcctgccgttcgaggttaccagcatgaaagacatccaaggtctgccgtgcattaccgacgacgtacgtgacgtgatcgaggagatcatcgaagagggcgagagcagccgtgttaaagaaatcctcaatgacgagcgctacaaggcctttaagcagttcaccagcgtgttcggtgtgggcgtgaaaacctcggaaaagtggtaccgtatgggcctccgtacggttgaagaagcaaaggccagtaagagtctgaagctgagcaagatgcagaaggcgggcttcctgtattacgaggatctggcgagcggtgttagtaaagaagaagccgatgccgttacgctcatcgtgaaggaaacggtgcgtactgttagtccggatgcgctggtgaccatcgccggcggtttccgccgtggcaaacctatgggccacgacgttgacctgctgatcacgattccgggccgtcctgaagatgacgagctgctccacaaagtggttgatctgctcaagaagcaaggtctgctgctgtacgaagacatccgtgagagcacgttcgtggaggggcaactgccaagtcctaaacctgacgccctggacaaccatcagaagtgcttcgccattctcaagctggttcgtccgaaggtggataacagtgcggttgggacgagtaagaaaagtgacatggctgaggttaaggattggaaagcggttcgtgtggatctggtgatcacgccattcgagcagttcgcctatgcgctgctcggttggacgggcagcggccaatttcgtcgcgatctgcgtcgctatgcggaggaagagcgcgacatgctgctcgacaaccatcgtctctacgacctgaaaaagggcatctttctgagtgcggacagcgaagaagagattttcggtcatctgggtctggattatctggagccgtgggaacgcaacgcg

SEQ ID NO: 4706 - protein, 394 aa, synthetic construct
  REGION 1..394: note = Variant of terminal deoxynucleotidyl transferase
MHHHHHHGGSGHPEGNTPEKEVPSVIARHVSQYACQRKTTLNNYNKKFTDALEIMAENYKFKENLQACLEAKRAASVLKSLPFEVTSMKDIQGLPCITDDVRDVIEEIIEEGESSRVKEILNDERYKAFKQFTSVFGVGVKTSEKWYRMGLRTVEEAKASKSLKLSKMQKAGFLYYEDLASGVSKEEADAVTLIVKETVRTVSPDALVTIAGGFRRGKPMGHDVDLLITIPGRPEDDELLHKVVDLLKKQGLLLYEDIRESTFVEGQLPSPKPDALDNHQKCFAILKLVRPKVDNSAVGTSKKSDMAEVKDWKAVRVDLVITPFEQFAYALLGWTGSGQFRRDLRRYAEEERDMLLDNHRLYDLKKGIFLSADSEEEIFGHLGLDYLEPWERNA

SEQ ID NO: 4707 - DNA, 1182 bp, synthetic construct
  misc_feature 1..1182: note = Variant of terminal deoxynucleotidyl transferase
  source 1..1182: mol_type = other DNA
atgcatcaccaccatcatcatgggggttctggtcatccggaaggtaataccccggagaaggaggtgccgagcgttatcgcccgtcatgttagtcagtacgcgtgccagcgcaagaccacgctgaataactacaacaaaaagttcaccgacgcgctggagatcatggccgagaactacaaatttaaagagaacctgcaggcgtgtctggaagccaagcgcgccgcgagtgtcctgaaaagcctgccgttcgaggttaccagcatgaaagacatccaaggtctgccgtgcattaccgacgacgtacgtgacgtgatcgaggagatcatcgaagagggcgagagcagccgtgttaaagaaatcctcaatgacgagcgctacaaggcctttaagcagttcaccagcgtgttcggtgtgggcgtgaaaacctcggaaaagtggtaccgtatgggcctccgtacggttgaagaagcaaaggccagtaagagtctgaagctgagcaagatgcagaaggcgggcttcctgtattacgaggatctggcgagcggtgttagtaaagaagaagccgatgccgttacgctcatcgtgaaggaaacggtgcgtactgttagtccggatgcgctggtgaccatcgccggcggtttccgccgtggcaaacctatgggccacgacgttgacctgctgatcacgattccgggccgtcctgaagatgacgagctgctccacaaagtggttgatctgctcaagaagcaaggtctgctgctgtacgaagacatccgtgagagcacgttcgtggaggggcaactgccaagtcctaaacctgacgccctggacaaccatcagaagtgcttcgccattctcaagctgtaccgtccgaaggtggataacagtgcggttgggacgagtaagaaaagtgactgggctgaggttaaggattggaaagcggttcgtgtggatctggtgatcacgccattcgagcagttcgcctatgcgctgctcggttggacgggcagcggccaatttcgtcgcgatctgcgtcgctatgcggaggaagagcgcgacatgctgctcgacaaccatcgtctctacgacctgaaaaagggcatctttctgagtgcggacagcgaagaagagattttcggtcatctgggtctggattatctggagccgtgggaacgcaacgcg

SEQ ID NO: 4708 - protein, 394 aa, synthetic construct
  REGION 1..394: note = Variant of terminal deoxynucleotidyl transferase
MHHHHHHGGSGHPEGNTPEKEVPSVIARHVSQYACQRKTTLNNYNKKFTDALEIMAENYKFKENLQACLEAKRAASVLKSLPFEVTSMKDIQGLPCITDDVRDVIEEIIEEGESSRVKEILNDERYKAFKQFTSVFGVGVKTSEKWYRMGLRTVEEAKASKSLKLSKMQKAGFLYYEDLASGVSKEEADAVTLIVKETVRTVSPDALVTIAGGFRRGKPMGHDVDLLITIPGRPEDDELLHKVVDLLKKQGLLLYEDIRESTFVEGQLPSPKPDALDNHQKCFAILKLYRPKVDNSAVGTSKKSDWAEVKDWKAVRVDLVITPFEQFAYALLGWTGSGQFRRDLRRYAEEERDMLLDNHRLYDLKKGIFLSADSEEEIFGHLGLDYLEPWERNA

SEQ ID NO: 4709 - DNA, 1182 bp, synthetic construct
  misc_feature 1..1182: note = Variant of terminal deoxynucleotidyl transferase
  source 1..1182: mol_type = other DNA
atgcatcaccaccatcatcatgggggttctggtcatccggaaggtaataccccggagaaggaggtgccgagcgttatcgcccgtcatgttagtcagtacgcgtgccagcgcaagaccacgctgaataactacaacaaaaagttcaccgacgcgctggagatcatggccgagaactacaaatttaaagagaacctgcaggcgtgtctggaagccaagcgcgccgcgagtgtcctgaaaagcctgccgttcgaggttaccagcatgaaagacatccaaggtctgccgtgcattaccgacgacgtacgtgacgtgatcgaggagatcatcgaagagggcgagagcagccgtgttaaagaaatcctcaatgacgagcgctacaaggcctttaagcagttcaccagcgtgttcggtgtgggcgtgaaaacctcggaaaagtggtaccgtatgggcctccgtacggttgaagaagcaaaggccagtaagagtctgaagctgagcaagatgcagaaggcgggcttcctgtattacgaggatctggcgagcggtgttagtaaagaagaagccgattgtgttacgctcatcgtgaaggaaacggtgcgtactgttagtccggatgcgctggtgaccatcgccggcggtttccgccgtggcaaacctatgggccacgacgttgacctgctgatcacgattccgggccgtcctgaagatgacgagctgctccacaaagtggttgatctgctcaagaagcaaggtctgctgctgtacgaagacatccgtgagagcacgttcgtggaggggcaactgccaagtcctaaacctgacgccctggacaaccatcagaagtgcttcgccattctcaagctgtaccgtccgaaggtggataacagtgcggttgggacgagtaagaaaagtgacatggctgaggttaaggattggaaagcggttcgtgtggatctggtgatcacgccattcgagcagttcgcctatgcgctgctcggttggacgggcagcggccaatttcgtcgcgatctgcgtcgctatgcggaggaagagcgcgacatgctgctcgacaaccatcgtctctacgacctgaaaaagggcatctttctgagtgcggacagcgaagaagagattttcggtcatctgggtctggattatctggagccgtgggaacgcaacgcg

SEQ ID NO: 4710 - protein, 394 aa, synthetic construct
  REGION 1..394: note = Variant of terminal deoxynucleotidyl transferase
MHHHHHHGGSGHPEGNTPEKEVPSVIARHVSQYACQRKTTLNNYNKKFTDALEIMAENYKFKENLQACLEAKRAASVLKSLPFEVTSMKDIQGLPCITDDVRDVIEEIIEEGESSRVKEILNDERYKAFKQFTSVFGVGVKTSEKWYRMGLRTVEEAKASKSLKLSKMQKAGFLYYEDLASGVSKEEADCVTLIVKETVRTVSPDALVTIAGGFRRGKPMGHDVDLLITIPGRPEDDELLHKVVDLLKKQGLLLYEDIRESTFVEGQLPSPKPDALDNHQKCFAILKLYRPKVDNSAVGTSKKSDMAEVKDWKAVRVDLVITPFEQFAYALLGWTGSGQFRRDLRRYAEEERDMLLDNHRLYDLKKGIFLSADSEEEIFGHLGLDYLEPWERNA

SEQ ID NO: 4711 - DNA, 1182 bp, synthetic construct
  misc_feature 1..1182: note = Variant of terminal deoxynucleotidyl transferase
  source 1..1182: mol_type = other DNA
atgcatcaccaccatcatcatgggggttctggtcatccggaaggtaataccccggagaaggaggtgccgagcgttatcgcccgtcatgttagtcagtacgcgtgccagcgcaagaccacgctgaataactacaacaaaaagttcaccgacgcgctggagatcatggccgagaactacaaatttaaagagaacctgcaggcgtgtctggaagccaagcgcgccgcgagtgtcctgaaaagcctgccgttcgaggttaccagcatgaaagacatccaaggtctgccgtgcattaccgacgacgtacgtgacgtgatcgaggagatcatcgaagagggcgagagcagccgtgttaaagaaatcctcaatgacgagcgctacaaggcctttaagcagttcaccagcgtgttcggtgtgggcgtgaaaacctcggaaaagtggtaccgtatgggcctccgtacggttgaagaagcaaaggccagtaagagtctgaagctgagcaagatgcagaaggcgggcttcctgtattacgaggatctggcgagcggtgttagtaaagaagaagccgatgccgttacgctcatcgtgaaggaaacggtgcgtactgttagtccggatgcgctggtgaccatcgccggcggtttccgccgtggcaaacctatgggccacgacgttgacctgctgatcacgattccgggccgtcctgaagatttggagctgctccacaaagtggttgatctgctcaagaagcaaggtctgctgctgtacgaagacatccgtgagagcacgttcgtggaggggcaactgccaagtcctaaacctgacgccctggacaaccatcagaagtgcttcgccattctcaagctgtaccgtccgaaggtggataacagtgcggttgggacgagtaagaaaagtgacatggctgaggttaaggattggaaagcggttcgtgtggatctggtgatcacgccattcgagcagttcgcctatgcgctgctcggttggacgggcagcggccaatttcgtcgcgatctgcgtcgctatgcggaggaagagcgcgacatgctgctcgacaaccatcgtctctacgacctgaaaaagggcatctttctgagtgcggacagcgaagaagagattttcggtcatctgggtctggattatctggagccgtgggaacgcaacgcg

SEQ ID NO: 4712 - protein, 394 aa, synthetic construct
  REGION 1..394: note = Variant of terminal deoxynucleotidyl transferase
MHHHHHHGGSGHPEGNTPEKEVPSVIARHVSQYACQRKTTLNNYNKKFTDALEIMAENYKFKENLQACLEAKRAASVLKSLPFEVTSMKDIQGLPCITDDVRDVIEEIIEEGESSRVKEILNDERYKAFKQFTSVFGVGVKTSEKWYRMGLRTVEEAKASKSLKLSKMQKAGFLYYEDLASGVSKEEADAVTLIVKETVRTVSPDALVTIAGGFRRGKPMGHDVDLLITIPGRPEDLELLHKVVDLLKKQGLLLYEDIRESTFVEGQLPSPKPDALDNHQKCFAILKLYRPKVDNSAVGTSKKSDMAEVKDWKAVRVDLVITPFEQFAYALLGWTGSGQFRRDLRRYAEEERDMLLDNHRLYDLKKGIFLSADSEEEIFGHLGLDYLEPWERNA

SEQ ID NO: 4713 - DNA, 1182 bp, synthetic construct
  misc_feature 1..1182: note = Variant of terminal deoxynucleotidyl transferase
  source 1..1182: mol_type = other DNA
atgcatcaccaccatcatcatgggggttctggtcatccggaaggtaataccccggagaaggaggtgccgagcgttatcgcccgtcatgttagtcagtacgcgtgccagcgcaagaccacgctgaataactacaacaaaaagttcaccgacgcgctggagatcatggccgagaactacaaatttaaagagaacctgcaggcgtgtctggaagccaagcgcgccgcgagtgtcctgaaaagcctgccgttcgaggttaccagcatgaaagacatccaaggtctgccgtgcattaccgacgacgtacgtgacgtgatcgaggagatcatcgaagagggcgagagcagccgtgttaaagaaatcctcaatgacgagcgctacaaggcctttaagcagttcaccagcgtgttcggtgtgggcgtgaaaacctcggaaaagtggtaccgtatgggcctccgtacggttgaagaagcaaaggccagtaagagtctgaagctgagcaagatgcagaaggcgggcttcctgtattacgaggatctggcgagcggtgttagtaaagaagaagccgatgccgttacgctcatcgtgaaggaaacggtgcgtactgttagtccggatgcgctggtgaccatcgccggcggtttccgccgtggcaaacctatgggccacgacgttgacctgctgatcacgattccgggccgtcctgaagatgacgagctgctccacaaagtggttgatctgctcaagaagcaaggtctgctgctgtacgaagacatccgtgagagcacgttcgtggaggggcaactgccaagtcctaaacctgacgccctggacaaccatcagaagtgcttcgccattctcaagctgtaccgtccgaaggtggataacagtgcggttgggacgagtaaggctagtgacatggctgaggttaaggattggaaagcggttcgtgtggatctggtgatcacgccattcgagcagttcgcctatgcgctgctcggttggacgggcagcggccaatttcgtcgcgatctgcgtcgctatgcggaggaagagcgcgacatgctgctcgacaaccatcgtctctacgacctgaaaaagggcatctttctgagtgcggacagcgaagaagagattttcggtcatctgggtctggattatctggagccgtgggaacgcaacgcg

SEQ ID NO: 4714 - protein, 394 aa, synthetic construct
  REGION 1..394: note = Variant of terminal deoxynucleotidyl transferase
MHHHHHHGGSGHPEGNTPEKEVPSVIARHVSQYACQRKTTLNNYNKKFTDALEIMAENYKFKENLQACLEAKRAASVLKSLPFEVTSMKDIQGLPCITDDVRDVIEEIIEEGESSRVKEILNDERYKAFKQFTSVFGVGVKTSEKWYRMGLRTVEEAKASKSLKLSKMQKAGFLYYEDLASGVSKEEADAVTLIVKETVRTVSPDALVTIAGGFRRGKPMGHDVDLLITIPGRPEDDELLHKVVDLLKKQGLLLYEDIRESTFVEGQLPSPKPDALDNHQKCFAILKLYRPKVDNSAVGTSKASDMAEVKDWKAVRVDLVITPFEQFAYALLGWTGSGQFRRDLRRYAEEERDMLLDNHRLYDLKKGIFLSADSEEEIFGHLGLDYLEPWERNA

SEQ ID NO: 4715 - DNA, 1182 bp, synthetic construct
  misc_feature 1..1182: note = Variant of terminal deoxynucleotidyl transferase
  source 1..1182: mol_type = other DNA
atgcatcaccaccatcatcatgggggttctggtcatccggaaggtaataccccggagaaggaggtgccgagcgttatcgcccgtcatgttagtcagtacgcgtgccagcgcaagaccacgctgaataactacaacaaaaagttcaccgacgcgctggagatcatggccgagaactacaaatttaaagagaacctgcaggcgtgtctggaagccaagcgcgccgcgagtgtcctgaaaagcctgccgttcgaggttaccagcatgaaagacatccaaggtctgccgtgcattaccgacgacgtacgtgacgtgatcgaggagatcatcgaagagggcgagagcagccgtgttaaagaaatcctcaatgacgagcgctacaaggcctttaagcagttcaccagcgtgttcggtgtgggcgtgaaaacctcggaaaagtggtaccgtatgggcctccgtacggttgaagaagcaaaggccagtaagagtctgaagctgagcaagatgcagaaggcgggcttcctgtattacgaggatctggcgagcggtgttagtaaagaagaagccgatgccgttacgctcatcgtgaaggaaacggtgcgtactgttagtccggatgcgctggtgaccatcgccggcggtttccgccgtggcaaacctatgggccacgacgttgacctgctgatcacgattccgggccgtcctgaagatgacgagctgctccacaaagtggttgatctgctcaagaagcaaggtctgctgctgtacgaagacatccgtgagagcacgttcgtggaggggcaactgccaagtcctaaacctgacgccctggacaaccatcagaagtgcttcgccattctcaagctgtaccgtccgaaggtggataacagtgcggttgggacgagtaagcggagtgacatggctgaggttaaggattggaaagcggttcgtgtggatctggtgatcacgccattcgagcagttcgcctatgcgctgctcggttggacgggcagcggccaatttcgtcgcgatctgcgtcgctatgcggaggaagagcgcgacatgctgctcgacaaccatcgtctctacgacctgaaaaagggcatctttctgagtgcggacagcgaagaagagattttcggtcatctgggtctggattatctggagccgtgggaacgcaacgcg

SEQ ID NO: 4716 - protein, 394 aa, synthetic construct
  REGION 1..394: note = Variant of terminal deoxynucleotidyl transferase
MHHHHHHGGSGHPEGNTPEKEVPSVIARHVSQYACQRKTTLNNYNKKFTDALEIMAENYKFKENLQACLEAKRAASVLKSLPFEVTSMKDIQGLPCITDDVRDVIEEIIEEGESSRVKEILNDERYKAFKQFTSVFGVGVKTSEKWYRMGLRTVEEAKASKSLKLSKMQKAGFLYYEDLASGVSKEEADAVTLIVKETVRTVSPDALVTIAGGFRRGKPMGHDVDLLITIPGRPEDDELLHKVVDLLKKQGLLLYEDIRESTFVEGQLPSPKPDALDNHQKCFAILKLYRPKVDNSAVGTSKRSDMAEVKDWKAVRVDLVITPFEQFAYALLGWTGSGQFRRDLRRYAEEERDMLLDNHRLYDLKKGIFLSADSEEEIFGHLGLDYLEPWERNA

SEQ ID NO: 4717 - DNA, 1182 bp, synthetic construct
  misc_feature 1..1182: note = Variant of terminal deoxynucleotidyl transferase
  source 1..1182: mol_type = other DNA
atgcatcaccaccatcatcatgggggttctggtcatccggaaggtaataccccggagaaggaggtgccgagcgttatcgcccgtcatgttagtcagtacgcgtgccagcgcaagaccacgctgaataactacaacaaaaagttcaccgacgcgctggagatcatggccgagaactacaaatttaaagagaacctgcaggcgtgtctggaagccaagcgcgccgcgagtgtcctgaaaagcctgccgttcgaggttaccagcatgaaagacatccaaggtctgccgtgcattaccgacgacgtacgtgacgtgatcgaggagatcatcgaagagggcgagagcagccgtgttaaagaaatcctcaatgacgagcgctacaaggcctttaagcagttcaccagcgtgttcggtgtgggcgtgaaaacctcggaaaagtggtaccgtatgggcctccgtacggttgaagaagcaaaggccagtaagagtctgaagctgagcaagatgcagaaggcgggcttcctgtattacgaggatctggcgagcggtgttagtaaagaagaagccgatgccgttacgctcatcgtgaaggaaacggtgcgtactgttagtccggatgcgctggtgaccatcgccggcggtttccgccgtggcaaacctatgggccacgacgttgacctgctgatcacgattccgggccgtcctgaagatgacgagctgctccacaaagtggttgatctgctcaagaagcaaggtctgctgctgtacgaagacatccgtgagagcacgttcgtggaggggcaactgccaagtcctaaacctgacgccctggacaaccatcagaagtgcttcgccattctcaggctgtaccgtccgaaggtggataacagtgcggttgggacgagtaagaaaagtgacatggctgaggttaaggattggaaagcggttcgtgtggatctggtgatcacgccattcgagcagttcgcctatgcgctgctcggttggacgggcagcggccaatttcgtcgcgatctgcgtcgctatgcggaggaagagcgcgacatgctgctcgacaaccatcgtctctacgacctgaaaaagggcatctttctgagtgcggacagcgaagaagagattttcggtcatctgggtctggattatctggagccgtgggaacgcaacgcg

SEQ ID NO: 4718 - protein, 394 aa, synthetic construct
  REGION 1..394: note = Variant of terminal deoxynucleotidyl transferase
MHHHHHHGGSGHPEGNTPEKEVPSVIARHVSQYACQRKTTLNNYNKKFTDALEIMAENYKFKENLQACLEAKRAASVLKSLPFEVTSMKDIQGLPCITDDVRDVIEEIIEEGESSRVKEILNDERYKAFKQFTSVFGVGVKTSEKWYRMGLRTVEEAKASKSLKLSKMQKAGFLYYEDLASGVSKEEADAVTLIVKETVRTVSPDALVTIAGGFRRGKPMGHDVDLLITIPGRPEDDELLHKVVDLLKKQGLLLYEDIRESTFVEGQLPSPKPDALDNHQKCFAILRLYRPKVDNSAVGTSKKSDMAEVKDWKAVRVDLVITPFEQFAYALLGWTGSGQFRRDLRRYAEEERDMLLDNHRLYDLKKGIFLSADSEEEIFGHLGLDYLEPWERNA

SEQ ID NO: 4719 - DNA, 1182 bp, synthetic construct
  misc_feature 1..1182: note = Variant of terminal deoxynucleotidyl transferase
  source 1..1182: mol_type = other DNA
atgcatcaccaccatcatcatgggggttctggtcatccggaaggtaataccccggagaaggaggtgccgagcgttatcgcccgtcatgttagtcagtacgcgtgccagcgcaagaccacgctgaataactacaacaaaaagttcaccgacgcgctggagatcgtggccgagaactacaaatttaaagagaacctgcaggcgtgtctggaagccaagcgcgccgcgagtgtcctgaaaagcctgccgttcgaggttaccagcatgaaagacatccaaggtctgccgtgcattaccgacgacgtacgtgacgtgatcgaggagatcatcgaagagggcgagagcagccgtgttaaagaaatcctcaatgacgagcgctacaaggcctttaagcagttcaccagcgtgttcggtgtgggcgtgaaaacctcggaaaagtggtaccgtatgggcctccgtacggttgaagaagcaaaggccagtaagagtctgaagctgagcaagatgcagaaggcgggcttcctgtattacgaggatctggcgagcggtgttagtaaagaagaagccgatgccgttacgctcatcgtgaaggaaacggtgcgtactgttagtccggatgcgctggtgaccatcgccggcggtttccgccgtggcaaacctatgggccacgacgttgacctgctgatcacgattccgggccgtcctgaagatgacgagctgctccacaaagtggttgatctgctcaagaagcaaggtctgctgctgtacgaagacatccgtgagagcacgttcgtggaggggcaactgccaagtcctaaacctgacgccctggacaaccatcagaagtgcttcgccattctcaagctgtaccgtccgaaggtggataacagtgcggttgggacgagtaagaaaagtgacatggctgaggttaaggattggaaagcggttcgtgtggatctggtgatcacgccattcgagcagttcgcctatgcgctgctcggttggacgggcagcggccaatttcgtcgcgatctgcgtcgctatgcggaggaagagcgcgacatgctgctcgacaaccatcgtctctacgacctgaaaaagggcatctttctgagtgcggacagcgaagaagagattttcggtcatctgggtctggattatctggagccgtgggaacgcaacgcg

SEQ ID NO: 4720 - protein, 394 aa, synthetic construct
  REGION 1..394: note = Variant of terminal deoxynucleotidyl transferase
MHHHHHHGGSGHPEGNTPEKEVPSVIARHVSQYACQRKTTLNNYNKKFTDALEIVAENYKFKENLQACLEAKRAASVLKSLPFEVTSMKDIQGLPCITDDVRDVIEEIIEEGESSRVKEILNDERYKAFKQFTSVFGVGVKTSEKWYRMGLRTVEEAKASKSLKLSKMQKAGFLYYEDLASGVSKEEADAVTLIVKETVRTVSPDALVTIAGGFRRGKPMGHDVDLLITIPGRPEDDELLHKVVDLLKKQGLLLYEDIRESTFVEGQLPSPKPDALDNHQKCFAILKLYRPKVDNSAVGTSKKSDMAEVKDWKAVRVDLVITPFEQFAYALLGWTGSGQFRRDLRRYAEEERDMLLDNHRLYDLKKGIFLSADSEEEIFGHLGLDYLEPWERNA

SEQ ID NO: 4721 - DNA, 1182 bp, synthetic construct
  misc_feature 1..1182: note = Variant of terminal deoxynucleotidyl transferase
  source 1..1182: mol_type = other DNA
atgcatcaccaccatcatcatgggggttctggtcatccggaaggtaataccccggagaaggaggtgccgagcgttatcgcccgtcatgttagtcagtacgcgtgccagcgcaagaccacgctgaataactacaacaaaaagttcaccgacgcgctggagatcatggccgagaactacaaatttaaagagaacctgcaggcgtgtctggaagccaagcgcgccgcgagtgtcctgaaaagcctgccgttcgaggttaccagcatgaaagacatccaaggtctgccgtgcattaccgacgacgtacgtgacgtgatcgaggagatcatcgaagagggcgagagcagccgtgttaaagaaatcctcaatgacgagcgctacaaggcctttaagcagttcaccagcgtgttcggtgtgggcgtgaaaacctcggaaaagtggtaccgtatgggcctccgtacggttgaagaagcaaaggccagtaagagtctgaagctgagcaagatgcagaaggcgggcttcctgtattacgaggatctggcgagcggtgttagtaaagaagaagccgatgccgttacgctcatcgtgaaggaaacggtgcgtactgttagtccggatgcgctggtgaccatcgccggcggtttccgccgtggcaaacctatgggccacgacgttgacctgctgatcacgattccgggccgtcctgaagatgacgagctgctccacaaagtggttgatctgctcaagaagcaaggtctgctgctgtacgaagacatccgtgagagcacgttcgtggaggggcaactgccaagtcctaaacctgacgccctggacaaccatcagaagtgcttcgccattctcaagctgtaccgtccgaaggtggataactgtgcggttgggacgagtaagaaaagtgacatggctgaggttaaggattggaaagcggttcgtgtggatctggtgatcacgccattcgagcagttcgcctatgcgctgctcggttggacgggcagcggccaatttcgtcgcgatctgcgtcgctatgcggaggaagagcgcgacatgctgctcgacaaccatcgtctctacgacctgaaaaagggcatctttctgagtgcggacagcgaagaagagattttcggtcatctgggtctggattatctggagccgtgggaacgcaacgcg

SEQ ID NO: 4722 - protein, 394 aa, synthetic construct
  REGION 1..394: note = Variant of terminal deoxynucleotidyl transferase
MHHHHHHGGSGHPEGNTPEKEVPSVIARHVSQYACQRKTTLNNYNKKFTDALEIMAENYKFKENLQACLEAKRAASVLKSLPFEVTSMKDIQGLPCITDDVRDVIEEIIEEGESSRVKEILNDERYKAFKQFTSVFGVGVKTSEKWYRMGLRTVEEAKASKSLKLSKMQKAGFLYYEDLASGVSKEEADAVTLIVKETVRTVSPDALVTIAGGFRRGKPMGHDVDLLITIPGRPEDDELLHKVVDLLKKQGLLLYEDIRESTFVEGQLPSPKPDALDNHQKCFAILKLYRPKVDNCAVGTSKKSDMAEVKDWKAVRVDLVITPFEQFAYALLGWTGSGQFRRDLRRYAEEERDMLLDNHRLYDLKKGIFLSADSEEEIFGHLGLDYLEPWERNA

SEQ ID NO: 4723 - DNA, 1182 bp, synthetic construct
  misc_feature 1..1182: note = Variant of terminal deoxynucleotidyl transferase
  source 1..1182: mol_type = other DNA
atgcatcaccaccatcatcatgggggttctggtcatccggaaggtaataccccggagaaggaggtgccgagcgttatcgcccgtcatgttagtcagtacgcgtgccagcgcaagaccacgctgaataactacaacaaaaagttcaccgacgcgctggagatcatggccgagaactacaaatttaaagagaacctgcaggcgtgtctggaagccaagcgcgccgcgagtgtcctgaaaagcctgccgttcgaggttaccagcatgaaagacatccaaggtctgccgtgcattaccgacgacgtacgtgacgtgatcgaggagatcatcgaagagggcgagagcagccgtgttaaagaaatcctcaatgacgagcgctacaaggcctttaagcagttcaccagcgtgttcggtgtgggcgtgaaaacctcggaaaagtggtaccgtatgggcctccgtacggttgaagaagcaaaggccagtaagagtctgaagctgagcaagatgcagaaggcgggcttcctgtattacgaggatctggcgagcggtgttagtaaagaagaagccgatgccgttacgctcatcgtgaaggaaacggtgcgtactgttagtccggatgcgctggtgaccatcgccggcggtttccgccgtggcaaacctatgggccacgacgttgacctgctgatcacgattccgggccgtcctgaagatgacgagctgctccacaaagtggttgatctgctcaaggggcaaggtctgctgctgtacgaagacatccgtgagagcacgttcgtggaggggcaactgccaagtcctaaacctgacgccctggacaaccatcagaagtgcttcgccattctcaagctgtaccgtccgaaggtggataacagtgcggttgggacgagtaagaaaagtgacatggctgaggttaaggattggaaagcggttcgtgtggatctggtgatcacgccattcgagcagttcgcctatgcgctgctcggttggacgggcagcggccaatttcgtcgcgatctgcgtcgctatgcggaggaagagcgcgacatgctgctcgacaaccatcgtctctacgacctgaaaaagggcatctttctgagtgcggacagcgaagaagagattttcggtcatctgggtctggattatctggagccgtgggaacgcaacgcg

SEQ ID NO: 4724 - protein, 394 aa, synthetic construct
  REGION 1..394: note = Variant of terminal deoxynucleotidyl transferase
MHHHHHHGGSGHPEGNTPEKEVPSVIARHVSQYACQRKTTLNNYNKKFTDALEIMAENYKFKENLQACLEAKRAASVLKSLPFEVTSMKDIQGLPCITDDVRDVIEEIIEEGESSRVKEILNDERYKAFKQFTSVFGVGVKTSEKWYRMGLRTVEEAKASKSLKLSKMQKAGFLYYEDLASGVSKEEADAVTLIVKETVRTVSPDALVTIAGGFRRGKPMGHDVDLLITIPGRPEDDELLHKVVDLLKGQGLLLYEDIRESTFVEGQLPSPKPDALDNHQKCFAILKLYRPKVDNSAVGTSKKSDMAEVKDWKAVRVDLVITPFEQFAYALLGWTGSGQFRRDLRRYAEEERDMLLDNHRLYDLKKGIFLSADSEEEIFGHLGLDYLEPWERNA

SEQ ID NO: 4725 - DNA, 1182 bp, synthetic construct
  misc_feature 1..1182: note = Variant of terminal deoxynucleotidyl transferase
  source 1..1182: mol_type = other DNA
atgcatcaccaccatcatcatgggggttctggtcatccggaaggtaataccccggagaaggaggtgccgagcgttatcgcccgtcatgttagtcagtacgcgtgccagcgcaagaccacgctgaataactacaacaaaaagttcaccgacgcgctggagatcatggccgagaactacaaatttaaagagaacctgcaggcgtgtctggaagccaagcgcgccgcgagtgtcctgaaaagcctgccgttcgaggttaccagcatgaaagacatccaaggtctgccgtgcattaccgacgacgtacgtgacgtgatcgaggagatcatcgaagagggcgagagcagccgtgttaaagaaatcctcaatgacgagcgctacaaggcctttaagcagttcaccagcgtgttcggtgtgggcgtgaaaacctcggaaaagtggtaccgtatgggcctccgtacggttgaagaagcaaaggccagtaagagtctgaagctgagcaagatgcagaaggcgggcttcctgtattacgaggatctggcgagcggtgttagtaaagaagaagccgatgccgttacgctcatcgtgaaggaaacggtgcgtactgttagtccggaggcgctggtgaccatcgccggcggtttccgccgtggcaaacctatgggccacgacgttgacctgctgatcacgattccgggccgtcctgaagatgacgagctgctccacaaagtggttgatctgctcaagaagcaaggtctgctgctgtacgaagacatccgtgagagcacgttcgtggaggggcaactgccaagtcctaaacctgacgccctggacaaccatcagaagtgcttcgccattctcaagctgtaccgtccgaaggtggataacagtgcggttgggacgagtaagaaaagtgacatggctgaggttaaggattggaaagcggttcgtgtggatctggtgatcacgccattcgagcagttcgcctatgcgctgctcggttggacgggcagcggccaatttcgtcgcgatctgcgtcgctatgcggaggaagagcgcgacatgctgctcgacaaccatcgtctctacgacctgaaaaagggcatctttctgagtgcggacagcgaagaagagattttcggtcatctgggtctggattatctggagccgtgggaacgcaacgcg

SEQ ID NO: 4726 - protein, 394 aa, synthetic construct
  REGION 1..394: note = Variant of terminal deoxynucleotidyl transferase
MHHHHHHGGSGHPEGNTPEKEVPSVIARHVSQYACQRKTTLNNYNKKFTDALEIMAENYKFKENLQACLEAKRAASVLKSLPFEVTSMKDIQGLPCITDDVRDVIEEIIEEGESSRVKEILNDERYKAFKQFTSVFGVGVKTSEKWYRMGLRTVEEAKASKSLKLSKMQKAGFLYYEDLASGVSKEEADAVTLIVKETVRTVSPEALVTIAGGFRRGKPMGHDVDLLITIPGRPEDDELLHKVVDLLKKQGLLLYEDIRESTFVEGQLPSPKPDALDNHQKCFAILKLYRPKVDNSAVGTSKKSDMAEVKDWKAVRVDLVITPFEQFAYALLGWTGSGQFRRDLRRYAEEERDMLLDNHRLYDLKKGIFLSADSEEEIFGHLGLDYLEPWERNA

SEQ ID NO: 4727 - DNA, 1182 bp, synthetic construct
  misc_feature 1..1182: note = Variant of terminal deoxynucleotidyl transferase
  source 1..1182: mol_type = other DNA
atgcatcaccaccatcatcatgggggttctggtcatccggaaggtaataccccggagaaggaggtgccgagcgttatcgcccgtcatgttagtcagtacgcgtgccagcgcaagaccacgctgaataactacaacaaaaagttcaccgacgcgctggagatcatggccgagaactacaaatttaaagagaacctgcaggcgtgtctggaagccaagcgcgccgcgagtgtcctgaaaagcctgccgttcgaggttaccagcatgaaagacatccaaggtctgccgtgcattaccgacgacgtacgtgacgtgatcgaggagatcatcgaagagggcgagagcagccgtgttaaagaaatcctcaatgacgagcgctacaaggcctttaagcagttcaccagcgtgttcggtgtgggcgtgaaaacctcggaaaagtggtaccgtatgggcctccgtacggttgaagaagcaaaggccagtaagagtctgaagctgagcaagatgcagaaggcgggcttcctgtattacgaggatctggcgagcggtgttagtaaagaagaagccgatgccgttacgctcatcgtgaaggaaacggtgcgtactgttagtccggatgcgctggtgaccatcgccggcggtttccgccgtggcaaacctatgggccacgacgttgacctgctgatcacgattccgaatcgtcctgaagatgacgagctgctccacaaagtggttgatctgctcaagaagcaaggtctgctgctgtacgaagacatccgtgagagcacgttcgtggaggggcaactgccaagtcctaaacctgacgccctggacaaccatcagaagtgcttcgccattctcaagctgtaccgtccgaaggtggataacagtgcggttgggacgagtaagaaaagtgacatggctgaggttaaggattggaaagcggttcgtgtggatctggtgatcacgccattcgagcagttcgcctatgcgctgctcggttggacgggcagcggccaatttcgtcgcgatctgcgtcgctatgcggaggaagagcgcgacatgctgctcgacaaccatcgtctctacgacctgaaaaagggcatctttctgagtgcggacagcgaagaagagattttcggtcatctgggtctggattatctggagccgtgggaacgcaacgcg

SEQ ID NO: 4728 - protein, 394 aa, synthetic construct
  REGION 1..394: note = Variant of terminal deoxynucleotidyl transferase
MHHHHHHGGSGHPEGNTPEKEVPSVIARHVSQYACQRKTTLNNYNKKFTDALEIMAENYKFKENLQACLEAKRAASVLKSLPFEVTSMKDIQGLPCITDDVRDVIEEIIEEGESSRVKEILNDERYKAFKQFTSVFGVGVKTSEKWYRMGLRTVEEAKASKSLKLSKMQKAGFLYYEDLASGVSKEEADAVTLIVKETVRTVSPDALVTIAGGFRRGKPMGHDVDLLITIPNRPEDDELLHKVVDLLKKQGLLLYEDIRESTFVEGQLPSPKPDALDNHQKCFAILKLYRPKVDNSAVGTSKKSDMAEVKDWKAVRVDLVITPFEQFAYALLGWTGSGQFRRDLRRYAEEERDMLLDNHRLYDLKKGIFLSADSEEEIFGHLGLDYLEPWERNA

SEQ ID NO: 4729 - DNA, 1182 bp, synthetic construct
  misc_feature 1..1182: note = Variant of terminal deoxynucleotidyl transferase
  source 1..1182: mol_type = other DNA
atgcatcaccaccatcatcatgggggttctggtcatccggaaggtaataccccggagaaggaggtgccgagcgttatcgcccgtcatgttagtcagtacgcgtgccagcgcaagaccacgctgaataactacaacaaaaagttcaccgacgcgctggagatcatggccgagaactacaaatttaaagagaacctgcaggcgtgtctggaagccaagcgcgccgcgagtgtcctgaaaagcctgccgttcgaggttaccagcatgaaagacatccaaggtctgccgtgcattaccgacgacgtacgtgacgtgatcgaggagatcatcgaagagggcgagagcagccgtgttaaagaaatcctcaatgacgagcgctacaaggcctttaagcagttcaccagcgtgttcggtgtgggcgtgaaaacctcggaaaagtggtaccgtatgggcctccgtacggttgaagaagcaaaggccagtaagagtctgaagctgagcaagatgcagaaggcgggcttcctgtattacgaggatctggcgagcggtgttagtaaagaagaagccgatgccgttacgctcatcgtgaaggaaacggtgcgtactgttagtccggatgcgctggtgaccatcgccggcggtttccgccgtggcaaacctatgggccacgacgttgacctgctgatcacgattccgggccgtcctgaagatgacgagctgctccacaaagtggttgatctgctcaagaagcaaggtctgctgctgtacgaagacatccgtgagagcacgttcgtggaggggcaactgccaagtcctaaacctgacgccctggacaaccatcagaagtgcttcgccatttgtaagctgtaccgtccgaaggtggataacagtgcggttgggacgagtaagaaaagtgacatggctgaggttaaggattggaaagcggttcgtgtggatctggtgatcacgccattcgagcagttcgcctatgcgctgctcggttggacgggcagcggccaatttcgtcgcgatctgcgtcgctatgcggaggaagagcgcgacatgctgctcgacaaccatcgtctctacgacctgaaaaagggcatctttctgagtgcggacagcgaagaagagattttcggtcatctgggtctggattatctggagccgtgggaacgcaacgcg

SEQ ID NO: 4730 - protein, 394 aa, synthetic construct
  REGION 1..394: note = Variant of terminal deoxynucleotidyl transferase
MHHHHHHGGSGHPEGNTPEKEVPSVIARHVSQYACQRKTTLNNYNKKFTDALEIMAENYKFKENLQACLEAKRAASVLKSLPFEVTSMKDIQGLPCITDDVRDVIEEIIEEGESSRVKEILNDERYKAFKQFTSVFGVGVKTSEKWYRMGLRTVEEAKASKSLKLSKMQKAGFLYYEDLASGVSKEEADAVTLIVKETVRTVSPDALVTIAGGFRRGKPMGHDVDLLITIPGRPEDDELLHKVVDLLKKQGLLLYEDIRESTFVEGQLPSPKPDALDNHQKCFAICKLYRPKVDNSAVGTSKKSDMAEVKDWKAVRVDLVITPFEQFAYALLGWTGSGQFRRDLRRYAEEERDMLLDNHRLYDLKKGIFLSADSEEEIFGHLGLDYLEPWERNA

SEQ ID NO: 4731 - DNA, 1182 bp, synthetic construct
  misc_feature 1..1182: note = Variant of terminal deoxynucleotidyl transferase
  source 1..1182: mol_type = other DNA
atgcatcaccaccatcatcatgggggttctggtcatccggaaggtaataccccggagaaggaggtgccgagcgttatcgcccgtcatgttagtcagtacgcgtgccagcgcaagaccacgctgaataactacaacaaaaagttcaccgacgcgctggagatcatggccgagaactacaaatttaaagagaacctgcaggcgtgtctggaagccaagcgcgccgcgagtgtcctgaaaagcctgccgttcgaggttaccagcatgaaagacatccaaggtctgccgtgcattaccgacgacgtacgtgacgtgatcgaggagatcatcgaagagggcgagagcagccgtgttaaagaaatcctcaatgacgagcgctacaaggcctttaagcagttcaccagcgtgttcggtgtgggcgtgaaaacctcggaaaagtggtaccgtatgggcctccgtacggttgaagaagcaaaggccagtaagagtctgaagctgagcaagatgcagaaggcgggcttcgagtattacgaggatctggcgagcggtgttagtaaagaagaagccgatgccgttacgctcatcgtgaaggaaacggtgcgtactgttagtccggatgcgctggtgaccatcgccggcggtttccgccgtggcaaacctatgggccacgacgttgacctgctgatcacgattccgggccgtcctgaagatgacgagctgctccacaaagtggttgatctgctcaagaagcaaggtctgctgctgtacgaagacatccgtgagagcacgttcgtggaggggcaactgccaagtcctaaacctgacgccctggacaaccatcagaagtgcttcgccattctcaagctgtaccgtccgaaggtggataacagtgcggttgggacgagtaagaaaagtgacatggctgaggttaaggattggaaagcggttcgtgtggatctggtgatcacgccattcgagcagttcgcctatgcgctgctcggttggacgggcagcggccaatttcgtcgcgatctgcgtcgctatgcggaggaagagcgcgacatgctgctcgacaaccatcgtctctacgacctgaaaaagggcatctttctgagtgcggacagcgaagaagagattttcggtcatctgggtctggattatctggagccgtgggaacgcaacgcg

SEQ ID NO: 4732 - protein, 394 aa, synthetic construct
  REGION 1..394: note = Variant of terminal deoxynucleotidyl transferase
MHHHHHHGGSGHPEGNTPEKEVPSVIARHVSQYACQRKTTLNNYNKKFTDALEIMAENYKFKENLQACLEAKRAASVLKSLPFEVTSMKDIQGLPCITDDVRDVIEEIIEEGESSRVKEILNDERYKAFKQFTSVFGVGVKTSEKWYRMGLRTVEEAKASKSLKLSKMQKAGFEYYEDLASGVSKEEADAVTLIVKETVRTVSPDALVTIAGGFRRGKPMGHDVDLLITIPGRPEDDELLHKVVDLLKKQGLLLYEDIRESTFVEGQLPSPKPDALDNHQKCFAILKLYRPKVDNSAVGTSKKSDMAEVKDWKAVRVDLVITPFEQFAYALLGWTGSGQFRRDLRRYAEEERDMLLDNHRLYDLKKGIFLSADSEEEIFGHLGLDYLEPWERNA

SEQ ID NO: 4733 - DNA, 1182 bp, synthetic construct
  misc_feature 1..1182: note = Variant of terminal deoxynucleotidyl transferase
  source 1..1182: mol_type = other DNA
atgcatcaccaccatcatcatgggggttctggtcatccggaaggtaataccccggagaaggaggtgccgagcgttatcgcccgtcatgttagtcaatacgcgtgccagcgcaagaccacgctgaataactacaacaaaaagttcaccgacgcgctggagatcatggccgagaactacaagtttaaagagaacctgcaggcgtgcctggaagccaagcgcgccgcgagtgtcctgaaaagcctgccgttcgaggttaccagcatgaaagacatccaaggtctgccgtgcattaccgacgacgtacgtcctgtgatcgaagagatcatcgaagtaggcgagagcagccgtgttaaagaaatcctcaatgacgagcgctacaaggcctttaagcagttcaccagcgtgttcggtgtgggcgtgaaaacctcggaaaagtggtaccgtatgggcctccgtacggttgaagaagcaaaggccagtaagagtctgaagctgagcaagatgcagaaggcgggcttcctgtattacgaggatctggcgagcggtgttagtaaagaagaagccgatgccgttacgctcatcgtgaaggaaacggtgcgcactgttagtccggatgcgctggtgaccatcgccggcggtttccgccgtggcaaacctatgggccacgacgttgacctgctgatcacgattccgggccgtcctacggatgacgagctgctccacaaagtggttgatctgctcaagaagcaaggtctgctgctgtacgaagacatccgtgagagcacgttcgtggaggggcaactgccaaatcctaaacctgacgccctggacaaccatcagaagtgcttcgccattctcaagctgtaccgtccgaaggtggataacagtgcggttgggacgagtaagaaaagtgacatggctgaggttaaggattggaaagcggttcgtgtggatctggtggtcgctccagatgagcagttcgcctatgcgctgctcggttggacgggcagcggccaatttcgtcgcgatactcgtcgctatgcggaggaagagcgcgacatgctgctcgacaaccatcgtctctacgacctgaaaaagggcatctttctgagtgcggacagcgaagaagagattttcggtcatctggacctggattatctggagccgtgggaacgcaacgcg

SEQ ID NO: 4734 - protein, 394 aa, synthetic construct
  REGION 1..394: note = Variant of terminal deoxynucleotidyl transferase
MHHHHHHGGSGHPEGNTPEKEVPSVIARHVSQYACQRKTTLNNYNKKFTDALEIMAENYKFKENLQACLEAKRAASVLKSLPFEVTSMKDIQGLPCITDDVRPVIEEIIEVGESSRVKEILNDERYKAFKQFTSVFGVGVKTSEKWYRMGLRTVEEAKASKSLKLSKMQKAGFLYYEDLASGVSKEEADAVTLIVKETVRTVSPDALVTIAGGFRRGKPMGHDVDLLITIPGRPTDDELLHKVVDLLKKQGLLLYEDIRESTFVEGQLPNPKPDALDNHQKCFAILKLYRPKVDNSAVGTSKKSDMAEVKDWKAVRVDLVVAPDEQFAYALLGWTGSGQFRRDTRRYAEEERDMLLDNHRLYDLKKGIFLSADSEEEIFGHLDLDYLEPWERNA

SEQ ID NO: 4735 - DNA, 1182 bp, synthetic construct
  misc_feature 1..1182: note = Variant of terminal deoxynucleotidyl transferase
  source 1..1182: mol_type = other DNA
atgcatcaccaccatcatcatgggggttctggtcatccggaaggtaataccccggagaaggaggtgccgagcgttatcgcccgtcatgttagtcagtacgcgtgccagcgcaagaccacgctgaataactacaacaaaaagttcaccgacgcgctggagatcatggccgagaactacaaatttaaagagaacctgcaggcgtgtctggaagccaaacgcgtggcgagtgtcctgaaaagcctgccgttcgaggttaccagcatgaaagacatccaaggtctgccgtgcattaccgacgacgtacgtgacgtgatcgaagagatcatcgaagagggcgagagcagccgtgttaaagaaatcctcaatgacgagcgctacaaggcctttaagcagttcaccagcgtgttcggtgtgggcgtgaaaacctcggaaaagtggtaccgtatgggcctccgtacggttgaagaagcaaaggccagtaagagtctgaagctgagcaagatgcagaaggcgggcttcctgtattacgaggatctggcgagcggtgttagtaaagaagaagccgatgccgttacgctcatcgtgaaggaaacggtggcaactgttagtccggatgcgctggtgaccatcgccggcggtttccgccgtggcaaacctatgggccacgacgttgacctgctgatcacgattccgggccgtcctgaagatgacgagctgctccacaaagtggttgatctgctcaagaagcaaggtctgctgctgtacgaagacatccgtgagagcacgttcgtggaggggcaactgccaaatcctaaacctgacgccctggacaaccatcagaagtgcttcgccattctcaagctgtaccgtccgaaggtggataacagtgcggttgggacgagtaagaaaagtgacatggctgaggttaaggattggaaagcggttcgtgtggatctggtgattgcgccattcgagcagttcgcctatgcgctgctcggttggacgggcagcggcatgtttcgtcgcgatacgcgtcgctatgcggaggaagagcgcgacatgctgctcgacaaccatcgtctctacgacctgaaaaagggcatctttctgagtgcggacagcgaagaagagattttcggtcatctggacctggattatctggagccgtgggaacgcaacgcg

SEQ ID NO: 4736 - protein, 394 aa, synthetic construct
  REGION 1..394: note = Variant of terminal deoxynucleotidyl transferase
MHHHHHHGGSGHPEGNTPEKEVPSVIARHVSQYACQRKTTLNNYNKKFTDALEIMAENYKFKENLQACLEAKRVASVLKSLPFEVTSMKDIQGLPCITDDVRDVIEEIIEEGESSRVKEILNDERYKAFKQFTSVFGVGVKTSEKWYRMGLRTVEEAKASKSLKLSKMQKAGFLYYEDLASGVSKEEADAVTLIVKETVATVSPDALVTIAGGFRRGKPMGHDVDLLITIPGRPEDDELLHKVVDLLKKQGLLLYEDIRESTFVEGQLPNPKPDALDNHQKCFAILKLYRPKVDNSAVGTSKKSDMAEVKDWKAVRVDLVIAPFEQFAYALLGWTGSGMFRRDTRRYAEEERDMLLDNHRLYDLKKGIFLSADSEEEIFGHLDLDYLEPWERNA

SEQ ID NO: 4737 - DNA, 1182 bp, synthetic construct
  misc_feature 1..1182: note = Variant of terminal deoxynucleotidyl transferase
  source 1..1182: mol_type = other DNA
atgcatcaccaccatcatcatgggggttctggtcatccggaaggtaataccccggagaaggaggtgccgagcgttatcgcccgtcatgttagtcagtacgcgtgccagcgcaagaccacgctgaataactacaacaaaaagttcaccgacgcgctggagatcatggccgagaactacaagtttaaagagaacctgcaggcgtgcctggaagccaagcgcgccgcgagtgtcctgaaaagcctgccgttcgaggttaccagcatgaaagacatccaaggtctgccgtgcattaccgacgacgtacgtgacgtgatcgaagagatcatcgaagaaggcgagagcagccgtgttaaagaaatcctcaatgacgagcgctacaaggcctttaagcagttcaccagcgtgttcggtgtgggcgtgaaaacctcggaaaagtggtaccgtatgggcctccgtacggttgaagaagcaaaggccagtaagagtctgaagctgagcaagatgcagaaggcgggcttcctgtattacgaggatctggcgagcggtgttagtaaagaagaagccgatgccgttacgctcatcgtgaaggaaacggtgcgcactgttagtccggatgcgctggtgaccatcgccggcggtttccgccgtggcaaacctatgggccacgacgttgacctgctgatcacgattccgggccgtcctgaagatgacgagctgctccacaaagtggttgatctgctcaagaagcaaggtctgctgctgtacgaagacatccgtgagagcacgttcgtggaggggcaactgccaaatcctaaacctgacgccctggacaaccattcgaagtgcttcgccattctcaagctgtaccgtccgaaggtggataacagtgcggttgggacgagtaagaaaagtgacatggctgaggttaaggattggaaagcggttcgtgtggatctggtgattgcgccattcgagcagttcgcctatgcgctgctcggttggacgggcagcggccaatttcgtcgcgatactcgtcgctatgcggaggaagagcgcgacatgctgctcgacaaccatcgtctctacgacctgaaaaagggcatctttctgagtgcggacagcgaagaagagattttcggtcatctggacctggattatctggagccgtgggaacgcaacgcg

SEQ ID NO: 4738 - protein, 394 aa, synthetic construct
  REGION 1..394: note = Variant of terminal deoxynucleotidyl transferase
MHHHHHHGGSGHPEGNTPEKEVPSVIARHVSQYACQRKTTLNNYNKKFTDALEIMAENYKFKENLQACLEAKRAASVLKSLPFEVTSMKDIQGLPCITDDVRDVIEEIIEEGESSRVKEILNDERYKAFKQFTSVFGVGVKTSEKWYRMGLRTVEEAKASKSLKLSKMQKAGFLYYEDLASGVSKEEADAVTLIVKETVRTVSPDALVTIAGGFRRGKPMGHDVDLLITIPGRPEDDELLHKVVDLLKKQGLLLYEDIRESTFVEGQLPNPKPDALDNHSKCFAILKLYRPKVDNSAVGTSKKSDMAEVKDWKAVRVDLVIAPFEQFAYALLGWTGSGQFRRDTRRYAEEERDMLLDNHRLYDLKKGIFLSADSEEEIFGHLDLDYLEPWERNA

SEQ ID NO: 4739 - DNA, 1182 bp, synthetic construct
  misc_feature 1..1182: note = Variant of terminal deoxynucleotidyl transferase
  source 1..1182: mol_type = other DNA
atgcatcaccaccatcatcatgggggttctggtcatccggaaggtaataccccggagaaggaggtgccgagcgttatcgcccgtcatgttagtccatacgcgtgccagcgcaagaccacgctgaataactacaacaaaaagttcaccgacgcgctggagatcatggccgagaactacaaatttaaagagaacctgcaggcgtgcctggaagccaagcgcgccgcgagtgtcctgaaaagcctgccgttcgaggttaccagcatgaaagacatccaaggtctgccgtgcattaccgacgacgtacgtgacgtgatcgaagagatcatcgaagagggcgagagcagccgtgttaaagaaatcctcaatgacgagcgctacaaggcctttaagcagttcaccagcgtgttcggtgtgggcgtgaaaacctcggaaaagtggtaccgtatgggcctccgtacggttgaagaagcaaaggccagtaagagtctgaagctgagcaagatgcagaaggcgggcttcctgtattacgaggatctggcgagcggtgttagtaaagaagaagccgatgccgttacgctcatcgtgaaggaaacggtgcgcactgttagtccggatgcgctggtgaccatcgccggcggtttccgccgtggcaaacctatgggccacgacgttgacctgctgatcacgattccgggccgtcctgaagatgacgagctgctccacaaagtggttgatctgctcaagaagcaaggtctgctgctgtacgaagacatccgtgagagcacgttcgtggaggggcaactgccaaatcctaaacctgacgccctggacaaccatcagaagtgcttcgccattctcaagctgtaccgtccgaaggtggataacagtgcggttgggacgagtaagaaaagtgacatggctgaggttaaggattggaaagcggttcgtgtggatctggtggtcgctccagatgagcagttcgcctatgcgctgctcggttggacgggcagcggccaatttcgtcgcgatactcgtcgctatgcggaggaagagcgcgacatgctgctcgacaaccatagtctctacgacctgaaaaagggcatctttctgagtgcggacagcgaagaagagattttcggtcatctggacctggattatctggagccgtgggaacgcaacgcg

SEQ ID NO: 4740 - protein, 394 aa, synthetic construct
  REGION 1..394: note = Variant of terminal deoxynucleotidyl transferase
MHHHHHHGGSGHPEGNTPEKEVPSVIARHVSPYACQRKTTLNNYNKKFTDALEIMAENYKFKENLQACLEAKRAASVLKSLPFEVTSMKDIQGLPCITDDVRDVIEEIIEEGESSRVKEILNDERYKAFKQFTSVFGVGVKTSEKWYRMGLRTVEEAKASKSLKLSKMQKAGFLYYEDLASGVSKEEADAVTLIVKETVRTVSPDALVTIAGGFRRGKPMGHDVDLLITIPGRPEDDELLHKVVDLLKKQGLLLYEDIRESTFVEGQLPNPKPDALDNHQKCFAILKLYRPKVDNSAVGTSKKSDMAEVKDWKAVRVDLVVAPDEQFAYALLGWTGSGQFRRDTRRYAEEERDMLLDNHSLYDLKKGIFLSADSEEEIFGHLDLDYLEPWERNA

SEQ ID NO: 4741 - DNA, 1182 bp, synthetic construct
  misc_feature 1..1182: note = Variant of terminal deoxynucleotidyl transferase
  source 1..1182: mol_type = other DNA
atgcatcaccaccatcatcatgggggttctggtcatccggaaggtaataccccggagaaggaggtgccgagcgttatcgcccgtcatgttagtccatacgcgtgccagcgcaagaccacgctgaataactacaacaaaaagttcaccgacgcgctggagatcatggccgagaactacaagtttaaagagaacctgcaggcgtgcctggaagccaagcgcgccgcgagtgtcctgaaaagcctgccgttcgaggttaccagcatgaaagacatccaaggtctgccgtgcattaccgacgacgtacgtgacgtgatcgaagagatcatcgaagagggcgagagcagccgtgttaaagaaatcctcaatgacgagcgctacaaggcctttaagcagttcaccagcgtgttcggtgtgggcgtgaaaacctcggaaaagtggtaccgtatgggcctccgtacggttgaagaagcaaaggccagtaagagtctgaagctgagcaagatgcagaaggcgggcttcctgtattacgaggatctggcgagcggtgttagtaaagaagaagccgatgccgttacgctcatcgtgaaggaaacggtgcgcactgttagtccggatgcgctggtgaccatcgccggcggtttccgccgtggcaaacctatgggccacgacgttgacctgctgatcacgattccgggccgtcctacggatgacgagctgctccacaaagtggttgatctgctcaagaagcaaggtctgctgctgtacgaagacatccgtgagagcacgttcgtggaggggcaactgccaaatcctaaacctgacgccctggacaaccatcagaagtgcttcgccattctcaagctgtaccgtccgaaggtggataacagtgcggttgggacgagtaagaaaagtgacatggctgaggttaaggattggaaagcggttcgtgtggatctggtgattgcgccattcgagcagttcgcctatgcgctgctcggttggacgggcagcggccaatttcgtcgcgatactcgtcgctatgcggaggaagagcgcgacatgctgctcgacaaccatcgtctctacgacctgaaaaagggcatctttctgagtgcggacagcgaagaagagattttcggtcatctggacctggattatctggagccgtgggaacgcaacgcg

SEQ ID NO: 4742 - protein, 394 aa, synthetic construct
  REGION 1..394: note = Variant of terminal deoxynucleotidyl transferase
MHHHHHHGGSGHPEGNTPEKEVPSVIARHVSPYACQRKTTLNNYNKKFTDALEIMAENYKFKENLQACLEAKRAASVLKSLPFEVTSMKDIQGLPCITDDVRDVIEEIIEEGESSRVKEILNDERYKAFKQFTSVFGVGVKTSEKWYRMGLRTVEEAKASKSLKLSKMQKAGFLYYEDLASGVSKEEADAVTLIVKETVRTVSPDALVTIAGGFRRGKPMGHDVDLLITIPGRPTDDELLHKVVDLLKKQGLLLYEDIRESTFVEGQLPNPKPDALDNHQKCFAILKLYRPKVDNSAVGTSKKSDMAEVKDWKAVRVDLVIAPFEQFAYALLGWTGSGQFRRDTRRYAEEERDMLLDNHRLYDLKKGIFLSADSEEEIFGHLDLDYLEPWERNA

SEQ ID NO: 4743 - DNA, 1182 bp, synthetic construct
  misc_feature 1..1182: note = Variant of terminal deoxynucleotidyl transferase
  source 1..1182: mol_type = other DNA
atgcatcaccaccatcatcatgggggttctggtcatccggaaggtaataccccggagaaggaggtgccgagcgttatcgcccgtcatgttagtcagtacgcgtgccagcgcaagaccacgctgaataactacaacaaaaagttcaccgacgcgctggagatcatggccgagaactacaagtttaaagagaacctgcaggcgtgcctggaagccaagcgcgccgcgagtgtcctgaaaagcctgccgttcgaggttaccagcatgaaagacatccaaggtctgccgtgcattaccgacgacgtacgtgacgtgatcgaagagatcatcgaagagggcgagagcagccgtgttaaagaaatcctcaatgacgagcgctacaaggcctttaagcagttcaccagcgtgttcggtgtgggcgtgaaaacctcggaaaagtggtaccgtatgggcctccgtacggttgaagaagcaaaggccagtaagagtctgaagctgagcaagatgcagaaggcgggcttcctgtattacgaggatctggcgagcggtgttagtaaagaagaagccgatgccgttacgctcatcgtgaaggaaacggtgcgcactgttagtccggatgcgctggtgaccatcgccggcggtttccgccgtggcaaacctatgggccacgacgttgacctgctgatcacgattccgggccgtcctacggatgacgagctgctccacaaagtggttgatctgctcaagaagcaaggtctgctgctgtacgaagacatccgtgagagcacgttcgtggaggggcaactgccaaatcctaaacctgacgccctggacaaccattcgaagtgcttcgccattctcaagctgtaccgtccgaaggtggataacagtgcggttgggacgagtaagaaaagtgacatggctgaggttaaggattggaaagcggttcgtgtggatctggtgattgcgccattcgagcagttcgcctatgcgctgctcggttggacgggcagcggccaatttcgtcgcgatactcgtcgctatgcggaggaagagcgcgacatgctgctcgacaaccatcgtctctacgacctgaaaaagggcatctttctgagtgcggacagcgaagaagagattttcggtcatctggacctggattatctggagccgtgggaacgcaacgcg

SEQ ID NO: 4744 - protein, 394 aa, synthetic construct
  REGION 1..394: note = Variant of terminal deoxynucleotidyl transferase
MHHHHHHGGSGHPEGNTPEKEVPSVIARHVSQYACQRKTTLNNYNKKFTDALEIMAENYKFKENLQACLEAKRAASVLKSLPFEVTSMKDIQGLPCITDDVRDVIEEIIEEGESSRVKEILNDERYKAFKQFTSVFGVGVKTSEKWYRMGLRTVEEAKASKSLKLSKMQKAGFLYYEDLASGVSKEEADAVTLIVKETVRTVSPDALVTIAGGFRRGKPMGHDVDLLITIPGRPTDDELLHKVVDLLKKQGLLLYEDIRESTFVEGQLPNPKPDALDNHSKCFAILKLYRPKVDNSAVGTSKKSDMAEVKDWKAVRVDLVIAPFEQFAYALLGWTGSGQFRRDTRRYAEEERDMLLDNHRLYDLKKGIFLSADSEEEIFGHLDLDYLEPWERNA

SEQ ID NO: 4745 - DNA, 1182 bp, synthetic construct
  misc_feature 1..1182: note = Variant of terminal deoxynucleotidyl transferase
  source 1..1182: mol_type = other DNA
atgcatcaccaccatcatcatgggggttctggtcatccggaaggtaataccccggagaaggaggtgccgagcgttatcgcccgtcatgttagtcagtacgcgtgccagcgcaagaccacgctgaataactacaacaaaaagttcaccgacgcgctggagatcatggccgagaactacaaatttaaagagaacctgcaggcgtgtctggaagccaaacgcgcggcgagtgtcctgaaaagcctgccgttcgaggttaccagcatgaaagacatccaaggtctgccgtgcattaccgacgacgtacgtgacgtgatcgaagagatcatcgaagagggcgagagcagccgtgttaaagaaatcctcaatgacgagcgctacaaggcctttaagcagttcaccagcgtgttcggtgtgggcgtgaaaacctcggaaaagtggtaccgtatgggcctccgtacggttgaagaagcaaaggccagtaagagtctgaagctgagcaagatgcagaaggcgggcttcctgtattacgaggatctggcgagcggtgttagtaaagaagaagccgatgccgttacgctcatcgtgaaggaaacggtgcgtactgttagtccggatgcgctggtgaccatcgccggcggtttccgccgtggcaaacctatgggccacgacgttgacctgctgatcacgattccgggccgtcctgaagatgacgagctgctccacaaagtggttgatctgctcaagaagcaaggtctgctgctgtacgaagacatccgtgagagcacgttcgtggaggggatgctgccaagtcctaaacctgacaaactggacaaccatcagaagtgcttcgccattctcaagctgtaccgtccgaaggtggataacagtgcggttgggacgagtaagaaaagtgacatggctgaggttaaggattggaaagcggttcgtgtggatctggtgattgcgccattcgagcagttcgcctatgcgctgctcggttggacgggcagcggcatgtttcgtcgcgatacgcgtcgctttgcggaggaagagcgcgacatgctgctcgacaaccatcgtctctacgacctgaaaaagggcatctttctgagtgcggacagcgaagaagagattttcggtcatctggacctggattatctggagccgtgggaacgcaacgcg

SEQ ID NO: 4746 - protein, 394 aa, synthetic construct
  REGION 1..394: note = Variant of terminal deoxynucleotidyl transferase
MHHHHHHGGSGHPEGNTPEKEVPSVIARHVSQYACQRKTTLNNYNKKFTDALEIMAENYKFKENLQACLEAKRAASVLKSLPFEVTSMKDIQGLPCITDDVRDVIEEIIEEGESSRVKEILNDERYKAFKQFTSVFGVGVKTSEKWYRMGLRTVEEAKASKSLKLSKMQKAGFLYYEDLASGVSKEEADAVTLIVKETVRTVSPDALVTIAGGFRRGKPMGHDVDLLITIPGRPEDDELLHKVVDLLKKQGLLLYEDIRESTFVEGMLPSPKPDKLDNHQKCFAILKLYRPKVDNSAVGTSKKSDMAEVKDWKAVRVDLVIAPFEQFAYALLGWTGSGMFRRDTRRFAEEERDMLLDNHRLYDLKKGIFLSADSEEEIFGHLDLDYLEPWERNA

SEQ ID NO: 4747 - DNA, 1182 bp, synthetic construct
  misc_feature 1..1182: note = Variant of terminal deoxynucleotidyl transferase
  source 1..1182: mol_type = other DNA
atgcatcaccaccatcatcatgggggttctggtcatccggaaggtaataccccggagaaggaggtgccgagcgttatcgcccgtcatgttagtcagtacgcgtgccagcgcaagaccacgctgaataactacaacaaaaagttcaccgacgcgctggagatcatggccgagaactacaaatttaaagagaacctgcaggcgtgtctggaagccaaacgcgcggcgagtgtcctgaaaagcctgccgttcgaggttaccagcatgaaagacatccaaggtctgccgtgcattaccgacgacgtacgtgacgtgatcgaagagatcatcgaagagggcgagagcagccgtgttaaagaaatcctcaatgacgagcgctacaaggcctttaagcagttcaccagcgtgttcggtgtgggcgtgaaaacctcggaaaagtggtaccgtatgggcctccgtacggttgaagaagcaaaggccagtaagagtctgaagctgagcaagatgcagaaggcgggcttcctgtattacgaggatctggcgagcggtgttagtaaagaagaagccgatgccgttacgctcatcgtgaaggaaacggtgcgtactgttagtccggatgcgctggtgaccatcgccggcggtttccgccgtggcaaacctatgggccacgacgttgacctgctgatcacgattccgggccgtcctgaagatgacgagctgctccacaaagtggttgatctgctcaagaagcaaggtctgctgctgtacgaagacatccgtgagagcacgttcgtggaggggatgctgccaaatcctcgtcctgacaaactggacaaccatcagaagtgcttcgccattctcaagctgtaccgtccgaaggtggataacagtgcggttgggacgagtaagaaaagtgacatggctgaggttaaggattggaaagcggttcgtgtggatctggtgattgcgccattcgagcagttcgcctatgcgctgctcggttggacgggcagcggccaatttcgtcgcgatactcgtcgctatgcggaggaagagcgcgacatgctgctcgacaaccatcgtctctacgacctgaaaaagggcatctttctgagtgcggacagcgaagaagagattttcggtcatctggacctggattatctggagccgtgggaacgcaacgcg

SEQ ID NO: 4748 - protein, 394 aa, synthetic construct
  REGION 1..394: note = Variant of terminal deoxynucleotidyl transferase
MHHHHHHGGSGHPEGNTPEKEVPSVIARHVSQYACQRKTTLNNYNKKFTDALEIMAENYKFKENLQACLEAKRAASVLKSLPFEVTSMKDIQGLPCITDDVRDVIEEIIEEGESSRVKEILNDERYKAFKQFTSVFGVGVKTSEKWYRMGLRTVEEAKASKSLKLSKMQKAGFLYYEDLASGVSKEEADAVTLIVKETVRTVSPDALVTIAGGFRRGKPMGHDVDLLITIPGRPEDDELLHKVVDLLKKQGLLLYEDIRESTFVEGMLPNPRPDKLDNHQKCFAILKLYRPKVDNSAVGTSKKSDMAEVKDWKAVRVDLVIAPFEQFAYALLGWTGSGQFRRDTRRYAEEERDMLLDNHRLYDLKKGIFLSADSEEEIFGHLDLDYLEPWERNA

SEQ ID NO: 4749 - DNA, 1182 bp, synthetic construct
  misc_feature 1..1182: note = Variant of terminal deoxynucleotidyl transferase
  source 1..1182: mol_type = other DNA
atgcatcaccaccatcatcatgggggttctggtcatccggaaggtaataccccggagaaggaggtgccgagcgttatcgcccgtcatgttagtcagtacgcgtgccagcgcaagaccacgctgaataactacaacaaaaagttcaccgacgcgctggagatcatggccgagaactacaagtttaaagagaacctgcaggcgtgcctggaagccaagcgcgccgcgagtgtcctgaaaagcctgccgttcgaggttaccagcatgaaagacatccaaggtctgccgtgcattaccgacgacgtacgtgacgtgatccgcgagatcatcgaagaaggcgagagcagccgtgttaaagaaatcctcaatgacgagcgctacaaggcctttaagcagttcaccagcgtgttcggtgtgggcgtgaaaacctcggaaaagtggtaccgtatgggcctccgtacggttgaagaagcaaaggccagtaagagtctgaagctgagcaagatgcagaaggcgggcttcctgtattacgaggatctggcgagcggtgttagtaaagaagaagccgatgccgttacgctcatcgtgaaggaaacggtgcgcactgttagtccggatgcgctggtgaccatcgccggcggtttccgccgtggcaaacctatgggccacgacgttgacctgctgatcacgattccgggccgtcctgaagatgacgagctgctccacaaagtggttgatctgctcaagaagcaaggtctgctgctgtacgaagacatccgtgagagcacgttcgtggaggggcaactgccaaatcctaaacctgacgccctggacaaccatcagaagtgcttcgccattctcaagctgtaccgtccgaaggtggataacagtgcggttgggacgagtaagaaaagtgacatggctgaggttaaggattggaaagcggttcgtgtggatctggtgattgcgccattcgagcagttcgcctatgcgctgctcggttggacgggcagcggccaatttcgtcgcgatactcgtcgctatgcggaggaagagcgcgacatgctgctcgacaaccatcgtctctacgacctgaaaaagggcatctttctgagtgcggacagcgaagaagagattttcggtcatctggacctggattatctggagccgtgggaacgcaacgcg

SEQ ID NO: 4750 - protein, 394 aa, synthetic construct
  REGION 1..394: note = Variant of terminal deoxynucleotidyl transferase
MHHHHHHGGSGHPEGNTPEKEVPSVIARHVSQYACQRKTTLNNYNKKFTDALEIMAENYKFKENLQACLEAKRAASVLKSLPFEVTSMKDIQGLPCITDDVRDVIREIIEEGESSRVKEILNDERYKAFKQFTSVFGVGVKTSEKWYRMGLRTVEEAKASKSLKLSKMQKAGFLYYEDLASGVSKEEADAVTLIVKETVRTVSPDALVTIAGGFRRGKPMGHDVDLLITIPGRPEDDELLHKVVDLLKKQGLLLYEDIRESTFVEGQLPNPKPDALDNHQKCFAILKLYRPKVDNSAVGTSKKSDMAEVKDWKAVRVDLVIAPFEQFAYALLGWTGSGQFRRDTRRYAEEERDMLLDNHRLYDLKKGIFLSADSEEEIFGHLDLDYLEPWERNA

SEQ ID NO: 4751 - DNA, 1182 bp, synthetic construct
  misc_feature 1..1182: note = Variant of terminal deoxynucleotidyl transferase
  source 1..1182: mol_type = other DNA
atgcatcaccaccatcatcatgggggttctggtcatccggaaggtaataccccggagaaggaggtgccgagcgttatcgcccgtcatgttagtcagtacgcgtgccagcgcaagaccacgctgaataactacaacaaaaagttcaccgacgcgctggagatcatggccgagaactacaaatttaaagagaacctgcaggcgtgcctggaagccaagcgcgccgcgagtgtcctgaaaagcctgccgttcgaggttaccagcatgaaagacatccaaggtctgccgtgcattaccgacgacgtacgtgacgtgatcgaagagatcatcgaagagggcgagagcagccgtgttaaagaaatcctcaatgacgagcgctacaaggcctttaagcagttcaccagcgtgttcggtgtgggcgtgaaaacctcggaaaagtggtaccgtatgggcctccgtacggttgaagaagcaaaggccagtaagagtctgaagctgagcaagatgcagaaggcgggcttcctgtattacgaggatctggcgagcggtgttagtaaagaagaagccgatgccgttacgctcatcgtgaaggaaacggtgcgcactgttagtccggatgcgctggtgaccatcgccggcggtttccgccgtggcaaacctatgggccacgacgttgacctgctgatcacgattccgggccgtcctacggatgacgagctgctccacaaagtggttgatctgctcaagaagcaaggtctgctgctgtacgaagacatccgtgagagcacgttcgtggaggggcaactgccaaatcctaaacctgacgccctggacaaccatcagaagtgcttcgccattctcaagctgtaccgtccgaaggtggataacagtgcggttgggacgagtaagaaaagtgacatggctgaggttaaggattggaaagcggttcgtgtggatctggtgattgcgccattcgagcagttcgcctatgcgctgctcggttggacgggcagcggccaatttcgtcgcgatactcgtcgctatgcggaggaagagcgcgacatgctgctcgacaaccatcgtctctacgacctgaaaaagggcatctttctgagtgcggacagcgaagaagagattttcggtcatctggacctggattatctggagccgtgggaacgcaacgcg

SEQ ID NO: 4752 - protein, 394 aa, synthetic construct
  REGION 1..394: note = Variant of terminal deoxynucleotidyl transferase
MHHHHHHGGSGHPEGNTPEKEVPSVIARHVSQYACQRKTTLNNYNKKFTDALEIMAENYKFKENLQACLEAKRAASVLKSLPFEVTSMKDIQGLPCITDDVRDVIEEIIEEGESSRVKEILNDERYKAFKQFTSVFGVGVKTSEKWYRMGLRTVEEAKASKSLKLSKMQKAGFLYYEDLASGVSKEEADAVTLIVKETVRTVSPDALVTIAGGFRRGKPMGHDVDLLITIPGRPTDDELLHKVVDLLKKQGLLLYEDIRESTFVEGQLPNPKPDALDNHQKCFAILKLYRPKVDNSAVGTSKKSDMAEVKDWKAVRVDLVIAPFEQFAYALLGWTGSGQFRRDTRRYAEEERDMLLDNHRLYDLKKGIFLSADSEEEIFGHLDLDYLEPWERNA

SEQ ID NO: 4753 - DNA, 1182 bp, synthetic construct
  misc_feature 1..1182: note = Variant of terminal deoxynucleotidyl transferase
  source 1..1182: mol_type = other DNA
atgcatcaccaccatcatcatgggggttctggtcatccggaaggtaataccccggagaaggaggtgccgagcgttatcgcccgtcatgttagtcaatacgcgtgccagcgcaagaccacgctgaataactacaacaaaaagttcaccgacgcgctggagatcatggccgagaactaccgttttaaagagaacctgcaggcgtgcctggaagccaagcgcgccgcgagtgtcctgaaaagcctgccgttcgaggttaccagcatgaaagacatccaaggtctgccgtgcattaccgacgacgtacgtgacgtgatccgcgagatcatcgaagtaggcgagagcagccgtgttaaagaaatcctcaatgacgagcgctacaaggcctttaagcagttcaccagcgtgttcggtgtgggcgtgaaaacctcggaaaagtggtaccgtatgggcctccgtacggttgaagaagcaaaggccagtaagagtctgaagctgagcaagatgcagaaggcgggcttcctgtattacgaggatctggcgagcggtgttagtaaagaagaagccgatgccgttacgctcatcgtgaaggaaacggtgcgcactgttagtccggatgcgctggtgaccatcgccggcggtttccgccgtggcaaacctatgggccacgacgttgacctgctgatcacgattccgggccgtcctacggatgacgagctgctccacaaagtggttgatctgctcaagaagcaaggtctgctgctgtacgaagacatccgtgagagcacgttcgtggaggggcaactgccaaatcctaaacctgacgccctggacaaccatcagaagtgcttcgccattctcaagctgtaccgtccgaaggtggataacagtgcggttgggacgagtaagaaaagtgacatggctgaggttaaggattggaaagcggttcgtgtggatctggtgattgcgccattcgagcagttcgcctatgcgctgctcggttggacgggcagcggccaatttcgtcgcgatactcgtcgctatgcggaggaagagcgcgacatgctgctcgacaaccatagtctctacgacctgaaaaagggcatctttctgagtgcggacagcgaagaagagattttcggtcatctggatctggattatctggagccgtgggaacgcaacgcg

SEQ ID NO: 4754 - protein, 394 aa, synthetic construct
  REGION 1..394: note = Variant of terminal deoxynucleotidyl transferase
MHHHHHHGGSGHPEGNTPEKEVPSVIARHVSQYACQRKTTLNNYNKKFTDALEIMAENYRFKENLQACLEAKRAASVLKSLPFEVTSMKDIQGLPCITDDVRDVIREIIEVGESSRVKEILNDERYKAFKQFTSVFGVGVKTSEKWYRMGLRTVEEAKASKSLKLSKMQKAGFLYYEDLASGVSKEEADAVTLIVKETVRTVSPDALVTIAGGFRRGKPMGHDVDLLITIPGRPTDDELLHKVVDLLKKQGLLLYEDIRESTFVEGQLPNPKPDALDNHQKCFAILKLYRPKVDNSAVGTSKKSDMAEVKDWKAVRVDLVIAPFEQFAYALLGWTGSGQFRRDTRRYAEEERDMLLDNHSLYDLKKGIFLSADSEEEIFGHLDLDYLEPWERNA

SEQ ID NO: 4755 - DNA, 1182 bp, synthetic construct
  misc_feature 1..1182: note = Variant of terminal deoxynucleotidyl transferase
  source 1..1182: mol_type = other DNA
atgcatcaccaccatcatcatgggggttctggtcatccggaaggtaataccccggagaaggaggtgccgagcgttatcgcccgtcatgttagtcaatacgcgtgccagcgcaagaccacgctgaataactacaacaaaaagttcaccgacgcgctggagatcatggccgagaactacaagtttaaagagaacctgcaggcgtgcctggaagccaagcgcgccgcgagtgtcctgaaaagcctgccgttcgaggttaccagcatgaaagacatccaaggtctgccgtgcattaccgacgacgtacgtgacgtgatccgcgagatcatcgaagaaggcgagagcagccgtgttaaagaaatcctcaatgacgagcgctacaaggcctttaagcagttcaccagcgtgttcggtgtgggcgtgaaaacctcggaaaagtggtaccgtatgggcctccgtacggttgaagaagcaaaggccagtaagagtctgaagctgagcaagatgcagaaggcgggcttcctgtattacgaggatctggcgagcggtgttagtaaagaagaagccgatgccgttacgctcatcgtgaaggaaacggtgcgcactgttagtccggatgcgctggtgaccatcgccggcggtttccgccgtggcaaacctatgggccacgacgttgacctgctgatcacgattccgggccgtcctacggatgacgagctgctccacaaagtggttgatctgctcaagaagcaaggtctgctgctgtacgaagacatccgtgagagcacgttcgtggaggggcaactgccaaatcctaaacctgacgccctggacaaccatcagaagtgcttcgccattctcaagctgtaccgtccgaaggtggataacagtgcggttgggacgagtaagaaaagtgacatggctgaggttaaggattggaaagcggttcgtgtggatctggtgattgcgccattcgagcagttcgcctatgcgctgctcggttggacgggcagcggccaatttcgtcgcgatactcgtcgctatgcggaggaagagcgcgacatgctgctcgacaaccatcgtctctacgacctgaaaaagggcatctttctgagtgcggacagcgaagaagagattttcggtcatctggacctggattatctggagccgtgggaacgcaacgcg

SEQ ID NO: 4756 - protein, 394 aa, synthetic construct
  REGION 1..394: note = Variant of terminal deoxynucleotidyl transferase
MHHHHHHGGSGHPEGNTPEKEVPSVIARHVSQYACQRKTTLNNYNKKFTDALEIMAENYKFKENLQACLEAKRAASVLKSLPFEVTSMKDIQGLPCITDDVRDVIREIIEEGESSRVKEILNDERYKAFKQFTSVFGVGVKTSEKWYRMGLRTVEEAKASKSLKLSKMQKAGFLYYEDLASGVSKEEADAVTLIVKETVRTVSPDALVTIAGGFRRGKPMGHDVDLLITIPGRPTDDELLHKVVDLLKKQGLLLYEDIRESTFVEGQLPNPKPDALDNHQKCFAILKLYRPKVDNSAVGTSKKSDMAEVKDWKAVRVDLVIAPFEQFAYALLGWTGSGQFRRDTRRYAEEERDMLLDNHRLYDLKKGIFLSADSEEEIFGHLDLDYLEPWERNA

SEQ ID NO: 4757 - DNA, 1182 bp, synthetic construct
  misc_feature 1..1182: note = Variant of terminal deoxynucleotidyl transferase
  source 1..1182: mol_type = other DNA
atgcatcaccaccatcatcatgggggttctggtcatccggaaggtaataccccggagaaggaggtgccgagcgttatcgcccgtcatgttagtcaatacgcgtgccagcgcaagaccacgctgaataactacaacaaaaagttcaccgacgcgctggagatcatggccgagaactacaaatttaaagagaacctgcaggcgtgcctggaagccaagcgcgccgcgagtgtcctgaaaagcctgccgttcgaggttaccagcatgaaagacatccaaggtctgccgtgcattaccgacgacgtacgtcctgtgatcgaagagatcatcgaagtaggcgagagcagccgtgttaaagaaatcctcaatgacgagcgctacaaggcctttaagcagttcaccagcgtgttcggtgtgggcgtgaaaacctcggaaaagtggtaccgtatgggcctccgtacggttgaagaagcaaaggccagtaagagtctgaagctgagcaagatgcagaaggcgggcttcctgtattacgaggatctggcgagcggtgttagtaaagaagaagccgatgccgttacgctcatcgtgaaggaaacggtgcgcactgttagtccggatgcgctggtgaccatcgccggcggtttccgccgtggcaaacctatgggccacgacgttgacctgctgatcacgattccgggccgtcctacggatgacgagctgctccacaaagtggttgatctgctcaagaagcaaggtctgctgctgtacgaagacatccgtgagagcacgttcgtggaggggcaactgccaaatcctaaacctgacgccctggacaaccattcgaagtgcttcgccattctcaagctgtaccgtccgaaggtggataacagtgcggttgggacgagtaagaaaagtgacatggctgaggttaaggattggaaagcggttcgtgtggatctggtgattgcgccattcgagcagttcgcctatgcgctgctcggttggacgggcagcggccaatttcgtcgcgatactcgtcgctatgcggaggaagagcgcgacatgctgctcgacaaccatagtctctacgacctgaaaaagggcatctttctgagtgcggacagcgaagaagagattttcggtcatctggacctggattatctggagccgtgggaacgcaacgcg

SEQ ID NO: 4758 - protein, 394 aa, synthetic construct
  REGION 1..394: note = Variant of terminal deoxynucleotidyl transferase
MHHHHHHGGSGHPEGNTPEKEVPSVIARHVSQYACQRKTTLNNYNKKFTDALEIMAENYKFKENLQACLEAKRAASVLKSLPFEVTSMKDIQGLPCITDDVRPVIEEIIEVGESSRVKEILNDERYKAFKQFTSVFGVGVKTSEKWYRMGLRTVEEAKASKSLKLSKMQKAGFLYYEDLASGVSKEEADAVTLIVKETVRTVSPDALVTIAGGFRRGKPMGHDVDLLITIPGRPTDDELLHKVVDLLKKQGLLLYEDIRESTFVEGQLPNPKPDALDNHSKCFAILKLYRPKVDNSAVGTSKKSDMAEVKDWKAVRVDLVIAPFEQFAYALLGWTGSGQFRRDTRRYAEEERDMLLDNHSLYDLKKGIFLSADSEEEIFGHLDLDYLEPWERNA

SEQ ID NO: 4759 - DNA, 1182 bp, synthetic construct
  misc_feature 1..1182: note = Variant of terminal deoxynucleotidyl transferase
  source 1..1182: mol_type = other DNA
atgcatcaccaccatcatcatgggggttctggtcatccggaaggtaataccccggagaaggaggtgccgagcgttatcgcccgtcatgttagtcaatacgcgtgccagcgcaagaccacgctgaataactacaacaaaaagttcaccgacgcgctggagatcatggccgagaactacaagtttaaagagaacctgcaggcgtgcctggaagccaagcgcgccgcgagtgtcctgaaaagcctgccgttcgaggttaccagcatgaaagacatccaaggtctgccgtgcattaccgacgacgtacgtgacgtgatcgaagagatcatcgaagagggcgagagcagccgtgttaaagaaatcctcaatgacgagcgctacaaggcctttaagcagttcaccagcgtgttcggtgtgggcgtgaaaacctcggaaaagtggtaccgtatgggcctccgtacggttgaagaagcaaaggccagtaagagtctgaagctgagcaagatgcagaaggcgggcttcctgtattacgaggatctggcgagcggtgttagtaaagaagaagccgatgccgttacgctcatcgtgaaggaaacggtgcgcactgttagtccggatgcgctggtgaccatcgccggcggtttccgccgtggcaaacctatgggccacgacgttgacctgctgatcacgattccgggccgtcctacggatgacgagctgctccacaaagtggttgatctgctcaagaagcaaggtctgctgctgtacgaagacatccgtgagagcacgttcgtggaggggcaactgccaaatcctaaacctgacgccctggacaaccattcgaagtgcttcgccattctcaagctgtaccgtccgaaggtggataacagtgcggttgggacgagtaagaaaagtgacatggctgaggttaaggattggaaagcggttcgtgtggatctggtggtcactccagatgagcagttcgcctatgcgctgctcggttggacgggcagcggccaatttcgtcgcgatactcgtcgctatgcggaggaagagcgcgacatgctgctcgacaaccatcgtctctacgacctgaaaaagggcatctttctgagtgcggacagcgaagaagagattttcggtcatctggacctggattatctggagccgtgggaacgcaacgcg

SEQ ID NO: 4760 - protein, 394 aa, synthetic construct
  REGION 1..394: note = Variant of terminal deoxynucleotidyl transferase
MHHHHHHGGSGHPEGNTPEKEVPSVIARHVSQYACQRKTTLNNYNKKFTDALEIMAENYKFKENLQACLEAKRAASVLKSLPFEVTSMKDIQGLPCITDDVRDVIEEIIEEGESSRVKEILNDERYKAFKQFTSVFGVGVKTSEKWYRMGLRTVEEAKASKSLKLSKMQKAGFLYYEDLASGVSKEEADAVTLIVKETVRTVSPDALVTIAGGFRRGKPMGHDVDLLITIPGRPTDDELLHKVVDLLKKQGLLLYEDIRESTFVEGQLPNPKPDALDNHSKCFAILKLYRPKVDNSAVGTSKKSDMAEVKDWKAVRVDLVVTPDEQFAYALLGWTGSGQFRRDTRRYAEEERDMLLDNHRLYDLKKGIFLSADSEEEIFGHLDLDYLEPWERNA

SEQ ID NO: 4761 - DNA, 1182 bp, synthetic construct
  misc_feature 1..1182: note = Variant of terminal deoxynucleotidyl transferase
  source 1..1182: mol_type = other DNA
atgcatcaccaccatcatcatgggggttctggtcatccggaaggtaataccccggagaaggaggtgccgagcgttatcgcccgtcatgttagtcaatacgcgtgccagcgcaagaccacgctgaataactacaacaaaaagttcaccgacgcgctggagatcatggccgagaactacaaatttaaagagaacctgcaggcgtgcctggaagccaagcgcgccgcgagtgtcctgaaaagcctgccgttcgaggttaccagcatgaaagacatccaaggtctgccgtgcattaccgacgacgtacgtgacgtgatcgaagagatcatcgaagagggcgagagcagccgtgttaaagaaatcctcaatgacgagcgctacaaggcctttaagcagttcaccagcgtgttcggtgtgggcgtgaaaacctcggaaaagtggtaccgtatgggcctccgtacggttgaagaagcaaaggccagtaagagtctgaagctgagcaagatgcagaaggcgggcttcctgtattacgaggatctggcgagcggtgttagtaaagaagaagccgatgccgttacgctcatcgtgaaggaaacggtgcgcactgttagtccggatgcgctggtgaccatcgccggcggtttccgccgtggcaaacctatgggccacgacgttgacctgctgatcacgattccgggccgtcctgaagatgacgagctgctccacaaagtggttgatctgctcaagaagcaaggtctgctgctgtacgaagacatccgtgagagcacgttcgtggaggggcaactgccaaatcctaaacctgacgccctggacaaccattcgaagtgcttcgccattctcaagctgtaccgtccgaaggtggataacagtgcggttgggacgagtaagaaaagtgacatggctgaggttaaggattggaaagcggttcgtgtggatctggtgatcgctccatttgagcagttcgcctatgcgctgctcggttggacgggcagcggccaatttcgtcgcgatactcgtcgctatgcggaggaagagcgcgacatgctgctcgacaaccatcgtctctacgacctgaaaaagggcatctttctgagtgcggacagcgaagaagagattttcggtcatctggagctggattatctggagccgtgggaacgcaacgcg

SEQ ID NO: 4762 - protein, 394 aa, synthetic construct
  REGION 1..394: note = Variant of terminal deoxynucleotidyl transferase
MHHHHHHGGSGHPEGNTPEKEVPSVIARHVSQYACQRKTTLNNYNKKFTDALEIMAENYKFKENLQACLEAKRAASVLKSLPFEVTSMKDIQGLPCITDDVRDVIEEIIEEGESSRVKEILNDERYKAFKQFTSVFGVGVKTSEKWYRMGLRTVEEAKASKSLKLSKMQKAGFLYYEDLASGVSKEEADAVTLIVKETVRTVSPDALVTIAGGFRRGKPMGHDVDLLITIPGRPEDDELLHKVVDLLKKQGLLLYEDIRESTFVEGQLPNPKPDALDNHSKCFAILKLYRPKVDNSAVGTSKKSDMAEVKDWKAVRVDLVIAPFEQFAYALLGWTGSGQFRRDTRRYAEEERDMLLDNHRLYDLKKGIFLSADSEEEIFGHLELDYLEPWERNA

SEQ ID NO: 4763 - DNA, 1182 bp, synthetic construct
  misc_feature 1..1182: note = Variant of terminal deoxynucleotidyl transferase
  source 1..1182: mol_type = other DNA
atgcatcaccaccatcatcatgggggttctggtcatccggaaggtaataccccggagaaggaggtgccgagcgttatcgcccgtcatgttagtccatacgcgtgccagcgcaagaccacgctgaataactacaacaaaaagttcaccgacgcgctggagatcatggccgagaactacaagtttaaagagaacctgcaggcgtgcctggaagccaagcgcgccgcgagtgtcctgaaaagcctgccgttcgaggttaccagcatgaaagacatccaaggtctgccgtgcattaccgacgacgtacgtcctgtgatccgcgagatcatcgaagtaggcgagagcagccgtgttaaagaaatcctcaatgacgagcgctacaaggcctttaagcagttcaccagcgtgttcggtgtgggcgtgaaaacctcggaaaagtggtaccgtatgggcctccgtacggttgaagaagcaaaggccagtaagagtctgaagctgagcaagatgcagaaggcgggcttcctgtattacgaggatctggcgagcggtgttagtaaagaagaagccgatgccgttacgctcatcgtgaaggaaacggtgcgcactgttagtccggatgcgctggtgaccatcgccggcggtttccgccgtggcaaacctatgggccacgacgttgacctgctgatcacgattccgggccgtcctgaagatgacgagctgctccacaaagtggttgatctgctcaagaagcaaggtctgctgctgtacgaagacatccgtgagagcacgttcgtggaggggcaactgccaaatcctaaacctgacgccctggacaaccatcagaagtgcttcgccattctcaagctgtaccgtccgaaggtggataacagtgcggttgggacgagtaagaaaagtgacatggctgaggttaaggattggaaagcggttcgtgtggatctggtgatcactccagaagagcagttcgcctatgcgctgctcggttggacgggcagcggccaatttcgtcgcgatactcgtcgctatgcggaggaagagcgcgacatgctgctcgacaaccatcgtctctacgacctgaaaaagggcatctttctgagtgcggacagcgaagaagagattttcggtcatctggatctggattatctggagccgtgggaacgcaacgcg

SEQ ID NO: 4764 - protein, 394 aa, synthetic construct
  REGION 1..394: note = Variant of terminal deoxynucleotidyl transferase
MHHHHHHGGSGHPEGNTPEKEVPSVIARHVSPYACQRKTTLNNYNKKFTDALEIMAENYKFKENLQACLEAKRAASVLKSLPFEVTSMKDIQGLPCITDDVRPVIREIIEVGESSRVKEILNDERYKAFKQFTSVFGVGVKTSEKWYRMGLRTVEEAKASKSLKLSKMQKAGFLYYEDLASGVSKEEADAVTLIVKETVRTVSPDALVTIAGGFRRGKPMGHDVDLLITIPGRPEDDELLHKVVDLLKKQGLLLYEDIRESTFVEGQLPNPKPDALDNHQKCFAILKLYRPKVDNSAVGTSKKSDMAEVKDWKAVRVDLVITPEEQFAYALLGWTGSGQFRRDTRRYAEEERDMLLDNHRLYDLKKGIFLSADSEEEIFGHLDLDYLEPWERNA

SEQ ID NO: 4765 - DNA, 1182 bp, synthetic construct
  misc_feature 1..1182: note = Variant of terminal deoxynucleotidyl transferase
  source 1..1182: mol_type = other DNA
atgcatcaccaccatcatcatgggggttctggtcatccggaaggtaataccccggagaaggaggtgccgagcgttatcgcccgtcatgttagtcagtacgcgtgccagcgcaagaccacgctgaataactacaacaaaaagttcaccgacgcgctggagatcatggccgagaactacaaatttaaagagaacctgcaggcgtgtctggaagccaaacgcgcggcgagtgtcctgaaaagcctgccgttcgaggttaccagcatgaaagacatccaaggtctgccgtgcattaccgacgacgtacgtgacgtgatcgaagagatcatcgaagagggcgagagcagccgtgttaaagaaatcctcaatgacgagcgctacaaggcctttaagcagttcaccagcgtgttcggtgtgggcgtgaaaacctcggaaaagtggtaccgtatgggcctccgtacggttgaagaagcaaaggccagtaagagtctgaagctgagcaagatgcagaaggcgggcttcctgtattacgaggatctggcgagcggtgttagtaaagaagaagccgatgccgttacgctcatcgtgaaggaaacggtggcaactgttagtccggatgcgctggtgaccatcgccggcggtttccgccgtggcaaacctatgggccacgacgttgacctgctgatcacgattccgggccgtcctgaagatgacgagctgctccacaaagtggttgatctgctcaagaagcaaggtctgctgctgtacgaagacatccgtgagagcacgttcgtggaggggcagctgccaagtcctaaacctgacaaactggacaaccatcagaagtgcttcgccattctcaagctgtaccgtccgaaggtggataacagtgcggttgggacgagtaagaaaagtgacatggctgaggttaaggattggaaagcggttcgtgtggatctggtgattgcgccattcgagcagttcgcctatgcgctgctcggttggacgggcagcggcatgtttcgtcgcgatacgcgtcgctatgcggaggaagagcgcgacatgctgctcgacaaccatcgtctctacgacctgaaaaagggcatctttctgagtgcggacagcgaagaagagattttcggtcatctggacctggattatctggagccgtgggaacgcaacgcg

SEQ ID NO: 4766 - protein, 394 aa, synthetic construct
  REGION 1..394: note = Variant of terminal deoxynucleotidyl transferase
MHHHHHHGGSGHPEGNTPEKEVPSVIARHVSQYACQRKTTLNNYNKKFTDALEIMAENYKFKENLQACLEAKRAASVLKSLPFEVTSMKDIQGLPCITDDVRDVIEEIIEEGESSRVKEILNDERYKAFKQFTSVFGVGVKTSEKWYRMGLRTVEEAKASKSLKLSKMQKAGFLYYEDLASGVSKEEADAVTLIVKETVATVSPDALVTIAGGFRRGKPMGHDVDLLITIPGRPEDDELLHKVVDLLKKQGLLLYEDIRESTFVEGQLPSPKPDKLDNHQKCFAILKLYRPKVDNSAVGTSKKSDMAEVKDWKAVRVDLVIAPFEQFAYALLGWTGSGMFRRDTRRYAEEERDMLLDNHRLYDLKKGIFLSADSEEEIFGHLDLDYLEPWERNA

SEQ ID NO: 4767 - DNA, 1182 bp, synthetic construct
  misc_feature 1..1182: note = Variant of terminal deoxynucleotidyl transferase
  source 1..1182: mol_type = other DNA
atgcatcaccaccatcatcatgggggttctggtcatccggaaggtaataccccggagaaggaggtgccgagcgttatcgcccgtcatgttagtcagtacgcgtgccagcgcaagaccacgctgaataactacaacaaaaagttcaccgacgcgctggagatcatggccgagaactacaaatttaaagagaacctgcaggcgtgcctggaagccaagcgcgccgcgagtgtcctgaaaagcctgccgttcgaggttaccagcatgaaagacatccaaggtctgccgtgcattaccgacgacgtacgtgacgtgatccgcgagatcatcgaagaaggcgagagcagccgtgttaaagaaatcctcaatgacgagcgctacaaggcctttaagcagttcaccagcgtgttcggtgtgggcgtgaaaacctcggaaaagtggtaccgtatgggcctccgtacggttgaagaagcaaaggccagtaagagtctgaagctgagcaagatgcagaaggcgggcttcctgtattacgaggatctggcgagcggtgttagtaaagaagaagccgatgccgttacgctcatcgtgaaggaaacggtgcgcactgttagtccggatgcgctggtgaccatcgccggcggtttccgccgtggcaaacctatgggccacgacgttgacctgctgatcacgattccgggccgtcctgaagatgacgagctgctccacaaagtggttgatctgctcaagaagcaaggtctgctgctgtacgaagacatccgtgagagcacgttcgtggaggggcaactgccaaatcctaaacctgacgccctggacaaccatcagaagtgcttcgccattctcaagctgtaccgtccgaaggtggataacagtgcggttgggacgagtaagaaaagtgacatggctgaggttaaggattggaaagcggttcgtgtggatctggtgatcgctccagatgagcagttcgcctatgcgctgctcggttggacgggcagcggccaatttcgtcgcgatactcgtcgctatgcggaggaagagcgcgacatgctgctcgacaaccatcgtctctacgacctgaaaaagggcatctttctgagtgcggacagcgaagaagagattttcggtcatctggatctggattatctggagccgtgggaacgcaacgcg

SEQ ID NO: 4768 - protein, 394 aa, synthetic construct
  REGION 1..394: note = Variant of terminal deoxynucleotidyl transferase
MHHHHHHGGSGHPEGNTPEKEVPSVIARHVSQYACQRKTTLNNYNKKFTDALEIMAENYKFKENLQACLEAKRAASVLKSLPFEVTSMKDIQGLPCITDDVRDVIREIIEEGESSRVKEILNDERYKAFKQFTSVFGVGVKTSEKWYRMGLRTVEEAKASKSLKLSKMQKAGFLYYEDLASGVSKEEADAVTLIVKETVRTVSPDALVTIAGGFRRGKPMGHDVDLLITIPGRPEDDELLHKVVDLLKKQGLLLYEDIRESTFVEGQLPNPKPDALDNHQKCFAILKLYRPKVDNSAVGTSKKSDMAEVKDWKAVRVDLVIAPDEQFAYALLGWTGSGQFRRDTRRYAEEERDMLLDNHRLYDLKKGIFLSADSEEEIFGHLDLDYLEPWERNA

SEQ ID NO: 4769 - DNA, 1182 bp, synthetic construct
  misc_feature 1..1182: note = Variant of terminal deoxynucleotidyl transferase
  source 1..1182: mol_type = other DNA
atgcatcaccaccatcatcatgggggttctggtcatccggaaggtaataccccggagaaggaggtgccgagcgttatcgcccgtcatgttagtcaatacgcgtgccagcgcaagaccacgctgaataactacaacaaaaagttcaccgacgcgctggagatcatggccgagaactacaagtttaaagagaacctgcaggcgtgcctggaagccaagcgcgccgcgagtgtcctgaaaagcctgccgttcgaggttaccagcatgaaagacatccaaggtctgccgtgcattaccgacgacgtacgtgacgtgatcgaagagatcatcgaagtaggcgagagcagccgtgttaaagaaatcctcaatgacgagcgctacaaggcctttaagcagttcaccagcgtgttcggtgtgggcgtgaaaacctcggaaaagtggtaccgtatgggcctccgtacggttgaagaagcaaaggccagtaagagtctgaagctgagcaagatgcagaaggcgggcttcctgtattacgaggatctggcgagcggtgttagtaaagaagaagccgatgccgttacgctcatcgtgaaggaaacggtgcgcactgttagtccggatgcgctggtgaccatcgccggcggtttccgccgtggcaaacctatgggccacgacgttgacctgctgatcacgattccgggccgtcctacggatgacgagctgctccacaaagtggttgatctgctcaagaagcaaggtctgctgctgtacgaagacatccgtgagagcacgttcgtggaggggcaactgccaaatcctaaacctgacgccctggacaaccattcgaagtgcttcgccattctcaagctgtaccgtccgaaggtggataacagtgcggttgggacgagtaagaaaagtgacatggctgaggttaaggattggaaagcggttcgtgtggatctggtgattgcgccattcgagcagttcgcctatgcgctgctcggttggacgggcagcggccaatttcgtcgcgatactcgtcgctatgcggaggaagagcgcgacatgctgctcgacaaccatcgtctctacgacctgaaaaagggcatctttctgagtgcggacagcgaagaagagattttcggtcatctggacctggattatctggagccgtgggaacgcaacgcg

SEQ ID NO: 4770 - protein, 394 aa, synthetic construct
  REGION 1..394: note = Variant of terminal deoxynucleotidyl transferase
MHHHHHHGGSGHPEGNTPEKEVPSVIARHVSQYACQRKTTLNNYNKKFTDALEIMAENYKFKENLQACLEAKRAASVLKSLPFEVTSMKDIQGLPCITDDVRDVIEEIIEVGESSRVKEILNDERYKAFKQFTSVFGVGVKTSEKWYRMGLRTVEEAKASKSLKLSKMQKAGFLYYEDLASGVSKEEADAVTLIVKETVRTVSPDALVTIAGGFRRGKPMGHDVDLLITIPGRPTDDELLHKVVDLLKKQGLLLYEDIRESTFVEGQLPNPKPDALDNHSKCFAILKLYRPKVDNSAVGTSKKSDMAEVKDWKAVRVDLVIAPFEQFAYALLGWTGSGQFRRDTRRYAEEERDMLLDNHRLYDLKKGIFLSADSEEEIFGHLDLDYLEPWERNA

SEQ ID NO: 4771 - DNA, 1182 bp, synthetic construct
  misc_feature 1..1182: note = Variant of terminal deoxynucleotidyl transferase
  source 1..1182: mol_type = other DNA
atgcatcaccaccatcatcatgggggttctggtcatccggaaggtaataccccggagaaggaggtgccgagcgttatcgcccgtcatgttagtcaatacgcgtgccagcgcaagaccacgctgaataactacaacaaaaagttcaccgacgcgctggagatcatggccgagaactacaaatttaaagagaacctgcaggcgtgcctggaagccaagcgcgccgcgagtgtcctgaaaagcctgccgttcgaggttaccagcatgaaagacatccaaggtctgccgtgcattaccgacgacgtacgtgacgtgatcgaagagatcatcgaagtaggcgagagcagccgtgttaaagaaatcctcaatgacgagcgctacaaggcctttaagcagttcaccagcgtgttcggtgtgggcgtgaaaacctcggaaaagtggtaccgtatgggcctccgtacggttgaagaagcaaaggccagtaagagtctgaagctgagcaagatgcagaaggcgggcttcctgtattacgaggatctggcgagcggtgttagtaaagaagaagccgatgccgttacgctcatcgtgaaggaaacggtgcgcactgttagtccggatgcgctggtgaccatcgccggcggtttccgccgtggcaaacctatgggccacgacgttgacctgctgatcacgattccgggccgtcctgaagatgacgagctgctccacaaagtggttgatctgctcaagaagcaaggtctgctgctgtacgaagacatccgtgagagcacgttcgtggaggggcaactgccaaatcctaaacctgacgccctggacaaccatcagaagtgcttcgccattctcaagctgtaccgtccgaaggtggataacagtgcggttgggacgagtaagaaaagtgacatggctgaggttaaggattggaaagcggttcgtgtggatctggtgatcactccatttgagcagttcgcctatgcgctgctcggttggacgggcagcggccaatttcgtcgcgatactcgtcgctatgcggaggaagagcgcgacatgctgctcgacaaccatagtctctacgacctgaaaaagggcatctttctgagtgcggacagcgaagaagagattttcggtcatctggacctggattatctggagccgtgggaacgcaacgcg

SEQ ID NO: 4772 - protein, 394 aa, synthetic construct
  REGION 1..394: note = Variant of terminal deoxynucleotidyl transferase
MHHHHHHGGSGHPEGNTPEKEVPSVIARHVSQYACQRKTTLNNYNKKFTDALEIMAENYKFKENLQACLEAKRAASVLKSLPFEVTSMKDIQGLPCITDDVRDVIEEIIEVGESSRVKEILNDERYKAFKQFTSVFGVGVKTSEKWYRMGLRTVEEAKASKSLKLSKMQKAGFLYYEDLASGVSKEEADAVTLIVKETVRTVSPDALVTIAGGFRRGKPMGHDVDLLITIPGRPEDDELLHKVVDLLKKQGLLLYEDIRESTFVEGQLPNPKPDALDNHQKCFAILKLYRPKVDNSAVGTSKKSDMAEVKDWKAVRVDLVITPFEQFAYALLGWTGSGQFRRDTRRYAEEERDMLLDNHSLYDLKKGIFLSADSEEEIFGHLDLDYLEPWERNA

SEQ ID NO: 4773 - DNA, 1182 bp, synthetic construct
  misc_feature 1..1182: note = Variant of terminal deoxynucleotidyl transferase
  source 1..1182: mol_type = other DNA
atgcatcaccaccatcatcatgggggttctggtcatccggaaggtaataccccggagaaggaggtgccgagcgttatcgcccgtcatgttagtcaatacgcgtgccagcgcaagaccacgctgaataactacaacaaaaagttcaccgacgcgctggagatcatggccgagaactacaaatttaaagagaacctgcaggcgtgcctggaagccaagcgcgccgcgagtgtcctgaaaagcctgccgttcgaggttaccagcatgaaagacatccaaggtctgccgtgcattaccgacgacgtacgtgacgtgatccgcgagatcatcgaagaaggcgagagcagccgtgttaaagaaatcctcaatgacgagcgctacaaggcctttaagcagttcaccagcgtgttcggtgtgggcgtgaaaacctcggaaaagtggtaccgtatgggcctccgtacggttgaagaagcaaaggccagtaagagtctgaagctgagcaagatgcagaaggcgggcttcctgtattacgaggatctggcgagcggtgttagtaaagaagaagccgatgccgttacgctcatcgtgaaggaaacggtgcgcactgttagtccggatgcgctggtgaccatcgccggcggtttccgccgtggcaaacctatgggccacgacgttgacctgctgatcacgattccgggccgtcctacggatgacgagctgctccacaaagtggttgatctgctcaagaagcaaggtctgctgctgtacgaagacatccgtgagagcacgttcgtggaggggcaactgccaaatcctaaacctgacgccctggacaaccatcagaagtgcttcgccattctcaagctgtaccgtccgaaggtggataacagtgcggttgggacgagtaagaaaagtgacatggctgaggttaaggattggaaagcggttcgtgtggatctggtgattgcgccattcgagcagttcgcctatgcgctgctcggttggacgggcagcggccaatttcgtcgcgatactcgtcgctatgcggaggaagagcgcgacatgctgctcgacaaccatcgtctctacgacctgaaaaagggcatctttctgagtgcggacagcgaagaagagattttcggtcatctggagctggattggctggagccgtgggaacgcaacgcg

SEQ ID NO: 4774 - protein, 394 aa, synthetic construct
  REGION 1..394: note = Variant of terminal deoxynucleotidyl transferase
MHHHHHHGGSGHPEGNTPEKEVPSVIARHVSQYACQRKTTLNNYNKKFTDALEIMAENYKFKENLQACLEAKRAASVLKSLPFEVTSMKDIQGLPCITDDVRDVIREIIEEGESSRVKEILNDERYKAFKQFTSVFGVGVKTSEKWYRMGLRTVEEAKASKSLKLSKMQKAGFLYYEDLASGVSKEEADAVTLIVKETVRTVSPDALVTIAGGFRRGKPMGHDVDLLITIPGRPTDDELLHKVVDLLKKQGLLLYEDIRESTFVEGQLPNPKPDALDNHQKCFAILKLYRPKVDNSAVGTSKKSDMAEVKDWKAVRVDLVIAPFEQFAYALLGWTGSGQFRRDTRRYAEEERDMLLDNHRLYDLKKGIFLSADSEEEIFGHLELDWLEPWERNA

SEQ ID NO: 4775 - DNA, 1182 bp, synthetic construct
  misc_feature 1..1182: note = Variant of terminal deoxynucleotidyl transferase
  source 1..1182: mol_type = other DNA
atgcatcaccaccatcatcatgggggttctggtcatccggaaggtaataccccggagaaggaggtgccgagcgttatcgcccgtcatgttagtcaatacgcgtgccagcgcaagaccacgctgaataactacaacaaaaagttcaccgacgcgctggagatcatggccgagaactacaaatttaaagagaacctgcaggcgtgcctggaagccaagcgcgccgcgagtgtcctgaaaagcctgccgttcgaggttaccagcatgaaagacatccaaggtctgccgtgcattaccgacgacgtacgtcctgtgatccgcgagatcatcgaagaaggcgagagcagccgtgttaaagaaatcctcaatgacgagcgctacaaggcctttaagcagttcaccagcgtgttcggtgtgggcgtgaaaacctcggaaaagtggtaccgtatgggcctccgtacggttgaagaagcaaaggccagtaagagtctgaagctgagcaagatgcagaaggcgggcttcctgtattacgaggatctggcgagcggtgttagtaaagaagaagccgatgccgttacgctcatcgtgaaggaaacggtgcgcactgttagtccggatgcgctggtgaccatcgccggcggtttccgccgtggcaaacctatgggccacgacgttgacctgctgatcacgattccgggccgtcctgaagatgacgagctgctccacaaagtggttgatctgctcaagaagcaaggtctgctgctgtacgaagacatccgtgagagcacgttcgtggaggggcaactgccaaatcctaaacctgacgccctggacaaccatcagaagtgcttcgccattctcaagctgtaccgtccgaaggtggataacagtgcggttgggacgagtaagaaaagtgacatggctgaggttaaggattggaaagcggttcgtgtggatctggtgattgcgccattcgagcagttcgcctatgcgctgctcggttggacgggcagcggccaatttcgtcgcgatactcgtcgctatgcggaggaagagcgcgacatgctgctcgacaaccatagtctctacgacctgaaaaagggcatctttctgagtgcggacagcgaagaagagattttcggtcatctggacctggattatctggagccgtgggaacgcaacgcg

SEQ ID NO: 4776 - protein, 394 aa, synthetic construct
  REGION 1..394: note = Variant of terminal deoxynucleotidyl transferase
MHHHHHHGGSGHPEGNTPEKEVPSVIARHVSQYACQRKTTLNNYNKKFTDALEIMAENYKFKENLQACLEAKRAASVLKSLPFEVTSMKDIQGLPCITDDVRPVIREIIEEGESSRVKEILNDERYKAFKQFTSVFGVGVKTSEKWYRMGLRTVEEAKASKSLKLSKMQKAGFLYYEDLASGVSKEEADAVTLIVKETVRTVSPDALVTIAGGFRRGKPMGHDVDLLITIPGRPEDDELLHKVVDLLKKQGLLLYEDIRESTFVEGQLPNPKPDALDNHQKCFAILKLYRPKVDNSAVGTSKKSDMAEVKDWKAVRVDLVIAPFEQFAYALLGWTGSGQFRRDTRRYAEEERDMLLDNHSLYDLKKGIFLSADSEEEIFGHLDLDYLEPWERNA

SEQ ID NO: 4777 - DNA, 1182 bp, synthetic construct
  misc_feature 1..1182: note = Variant of terminal deoxynucleotidyl transferase
  source 1..1182: mol_type = other DNA
atgcatcaccaccatcatcatgggggttctggtcatccggaaggtaataccccggagaaggaggtgccgagcgttatcgcccgtcatgttagtcagtacgcgtgccagcgcaagaccacgctgaataactacaacaaaaagttcaccgacgcgctggagatcatggccgagaactacaagtttaaagagaacctgcaggcgtgcctggaagccaagcgcgccgcgagtgtcctgaaaagcctgccgttcgaggttaccagcatgaaagacatccaaggtctgccgtgcattaccgacgacgtacgtgacgtgatcgaagagatcatcgaagagggcgagagcagccgtgttaaagaaatcctcaatgacgagcgctacaaggcctttaagcagttcaccagcgtgttcggtgtgggcgtgaaaacctcggaaaagtggtaccgtatgggcctccgtacggttgaagaagcaaaggccagtaagagtctgaagctgagcaagatgcagaaggcgggcttcctgtattacgaggatctggcgagcggtgttagtaaagaagaagccgatgccgttacgctcatcgtgaaggaaacggtgcgcactgttagtccggatgcgctggtgaccatcgccggcggtttccgccgtggcaaacctatgggccacgacgttgacctgctgatcacgattccgggccgtcctgaagatgacgagctgctccacaaagtggttgatctgctcaagaagcaaggtctgctgctgtacgaagacatccgtgagagcacgttcgtggaggggcaactgccaaatcctaaacctgacgccctggacaaccatcagaagtgcttcgccattctcaagctgtaccgtccgaaggtggataacagtgcggttgggacgagtaagaaaagtgacatggctgaggttaaggattggaaagcggttcgtgtggatctggtgattgcgccattcgagcagttcgcctatgcgctgctcggttggacgggcagcggccaatttcgtcgcgatactcgtcgctatgcggaggaagagcgcgacatgctgctcgacaaccatagtctctacgacctgaaaaagggcatctttctgagtgcggacagcgaagaagagattttcggtcatctggagctggattatctggagccgtgggaacgcaacgcg

SEQ ID NO: 4778 - protein, 394 aa, synthetic construct
  REGION 1..394: note = Variant of terminal deoxynucleotidyl transferase
MHHHHHHGGSGHPEGNTPEKEVPSVIARHVSQYACQRKTTLNNYNKKFTDALEIMAENYKFKENLQACLEAKRAASVLKSLPFEVTSMKDIQGLPCITDDVRDVIEEIIEEGESSRVKEILNDERYKAFKQFTSVFGVGVKTSEKWYRMGLRTVEEAKASKSLKLSKMQKAGFLYYEDLASGVSKEEADAVTLIVKETVRTVSPDALVTIAGGFRRGKPMGHDVDLLITIPGRPEDDELLHKVVDLLKKQGLLLYEDIRESTFVEGQLPNPKPDALDNHQKCFAILKLYRPKVDNSAVGTSKKSDMAEVKDWKAVRVDLVIAPFEQFAYALLGWTGSGQFRRDTRRYAEEERDMLLDNHSLYDLKKGIFLSADSEEEIFGHLELDYLEPWERNA

SEQ ID NO: 4779 - DNA, 1182 bp, synthetic construct
  misc_feature 1..1182: note = Variant of terminal deoxynucleotidyl transferase
  source 1..1182: mol_type = other DNA
atgcatcaccaccatcatcatgggggttctggtcatccggaaggtaataccccggagaaggaggtgccgagcgttatcgcccgtcatgttagtcaatacgcgtgccagcgcaagaccacgctgaataactacaacaaaaagttcaccgacgcgctggagatcatggccgagaactacaagtttaaagagaacctgcaggcgtgcctggaagccaagcgcgccgcgagtgtcctgaaaagcctgccgttcgaggttaccagcatgaaagacatccaaggtctgccgtgcattaccgacgacgtacgtgacgtgatccgcgagatcatcgaagtaggcgagagcagccgtgttaaagaaatcctcaatgacgagcgctacaaggcctttaagcagttcaccagcgtgttcggtgtgggcgtgaaaacctcggaaaagtggtaccgtatgggcctccgtacggttgaagaagcaaaggccagtaagagtctgaagctgagcaagatgcagaaggcgggcttcctgtattacgaggatctggcgagcggtgttagtaaagaagaagccgatgccgttacgctcatcgtgaaggaaacggtgcgcactgttagtccggatgcgctggtgaccatcgccggcggtttccgccgtggcaaacctatgggccacgacgttgacctgctgatcacgattccgggccgtcctgaagatgacgagctgctccacaaagtggttgatctgctcaagaagcaaggtctgctgctgtacgaagacatccgtgagagcacgttcgtggaggggcaactgccaaatcctaaacctgacgccctggacaaccatcagaagtgcttcgccattctcaagctgtaccgtccgaaggtggataacagtgcggttgggacgagtaagaaaagtgacatggctgaggttaaggattggaaagcggttcgtgtggatctggtgattgcgccattcgagcagttcgcctatgcgctgctcggttggacgggcagcggccaatttcgtcgcgatactcgtcgctatgcggaggaagagcgcgacatgctgctcgacaaccatcgtctctacgacctgaaaaagggcatctttctgagtgcggacagcgaagaagagattttcggtcatctggacctggattatctggagccgtgggaacgcaacgcg

SEQ ID NO: 4780 - protein, 394 aa, synthetic construct
  REGION 1..394: note = Variant of terminal deoxynucleotidyl transferase
MHHHHHHGGSGHPEGNTPEKEVPSVIARHVSQYACQRKTTLNNYNKKFTDALEIMAENYKFKENLQACLEAKRAASVLKSLPFEVTSMKDIQGLPCITDDVRDVIREIIEVGESSRVKEILNDERYKAFKQFTSVFGVGVKTSEKWYRMGLRTVEEAKASKSLKLSKMQKAGFLYYEDLASGVSKEEADAVTLIVKETVRTVSPDALVTIAGGFRRGKPMGHDVDLLITIPGRPEDDELLHKVVDLLKKQGLLLYEDIRESTFVEGQLPNPKPDALDNHQKCFAILKLYRPKVDNSAVGTSKKSDMAEVKDWKAVRVDLVIAPFEQFAYALLGWTGSGQFRRDTRRYAEEERDMLLDNHRLYDLKKGIFLSADSEEEIFGHLDLDYLEPWERNA

SEQ ID NO: 4781 - DNA, 1182 bp, synthetic construct
  misc_feature 1..1182: note = Variant of terminal deoxynucleotidyl transferase
  source 1..1182: mol_type = other DNA
atgcatcaccaccatcatcatgggggttctggtcatccggaaggtaataccccggagaaggaggtgccgagcgttatcgcccgtcatgttagtcaatacgcgtgccagcgcaagaccacgctgaataactacaacaaaaagttcaccgacgcgctggagatcatggccgagaactacaaatttaaagagaacctgcaggcgtgcctggaagccaagcgcgccgcgagtgtcctgaaaagcctgccgttcgaggttaccagcatgaaagacatccaaggtctgccgtgcattaccgacgacgtacgtgacgtgatcgaagagatcatcgaagaaggcgagagcagccgtgttaaagaaatcctcaatgacgagcgctacaaggcctttaagcagttcaccagcgtgttcggtgtgggcgtgaaaacctcggaaaagtggtaccgtatgggcctccgtacggttgaagaagcaaaggccagtaagagtctgaagctgagcaagatgcagaaggcgggcttcctgtattacgaggatctggcgagcggtgttagtaaagaagaagccgatgccgttacgctcatcgtgaaggaaacggtgcgcactgttagtccggatgcgctggtgaccatcgccggcggtttccgccgtggcaaacctatgggccacgacgttgacctgctgatcacgattccgggccgtcctgaagatgacgagctgctccacaaagtggttgatctgctcaagaagcaaggtctgctgctgtacgaagacatccgtgagagcacgttcgtggaggggcaactgccaaatcctaaacctgacgccctggacaaccatcagaagtgcttcgccattctcaagctgtaccgtccgaaggtggataacagtgcggttgggacgagtaagaaaagtgacatggctgaggttaaggattggaaagcggttcgtgtggatctggtggtcgctccacgcgagcagttcgcctatgcgctgctcggttggacgggcagcggccaatttcgtcgcgatactcgtcgctatgcggaggaagagcgcgacatgctgctcgacaaccatcgtctctacgacctgaaaaagggcatctttctgagtgcggacagcgaagaagagattttcggtcatctggacctggattatctggagccgtgggaacgcaacgcg

SEQ ID NO: 4782 - protein, 394 aa, synthetic construct
  REGION 1..394: note = Variant of terminal deoxynucleotidyl transferase
MHHHHHHGGSGHPEGNTPEKEVPSVIARHVSQYACQRKTTLNNYNKKFTDALEIMAENYKFKENLQACLEAKRAASVLKSLPFEVTSMKDIQGLPCITDDVRDVIEEIIEEGESSRVKEILNDERYKAFKQFTSVFGVGVKTSEKWYRMGLRTVEEAKASKSLKLSKMQKAGFLYYEDLASGVSKEEADAVTLIVKETVRTVSPDALVTIAGGFRRGKPMGHDVDLLITIPGRPEDDELLHKVVDLLKKQGLLLYEDIRESTFVEGQLPNPKPDALDNHQKCFAILKLYRPKVDNSAVGTSKKSDMAEVKDWKAVRVDLVVAPREQFAYALLGWTGSGQFRRDTRRYAEEERDMLLDNHRLYDLKKGIFLSADSEEEIFGHLDLDYLEPWERNA

SEQ ID NO: 4783 - DNA, 1182 bp, synthetic construct
  misc_feature 1..1182: note = Variant of terminal deoxynucleotidyl transferase
  source 1..1182: mol_type = other DNA
atgcatcaccaccatcatcatgggggttctggtcatccggaaggtaataccccggagaaggaggtgccgagcgttatcgcccgtcatgttagtccatacgcgtgccagcgcaagaccacgctgaataactacaacaaaaagttcaccgacgcgctggagatcatggccgagaactacaagtttaaagagaacctgcaggcgtgcctggaagccaagcgcgccgcgagtgtcctgaaaagcctgccgttcgaggttaccagcatgaaagacatccaaggtctgccgtgcattaccgacgacgtacgtgacgtgatccgcgagatcatcgaagaaggcgagagcagccgtgttaaagaaatcctcaatgacgagcgctacaaggcctttaagcagttcaccagcgtgttcggtgtgggcgtgaaaacctcggaaaagtggtaccgtatgggcctccgtacggttgaagaagcaaaggccagtaagagtctgaagctgagcaagatgcagaaggcgggcttcctgtattacgaggatctggcgagcggtgttagtaaagaagaagccgatgccgttacgctcatcgtgaaggaaacggtgcgcactgttagtccggatgcgctggtgaccatcgccggcggtttccgccgtggcaaacctatgggccacgacgttgacctgctgatcacgattccgggccgtcctgaagatgacgagctgctccacaaagtggttgatctgctcaagaagcaaggtctgctgctgtacgaagacatccgtgagagcacgttcgtggaggggcaactgccaaatcctaaacctgacgccctggacaaccattcgaagtgcttcgccattctcaagctgtaccgtccgaaggtggataacagtgcggttgggacgagtaagaaaagtgacatggctgaggttaaggattggaaagcggttcgtgtggatctggtgattgcgccattcgagcagttcgcctatgcgctgctcggttggacgggcagcggccaatttcgtcgcgatactcgtcgctatgcggaggaagagcgcgacatgctgctcgacaaccatcgtctctacgacctgaaaaagggcatctttctgagtgcggacagcgaagaagagattttcggtcatctggatctggattatctggagccgtgggaacgcaacgcg

SEQ ID NO: 4784 - protein, 394 aa, synthetic construct
  REGION 1..394: note = Variant of terminal deoxynucleotidyl transferase
MHHHHHHGGSGHPEGNTPEKEVPSVIARHVSPYACQRKTTLNNYNKKFTDALEIMAENYKFKENLQACLEAKRAASVLKSLPFEVTSMKDIQGLPCITDDVRDVIREIIEEGESSRVKEILNDERYKAFKQFTSVFGVGVKTSEKWYRMGLRTVEEAKASKSLKLSKMQKAGFLYYEDLASGVSKEEADAVTLIVKETVRTVSPDALVTIAGGFRRGKPMGHDVDLLITIPGRPEDDELLHKVVDLLKKQGLLLYEDIRESTFVEGQLPNPKPDALDNHSKCFAILKLYRPKVDNSAVGTSKKSDMAEVKDWKAVRVDLVIAPFEQFAYALLGWTGSGQFRRDTRRYAEEERDMLLDNHRLYDLKKGIFLSADSEEEIFGHLDLDYLEPWERNA

SEQ ID NO: 4785 - DNA, 1182 bp, synthetic construct
  misc_feature 1..1182: note = Variant of terminal deoxynucleotidyl transferase
  source 1..1182: mol_type = other DNA
atgcatcaccaccatcatcatgggggttctggtcatccggaaggtaataccccggagaaggaggtgccgagcgttatcgcccgtcatgttagtccatacgcgtgccagcgcaagaccacgctgaataactacaacaaaaagttcaccgacgcgctggagatcatggccgagaactacaagtttaaagagaacctgcaggcgtgcctggaagccaagcgcgccgcgagtgtcctgaaaagcctgccgttcgaggttaccagcatgaaagacatccaaggtctgccgtgcattaccgacgacgtacgtgacgtgatcgaagagatcatcgaagagggcgagagcagccgtgttaaagaaatcctcaatgacgagcgctacaaggcctttaagcagttcaccagcgtgttcggtgtgggcgtgaaaacctcggaaaagtggtaccgtatgggcctccgtacggttgaagaagcaaaggccagtaagagtctgaagctgagcaagatgcagaaggcgggcttcctgtattacgaggatctggcgagcggtgttagtaaagaagaagccgatgccgttacgctcatcgtgaaggaaacggtgcgcactgttagtccggatgcgctggtgaccatcgccggcggtttccgccgtggcaaacctatgggccacgacgttgacctgctgatcacgattccgggccgtcctgaagatgacgagctgctccacaaagtggttgatctgctcaagaagcaaggtctgctgctgtacgaagacatccgtgagagcacgttcgtggaggggcaactgccaaatcctaaacctgacgccctggacaaccatcagaagtgcttcgccattctcaagctgtaccgtccgaaggtggataacagtgcggttgggacgagtaagaaaagtgacatggctgaggttaaggattggaaagcggttcgtgtggatctggtgatcgctccagatgagcagttcgcctatgcgctgctcggttggacgggcagcggccaatttcgtcgcgatactcgtcgctatgcggaggaagagcgcgacatgctgctcgacaaccatcgtctctacgacctgaaaaagggcatctttctgagtgcggacagcgaagaagagattttcggtcatctggacctggattatctggagccgtgggaacgcaacgcg

SEQ ID NO: 4786 - protein, 394 aa, synthetic construct
  REGION 1..394: note = Variant of terminal deoxynucleotidyl transferase
MHHHHHHGGSGHPEGNTPEKEVPSVIARHVSPYACQRKTTLNNYNKKFTDALEIMAENYKFKENLQACLEAKRAASVLKSLPFEVTSMKDIQGLPCITDDVRDVIEEIIEEGESSRVKEILNDERYKAFKQFTSVFGVGVKTSEKWYRMGLRTVEEAKASKSLKLSKMQKAGFLYYEDLASGVSKEEADAVTLIVKETVRTVSPDALVTIAGGFRRGKPMGHDVDLLITIPGRPEDDELLHKVVDLLKKQGLLLYEDIRESTFVEGQLPNPKPDALDNHQKCFAILKLYRPKVDNSAVGTSKKSDMAEVKDWKAVRVDLVIAPDEQFAYALLGWTGSGQFRRDTRRYAEEERDMLLDNHRLYDLKKGIFLSADSEEEIFGHLDLDYLEPWERNA

SEQ ID NO: 4787 - DNA, 1182 bp, synthetic construct
  misc_feature 1..1182: note = Variant of terminal deoxynucleotidyl transferase
  source 1..1182: mol_type = other DNA
atgcatcaccaccatcatcatgggggttctggtcatccggaaggtaataccccggagaaggaggtgccgagcgttatcgcccgtcatgttagtcaatacgcgtgccagcgcaagaccacgctgaataactacaacaaaaagttcaccgacgcgctggagatcatggccgagaactacaaatttaaagagaacctgcaggcgtgcctggaagccaagcgcgccgcgagtgtcctgaaaagcctgccgttcgaggttaccagcatgaaagacatccaaggtctgccgtgcattaccgacgacgtacgtgacgtgatcgaagagatcatcgaagaaggcgagagcagccgtgttaaagaaatcctcaatgacgagcgctacaaggcctttaagcagttcaccagcgtgttcggtgtgggcgtgaaaacctcggaaaagtggtaccgtatgggcctccgtacggttgaagaagcaaaggccagtaagagtctgaagctgagcaagatgcagaaggcgggcttcctgtattacgaggatctggcgagcggtgttagtaaagaagaagccgatgccgttacgctcatcgtgaaggaaacggtgcgcactgttagtccggatgcgctggtgaccatcgccggcggtttccgccgtggcaaacctatgggccacgacgttgacctgctgatcacgattccgggccgtcctacggatgacgagctgctccacaaagtggttgatctgctcaagaagcaaggtctgctgctgtacgaagacatccgtgagagcacgttcgtggaggggcaactgccaaatcctaaacctgacgccctggacaaccattcgaagtgcttcgccattctcaagctgtaccgtccgaaggtggataacagtgcggttgggacgagtaagaaaagtgacatggctgaggttaaggattggaaagcggttcgtgtggatctggtggtcgctccagaagagcagttcgcctatgcgctgctcggttggacgggcagcggccaatttcgtcgcgatactcgtcgctatgcggaggaagagcgcgacatgctgctcgacaaccatcgtctctacgacctgaaaaagggcatctttctgagtgcggacagcgaagaagagattttcggtcatctggagctggattggctggagccgtgggaacgcaacgcg

SEQ ID NO: 4788 - protein, 394 aa, synthetic construct
  REGION 1..394: note = Variant of terminal deoxynucleotidyl transferase
MHHHHHHGGSGHPEGNTPEKEVPSVIARHVSQYACQRKTTLNNYNKKFTDALEIMAENYKFKENLQACLEAKRAASVLKSLPFEVTSMKDIQGLPCITDDVRDVIEEIIEEGESSRVKEILNDERYKAFKQFTSVFGVGVKTSEKWYRMGLRTVEEAKASKSLKLSKMQKAGFLYYEDLASGVSKEEADAVTLIVKETVRTVSPDALVTIAGGFRRGKPMGHDVDLLITIPGRPTDDELLHKVVDLLKKQGLLLYEDIRESTFVEGQLPNPKPDALDNHSKCFAILKLYRPKVDNSAVGTSKKSDMAEVKDWKAVRVDLVVAPEEQFAYALLGWTGSGQFRRDTRRYAEEERDMLLDNHRLYDLKKGIFLSADSEEEIFGHLELDWLEPWERNA

SEQ ID NO: 4789 - DNA, 1182 bp, synthetic construct
  misc_feature 1..1182: note = Variant of terminal deoxynucleotidyl transferase
  source 1..1182: mol_type = other DNA
atgcatcaccaccatcatcatgggggttctggtcatccggaaggtaataccccggagaaggaggtgccgagcgttatcgcccgtcatgttagtcaatacgcgtgccagcgcaagaccacgctgaataactacaacaaaaagttcaccgacgcgctggagatcatggccgagaactacaagtttaaagagaacctgcaggcgtgcctggaagccaagcgcgccgcgagtgtcctgaaaagcctgccgttcgaggttaccagcatgaaagacatccaaggtctgccgtgcattaccgacgacgtacgtcctgtgatcgaagagatcatcgaagaaggcgagagcagccgtgttaaagaaatcctcaatgacgagcgctacaaggcctttaagcagttcaccagcgtgttcggtgtgggcgtgaaaacctcggaaaagtggtaccgtatgggcctccgtacggttgaagaagcaaaggccagtaagagtctgaagctgagcaagatgcagaaggcgggcttcctgtattacgaggatctggcgagcggtgttagtaaagaagaagccgatgccgttacgctcatcgtgaaggaaacggtgcgcactgttagtccggatgcgctggtgaccatcgccggcggtttccgccgtggcaaacctatgggccacgacgttgacctgctgatcacgattccgggccgtcctgaagatgacgagctgctccacaaagtggttgatctgctcaagaagcaaggtctgctgctgtacgaagacatccgtgagagcacgttcgtggaggggcaactgccaaatcctaaacctgacgccctggacaaccatcagaagtgcttcgccattctcaagctgtaccgtccgaaggtggataacagtgcggttgggacgagtaagaaaagtgacatggctgaggttaaggattggaaagcggttcgtgtggatctggtgattgcgccattcgagcagttcgcctatgcgctgctcggttggacgggcagcggccaatttcgtcgcgatactcgtcgctatgcggaggaagagcgcgacatgctgctcgacaaccatcgtctctacgacctgaaaaagggcatctttctgagtgcggacagcgaagaagagattttcggtcatctggacctggattatctggagccgtgggaacgcaacgcg

SEQ ID NO: 4790 - protein, 394 aa, synthetic construct
  REGION 1..394: note = Variant of terminal deoxynucleotidyl transferase
MHHHHHHGGSGHPEGNTPEKEVPSVIARHVSQYACQRKTTLNNYNKKFTDALEIMAENYKFKENLQACLEAKRAASVLKSLPFEVTSMKDIQGLPCITDDVRPVIEEIIEEGESSRVKEILNDERYKAFKQFTSVFGVGVKTSEKWYRMGLRTVEEAKASKSLKLSKMQKAGFLYYEDLASGVSKEEADAVTLIVKETVRTVSPDALVTIAGGFRRGKPMGHDVDLLITIPGRPEDDELLHKVVDLLKKQGLLLYEDIRESTFVEGQLPNPKPDALDNHQKCFAILKLYRPKVDNSAVGTSKKSDMAEVKDWKAVRVDLVIAPFEQFAYALLGWTGSGQFRRDTRRYAEEERDMLLDNHRLYDLKKGIFLSADSEEEIFGHLDLDYLEPWERNA

SEQ ID NO: 4791 - DNA, 1182 bp, synthetic construct
  misc_feature 1..1182: note = Variant of terminal deoxynucleotidyl transferase
  source 1..1182: mol_type = other DNA
atgcatcaccaccatcatcatgggggttctggtcatccggaaggtaataccccggagaaggaggtgccgagcgttatcgcccgtcatgttagtcaatacgcgtgccagcgcaagaccacgctgaataactacaacaaaaagttcaccgacgcgctggagatcatggccgagaactaccgttttaaagagaacctgcaggcgtgcctggaagccaagcgcgccgcgagtgtcctgaaaagcctgccgttcgaggttaccagcatgaaagacatccaaggtctgccgtgcattaccgacgacgtacgtgacgtgatcgaagagatcatcgaagaaggcgagagcagccgtgttaaagaaatcctcaatgacgagcgctacaaggcctttaagcagttcaccagcgtgttcggtgtgggcgtgaaaacctcggaaaagtggtaccgtatgggcctccgtacggttgaagaagcaaaggccagtaagagtctgaagctgagcaagatgcagaaggcgggcttcctgtattacgaggatctggcgagcggtgttagtaaagaagaagccgatgccgttacgctcatcgtgaaggaaacggtgcgcactgttagtccggatgcgctggtgaccatcgccggcggtttccgccgtggcaaacctatgggccacgacgttgacctgctgatcacgattccgggccgtcctgaagatgacgagctgctccacaaagtggttgatctgctcaagaagcaaggtctgctgctgtacgaagacatccgtgagagcacgttcgtggaggggcaactgccaaatcctaaacctgacgccctggacaaccattcgaagtgcttcgccattctcaagctgtaccgtccgaaggtggataacagtgcggttgggacgagtaagaaaagtgacatggctgaggttaaggattggaaagcggttcgtgtggatctggtgattgcgccattcgagcagttcgcctatgcgctgctcggttggacgggcagcggccaatttcgtcgcgatactcgtcgctatgcggaggaagagcgcgacatgctgctcgacaaccatagtctctacgacctgaaaaagggcatctttctgagtgcggacagcgaagaagagattttcggtcatctggacctggattatctggagccgtgggaacgcaacgcg

SEQ ID NO: 4792 - protein, 394 aa, synthetic construct
  REGION 1..394: note = Variant of terminal deoxynucleotidyl transferase
MHHHHHHGGSGHPEGNTPEKEVPSVIARHVSQYACQRKTTLNNYNKKFTDALEIMAENYRFKENLQACLEAKRAASVLKSLPFEVTSMKDIQGLPCITDDVRDVIEEIIEEGESSRVKEILNDERYKAFKQFTSVFGVGVKTSEKWYRMGLRTVEEAKASKSLKLSKMQKAGFLYYEDLASGVSKEEADAVTLIVKETVRTVSPDALVTIAGGFRRGKPMGHDVDLLITIPGRPEDDELLHKVVDLLKKQGLLLYEDIRESTFVEGQLPNPKPDALDNHSKCFAILKLYRPKVDNSAVGTSKKSDMAEVKDWKAVRVDLVIAPFEQFAYALLGWTGSGQFRRDTRRYAEEERDMLLDNHSLYDLKKGIFLSADSEEEIFGHLDLDYLEPWERNA

SEQ ID NO: 4793 - DNA, 1182 bp, synthetic construct
  misc_feature 1..1182: note = Variant of terminal deoxynucleotidyl transferase
  source 1..1182: mol_type = other DNA
atgcatcaccaccatcatcatgggggttctggtcatccggaaggtaataccccggagaaggaggtgccgagcgttatcgcccgtcatgttagtcaatacgcgtgccagcgcaagaccacgctgaataactacaacaaaaagttcaccgacgcgctggagatcatggccgagaactacaaatttaaagagaacctgcaggcgtgcctggaagccaagcgcgccgcgagtgtcctgaaaagcctgccgttcgaggttaccagcatgaaagacatccaaggtctgccgtgcattaccgacgacgtacgtgacgtgatccgcgagatcatcgaagtaggcgagagcagccgtgttaaagaaatcctcaatgacgagcgctacaaggcctttaagcagttcaccagcgtgttcggtgtgggcgtgaaaacctcggaaaagtggtaccgtatgggcctccgtacggttgaagaagcaaaggccagtaagagtctgaagctgagcaagatgcagaaggcgggcttcctgtattacgaggatctggcgagcggtgttagtaaagaagaagccgatgccgttacgctcatcgtgaaggaaacggtgcgcactgttagtccggatgcgctggtgaccatcgccggcggtttccgccgtggcaaacctatgggccacgacgttgacctgctgatcacgattccgggccgtcctgaagatgacgagctgctccacaaagtggttgatctgctcaagaagcaaggtctgctgctgtacgaagacatccgtgagagcacgttcgtggaggggcaactgccaaatcctaaacctgacgccctggacaaccatcagaagtgcttcgccattctcaagctgtaccgtccgaaggtggataacagtgcggttgggacgagtaagaaaagtgacatggctgaggttaaggattggaaagcggttcgtgtggatctggtgatcactccatttgagcagttcgcctatgcgctgctcggttggacgggcagcggccaatttcgtcgcgatactcgtcgctatgcggaggaagagcgcgacatgctgctcgacaaccatcgtctctacgacctgaaaaagggcatctttctgagtgcggacagcgaagaagagattttcggtcatctggagctggattggctggagccgtgggaacgcaacgcg

SEQ ID NO: 4794 - protein, 394 aa, synthetic construct
  REGION 1..394: note = Variant of terminal deoxynucleotidyl transferase
MHHHHHHGGSGHPEGNTPEKEVPSVIARHVSQYACQRKTTLNNYNKKFTDALEIMAENYKFKENLQACLEAKRAASVLKSLPFEVTSMKDIQGLPCITDDVRDVIREIIEVGESSRVKEILNDERYKAFKQFTSVFGVGVKTSEKWYRMGLRTVEEAKASKSLKLSKMQKAGFLYYEDLASGVSKEEADAVTLIVKETVRTVSPDALVTIAGGFRRGKPMGHDVDLLITIPGRPEDDELLHKVVDLLKKQGLLLYEDIRESTFVEGQLPNPKPDALDNHQKCFAILKLYRPKVDNSAVGTSKKSDMAEVKDWKAVRVDLVITPFEQFAYALLGWTGSGQFRRDTRRYAEEERDMLLDNHRLYDLKKGIFLSADSEEEIFGHLELDWLEPWERNA

SEQ ID NO: 4795 - DNA, 1182 bp, synthetic construct
  misc_feature 1..1182: note = Variant of terminal deoxynucleotidyl transferase
  source 1..1182: mol_type = other DNA
atgcatcaccaccatcatcatgggggttctggtcatccggaaggtaataccccggagaaggaggtgccgagcgttatcgcccgtcatgttagtccatacgcgtgccagcgcaagaccacgctgaataactacaacaaaaagttcaccgacgcgctggagatcatggccgagaactacaagtttaaagagaacctgcaggcgtgcctggaagccaagcgcgccgcgagtgtcctgaaaagcctgccgttcgaggttaccagcatgaaagacatccaaggtctgccgtgcattaccgacgacgtacgtgacgtgatcgaagagatcatcgaagagggcgagagcagccgtgttaaagaaatcctcaatgacgagcgctacaaggcctttaagcagttcaccagcgtgttcggtgtgggcgtgaaaacctcggaaaagtggtaccgtatgggcctccgtacggttgaagaagcaaaggccagtaagagtctgaagctgagcaagatgcagaaggcgggcttcctgtattacgaggatctggcgagcggtgttagtaaagaagaagccgatgccgttacgctcatcgtgaaggaaacggtgcgcactgttagtccggatgcgctggtgaccatcgccggcggtttccgccgtggcaaacctatgggccacgacgttgacctgctgatcacgattccgggccgtcctacggatgacgagctgctccacaaagtggttgatctgctcaagaagcaaggtctgctgctgtacgaagacatccgtgagagcacgttcgtggaggggcaactgccaaatcctaaacctgacgccctggacaaccatcagaagtgcttcgccattctcaagctgtaccgtccgaaggtggataacagtgcggttgggacgagtaagaaaagtgacatggctgaggttaaggattggaaagcggttcgtgtggatctggtgattgcgccattcgagcagttcgcctatgcgctgctcggttggacgggcagcggccaatttcgtcgcgatactcgtcgctatgcggaggaagagcgcgacatgctgctcgacaaccatcgtctctacgacctgaaaaagggcatctttctgagtgcggacagcgaagaagagattttcggtcatctggatctggattggctggagccgtgggaacgcaacgcg

SEQ ID NO: 4796 - protein, 394 aa, synthetic construct
  REGION 1..394: note = Variant of terminal deoxynucleotidyl transferase
MHHHHHHGGSGHPEGNTPEKEVPSVIARHVSPYACQRKTTLNNYNKKFTDALEIMAENYKFKENLQACLEAKRAASVLKSLPFEVTSMKDIQGLPCITDDVRDVIEEIIEEGESSRVKEILNDERYKAFKQFTSVFGVGVKTSEKWYRMGLRTVEEAKASKSLKLSKMQKAGFLYYEDLASGVSKEEADAVTLIVKETVRTVSPDALVTIAGGFRRGKPMGHDVDLLITIPGRPTDDELLHKVVDLLKKQGLLLYEDIRESTFVEGQLPNPKPDALDNHQKCFAILKLYRPKVDNSAVGTSKKSDMAEVKDWKAVRVDLVIAPFEQFAYALLGWTGSGQFRRDTRRYAEEERDMLLDNHRLYDLKKGIFLSADSEEEIFGHLDLDWLEPWERNA

SEQ ID NO: 4797 - DNA, 1182 bp, synthetic construct
  misc_feature 1..1182: note = Variant of terminal deoxynucleotidyl transferase
  source 1..1182: mol_type = other DNA
atgcatcaccaccatcatcatgggggttctggtcatccggaaggtaataccccggagaaggaggtgccgagcgttatcgcccgtcatgttagtcaatacgcgtgccagcgcaagaccacgctgaataactacaacaaaaagttcaccgacgcgctggagatcatggccgagaactacaagtttaaagagaacctgcaggcgtgcctggaagccaagcgcgccgcgagtgtcctgaaaagcctgccgttcgaggttaccagcatgaaagacatccaaggtctgccgtgcattaccgacgacgtacgtgacgtgatcgaagagatcatcgaagtaggcgagagcagccgtgttaaagaaatcctcaatgacgagcgctacaaggcctttaagcagttcaccagcgtgttcggtgtgggcgtgaaaacctcggaaaagtggtaccgtatgggcctccgtacggttgaagaagcaaaggccagtaagagtctgaagctgagcaagatgcagaaggcgggcttcctgtattacgaggatctggcgagcggtgttagtaaagaagaagccgatgccgttacgctcatcgtgaaggaaacggtgcgcactgttagtccggatgcgctggtgaccatcgccggcggtttccgccgtggcaaacctatgggccacgacgttgacctgctgatcacgattccgggccgtcctgaagatgacgagctgctccacaaagtggttgatctgctcaagaagcaaggtctgctgctgtacgaagacatccgtgagagcacgttcgtggaggggcaactgccaaatcctaaacctgacgccctggacaaccatcagaagtgcttcgccattctcaagctgtaccgtccgaaggtggataacagtgcggttgggacgagtaagaaaagtgacatggctgaggttaaggattggaaagcggttcgtgtggatctggtgattgcgccattcgagcagttcgcctatgcgctgctcggttggacgggcagcggccaatttcgtcgcgatactcgtcgctatgcggaggaagagcgcgacatgctgctcgacaaccatcgtctctacgacctgaaaaagggcatctttctgagtgcggacagcgaagaagagattttcggtcatctggacctggattatctggagccgtgggaacgcaacgcg

SEQ ID NO: 4798 - protein, 394 aa, synthetic construct
  REGION 1..394: note = Variant of terminal deoxynucleotidyl transferase
MHHHHHHGGSGHPEGNTPEKEVPSVIARHVSQYACQRKTTLNNYNKKFTDALEIMAENYKFKENLQACLEAKRAASVLKSLPFEVTSMKDIQGLPCITDDVRDVIEEIIEVGESSRVKEILNDERYKAFKQFTSVFGVGVKTSEKWYRMGLRTVEEAKASKSLKLSKMQKAGFLYYEDLASGVSKEEADAVTLIVKETVRTVSPDALVTIAGGFRRGKPMGHDVDLLITIPGRPEDDELLHKVVDLLKKQGLLLYEDIRESTFVEGQLPNPKPDALDNHQKCFAILKLYRPKVDNSAVGTSKKSDMAEVKDWKAVRVDLVIAPFEQFAYALLGWTGSGQFRRDTRRYAEEERDMLLDNHRLYDLKKGIFLSADSEEEIFGHLDLDYLEPWERNA

SEQ ID NO: 4799 - DNA, 1182 bp, synthetic construct
  misc_feature 1..1182: note = Variant of terminal deoxynucleotidyl transferase
  source 1..1182: mol_type = other DNA
atgcatcaccaccatcatcatgggggttctggtcatccggaaggtaataccccggagaaggaggtgccgagcgttatcgcccgtcatgttagtcagtacgcgtgccagcgcaagaccacgctgaataactacaacaaaaagttcaccgacgcgctggagatcatggccgagaactacaagtttaaagagaacctgcaggcgtgcctggaagccaagcgcgccgcgagtgtcctgaaaagcctgccgttcgaggttaccagcatgaaagacatccaaggtctgccgtgcattaccgacgacgtacgtgacgtgatccgcgagatcatcgaagtaggcgagagcagccgtgttaaagaaatcctcaatgacgagcgctacaaggcctttaagcagttcaccagcgtgttcggtgtgggcgtgaaaacctcggaaaagtggtaccgtatgggcctccgtacggttgaagaagcaaaggccagtaagagtctgaagctgagcaagatgcagaaggcgggcttcctgtattacgaggatctggcgagcggtgttagtaaagaagaagccgatgccgttacgctcatcgtgaaggaaacggtgcgcactgttagtccggatgcgctggtgaccatcgccggcggtttccgccgtggcaaacctatgggccacgacgttgacctgctgatcacgattccgggccgtcctgaagatgacgagctgctccacaaagtggttgatctgctcaagaagcaaggtctgctgctgtacgaagacatccgtgagagcacgttcgtggaggggcaactgccaaatcctaaacctgacgccctggacaaccatcagaagtgcttcgccattctcaagctgtaccgtccgaaggtggataacagtgcggttgggacgagtaagaaaagtgacatggctgaggttaaggattggaaagcggttcgtgtggatctggtgattgcgccattcgagcagttcgcctatgcgctgctcggttggacgggcagcggccaatttcgtcgcgatactcgtcgctatgcggaggaagagcgcgacatgctgctcgacaaccatcgtctctacgacctgaaaaagggcatctttctgagtgcggacagcgaagaagagattttcggtcatctggacctggattatctggagccgtgggaacgcaacgcg

SEQ ID NO: 4800 - protein, 394 aa, synthetic construct; identical to SEQ ID NO: 4780
  REGION 1..394: note = Variant of terminal deoxynucleotidyl transferase

SEQ ID NO: 4801 - DNA, 1182 bp, synthetic construct
  misc_feature 1..1182: note = Variant of terminal deoxynucleotidyl transferase
  source 1..1182: mol_type = other DNA
atgcatcaccaccatcatcatgggggttctggtcatccggaaggtaataccccggagaaggaggtgccgagcgttatcgcccgtcatgttagtccatacgcgtgccagcgcaagaccacgctgaataactacaacaaaaagttcaccgacgcgctggagatcatggccgagaactacaaatttaaagagaacctgcaggcgtgcctggaagccaagcgcgccgcgagtgtcctgaaaagcctgccgttcgaggttaccagcatgaaagacatccaaggtctgccgtgcattaccgacgacgtacgtgacgtgatcgaagagatcatcgaagagggcgagagcagccgtgttaaagaaatcctcaatgacgagcgctacaaggcctttaagcagttcaccagcgtgttcggtgtgggcgtgaaaacctcggaaaagtggtaccgtatgggcctccgtacggttgaagaagcaaaggccagtaagagtctgaagctgagcaagatgcagaaggcgggcttcctgtattacgaggatctggcgagcggtgttagtaaagaagaagccgatgccgttacgctcatcgtgaaggaaacggtgcgcactgttagtccggatgcgctggtgaccatcgccggcggtttccgccgtggcaaacctatgggccacgacgttgacctgctgatcacgattccgggccgtcctgaagatgacgagctgctccacaaagtggttgatctgctcaagaagcaaggtctgctgctgtacgaagacatccgtgagagcacgttcgtggaggggcaactgccaaatcctaaacctgacgccctggacaaccatcagaagtgcttcgccattctcaagctgtaccgtccgaaggtggataacagtgcggttgggacgagtaagaaaagtgacatggctgaggttaaggattggaaagcggttcgtgtggatctggtgatcactccacgcgagcagttcgcctatgcgctgctcggttggacgggcagcggccaatttcgtcgcgatactcgtcgctatgcggaggaagagcgcgacatgctgctcgacaaccatcgtctctacgacctgaaaaagggcatctttctgagtgcggacagcgaagaagagattttcggtcatctggagctggattggctggagccgtgggaacgcaacgcg

SEQ ID NO: 4802 - protein, 394 aa, synthetic construct
  REGION 1..394: note = Variant of terminal deoxynucleotidyl transferase
MHHHHHHGGSGHPEGNTPEKEVPSVIARHVSPYACQRKTTLNNYNKKFTDALEIMAENYKFKENLQACLEAKRAASVLKSLPFEVTSMKDIQGLPCITDDVRDVIEEIIEEGESSRVKEILNDERYKAFKQFTSVFGVGVKTSEKWYRMGLRTVEEAKASKSLKLSKMQKAGFLYYEDLASGVSKEEADAVTLIVKETVRTVSPDALVTIAGGFRRGKPMGHDVDLLITIPGRPEDDELLHKVVDLLKKQGLLLYEDIRESTFVEGQLPNPKPDALDNHQKCFAILKLYRPKVDNSAVGTSKKSDMAEVKDWKAVRVDLVITPREQFAYALLGWTGSGQFRRDTRRYAEEERDMLLDNHRLYDLKKGIFLSADSEEEIFGHLELDWLEPWERNA

SEQ ID NO: 4803 - DNA, 1182 bp, synthetic construct
  misc_feature 1..1182: note = Variant of terminal deoxynucleotidyl transferase
  source 1..1182: mol_type = other DNA
atgcatcaccaccatcatcatgggggttctggtcatccggaaggtaataccccggagaaggaggtgccgagcgttatcgcccgtcatgttagtcaatacgcgtgccagcgcaagaccacgctgaataactacaacaaaaagttcaccgacgcgctggagatcatggccgagaactacaaatttaaagagaacctgcaggcgtgcctggaagccaagcgcgccgcgagtgtcctgaaaagcctgccgttcgaggttaccagcatgaaagacatccaaggtctgccgtgcattaccgacgacgtacgtgacgtgatccgcgagatcatcgaagtaggcgagagcagccgtgttaaagaaatcctcaatgacgagcgctacaaggcctttaagcagttcaccagcgtgttcggtgtgggcgtgaaaacctcggaaaagtggtaccgtatgggcctccgtacggttgaagaagcaaaggccagtaagagtctgaagctgagcaagatgcagaaggcgggcttcctgtattacgaggatctggcgagcggtgttagtaaagaagaagccgatgccgttacgctcatcgtgaaggaaacggtgcgcactgttagtccggatgcgctggtgaccatcgccggcggtttccgccgtggcaaacctatgggccacgacgttgacctgctgatcacgattccgggccgtcctgaagatgacgagctgctccacaaagtggttgatctgctcaagaagcaaggtctgctgctgtacgaagacatccgtgagagcacgttcgtggaggggcaactgccaaatcctaaacctgacgccctggacaaccatcagaagtgcttcgccattctcaagctgtaccgtccgaaggtggataacagtgcggttgggacgagtaagaaaagtgacatggctgaggttaaggattggaaagcggttcgtgtggatctggtgatcactccagaagagcagttcgcctatgcgctgctcggttggacgggcagcggccaatttcgtcgcgatactcgtcgctatgcggaggaagagcgcgacatgctgctcgacaaccatcgtctctacgacctgaaaaagggcatctttctgagtgcggacagcgaagaagagattttcggtcatctggatctggattggctggagccgtgggaacgcaacgcg

SEQ ID NO: 4804 - protein, 394 aa, synthetic construct
  REGION 1..394: note = Variant of terminal deoxynucleotidyl transferase
MHHHHHHGGSGHPEGNTPEKEVPSVIARHVSQYACQRKTTLNNYNKKFTDALEIMAENYKFKENLQACLEAKRAASVLKSLPFEVTSMKDIQGLPCITDDVRDVIREIIEVGESSRVKEILNDERYKAFKQFTSVFGVGVKTSEKWYRMGLRTVEEAKASKSLKLSKMQKAGFLYYEDLASGVSKEEADAVTLIVKETVRTVSPDALVTIAGGFRRGKPMGHDVDLLITIPGRPEDDELLHKVVDLLKKQGLLLYEDIRESTFVEGQLPNPKPDALDNHQKCFAILKLYRPKVDNSAVGTSKKSDMAEVKDWKAVRVDLVITPEEQFAYALLGWTGSGQFRRDTRRYAEEERDMLLDNHRLYDLKKGIFLSADSEEEIFGHLDLDWLEPWERNA

SEQ ID NO: 4805 - DNA, 1182 bp, synthetic construct
  misc_feature 1..1182: note = Variant of terminal deoxynucleotidyl transferase
  source 1..1182: mol_type = other DNA
atgcatcaccaccatcatcatgggggttctggtcatccggaaggtaataccccggagaaggaggtgccgagcgttatcgcccgtcatgttagtcagtacgcgtgccagcgcaagaccacgctgaataactacaacaaaaagttcaccgacgcgctggagatcatggccgagaactacaaatttaaagagaacctgcaggcgtgtctggaagcccgtcgcgtggcgagtgtcctgaaaagcctgccgttcgaggttaccagcatgaaagacatccaaggtctgccgtgcattaccgacgacgtacgtgacgtgatcgaagagatcatcgaagagggcgagagcagccgtgttaaagaaatcctcaatgacgagcgctacaaggcctttaagcagttcaccagcgtgttcggtgtgggcgtgaaaacctcggaaaagtggtaccgtatgggcctccgtacggttgaagaagcaaaggccagtaagagtctgaagctgagcaagatgcagaaggcgggcttcctgtattacgaggatctggcgagcggtgttagtaaagaagaagccgatgccgttacgctcatcgtgaaggaaacggtggcaactgttagtccggatgcgctggtgaccatcgccggcggtttccgccgtggcaaacctatgggccacgacgttgacctgctgatcacgattccgggccgtcctgaagatgacgagctgctccacaaagtggttgatctgctcaagaagcaaggtctgctgctgtacgaagacatccgtgagagcacgttcgtggaggggcagctgccaaatcctcgtcctgacgctctggacaaccatcagaagtgcttcgccattctcaagctgtaccgtccgaaggtggataacagtgcggttgggacgagtaagaaaagtgacatggctgaggttaaggattggaaagcggttcgtgtggatctggtgattgcgccattcgagcagttcgcctatgcgctgctcggttggacgggcagcggcaactttcgtcgcgatacgcgtcgctttgcggaggaagagcgcgacatgctgctcgacaaccatcgtctctacgacctgaaaaagggcatctttctgagtgcggacagcgaagaagagattttcggtcatctggacctggattatctggagccgtgggaacgcaacgcg

SEQ ID NO: 4806 - protein, 394 aa, synthetic construct
  REGION 1..394: note = Variant of terminal deoxynucleotidyl transferase
MHHHHHHGGSGHPEGNTPEKEVPSVIARHVSQYACQRKTTLNNYNKKFTDALEIMAENYKFKENLQACLEARRVASVLKSLPFEVTSMKDIQGLPCITDDVRDVIEEIIEEGESSRVKEILNDERYKAFKQFTSVFGVGVKTSEKWYRMGLRTVEEAKASKSLKLSKMQKAGFLYYEDLASGVSKEEADAVTLIVKETVATVSPDALVTIAGGFRRGKPMGHDVDLLITIPGRPEDDELLHKVVDLLKKQGLLLYEDIRESTFVEGQLPNPRPDALDNHQKCFAILKLYRPKVDNSAVGTSKKSDMAEVKDWKAVRVDLVIAPFEQFAYALLGWTGSGNFRRDTRRFAEEERDMLLDNHRLYDLKKGIFLSADSEEEIFGHLDLDYLEPWERNA

SEQ ID NO: 4807 - DNA, 1182 bp, synthetic construct
  misc_feature 1..1182: note = Variant of terminal deoxynucleotidyl transferase
  source 1..1182: mol_type = other DNA
atgcatcaccaccatcatcatgggggttctggtcatccggaaggtaataccccggagaaggaggtgccgagcgttatcgcccgtcatgttagtcagtacgcgtgccagcgcaagaccacgctgaataactacaacaaaaagttcaccgacgcgctggagatcatggccgagaactacaaatttaaagagaacctgcaggcgtgcctggaagccaagcgcgccgcgagtgtcctgaaaagcctgccgttcgaggttaccagcatgaaagacatccaaggtctgccgtgcattaccgacgacgtacgtgacgtgatcgaagagatcatcgaagagggcgagagcagccgtgttaaagaaatcctcaatgacgagcgctacaaggcctttaagcagttcaccagcgtgttcggtgtgggcgtgaaaacctcggaaaagtggtaccgtatgggcctccgtacggttgaagaagcaaaggccagtaagagtctgaagctgaacaagatgcagaaggcgggcttcctgtattacgaggatctggcgagcggtgttagtaaagaagaagccgatgccgttacgctcatcgtgaaggaaacggtgcgcactgttagtccggatgcgctggtgaccatcgccggcggtttccgccgtggcaaacctatgggccacgacgttgacctgctgatcacgattccgggccgtcctgaagatgacgagctgctccacaaagtggttgatctgctcaagaagcaaggtctgctgctgtacgaagacatccgtgagagcacgttcgtggaggggcaactgccaaatcctaaacctgacgccctggacaaccatcagaagtgcttcgccattctcaagctgtaccgtccgaaggtggataacagtgcggttgggacgagtaagaaaagtgacatggctgaggttaaggattggaaagcggttcgtgtggatctggtgattgcgccattcgagcagttcgcctatgcgctgctcggttggacgggcagcggccaatttcgtcgcgatactcgtcgctatgcggaggaagagcgcgacatgctgctcgacaaccatcgtctctacgacctgaaaaagggcatctttctgagtgcggacagcgaagaagagattttcggtcatctggacctggattatctggagccgtgggaacgcaacgcg

SEQ ID NO: 4808 - protein, 394 aa, synthetic construct
  REGION 1..394: note = Variant of terminal deoxynucleotidyl transferase
MHHHHHHGGSGHPEGNTPEKEVPSVIARHVSQYACQRKTTLNNYNKKFTDALEIMAENYKFKENLQACLEAKRAASVLKSLPFEVTSMKDIQGLPCITDDVRDVIEEIIEEGESSRVKEILNDERYKAFKQFTSVFGVGVKTSEKWYRMGLRTVEEAKASKSLKLNKMQKAGFLYYEDLASGVSKEEADAVTLIVKETVRTVSPDALVTIAGGFRRGKPMGHDVDLLITIPGRPEDDELLHKVVDLLKKQGLLLYEDIRESTFVEGQLPNPKPDALDNHQKCFAILKLYRPKVDNSAVGTSKKSDMAEVKDWKAVRVDLVIAPFEQFAYALLGWTGSGQFRRDTRRYAEEERDMLLDNHRLYDLKKGIFLSADSEEEIFGHLDLDYLEPWERNA

SEQ ID NO: 4809 - DNA, 1182 bp, synthetic construct
  misc_feature 1..1182: note = Variant of terminal deoxynucleotidyl transferase
  source 1..1182: mol_type = other DNA
atgcatcaccaccatcatcatgggggttctggtcatccggaaggtaataccccggagaaggaggtgccgagcgttatcgcccgtcatgttagtcagtacgcgtgccagcgcaagaccacgctgaataactacaacaaaaagttcaccgacgcgctggagatcatggccgagaactacaaatttaaagagaacctgcaggcgtgcctggaagccaagcgcgccgcgagtgtcctgaaaagcctgccgttcgaggttaccagcatgaaagacatccaaggtctgccgtgcattaccgacgacgtacgtgacgtgatcgaagagatcatcgaagagggcgagagcagccgtgttaaagaaatcctcaatgacgagcgctacaaggcctttaagcagttcaccagcgtgttcggtgtgggcgtgaaaacctcggaaaagtggtaccgtatgggcctccgtacggttgaagaagcaaaggccagtaagagtctgaagctgagcaagatgcagaaggcgggcttcctgtattacgaggatctggcgagcggtgttagtaaagaagaagccgatgccgttacgctcatcgtgaaggaaacggtgcgcactgttagtccggatgcgctggtgaccatcgccggcggtttccgccgtggcaaacctatgggccacgacgttgacctgctgatcacgattccgggccgtcctgaagatgacgagctgctccacaaagtggttgatctgctcaagaagcaaggtctgctgctgtacgaagacatccgtgagagcacgttcgtggaggggcaactgccaaatcctaaacctgacgccctggacaaccatcagaagtgcttcgccattctcaagctgtaccgtccgaaggtggataacagtgcggttgggacgagtaagaaaagtgacatggctgaggttaaggattggaaagcggttcgtgtggatctggtgattgcgccattcgagcagttcgcctatgcgctgctcggttggacgggcagcggccaatttcgtcgcgatactcgtcgctatgcggagattgagcgcgacatgctgctcgacaaccatcgtctctacgacctgaaaaagggcatctttctgagtgcggacagcgaagaagagattttcggtcatctggacctggattatctggagccgtgggaacgcaacgcg

SEQ ID NO: 4810 - protein, 394 aa, synthetic construct
  REGION 1..394: note = Variant of terminal deoxynucleotidyl transferase
MHHHHHHGGSGHPEGNTPEKEVPSVIARHVSQYACQRKTTLNNYNKKFTDALEIMAENYKFKENLQACLEAKRAASVLKSLPFEVTSMKDIQGLPCITDDVRDVIEEIIEEGESSRVKEILNDERYKAFKQFTSVFGVGVKTSEKWYRMGLRTVEEAKASKSLKLSKMQKAGFLYYEDLASGVSKEEADAVTLIVKETVRTVSPDALVTIAGGFRRGKPMGHDVDLLITIPGRPEDDELLHKVVDLLKKQGLLLYEDIRESTFVEGQLPNPKPDALDNHQKCFAILKLYRPKVDNSAVGTSKKSDMAEVKDWKAVRVDLVIAPFEQFAYALLGWTGSGQFRRDTRRYAEIERDMLLDNHRLYDLKKGIFLSADSEEEIFGHLDLDYLEPWERNA

SEQ ID NO: 4811 - DNA, 1182 bp, synthetic construct
  misc_feature 1..1182: note = Variant of terminal deoxynucleotidyl transferase
  source 1..1182: mol_type = other DNA
atgcatcaccaccatcatcatgggggttctggtcatccggaaggtaataccccggagaaggaggtgccgagcgttatcgcccgtcatgttagtcagtacgcgtgccagcgcaagaccacgctgaataactacaacaaaaagttcaccgacgcgctggagatcatggccgagaactacaaatttaaagagaacctgcaggcgtgcctggaagccaagcgcgccgcgagtgtcctgaaaagcctgccgttcgaggttaccagcatgaaagacatccaaggtctgccgtgcattaccgacgacgtacgtgacgtgatcgaagagatcatcgaagagggcgagagcagccgtgttaaagaaatcctcaatgacgagcgctacaaggcctttaagcagttcaccagcgtgttcggtgtgggcgtgaaaacctcggaaaagtggtaccgtatgggcctccgtacggttgaagaagcaaaggccagtaagagtctgaagctgagcaagatgcagaaggcgggcttcctgtattacgaggatctggtgagcggtgttagtaaagaagaagccgatgccgttacgctcatcgtgaaggaaacggtgcgcactgttagtccggatgcgctggtgaccatcgccggcggtttccgccgtggcaaacctatgggccacgacgttgacctgctgatcacgattccgggccgtcctgaagatgacgagctgctccacaaagtggttgatctgctcaagaagcaaggtctgctgctgtacgaagacatccgtgagagcacgttcgtggaggggcaactgccaaatcctaaacctgacgccctggacaaccatcagaagtgcttcgccattctcaagctgtaccgtccgaaggtggataacagtgcggttgggacgagtaagaaaagtgacatggctgaggttaaggattggaaagcggttcgtgtggatctggtgattgcgccattcgagcagttcgcctatgcgctgctcggttggacgggcagcggccaatttcgtcgcgatactcgtcgctatgcggaggaagagcgcgacatgctgctcgacaaccatcgtctctacgacctgaaaaagggcatctttctgagtgcggacagcgaagaagagattttcggtcatctggacctggattatctggagccgtgggaacgcaacgcg

SEQ ID NO: 4812 - protein, 394 aa, synthetic construct
  REGION 1..394: note = Variant of terminal deoxynucleotidyl transferase
MHHHHHHGGSGHPEGNTPEKEVPSVIARHVSQYACQRKTTLNNYNKKFTDALEIMAENYKFKENLQACLEAKRAASVLKSLPFEVTSMKDIQGLPCITDDVRDVIEEIIEEGESSRVKEILNDERYKAFKQFTSVFGVGVKTSEKWYRMGLRTVEEAKASKSLKLSKMQKAGFLYYEDLVSGVSKEEADAVTLIVKETVRTVSPDALVTIAGGFRRGKPMGHDVDLLITIPGRPEDDELLHKVVDLLKKQGLLLYEDIRESTFVEGQLPNPKPDALDNHQKCFAILKLYRPKVDNSAVGTSKKSDMAEVKDWKAVRVDLVIAPFEQFAYALLGWTGSGQFRRDTRRYAEEERDMLLDNHRLYDLKKGIFLSADSEEEIFGHLDLDYLEPWERNA

SEQ ID NO: 4813 - DNA, 1182 bp, synthetic construct
  misc_feature 1..1182: note = Variant of terminal deoxynucleotidyl transferase
  source 1..1182: mol_type = other DNA
atgcatcaccaccatcatcatgggggttctggtcatccggaaggtaataccccggagaaggaggtgccgagcgttatcgcccgtcatgttagtcagtacgcgtgccagcgcaagaccacgctgaataactacaacaaaaagttcaccgacgcgctggagatcatggccgagaactacaaatttaaagagaacctgcaggcgtgcctggaagccaagcgcgccgcgagtgtcctgaaaagcctgccgttcgaggttaccagcatgaaagacatccaaggtctgccgtgcattaccgacgacgtacgtgacgtgatcgaagagatcatcgaagagggcgagagcagccgtgttaaagaaatcctcaatgacgagcgctacaaggcctttaagcagttcaccagcgtgttcggtgtgggcattaaaacctcggaaaagtggtaccgtatgggcctccgtacggttgaagaagcaaaggccagtaagagtctgaagctgagcaagatgcagaaggcgggcttcctgtattacgaggatctggcgagcggtgttagtaaagaagaagccgatgccgttacgctcatcgtgaaggaaacggtgcgcactgttagtccggatgcgctggtgaccatcgccggcggtttccgccgtggcaaacctatgggccacgacgttgacctgctgatcacgattccgggccgtcctgaagatgacgagctgctccacaaagtggttgatctgctcaagaagcaaggtctgctgctgtacgaagacatccgtgagagcacgttcgtggaggggcaactgccaaatcctaaacctgacgccctggacaaccatcagaagtgcttcgccattctcaagctgtaccgtccgaaggtggataacagtgcggttgggacgagtaagaaaagtgacatggctgaggttaaggattggaaagcggttcgtgtggatctggtgattgcgccattcgagcagttcgcctatgcgctgctcggttggacgggcagcggccaatttcgtcgcgatactcgtcgctatgcggaggaagagcgcgacatgctgctcgacaaccatcgtctctacgacctgaaaaagggcatctttctgagtgcggacagcgaagaagagattttcggtcatctggacctggattatctggagccgtgggaacgcaacgcg

SEQ ID NO: 4814 - protein, 394 aa, synthetic construct
  REGION 1..394: note = Variant of terminal deoxynucleotidyl transferase
MHHHHHHGGSGHPEGNTPEKEVPSVIARHVSQYACQRKTTLNNYNKKFTDALEIMAENYKFKENLQACLEAKRAASVLKSLPFEVTSMKDIQGLPCITDDVRDVIEEIIEEGESSRVKEILNDERYKAFKQFTSVFGVGIKTSEKWYRMGLRTVEEAKASKSLKLSKMQKAGFLYYEDLASGVSKEEADAVTLIVKETVRTVSPDALVTIAGGFRRGKPMGHDVDLLITIPGRPEDDELLHKVVDLLKKQGLLLYEDIRESTFVEGQLPNPKPDALDNHQKCFAILKLYRPKVDNSAVGTSKKSDMAEVKDWKAVRVDLVIAPFEQFAYALLGWTGSGQFRRDTRRYAEEERDMLLDNHRLYDLKKGIFLSADSEEEIFGHLDLDYLEPWERNA

SEQ ID NO: 4815 - DNA, 1182 bp, synthetic construct
  misc_feature 1..1182: note = Variant of terminal deoxynucleotidyl transferase
  source 1..1182: mol_type = other DNA
atgcatcaccaccatcatcatgggggttctggtcatccggaaggtaataccccggagaaggaggtgccgagcgttatcgcccgtcatgttagtcagtacgcgtgccagcgcaagaccacgctgaataactacaacaaaaagttcaccgacgcgctggagatcatggccgagaactacaaatttaaagagaacctgcaggcgtgcctggaagccaagcgcgccgcgagtgtcctgaaaagcctgccgttcgaggttaccagcatgaaagacatccaaggtctgccgtgcattaccgacgacgtacgtgacgtgatcgaagagatcatcgaagagggcgagagcagccgtgttaaagaaatcctcaatgacgagcgctacaaggcctttaagcagttcaccagcgtgttcggtgtgggcgtgaaaacctcggaaaagtggtaccgtatgggcctccgtacggttgaagaagcaaaggccagtaagagtctgaagctgagcaagatgcagaaggcgggcttcctgtattacgaggatctggcgagcggtgttagtaaagaagaagccgatgccgttacgctcatcgtgaaggaaacggtgcgcactgttagtccggatgcgctggtgaccatcgccggcggtttccgccgtggcaaacctatgggccacgacgttgacctgctgatcacgattccgggccgtcctgaagatgacgagctgctccacaaagtggttgatctgctcaagaagcaaggtctgctgctgtacgaagacatccgtgagagcacgttcgtggaggggcaactgccaaatcctaaacctgacgccctggacaaccatcagaagtgcttcgccattctcaagctgtaccgtccgaaggtggataacagtgcggttgggacgagtaagaaaagtgacatggctgaggttaaggattggaaagcggttcgtgtggatctggtgattgcgccattcgagcagttcgcctatgcgctgctcggttggacgggcagcggccaatttcgtcgcgatactcgtcgctatgcggagtatgagcgcgacatgctgctcgacaaccatcgtctctacgacctgaaaaagggcatctttctgagtgcggacagcgaagaagagattttcggtcatctggacctggattatctggagccgtgggaacgcaacgcg

SEQ ID NO: 4816 - protein, 394 aa, synthetic construct
  REGION 1..394: note = Variant of terminal deoxynucleotidyl transferase
MHHHHHHGGSGHPEGNTPEKEVPSVIARHVSQYACQRKTTLNNYNKKFTDALEIMAENYKFKENLQACLEAKRAASVLKSLPFEVTSMKDIQGLPCITDDVRDVIEEIIEEGESSRVKEILNDERYKAFKQFTSVFGVGVKTSEKWYRMGLRTVEEAKASKSLKLSKMQKAGFLYYEDLASGVSKEEADAVTLIVKETVRTVSPDALVTIAGGFRRGKPMGHDVDLLITIPGRPEDDELLHKVVDLLKKQGLLLYEDIRESTFVEGQLPNPKPDALDNHQKCFAILKLYRPKVDNSAVGTSKKSDMAEVKDWKAVRVDLVIAPFEQFAYALLGWTGSGQFRRDTRRYAEYERDMLLDNHRLYDLKKGIFLSADSEEEIFGHLDLDYLEPWERNA

SEQ ID NO: 4817 - DNA, 1182 bp, synthetic construct
  misc_feature 1..1182: note = Variant of terminal deoxynucleotidyl transferase
  source 1..1182: mol_type = other DNA
atgcatcaccaccatcatcatgggggttctggtcatccggaaggtaataccccggagaaggaggtgccgagcgttatcgcccgtcatgttagtcagtacgcgtgccagcgcaagaccacgctgaataactacaacaaaaagttcaccgacgcgctggagatcatggccgagaactacaaatttaaagagaacctgcaggcgtgcctggaagccaagcgcgccgcgagtgtcctgaaaagcctgccgttcgaggttaccagcatgaaagacatccaaggtctgccgtgcattaccgacgacgtacgtgacgtgatcgaagagatcatcgaagagggcgagagcagccgtgttaaagaaatcctcaatgacgagcgctacaaggcctttaagcagttcaccagcgtgttcggtgtgggcgtgcgtacctcggaaaagtggtaccgtatgggcctccgtacggttgaagaagcaaaggccagtaagagtctgaagctgagcaagatgcagaaggcgggcttcctgtattacgaggatctggcgagcggtgttagtaaagaagaagccgatgccgttacgctcatcgtgaaggaaacggtgcgcactgttagtccggatgcgctggtgaccatcgccggcggtttccgccgtggcaaacctatgggccacgacgttgacctgctgatcacgattccgggccgtcctgaagatgacgagctgctccacaaagtggttgatctgctcaagaagcaaggtctgctgctgtacgaagacatccgtgagagcacgttcgtggaggggcaactgccaaatcctaaacctgacgccctggacaaccatcagaagtgcttcgccattctcaagctgtaccgtccgaaggtggataacagtgcggttgggacgagtaagaaaagtgacatggctgaggttaaggattggaaagcggttcgtgtggatctggtgattgcgccattcgagcagttcgcctatgcgctgctcggttggacgggcagcggccaatttcgtcgcgatactcgtcgctatgcggaggaagagcgcgacatgctgctcgacaaccatcgtctctacgacctgaaaaagggcatctttctgagtgcggacagcgaagaagagattttcggtcatctggacctggattatctggagccgtgggaacgcaacgcg

SEQ ID NO: 4818 - protein, 394 aa, synthetic construct
  REGION 1..394: note = Variant of terminal deoxynucleotidyl transferase
MHHHHHHGGSGHPEGNTPEKEVPSVIARHVSQYACQRKTTLNNYNKKFTDALEIMAENYKFKENLQACLEAKRAASVLKSLPFEVTSMKDIQGLPCITDDVRDVIEEIIEEGESSRVKEILNDERYKAFKQFTSVFGVGVRTSEKWYRMGLRTVEEAKASKSLKLSKMQKAGFLYYEDLASGVSKEEADAVTLIVKETVRTVSPDALVTIAGGFRRGKPMGHDVDLLITIPGRPEDDELLHKVVDLLKKQGLLLYEDIRESTFVEGQLPNPKPDALDNHQKCFAILKLYRPKVDNSAVGTSKKSDMAEVKDWKAVRVDLVIAPFEQFAYALLGWTGSGQFRRDTRRYAEEERDMLLDNHRLYDLKKGIFLSADSEEEIFGHLDLDYLEPWERNA

SEQ ID NO: 4819 - DNA, 1182 bp, synthetic construct
  misc_feature 1..1182: note = Variant of terminal deoxynucleotidyl transferase
  source 1..1182: mol_type = other DNA
atgcatcaccaccatcatcatgggggttctggtcatccggaaggtaataccccggagaaggaggtgccgagcgttatcgcccgtcatgttagtcagtacgcgtgccagcgcaagaccacgctgaataactacaacaaaaagatcaccgacgcgctggagatcatggccgagaactacaaatttaaagagaacctgcaggcgtgcctggaagccaagcgcgccgcgagtgtcctgaaaagcctgccgttcgaggttaccagcatgaaagacatccaaggtctgccgtgcattaccgacgacgtacgtgacgtgatcgaagagatcatcgaagagggcgagagcagccgtgttaaagaaatcctcaatgacgagcgctacaaggcctttaagcagttcaccagcgtgttcggtgtgggcgtgaaaacctcggaaaagtggtaccgtatgggcctccgtacggttgaagaagcaaaggccagtaagagtctgaagctgagcaagatgcagaaggcgggcttcctgtattacgaggatctggcgagcggtgttagtaaagaagaagccgatgccgttacgctcatcgtgaaggaaacggtgcgcactgttagtccggatgcgctggtgaccatcgccggcggtttccgccgtggcaaacctatgggccacgacgttgacctgctgatcacgattccgggccgtcctgaagatgacgagctgctccacaaagtggttgatctgctcaagaagcaaggtctgctgctgtacgaagacatccgtgagagcacgttcgtggaggggcaactgccaaatcctaaacctgacgccctggacaaccatcagaagtgcttcgccattctcaagctgtaccgtccgaaggtggataacagtgcggttgggacgagtaagaaaagtgacatggctgaggttaaggattggaaagcggttcgtgtggatctggtgattgcgccattcgagcagttcgcctatgcgctgctcggttggacgggcagcggccaatttcgtcgcgatactcgtcgctatgcggaggaagagcgcgacatgctgctcgacaaccatcgtctctacgacctgaaaaagggcatctttctgagtgcggacagcgaagaagagattttcggtcatctggacctggattatctggagccgtgggaacgcaacgcg

SEQ ID NO: 4820 - protein, 394 aa, synthetic construct
  REGION 1..394: note = Variant of terminal deoxynucleotidyl transferase
MHHHHHHGGSGHPEGNTPEKEVPSVIARHVSQYACQRKTTLNNYNKKITDALEIMAENYKFKENLQACLEAKRAASVLKSLPFEVTSMKDIQGLPCITDDVRDVIEEIIEEGESSRVKEILNDERYKAFKQFTSVFGVGVKTSEKWYRMGLRTVEEAKASKSLKLSKMQKAGFLYYEDLASGVSKEEADAVTLIVKETVRTVSPDALVTIAGGFRRGKPMGHDVDLLITIPGRPEDDELLHKVVDLLKKQGLLLYEDIRESTFVEGQLPNPKPDALDNHQKCFAILKLYRPKVDNSAVGTSKKSDMAEVKDWKAVRVDLVIAPFEQFAYALLGWTGSGQFRRDTRRYAEEERDMLLDNHRLYDLKKGIFLSADSEEEIFGHLDLDYLEPWERNA

SEQ ID NO: 4821 - DNA, 1182 bp, synthetic construct
  misc_feature 1..1182: note = Variant of terminal deoxynucleotidyl transferase
  source 1..1182: mol_type = other DNA
atgcatcaccaccatcatcatgggggttctggtcatccggaaggtaataccccggagaaggaggtgccgagcgttatcgcccgtcatgttagtcagtacgcgtgccagcgcaagaccacgctgaataactacaacaaaaagttcaccgacgcgctggagatcatggccgagaactacaaatttaaagagaacctgcaggcgtgcctggaagccaagcgcgccgcgagtgtcctgaaaagcctgccattcgaggttaccagcatgaaagacatccaaggtctgccgtgcattaccgacgacgtacgtgacgtgatcgaagagatcatcgaagagggcgagagcagccgtgttaaagaaatcctcaatgacgagcgctacaaggcctttaagcagttcaccagcgtgttcggtgtgggcgtgaaaacctcggaaaagtggtaccgtatgggcctccgtacggttgaagaagcaaaggccagtaagagtctgaagctgagcaagatgcagaaggcgggcttcctgtattacgaggatctggcgagcggtgttagtaaagaagaagccgatgccgttacgctcatcgtgaaggaaacggtgcgcactgttagtccggatgcgctggtgaccatcgccggcggtttccgccgtggcaaacctatgggccacgacgttgacctgctgatcacgattccgggccgtcctgaagatgacgagctgctccacaaagtggttgatctgctcaagaagcaaggtctgctgctgtacgaagacatccgtgagagcacgttcgtggaggggcaactgccaaatcctaaacctgacgccctggacaaccatcagaagtgcttcgccattctcaagctgtaccgtccgaaggtggataacagtgcggttgggacgagtaagaaaagtgacatggctgaggttaaggattggaaagcggttcgtgtggatctggtgattgcgccattcgagcagttcgcctatgcgctgctcggttggacgggcagcggccaatttcgtcgcgatactcgtcgctatgcggaggaagagcgcgacatgctgctcgacaaccatggtctctacgacctgaaaaagggcatctttctgagtgcggacagcgaagaagagattttcggtcatctggacctggattatctggagccgtgggaacgcaacgcg

SEQ ID NO: 4822 - protein, 394 aa, synthetic construct
  REGION 1..394: note = Variant of terminal deoxynucleotidyl transferase
MHHHHHHGGSGHPEGNTPEKEVPSVIARHVSQYACQRKTTLNNYNKKFTDALEIMAENYKFKENLQACLEAKRAASVLKSLPFEVTSMKDIQGLPCITDDVRDVIEEIIEEGESSRVKEILNDERYKAFKQFTSVFGVGVKTSEKWYRMGLRTVEEAKASKSLKLSKMQKAGFLYYEDLASGVSKEEADAVTLIVKETVRTVSPDALVTIAGGFRRGKPMGHDVDLLITIPGRPEDDELLHKVVDLLKKQGLLLYEDIRESTFVEGQLPNPKPDALDNHQKCFAILKLYRPKVDNSAVGTSKKSDMAEVKDWKAVRVDLVIAPFEQFAYALLGWTGSGQFRRDTRRYAEEERDMLLDNHGLYDLKKGIFLSADSEEEIFGHLDLDYLEPWERNA

SEQ ID NO: 4823 - DNA, 1182 bp, synthetic construct
  misc_feature 1..1182: note = Variant of terminal deoxynucleotidyl transferase
  source 1..1182: mol_type = other DNA
atgcatcaccaccatcatcatgggggttctggtcatccggaaggtaataccccggagaaggaggtgccgagcgttatcgcccgtcatgttagtcagtacgcgtgccagcgcaagaccacgctgaataactacaacaaaaagttcaccgacgcgctggagatcatggccgagaactacaaatttaaagagaacctgcaggcgtgcctggaagccaagcgcgccgcgagtgtcctgaaaagcctgccgttcgaggttaccagcatgaaagacatccaaggtctgccgtgcattaccgacgacgtacgtgacgtgatcgaagagatcatcgaagagggcgagagcagccgtgttaaagaaatcctcaatgacgagcgctacaaggcctttaagcagttcaccagcgtgttcggtgtgggcgtgaaaacctcggaaaagtggtaccgtatgggcctccgtacggttgaagaagcaaaggccagtaagagtctgaagctgagcaagatgcagaaggcgggcttcctgtattacgaggatctggcgagcggtgttagtaaagaagaagccgatgccgttacgctcatcgtgaaggaaacggtgcgcactgttagtccggatgcgctggtgaccatcgccggcggtttccgccgtggcaaacctcggggccacgacgttgacctgctgatcacgattccgggccgtcctgaagatgacgagctgctccacaaagtggttgatctgctcaagaagcaaggtctgctgctgtacgaagacatccgtgagagcacgttcgtggaggggcaactgccaaatcctaaacctgacgccctggacaaccatcagaagtgcttcgccattctcaagctgtaccgtccgaaggtggataacagtgcggttgggacgagtaagaaaagtgacatggctgaggttaaggattggaaagcggttcgtgtggatctggtgattgcgccattcgagcagttcgcctatgcgctgctcggttggacgggcagcggccaatttcgtcgcgatactcgtcgctatgcggaggaagagcgcgacatgctgctcgacaaccatcgtctctacgacctgaaaaagggcatctttctgagtgcggacagcgaagaagagattttcggtcatctggacctggattatctggagccgtgggaacgcaacgcg

SEQ ID NO: 4824 - protein, 394 aa, synthetic construct
  REGION 1..394: note = Variant of terminal deoxynucleotidyl transferase
MHHHHHHGGSGHPEGNTPEKEVPSVIARHVSQYACQRKTTLNNYNKKFTDALEIMAENYKFKENLQACLEAKRAASVLKSLPFEVTSMKDIQGLPCITDDVRDVIEEIIEEGESSRVKEILNDERYKAFKQFTSVFGVGVKTSEKWYRMGLRTVEEAKASKSLKLSKMQKAGFLYYEDLASGVSKEEADAVTLIVKETVRTVSPDALVTIAGGFRRGKPRGHDVDLLITIPGRPEDDELLHKVVDLLKKQGLLLYEDIRESTFVEGQLPNPKPDALDNHQKCFAILKLYRPKVDNSAVGTSKKSDMAEVKDWKAVRVDLVIAPFEQFAYALLGWTGSGQFRRDTRRYAEEERDMLLDNHRLYDLKKGIFLSADSEEEIFGHLDLDYLEPWERNA

SEQ ID NO: 4825 - DNA, 1182 bp, synthetic construct
  misc_feature 1..1182: note = Variant of terminal deoxynucleotidyl transferase
  source 1..1182: mol_type = other DNA
atgcatcaccaccatcatcatgggggttctggtcatccggaaggtaataccccggagaaggaggtgccgagcgttatcgcccgtcatgttagtcagtacgcgtgccagcgcaagaccacgctgaataactacaacaaaaagttcaccgacgcgctggagatcatggccgagaactacaaatttaaagagaacctgcaggcgtgcctggaagccaagcgcgccgcgagtgtcctgaaaagcctgccgttcgaggttaccagcatgaaagacatccaaggtctgccgtgcattaccgacgacgtacgtgacgtgatcgaagagatcatcgaagagggcgagagcagccgtgttaaagaaatcctcaatgacgagcgctacaaggcctttaagcagttcaccagcgtgttcggtgtgggcgtgaaaacctcggaaaagtggtaccgtatgggcctccgtacggttgaagaagcaaaggccagtaagagtctgaagctgagcaagatgcagaaggcgggcttcctgtattacgaggatctggcgagcggtgttagtaaagaagaagccgatgccgttacgctcatcgtgaaggaaacggtgcgcactgttagtccggatgcgctggtgaccatcgccggcggtttccgccgtggcaaacctatgggccacgacgttgacctgctgatcacgattccgggccgtcctgaagatgacgagctgctccacaaagtgttggatctgctcaagaagcaaggtctgctgctgtacgaagacatccgtgagagcacgttcgtggaggggcaactgccaaatcctaaacctgacgccctggacaaccatcagaagtgcttcgccattctcaagctgtaccgtccgaaggtggataacagtgcggttgggacgagtaagaaaagtgacatggctgaggttaaggattggaaagcggttcgtgtggatctggtgattgcgccattcgagcagttcgcctatgcgctgctcggttggacgggcagcggccaatttcgtcgcgatactcgtcgctatgcggaggaagagcgcgacatgctgctcgacaaccatcgtctctacgacctgaaaaagggcatctttctgagtgcggacagcgaagaagagattttcggtcatctggacctggattatctggagccgtgggaacgcaacgcg

SEQ ID NO: 4826 - protein, 394 aa, synthetic construct
  REGION 1..394: note = Variant of terminal deoxynucleotidyl transferase
MHHHHHHGGSGHPEGNTPEKEVPSVIARHVSQYACQRKTTLNNYNKKFTDALEIMAENYKFKENLQACLEAKRAASVLKSLPFEVTSMKDIQGLPCITDDVRDVIEEIIEEGESSRVKEILNDERYKAFKQFTSVFGVGVKTSEKWYRMGLRTVEEAKASKSLKLSKMQKAGFLYYEDLASGVSKEEADAVTLIVKETVRTVSPDALVTIAGGFRRGKPMGHDVDLLITIPGRPEDDELLHKVLDLLKKQGLLLYEDIRESTFVEGQLPNPKPDALDNHQKCFAILKLYRPKVDNSAVGTSKKSDMAEVKDWKAVRVDLVIAPFEQFAYALLGWTGSGQFRRDTRRYAEEERDMLLDNHRLYDLKKGIFLSADSEEEIFGHLDLDYLEPWERNA

SEQ ID NO: 4827 - DNA, 1182 bp, synthetic construct
  misc_feature 1..1182: note = Variant of terminal deoxynucleotidyl transferase
  source 1..1182: mol_type = other DNA
atgcatcaccaccatcatcatgggggttctggtcatccggaaggtaataccccggagaaggaggtgccgagcgttatcgcccgtcatgttagtcagtacgcgtgccagcgcaagaccacgctgaataactacaacaaaaagttcaccgacgcgctggagatcatggccgagaactacaaatttaaagagaacctgcaggcgtgcctggaagccaagcgcgccattagtgtcctgaaaagcctgccgttcgaggttaccagcatgaaagacatccaaggtctgccgtgcattaccgacgacgtacgtgacgtgatcgaagagatcatcgaagagggcgagagcagccgtgttaaagaaatcctcaatgacgagcgctacaaggcctttaagcagttcaccagcgtgttcggtgtgggcgtgaaaacctcggaaaagtggtaccgtatgggcctccgtacggttgaagaagcaaaggccagtaagagtctgaagctgagcaagatgcagaaggcgggcttcctgtattacgaggatctggcgagcggtgttagtaaagaagaagccgatgccgttacgctcatcgtgaaggaaacggtgcgcactgttagtccggatgcgctggtgaccatcgccggcggtttccgccgtggcaaacctatgggccacgacgttgacctgctgatcacgattccgggccgtcctgaagatgacgagctgctccacaaagtggttgatctgctcaagaagcaaggtctgctgctgtacgaagacatccgtgagagcacgttcgtggaggggcaactgccaaatcctaaacctgacgccctggacaaccatcagaagtgcttcgccattctcaagctgtaccgtccgaaggtggataacagtgcggttgggacgagtaagaaaagtgacatggctgaggttaaggattggaaagcggttcgtgtggatctggtgattgcgccattcgagcagttcgcctatgcgctgctcggttggacgggcagcggccaatttcgtcgcgatactcgtcgctatgcggaggaagagcgcgacatgctgctcgacaaccatcgtctctacgacctgaaaaagggcatctttctgagtgcggacagcgaagaagagattttcggtcatctggacctggattatctggagccgtgggaacgcaacgcg

SEQ ID NO: 4828 - protein, 394 aa, synthetic construct
  REGION 1..394: note = Variant of terminal deoxynucleotidyl transferase
MHHHHHHGGSGHPEGNTPEKEVPSVIARHVSQYACQRKTTLNNYNKKFTDALEIMAENYKFKENLQACLEAKRAISVLKSLPFEVTSMKDIQGLPCITDDVRDVIEEIIEEGESSRVKEILNDERYKAFKQFTSVFGVGVKTSEKWYRMGLRTVEEAKASKSLKLSKMQKAGFLYYEDLASGVSKEEADAVTLIVKETVRTVSPDALVTIAGGFRRGKPMGHDVDLLITIPGRPEDDELLHKVVDLLKKQGLLLYEDIRESTFVEGQLPNPKPDALDNHQKCFAILKLYRPKVDNSAVGTSKKSDMAEVKDWKAVRVDLVIAPFEQFAYALLGWTGSGQFRRDTRRYAEEERDMLLDNHRLYDLKKGIFLSADSEEEIFGHLDLDYLEPWERNA

SEQ ID NO: 4829 - DNA, 1182 bp, synthetic construct
  misc_feature 1..1182: note = Variant of terminal deoxynucleotidyl transferase
  source 1..1182: mol_type = other DNA
atgcatcaccaccatcatcatgggggttctggtcatccggaaggtaataccccggagaaggaggtgccgagcgttatcgcccgtcatgttagtcagtacgcgtgccagcgcaagaccacgctgaataactacaacaaaaagttcaccgacgcgctggagatcatggccgagaactacaaatttaaagagaacctgcaggcgtgcgccgaagccaagcgcgccgcgagtgtcctgaaaagcctgccgttcgaggttaccagcatgaaagacatccaaggtctgccgtgcattaccgacgacgtacgtgacgtgatcgaagagatcatcgaagagggcgagagcagccgtgttaaagaaatcctcaatgacgagcgctacaaggcctttaagcagttcaccagcgtgttcggtgtgggcgtgaaaacctcggaaaagtggtaccgtatgggcctccgtacggttgaagaagcaaaggccagtaagagtctgaagctgagcaagatgcagaaggcgggcttcctgtattacgaggatctggcgagcggtgttagtaaagaagaagccgatgccgttacgctcatcgtgaaggaaacggtgcgcactgttagtccggatgcgctggtgaccatcgccggcggtttccgccgtggcaaacctatgggccacgacgttgacctgctgatcacgattccgggccgtcctgaagatgacgagctgctccacaaagtggttgatctgctcaagaagcaaggtctgctgctgtacgaagacatccgtgagagcacgttcgtggaggggcaactgccaaatcctaaacctgacgccctggacaaccatcagaagtgcttcgccattctcaagctgtaccgtccgaaggtggataacagtgcggttgggacgagtaagaaaagtgacatggctgaggttaaggattggaaagcggttcgtgtggatctggtgattgcgccattcgagcagttcgcctatgcgctgctcggttggacgggcagcggccaatttcgtcgcgatactcgtcgctatgcggaggaagagcgcgacatgctgctcgacaaccatcgtctctacgacctgaaaaagggcatctttctgagtgcggacagcgaagaagagattttcggtcatctggacctggattatctggagccgtgggaacgcaacgcg

SEQ ID NO: 4830 - protein, 394 aa, synthetic construct
  REGION 1..394: note = Variant of terminal deoxynucleotidyl transferase
MHHHHHHGGSGHPEGNTPEKEVPSVIARHVSQYACQRKTTLNNYNKKFTDALEIMAENYKFKENLQACAEAKRAASVLKSLPFEVTSMKDIQGLPCITDDVRDVIEEIIEEGESSRVKEILNDERYKAFKQFTSVFGVGVKTSEKWYRMGLRTVEEAKASKSLKLSKMQKAGFLYYEDLASGVSKEEADAVTLIVKETVRTVSPDALVTIAGGFRRGKPMGHDVDLLITIPGRPEDDELLHKVVDLLKKQGLLLYEDIRESTFVEGQLPNPKPDALDNHQKCFAILKLYRPKVDNSAVGTSKKSDMAEVKDWKAVRVDLVIAPFEQFAYALLGWTGSGQFRRDTRRYAEEERDMLLDNHRLYDLKKGIFLSADSEEEIFGHLDLDYLEPWERNA

SEQ ID NO: 4831 - DNA, 1182 bp, synthetic construct
  misc_feature 1..1182: note = Variant of terminal deoxynucleotidyl transferase
  source 1..1182: mol_type = other DNA
atgcatcaccaccatcatcatgggggttctggtcatccggaaggtaataccccggagaaggaggtgccgagcgttatcgcccgtcatgttagtcagtacgcgtgccagcgcaagaccacgctgaataactacaacaaaaagttcaccgacgcgctggagatcatggccgagaactacaaatttaaagagaacaggcaggcgtgcctggaagccaagcgcgccgcgagtgtcctgaaaagcctgccgttcgaggttaccagcatgaaagacatccaaggtctgccgtgcattaccgacgacgtacgtgacgtgatcgaagagatcatcgaagagggcgagagcagccgtgttaaagaaatcctcaatgacgagcgctacaaggcctttaagcagttcaccagcgtgttcggtgtgggcgtgaaaacctcggaaaagtggtaccgtatgggcctccgtacggttgaagaagcaaaggccagtaagagtctgaagctgagcaagatgcagaaggcgggcttcctgtattacgaggatctggcgagcggtgttagtaaagaagaagccgatgccgttacgctcatcgtgaaggaaacggtgcgcactgttagtccggatgcgctggtgaccatcgccggcggtttccgccgtggcaaacctatgggccacgacgttgacctgctgatcacgattccgggccgtcctgaagatgacgagctgctccacaaagtggttgatctgctcaagaagcaaggtctgctgctgtacgaagacatccgtgagagcacgttcgtggaggggcaactgccaaatcctaaacctgacgccctggacaaccatcagaagtgcttcgccattctcaagctgtaccgtccgaaggtggataacagtgcggttgggacgagtaagaaaagtgacatggctgaggttaaggattggaaagcggttcgtgtggatctggtgattgcgccattcgagcagttcgcctatgcgctgctcggttggacgggcagcggccaatttcgtcgcgatactcgtcgctatgcggaggaagagcgcgacatgctgctcgacaaccatcgtctctacgacctgaaaaagggcatctttctgagtgcggacagcgaagaagagattttcggtcatctggacctggattatctggagccgtgggaacgcaacgcg

SEQ ID NO: 4832 - protein, 394 aa, synthetic construct
  REGION 1..394: note = Variant of terminal deoxynucleotidyl transferase
MHHHHHHGGSGHPEGNTPEKEVPSVIARHVSQYACQRKTTLNNYNKKFTDALEIMAENYKFKENRQACLEAKRAASVLKSLPFEVTSMKDIQGLPCITDDVRDVIEEIIEEGESSRVKEILNDERYKAFKQFTSVFGVGVKTSEKWYRMGLRTVEEAKASKSLKLSKMQKAGFLYYEDLASGVSKEEADAVTLIVKETVRTVSPDALVTIAGGFRRGKPMGHDVDLLITIPGRPEDDELLHKVVDLLKKQGLLLYEDIRESTFVEGQLPNPKPDALDNHQKCFAILKLYRPKVDNSAVGTSKKSDMAEVKDWKAVRVDLVIAPFEQFAYALLGWTGSGQFRRDTRRYAEEERDMLLDNHRLYDLKKGIFLSADSEEEIFGHLDLDYLEPWERNA

SEQ ID NO: 4833 - DNA, 1182 bp, synthetic construct
  misc_feature 1..1182: note = Variant of terminal deoxynucleotidyl transferase
  source 1..1182: mol_type = other DNA
atgcatcaccaccatcatcatgggggttctggtcatccggaaggtaataccccggagaaggaggtgccgagcgttatcgcccgtcatgttagtcagtacgcgtgccagcgcaagaccacgctgaataactacaacaaaaagttcaccgacgcgctggagatcatggccgagaactacaaatttaaagagaacctgcaggcgtgcctggaagccaagcgcgccgcgagtgtcctgaaaagcctgccgttcgaggttaccagcatgaaagacatccaaggtctgccgtgcattaccgacgacgtacgtgacgtgatcgaagagatcatcgaagagggcgagagcagccgtgttaaagaaatcctcaatgacgagcgctacaaggcctttaagcagttcaccagcgtgttcggtgtgggcgtgaaaacctcggaaaagtggtaccgtatgggcctccgtacggttgaagaagcaaaggccagtaagagtctgaagctgagcaagatgcagaaggcgggcttcctgtattacgaggatctggcgagcggtgttagtaaagaagaagccgatgccgttacgctcatcgtgaaggaaacggtgcgcactgttagtccggatgcgctggtgaccatcgccggcggtttccgccgtggcaaacctatgggccacgacgttgacctgctgatcacgattccgggccgtcctgaagatgacgagctgctccacaaagtggttgatctgctcaagaagcaaggtctgctgctgtacgaagacatccgtgagagcacgttcgtggaggggcaactgccaaatcctaaacctgacgccctggacaaccatcagaagtgcttcgccattctcaagctgtaccgtccgaaggtggataacagtgcggttgggacgagtaagaaaagtgacatggctgaggttaaggattggaaagcggttcgtgtggatctggtgattgcgccattcgagcagttcgcctatgcgctgctcggttggacgggcagcggccaatttcgtcgcgatactcgtcgctatgcggagagggagcgcgacatgctgctcgacaaccatcgtctctacgacctgaaaaagggcatctttctgagtgcggacagcgaagaagagattttcggtcatctggacctggattatctggagccgtgggaacgcaacgcg

SEQ ID NO: 4834 - protein, 394 aa, synthetic construct
  REGION 1..394: note = Variant of terminal deoxynucleotidyl transferase
MHHHHHHGGSGHPEGNTPEKEVPSVIARHVSQYACQRKTTLNNYNKKFTDALEIMAENYKFKENLQACLEAKRAASVLKSLPFEVTSMKDIQGLPCITDDVRDVIEEIIEEGESSRVKEILNDERYKAFKQFTSVFGVGVKTSEKWYRMGLRTVEEAKASKSLKLSKMQKAGFLYYEDLASGVSKEEADAVTLIVKETVRTVSPDALVTIAGGFRRGKPMGHDVDLLITIPGRPEDDELLHKVVDLLKKQGLLLYEDIRESTFVEGQLPNPKPDALDNHQKCFAILKLYRPKVDNSAVGTSKKSDMAEVKDWKAVRVDLVIAPFEQFAYALLGWTGSGQFRRDTRRYAERERDMLLDNHRLYDLKKGIFLSADSEEEIFGHLDLDYLEPWERNA

SEQ ID NO: 4835 - DNA, 1182 bp, synthetic construct
  misc_feature 1..1182: note = Variant of terminal deoxynucleotidyl transferase
  source 1..1182: mol_type = other DNA
atgcatcaccaccatcatcatgggggttctggtcatccggaaggtaataccccggagaaggaggtgccgagcgttatcgcccgtcatgttagtcagtacgcgtgccagcgcaagaccacgctgaataactacaacaaaaagttcaccgacgcgctggagatcatggccgagaactacaaatttaaaggtaacctgcaggcgtgcctggaagccaagcgcgccgcgagtgtcctgaaaagcctgccgttcgaggttaccagcatgaaagacatccaaggtctgccgtgcattaccgacgacgtacgtgacgtgatcgaagagatcatcgaagagggcgagagcagccgtgttaaagaaatcctcaatgacgagcgctacaaggcctttaagcagttcaccagcgtgttcggtgtgggcgtgaaaacctcggaaaagtggtaccgtatgggcctccgtacggttgaagaagcaaaggccagtaagagtctgaagctgagcaagatgcagaaggcgggcttcctgtattacgaggatctggcgagcggtgttagtaaagaagaagccgatgccgttacgctcatcgtgaaggaaacggtgcgcactgttagtccggatgcgctggtgaccatcgccggcggtttccgccgtggcaaacctatgggccacgacgttgacctgctgatcacgattccgggccgtcctgaagatgacgagctgctccacaaagtggttgatctgctcaagaagcaaggtctgctgctgtacgaagacatccgtgagagcacgttcgtggaggggcaactgccaaatcctaaacctgacgccctggacaaccatcagaagtgcttcgccattctcaagctgtaccgtccgaaggtggataacagtgcggttgggacgagtaagaaaagtgacatggctgaggttaaggattggaaagcggttcgtgtggatctggtgattgcgccattcgagcagttcgcctatgcgctgctcggttggacgggcagcggccaatttcgtcgcgatactcgtcgctatgcggaggaagagcgcgacatgctgctcgacaaccatcgtctctacgacctgaaaaagggcatctttctgagtgcggacagcgaagaagagattttcggtcatctggacctggattatctggagccgtgggaacgcaacgcg

SEQ ID NO: 4836 - protein, 394 aa, synthetic construct
  REGION 1..394: note = Variant of terminal deoxynucleotidyl transferase
MHHHHHHGGSGHPEGNTPEKEVPSVIARHVSQYACQRKTTLNNYNKKFTDALEIMAENYKFKGNLQACLEAKRAASVLKSLPFEVTSMKDIQGLPCITDDVRDVIEEIIEEGESSRVKEILNDERYKAFKQFTSVFGVGVKTSEKWYRMGLRTVEEAKASKSLKLSKMQKAGFLYYEDLASGVSKEEADAVTLIVKETVRTVSPDALVTIAGGFRRGKPMGHDVDLLITIPGRPEDDELLHKVVDLLKKQGLLLYEDIRESTFVEGQLPNPKPDALDNHQKCFAILKLYRPKVDNSAVGTSKKSDMAEVKDWKAVRVDLVIAPFEQFAYALLGWTGSGQFRRDTRRYAEEERDMLLDNHRLYDLKKGIFLSADSEEEIFGHLDLDYLEPWERNA

SEQ ID NO: 4837 - DNA, 1182 bp, synthetic construct
  misc_feature 1..1182: note = Variant of terminal deoxynucleotidyl transferase
  source 1..1182: mol_type = other DNA
atgcatcaccaccatcatcatgggggttctggtcatccggaaggtaataccccggagaaggaggtgccgagcgttatcgcccgtcatgttagtcagtacgcgtgccagcgcaagaccacgctgaataactacaacaaaaagttcaccgacgcgctggagatcatggccgagaactacaaatttaaagagaacctgcaggcgtgcctggaagccaagcgcgccgcgagtgtcctgaaaagcctgccgttcgaggttaccagcatgaaagacatccaaggtctgccgtgcattaccgacgacgtacgtgacgtgatcgaagagatcatcgaagagggcgagagcagccgtgttaaagaaatcctcaatgacgagcgctacaaggcctttaagcagttcaccagcgtgttcggtgtgggcgtgaaaacctcggaaaagtggtaccgtatgggcctccgtacggttgaagaagcaaaggccagtaagagtctgaagctgagcaagatgcagaaggcgggcttcctgtattacgaggatctggcgagcggtgttagtaaagaagaagccgatgccgttacgctcatcgtgaaggaaacggtgcgcactgttagtccggatgcgctggtgaccatcgccggcggtttccgccgtggcaaacctatgggccacgacgttgacctgctgatcacgattccgggccgtcctgaagatgacgagctgctccacaaagtggttgatctgctcaagaagcaaggtctgctgctgtacgaagacatccgtgagagcacgttcgtggaggggcaactgccaaatcctaaacctgacgccctggacaaccatcagaagtgcttcgccattctcaagctgtaccgtccgaaggtggataacagtgcggttgggacgagtaagaaaagtgacatggctgaggttaaggattggaaagcggttcgtgtggatctggtgattgcgccattcgagcagttcgcctatgcgctgctcggttggacgggcagcggccaatttcgtcgcgatactcgtcgctatgcggttgaagagcgcgacatgctgctcgacaaccatcgtctctacgacctgaaaaagggcatctttctgagtgcggacagcgaagaagagattttcggtcatctggacctggattatctggagccgtgggaacgcaacgcg

SEQ ID NO: 4838 - protein, 394 aa, synthetic construct
  REGION 1..394: note = Variant of terminal deoxynucleotidyl transferase
MHHHHHHGGSGHPEGNTPEKEVPSVIARHVSQYACQRKTTLNNYNKKFTDALEIMAENYKFKENLQACLEAKRAASVLKSLPFEVTSMKDIQGLPCITDDVRDVIEEIIEEGESSRVKEILNDERYKAFKQFTSVFGVGVKTSEKWYRMGLRTVEEAKASKSLKLSKMQKAGFLYYEDLASGVSKEEADAVTLIVKETVRTVSPDALVTIAGGFRRGKPMGHDVDLLITIPGRPEDDELLHKVVDLLKKQGLLLYEDIRESTFVEGQLPNPKPDALDNHQKCFAILKLYRPKVDNSAVGTSKKSDMAEVKDWKAVRVDLVIAPFEQFAYALLGWTGSGQFRRDTRRYAVEERDMLLDNHRLYDLKKGIFLSADSEEEIFGHLDLDYLEPWERNA

SEQ ID NO: 4839 - DNA, 1182 bp, synthetic construct
  misc_feature 1..1182: note = Variant of terminal deoxynucleotidyl transferase
  source 1..1182: mol_type = other DNA
atgcatcaccaccatcatcatgggggttctggtcatccggaaggtaataccccggagaaggaggtgccgagcgttatcgcccgtcatgttagtcagtacgcgtgccagcgcaagaccacgctgaataactacaacaaaaagttcaccgacgcgctggagatcatggccgagaactacaaatttaaagagaacctgcaggcgtgcctggaagccaagcgcgccgcgagtgtcctgaaaagcctgccgttcgaggttaccagcatgaaagacatccaaggtctgccgtgcattaccgacgacgtacgtgacgtgatcgaagagatcatcgaagagggcgagagcagccgtgttaaagaaatcctcaatgacgagcgctacaaggcctttaagcagttcaccagcgtgttcggtgtgggcgtgaaaacctcggaaaagtggtaccgtatgggcctccgtacggttgaagaagcaaaggccagtaagagtctgaagctgagcaagatgcagaaggcgggcttcctgtattacgaggatctggcgagcggtgttagtaaagaagaagccgatgccgttacgctcatcgtgaaggaaacggtgcgcactgttagtccggatgcgctggtgaccatcgccggcggtttccgccgtggcaaacctatgggccacgacgttgacctgctgatcacgattccgggccgtcctgaagatgacgagctgctccacaaagtggttgatctgctcaagaagcaaggtctgctgctgtacgaagacatccgtgagagcacgttcgtggaggggcaactgccaaatcctaaacctgacaggctggacaaccatcagaagtgcttcgccattctcaagctgtaccgtccgaaggtggataacagtgcggttgggacgagtaagaaaagtgacatggctgaggttaaggattggaaagcggttcgtgtggatctggtgattgcgccattcgagcagttcgcctatgcgctgctcggttggacgggcagcggccaatttcgtcgcgatactcgtcgctatgcggaggaagagcgcgacatgctgctcgacaaccatcgtctctacgacctgaaaaagggcatctttctgagtgcggacagcgaagaagagattttcggtcatctggacctggattatctggagccgtgggaacgcaacgcg

SEQ ID NO: 4840 - protein, 394 aa, synthetic construct
  REGION 1..394: note = Variant of terminal deoxynucleotidyl transferase
MHHHHHHGGSGHPEGNTPEKEVPSVIARHVSQYACQRKTTLNNYNKKFTDALEIMAENYKFKENLQACLEAKRAASVLKSLPFEVTSMKDIQGLPCITDDVRDVIEEIIEEGESSRVKEILNDERYKAFKQFTSVFGVGVKTSEKWYRMGLRTVEEAKASKSLKLSKMQKAGFLYYEDLASGVSKEEADAVTLIVKETVRTVSPDALVTIAGGFRRGKPMGHDVDLLITIPGRPEDDELLHKVVDLLKKQGLLLYEDIRESTFVEGQLPNPKPDRLDNHQKCFAILKLYRPKVDNSAVGTSKKSDMAEVKDWKAVRVDLVIAPFEQFAYALLGWTGSGQFRRDTRRYAEEERDMLLDNHRLYDLKKGIFLSADSEEEIFGHLDLDYLEPWERNA

SEQ ID NO: 4841 - DNA, 1182 bp, synthetic construct
  misc_feature 1..1182: note = Variant of terminal deoxynucleotidyl transferase
  source 1..1182: mol_type = other DNA
atgcatcaccaccatcatcatgggggttctggtcatccggaaggtaataccccggagaaggaggtgccgagcgttatcgcccgtcatgttagtcagtacgcgtgccagcgcaagaccacgctgaataactacaacaaaaagttcaccgacgcgctggagatcatggccgagaactacaaatttaaagagaacctgcaggcgtgcctggaagccaagcgcgccgcgagtgtcctgaaaagcctgccgttcgaggttaccagcatgaaagacatccaaggtctgccgtgcattaccgacgacgtacgtgacgtgatcgaagagatcatcgaagagggcgagagcagccgtgttaaagaaatcctcaatgacgagcgctacaaggcctttaagcagttcaccagcattttcggtgtgggcgtgaaaacctcggaaaagtggtaccgtatgggcctccgtacggttgaagaagcaaaggccagtaagagtctgaagctgagcaagatgcagaaggcgggcttcctgtattacgaggatctggcgagcggtgttagtaaagaagaagccgatgccgttacgctcatcgtgaaggaaacggtgcgcactgttagtccggatgcgctggtgaccatcgccggcggtttccgccgtggcaaacctatgggccacgacgttgacctgctgatcacgattccgggccgtcctgaagatgacgagctgctccacaaagtggttgatctgctcaagaagcaaggtctgctgctgtacgaagacatccgtgagagcacgttcgtggaggggcaactgccaaatcctaaacctgacgccctggacaaccatcagaagtgcttcgccattctcaagctgtaccgtccgaaggtggataacagtgcggttgggacgagtaagaaaagtgacatggctgaggttaaggattggaaagcggttcgtgtggatctggtgattgcgccattcgagcagttcgcctatgcgctgctcggttggacgggcagcggccaatttcgtcgcgatactcgtcgctatgcggaggaagagcgcgacatgctgctcgacaaccatcgtctctacgacctgaaaaagggcatctttctgagtgcggacagcgaagaagagattttcggtcatctggacctggattatctggagccgtgggaacgcaacgcg

SEQ ID NO: 4842 - protein, 394 aa, synthetic construct
  REGION 1..394: note = Variant of terminal deoxynucleotidyl transferase
MHHHHHHGGSGHPEGNTPEKEVPSVIARHVSQYACQRKTTLNNYNKKFTDALEIMAENYKFKENLQACLEAKRAASVLKSLPFEVTSMKDIQGLPCITDDVRDVIEEIIEEGESSRVKEILNDERYKAFKQFTSIFGVGVKTSEKWYRMGLRTVEEAKASKSLKLSKMQKAGFLYYEDLASGVSKEEADAVTLIVKETVRTVSPDALVTIAGGFRRGKPMGHDVDLLITIPGRPEDDELLHKVVDLLKKQGLLLYEDIRESTFVEGQLPNPKPDALDNHQKCFAILKLYRPKVDNSAVGTSKKSDMAEVKDWKAVRVDLVIAPFEQFAYALLGWTGSGQFRRDTRRYAEEERDMLLDNHRLYDLKKGIFLSADSEEEIFGHLDLDYLEPWERNA

SEQ ID NO: 4843 - DNA, 1182 bp, synthetic construct
  misc_feature 1..1182: note = Variant of terminal deoxynucleotidyl transferase
  source 1..1182: mol_type = other DNA
atgcatcaccaccatcatcatgggggttctggtcatccggaaggtaataccccggagaaggaggtgccgagcgttatcgcccgtcatgttagtcagtacgcgtgccagcgcaagaccacgctgaataactacaacaaaaagttcaccgacgcgctggagatcatggccgagaactacaaatttaaagagaacctgcaggcgtgcctggaagccaagcgcgccgcgagtgtcctgaaaagcctgccgttcgaggttaccagcatgaaagacatccaaggtctgccgtgcattaccgacgacgtacgtgacgtgatcgaagagatcatcgaagagggcgagagcagccgtgttaaagaaatcctcaatgacgagcgctacaaggcctttaagcagttcaccagcgtgttcggtgtgggcgtgaaaacctcggaaaagtggtaccgtatgggcctccgtacggttgaagaagcaaaggccagtaagagtctgaagctgagcaagatgcagaaggcgggcttcctgtattacgaggatctggcgagcggtgttagtaaagaagaagccgatgccgttacgctcatcgtgaaggaaacggtgcgcactgttagtccggatgcgctggtgaccatcgccggcggtttccgccgtggcaaacctatgggccacgacgttgacctgctgatcacgattccgggccgtcctgaagatgacgagctgctccacaaagtggttgatctgctcaagaagcaaggtctgctgctgtacgaagacatccgtgagagcacgttcgtggaggggcaactgccaaatcctaaacctgacgccctggacaaccatcagaagtgcttcgccattctcaagctgtaccgtccgaaggtggataacagtgcggttgggacgagtaagaaaagtgacatggctgaggttaaggattggaaagcggttcgtgtggatctggtgattgcgccattcgagcagttcgcctatgcgctgctcggttggacgggcagcggccaatttcgtcgcgatactcgtcgctatgcggaggaagagaaggacatgctgctcgacaaccatcgtctctacgacctgaaaaagggcatctttctgagtgcggacagcgaagaagagattttcggtcatctggacctggattatctggagccgtgggaacgcaacgcg

SEQ ID NO: 4844 - protein, 394 aa, synthetic construct
  REGION 1..394: note = Variant of terminal deoxynucleotidyl transferase
MHHHHHHGGSGHPEGNTPEKEVPSVIARHVSQYACQRKTTLNNYNKKFTDALEIMAENYKFKENLQACLEAKRAASVLKSLPFEVTSMKDIQGLPCITDDVRDVIEEIIEEGESSRVKEILNDERYKAFKQFTSVFGVGVKTSEKWYRMGLRTVEEAKASKSLKLSKMQKAGFLYYEDLASGVSKEEADAVTLIVKETVRTVSPDALVTIAGGFRRGKPMGHDVDLLITIPGRPEDDELLHKVVDLLKKQGLLLYEDIRESTFVEGQLPNPKPDALDNHQKCFAILKLYRPKVDNSAVGTSKKSDMAEVKDWKAVRVDLVIAPFEQFAYALLGWTGSGQFRRDTRRYAEEEKDMLLDNHRLYDLKKGIFLSADSEEEIFGHLDLDYLEPWERNA

SEQ ID NO: 4845 - DNA, 1182 bp, synthetic construct
  misc_feature 1..1182: note = Variant of terminal deoxynucleotidyl transferase
  source 1..1182: mol_type = other DNA
atgcatcaccaccatcatcatgggggttctggtcatccggaaggtaataccccggagaaggaggtgccgagcgttatcgcccgtcatgttagtcagtacgcgtgccagcgcaagaccacgctgaataactacaacaaaaagttcaccgacgcgctggagatcatggccgagaactacaaatttaaagagaacctgcaggcgtgcctggaagccaagcgcgccgcgagtgtcctgaaaagcctgccgttcgaggttaccagcatgaaagacatccaaggtctgccgtgcattaccgacgacgtacgtgacgtgatcgaagagatcatcgaagagggcgagagcagccgtgttaaagaaatcctcaatgacgagcgctacaaggcctttaagcagttcaccagcgtgttcggtgtgggcgtgaaaacctcggaaaagtggtaccgtatgggcctccgtacggttgaagaagcaaaggccagtaagagtctgaagctgagcaagatgcagaaggcgggcttcctgtattacgaggatctggcgagcggtgttagtaaagaagaagccgatgccgttacgctcatcgtgaaggaaacggtgcgcactgttagtccggatgcgctggtgaccatcgccggcggtttccgccgtggcaaacctatgggccacgacgttgacctgctgatcacgattccgggccgtcctgaagatgacgagctgctccacaaagtggttgatctgctcaagaagcaaggtctgctgctgtaccaggacatccgtgagagcacgttcgtggaggggcaactgccaaatcctaaacctgacgccctggacaaccatcagaagtgcttcgccattctcaagctgtaccgtccgaaggtggataacagtgcggttgggacgagtaagaaaagtgacatggctgaggttaaggattggaaagcggttcgtgtggatctggtgattgcgccattcgagcagttcgcctatgcgctgctcggttggacgggcagcggccaatttcgtcgcgatactcgtcgctatgcggaggaagagcgcgacatgctgctcgacaaccatcgtctctacgacctgaaaaagggcatctttctgagtgcggacagcgaagaagagattttcggtcatctggacctggattatctggagccgtgggaacgcaacgcg

SEQ ID NO: 4846 - protein, 394 aa, synthetic construct
  REGION 1..394: note = Variant of terminal deoxynucleotidyl transferase
MHHHHHHGGSGHPEGNTPEKEVPSVIARHVSQYACQRKTTLNNYNKKFTDALEIMAENYKFKENLQACLEAKRAASVLKSLPFEVTSMKDIQGLPCITDDVRDVIEEIIEEGESSRVKEILNDERYKAFKQFTSVFGVGVKTSEKWYRMGLRTVEEAKASKSLKLSKMQKAGFLYYEDLASGVSKEEADAVTLIVKETVRTVSPDALVTIAGGFRRGKPMGHDVDLLITIPGRPEDDELLHKVVDLLKKQGLLLYQDIRESTFVEGQLPNPKPDALDNHQKCFAILKLYRPKVDNSAVGTSKKSDMAEVKDWKAVRVDLVIAPFEQFAYALLGWTGSGQFRRDTRRYAEEERDMLLDNHRLYDLKKGIFLSADSEEEIFGHLDLDYLEPWERNA

SEQ ID NO: 4847 - DNA, 1182 bp, synthetic construct
  misc_feature 1..1182: note = Variant of terminal deoxynucleotidyl transferase
  source 1..1182: mol_type = other DNA
atgcatcaccaccatcatcatgggggttctggtcatccggaaggtaataccccggagaaggaggtgccgagcgttatcgcccgtcatgttagtcagtacgcgtgccagcgcaagaccacgctgaataactacaacaaaaagttcaccgacgcgctggagatcatggccgagaactacaaatttaaagagaacctgcaggcgtgcctggaagccaagcgcgccgcgagtgtcctgaaaagcctgccgttcgaggttaccagcatgaaagacatccaaggtctgccgtgcattaccgacgacgtacgtgacgtgatcgaagagatcatcgaagagggcgagagcagccgtgttaaagaaatcctcaatgacgagcgctacaaggcctttaagcagttcaccagcgtgttcggtgtgggcgtgaaaacctcggaaaagtggtaccgtatgggcctccgtacggttgaagaagcaaaggccagtaagagtctgaagctgagcaagatgcagaaggcgggcttcctgtattacgaggatctggcgagcggtgttagtaaagaagaagccgatgccgttacgctcatcgtgaaggaaacggtgcgcactgttagtccggatgcgctggtgaccatcgccggcggtttccgccgtggcaaacctcagggccacgacgttgacctgctgatcacgattccgggccgtcctgaagatgacgagctgctccacaaagtggttgatctgctcaagaagcaaggtctgctgctgtacgaagacatccgtgagagcacgttcgtggaggggcaactgccaaatcctaaacctgacgccctggacaaccatcagaagtgcttcgccattctcaagctgtaccgtccgaaggtggataacagtgcggttgggacgagtaagaaaagtgacatggctgaggttaaggattggaaagcggttcgtgtggatctggtgattgcgccattcgagcagttcgcctatgcgctgctcggttggacgggcagcggccaatttcgtcgcgatactcgtcgctatgcggaggaagagcgcgacatgctgctcgacaaccatcgtctctacgacctgaaaaagggcatctttctgagtgcggacagcgaagaagagattttcggtcatctggacctggattatctggagccgtgggaacgcaacgcg

SEQ ID NO: 4848 - protein, 394 aa, synthetic construct
  REGION 1..394: note = Variant of terminal deoxynucleotidyl transferase
MHHHHHHGGSGHPEGNTPEKEVPSVIARHVSQYACQRKTTLNNYNKKFTDALEIMAENYKFKENLQACLEAKRAASVLKSLPFEVTSMKDIQGLPCITDDVRDVIEEIIEEGESSRVKEILNDERYKAFKQFTSVFGVGVKTSEKWYRMGLRTVEEAKASKSLKLSKMQKAGFLYYEDLASGVSKEEADAVTLIVKETVRTVSPDALVTIAGGFRRGKPQGHDVDLLITIPGRPEDDELLHKVVDLLKKQGLLLYEDIRESTFVEGQLPNPKPDALDNHQKCFAILKLYRPKVDNSAVGTSKKSDMAEVKDWKAVRVDLVIAPFEQFAYALLGWTGSGQFRRDTRRYAEEERDMLLDNHRLYDLKKGIFLSADSEEEIFGHLDLDYLEPWERNA

SEQ ID NO: 4849 - DNA, 1182 bp, synthetic construct
  misc_feature 1..1182: note = Variant of terminal deoxynucleotidyl transferase
  source 1..1182: mol_type = other DNA
atgcatcaccaccatcatcatgggggttctggtcatccggaaggtaataccccggagaaggaggtgccgagcgttatcgcccgtcatgttagtcagtacgcgtgccagcgcaagaccacgctgaataactacaacaaaaagttcaccgacgcgctggagatcatggccgagaactacaaatttaaagagaacctgcaggcgtgcctggaagccaagcgcgccgcgagtgtcctgaaaagcctgccgttcgaggttaccagcatgaaagacatccaaggtctgccgtgcattaccgacgacgtacgtgacgtgatcgaagagatcatcgaagagggcgagagcagccgtgttaaagaaatcctcaatgacgagcgctacaaggcctttaagcagttcaccagcgtgttcggtgtgggcgtgaaaacctcggaaaagtggtaccgtatgggcctccgtacggttgaagaagcaaaggccagtaagagtctgaagctgagcaagatgcagaaggcgggcttcctgtattacgaggatctggcgagcggtgttagtaaagaagaagccgatgccgttacgctcatcgtgaaggaaacggtgcgcactgttagtccggatgcgctggtgaccatcgccggcggtttccgccgtggcaaacctatgggccacgacgttgacctgctgatcacgattccgggccgtcctgaagatgacgagctgctccacaaagtggttgatctgctcaagaagcaaggtctgctgctgtacgaagacatccgtgagagcacgttcgtggaggggcaactgccaaatcctaaacctgacgccctggacaaccatcagaagtgcttcgccattctcaagctgtaccgtccgaaggtggataacagtgcggttgggacgagtaagaaaagtgacatggctgaggttaaggattggaaagcggttcgtgtggatctggtgattgcgccattcgagcagttcgcctatgcgctgctcggttggacgggcagcggccaatttcgtcgcgatactcgtcgctatgcggcggaagagcgcgacatgctgctcgacaaccatcgtctctacgacctgaaaaagggcatctttctgagtgcggacagcgaagaagagattttcggtcatctggacctggattatctggagccgtgggaacgcaacgcg

SEQ ID NO: 4850 - protein, 394 aa, synthetic construct
  REGION 1..394: note = Variant of terminal deoxynucleotidyl transferase
MHHHHHHGGSGHPEGNTPEKEVPSVIARHVSQYACQRKTTLNNYNKKFTDALEIMAENYKFKENLQACLEAKRAASVLKSLPFEVTSMKDIQGLPCITDDVRDVIEEIIEEGESSRVKEILNDERYKAFKQFTSVFGVGVKTSEKWYRMGLRTVEEAKASKSLKLSKMQKAGFLYYEDLASGVSKEEADAVTLIVKETVRTVSPDALVTIAGGFRRGKPMGHDVDLLITIPGRPEDDELLHKVVDLLKKQGLLLYEDIRESTFVEGQLPNPKPDALDNHQKCFAILKLYRPKVDNSAVGTSKKSDMAEVKDWKAVRVDLVIAPFEQFAYALLGWTGSGQFRRDTRRYAAEERDMLLDNHRLYDLKKGIFLSADSEEEIFGHLDLDYLEPWERNA

SEQ ID NO: 4851 - DNA, 1182 bp, synthetic construct
  misc_feature 1..1182: note = Variant of terminal deoxynucleotidyl transferase
  source 1..1182: mol_type = other DNA
atgcatcaccaccatcatcatgggggttctggtcatccggaaggtaataccccggagaaggaggtgccgagcgttatcgcccgtcatgttagtcagtacgcgtgccagcgcaagaccacgctgaataactacaacaaaaagttcaccgacgcgctggagatcatggccgagaactacaaatttaaagagaacctgcaggcgtgcctggaagccaagcgcgccgcgagtgtcctgaaaagcctgccgttcgaggttaccagcatgaaagacatccaaggtctgccgtgcattaccgacgacgtacgtgacgtgatcgaagagatcatcgaagagggcgagagcagccgtgttaaagaaatcctcaatgacgagcgctacaaggcctttaagcagttcaccagcgtgttcggtgtgggcgtgaaaacctcggaaaagtggtaccgtatgggcctccgtacggttgaagaagcaaaggccagtaagagtctgaagctgagcaagatgcagaaggcgggcttcctgtattacgaggatctggcgagcggtgttagtaaagaagaagccgatgccgttacgctcatcgtgaaggaaacggtgcgcactgttagtccggatgcgctggtgaccatcgccggcggtttccgccgtggcaaacctatgggccacgacgttgacctgctgatcacgattccgggccgtcctgaagatgacgagctgctccacaaagtggttgatctgctcaagaagcaaggtctgctgctgtacgaagacatccgtgagagcacgttcgtggaggggcaactgccaaatcctaaacctgacgccctggacaaccatcagaagtgcttcgccattctcaagctgtaccgtccgaaggtggataacagtgcggttgggacgagtaagaaaagtgacatggctgaggttaaggattggaaagcggttcgtgtggatctggtgattgcgccattcgagcagttcgcctatgcgctgctcggttggacgggcagcggccaatttcgtcgcgatactcgtcgctatgcgtgggaagagcgcgacatgctgctcgacaaccatcgtctctacgacctgaaaaagggcatctttctgagtgcggacagcgaagaagagattttcggtcatctggacctggattatctggagccgtgggaacgcaacgcg

SEQ ID NO: 4852 - protein, 394 aa, synthetic construct
  REGION 1..394: note = Variant of terminal deoxynucleotidyl transferase
MHHHHHHGGSGHPEGNTPEKEVPSVIARHVSQYACQRKTTLNNYNKKFTDALEIMAENYKFKENLQACLEAKRAASVLKSLPFEVTSMKDIQGLPCITDDVRDVIEEIIEEGESSRVKEILNDERYKAFKQFTSVFGVGVKTSEKWYRMGLRTVEEAKASKSLKLSKMQKAGFLYYEDLASGVSKEEADAVTLIVKETVRTVSPDALVTIAGGFRRGKPMGHDVDLLITIPGRPEDDELLHKVVDLLKKQGLLLYEDIRESTFVEGQLPNPKPDALDNHQKCFAILKLYRPKVDNSAVGTSKKSDMAEVKDWKAVRVDLVIAPFEQFAYALLGWTGSGQFRRDTRRYAWEERDMLLDNHRLYDLKKGIFLSADSEEEIFGHLDLDYLEPWERNA

SEQ ID NO: 4853 - DNA, 1182 bp, synthetic construct
  misc_feature 1..1182: note = Variant of terminal deoxynucleotidyl transferase
  source 1..1182: mol_type = other DNA
atgcatcaccaccatcatcatgggggttctggtcatccggaaggtaataccccggagaaggaggtgccgagcgttatcgcccgtcatgttagtcagtacgcgtgccagcgcaagaccacgctgaataactacaacaaaaagttcaccgacgcgctggagatcatggccgagaactacaaatttaaagagaacctgcaggcgtgcctggaagccaagcgcgccgtgagtgtcctgaaaagcctgccgttcgaggttaccagcatgaaagacatccaaggtctgccgtgcattaccgacgacgtacgtgacgtgatcgaagagatcatcgaagagggcgagagcagccgtgttaaagaaatcctcaatgacgagcgctacaaggcctttaagcagttcaccagcgtgttcggtgtgggcgtgaaaacctcggaaaagtggtaccgtatgggcctccgtacggttgaagaagcaaaggccagtaagagtctgaagctgagcaagatgcagaaggcgggcttcctgtattacgaggatctggcgagcggtgttagtaaagaagaagccgatgccgttacgctcatcgtgaaggaaacggtgcgcactgttagtccggatgcgctggtgaccatcgccggcggtttccgccgtggcaaacctatgggccacgacgttgacctgctgatcacgattccgggccgtcctgaagatgacgagctgctccacaaagtggttgatctgctcaagaagcaaggtctgctgctgtacgaagacatccgtgagagcacgttcgtggaggggcaactgccaaatcctaaacctgacgccctggacaaccatcagaagtgcttcgccattctcaagctgtaccgtccgaaggtggataacagtgcggttgggacgagtaagaaaagtgacatggctgaggttaaggattggaaagcggttcgtgtggatctggtgattgcgccattcgagcagttcgcctatgcgctgctcggttggacgggcagcggccaatttcgtcgcgatactcgtcgctatgcggaggaagagcgcgacatgctgctcgacaaccatcgtctctacgacctgaaaaagggcatctttctgagtgcggacagcgaagaagagattttcggtcatctggacctggattatctggagccgtgggaacgcaacgcg

SEQ ID NO: 4854 - protein, 394 aa, synthetic construct
  REGION 1..394: note = Variant of terminal deoxynucleotidyl transferase
MHHHHHHGGSGHPEGNTPEKEVPSVIARHVSQYACQRKTTLNNYNKKFTDALEIMAENYKFKENLQACLEAKRAVSVLKSLPFEVTSMKDIQGLPCITDDVRDVIEEIIEEGESSRVKEILNDERYKAFKQFTSVFGVGVKTSEKWYRMGLRTVEEAKASKSLKLSKMQKAGFLYYEDLASGVSKEEADAVTLIVKETVRTVSPDALVTIAGGFRRGKPMGHDVDLLITIPGRPEDDELLHKVVDLLKKQGLLLYEDIRESTFVEGQLPNPKPDALDNHQKCFAILKLYRPKVDNSAVGTSKKSDMAEVKDWKAVRVDLVIAPFEQFAYALLGWTGSGQFRRDTRRYAEEERDMLLDNHRLYDLKKGIFLSADSEEEIFGHLDLDYLEPWERNA

SEQ ID NO: 4855 - DNA, 1182 bp, synthetic construct
  misc_feature 1..1182: note = Variant of terminal deoxynucleotidyl transferase
  source 1..1182: mol_type = other DNA
atgcatcaccaccatcatcatgggggttctggtcatccggaaggtaataccccggagaaggaggtgccgagcgttatcgcccgtcatgttagtcagtacgcgtgccagcgcaagaccacgctgaataactacaacaaaaagttcaccgacgcgctggagatcatggccgagaactacaaatttaaagagaacctgcaggcgtgcctggaagccaagcgcgccgcgagtgtcctgaaaagcctgccgttcgaggttaccagcatgaaagacatccaaggtctgccgtgcattaccgacgacgtacgtgacgtgatcgaagagatcatcgaagagggcgagagcagccgtgttaaagaaatcctcaatgacgagcgctacaaggcctttaagcagttcaccagcgtgttcggtgtgggcgtgaaaacctcggaaaagtggtaccgtatgggcctccgtacggttgaagaagcaaaggccagtaagagtctgaagctgagcaagatgcagaaggcgggcttcctgtattacgaggatctggcgagcggtgttagtaaagaagaagccgatgccgttacgctcatcgtgaaggaaacggtgcgcactgttagtccggatgcgctggtgaccatcgccggcggtttccgccgtggcaaacctatgggccacgacgttgacctgctgatcacgattccgggccgtcctgaagatgacgagctgctccacaaagtggttgatctgctcaagaagcaaggtctgctgctgtacgaagacatccgtgagagcacgttcgtggaggggcaactgccaaatcctaaacctgacgccctggacaaccatcagaagtgcttcgccattctcaagctgtaccgtccgaaggtggataacagtgcggttgggacgagtaagaaaagtgacatggctgaggttaaggattggaaagcggttcgtgtggatctggtgattgcgccattcgagcagttcgcctatgcgctgctcggttggacgggcagcggccaatttcgtcgcgatactcgtcgctatgcgtatgaagagcgcgacatgctgctcgacaaccatcgtctctacgacctgaaaaagggcatctttctgagtgcggacagcgaagaagagattttcggtcatctggacctggattatctggagccgtgggaacgcaacgcg

SEQ ID NO: 4856 - protein, 394 aa, synthetic construct
  REGION 1..394: note = Variant of terminal deoxynucleotidyl transferase
MHHHHHHGGSGHPEGNTPEKEVPSVIARHVSQYACQRKTTLNNYNKKFTDALEIMAENYKFKENLQACLEAKRAASVLKSLPFEVTSMKDIQGLPCITDDVRDVIEEIIEEGESSRVKEILNDERYKAFKQFTSVFGVGVKTSEKWYRMGLRTVEEAKASKSLKLSKMQKAGFLYYEDLASGVSKEEADAVTLIVKETVRTVSPDALVTIAGGFRRGKPMGHDVDLLITIPGRPEDDELLHKVVDLLKKQGLLLYEDIRESTFVEGQLPNPKPDALDNHQKCFAILKLYRPKVDNSAVGTSKKSDMAEVKDWKAVRVDLVIAPFEQFAYALLGWTGSGQFRRDTRRYAYEERDMLLDNHRLYDLKKGIFLSADSEEEIFGHLDLDYLEPWERNA

SEQ ID NO: 4857 - DNA, 1182 bp, synthetic construct
  misc_feature 1..1182: note = Variant of terminal deoxynucleotidyl transferase
  source 1..1182: mol_type = other DNA
atgcatcaccaccatcatcatgggggttctggtcatccggaaggtaataccccggagaaggaggtgccgagcgttatcgcccgtcatgttagtcagtacgcgtgccagcgcaagaccacgctgaataactacaacaaaaagttcaccgacgcgctggagatcatggccgagaactacaaatttaaagagaacctgcaggcgtgcctggaagccaagcgcgccgcgagtgtcctgaaaagcctgccgttcgaggttaccagcatgaaagacatccaaggtctgccgtgcattaccgacgacgtacgtgacgtgatcgaagagatcatcgaagagggcgagagcagccgtgttaaagaaatcctcaatgacgagcgctacaaggcctttaagcagttcaccagcgtgttcggtgtgggcgtgaaaacctcggaaaagtggtaccgtatgggcctccgtacggttgaagaagcaaaggccagtaagagtctgaagctgagcaagatgcagaaggcgggcttcctgtattacgaggatctggcgagcggtgttagtaaagaagaagccgatgccgttacgctcatcgtgaaggaaacggtgcgcactgttagtccggatgcgctggtgaccatcgccggcggtttccgccgtggcaaacctatgggccacgacgttgacctgctgatcacgattccgggccgtcctgaagatgacgagctgctccacaaagtggttgatctgctcaagaagcaaggtctgctgctgtacgaagacatccgtgagagcacgttcgtggaggggcaactgccaaatcctaaacctgacgccctggacaaccatcagaagtgcttcgccattctcaagctgtaccgtccgaaggtggataacagtgcggttgggacgagtaagaaaagtgacatggctgaggttaaggattggaaagcggttcgtgtggatctggtgattgcgccattcgagcagttcgcctatgcgctgctcggttggacgggcagcggccaatttcgtcgcgatactcgtcgctatgcggaggtggagcgcgacatgctgctcgacaaccatcgtctctacgacctgaaaaagggcatctttctgagtgcggacagcgaagaagagattttcggtcatctggacctggattatctggagccgtgggaacgcaacgcg

SEQ ID NO: 4858 - protein, 394 aa, synthetic construct
  REGION 1..394: note = Variant of terminal deoxynucleotidyl transferase
MHHHHHHGGSGHPEGNTPEKEVPSVIARHVSQYACQRKTTLNNYNKKFTDALEIMAENYKFKENLQACLEAKRAASVLKSLPFEVTSMKDIQGLPCITDDVRDVIEEIIEEGESSRVKEILNDERYKAFKQFTSVFGVGVKTSEKWYRMGLRTVEEAKASKSLKLSKMQKAGFLYYEDLASGVSKEEADAVTLIVKETVRTVSPDALVTIAGGFRRGKPMGHDVDLLITIPGRPEDDELLHKVVDLLKKQGLLLYEDIRESTFVEGQLPNPKPDALDNHQKCFAILKLYRPKVDNSAVGTSKKSDMAEVKDWKAVRVDLVIAPFEQFAYALLGWTGSGQFRRDTRRYAEVERDMLLDNHRLYDLKKGIFLSADSEEEIFGHLDLDYLEPWERNA

SEQ ID NO: 4859 - DNA, 1182 bp, synthetic construct
  misc_feature 1..1182: note = Variant of terminal deoxynucleotidyl transferase
  source 1..1182: mol_type = other DNA
atgcatcaccaccatcatcatgggggttctggtcatccggaaggtaataccccggagaaggaggtgccgagcgttatcgcccgtcatgttagtcagtacgcgtgccagcgcaagaccacgctgaataactacaacaaaaagttcaccgacgcgctggagatcatggccgagaactacaaatttaaagagaacctgcaggcgtgcctggaagccaagcgcgccgcgagtgtcctgaaaagcctgccgttcgaggttaccagcatgaaagacatccaaggtctgccgtgcattaccgacgacgtacgtgacgtgatcgaagagatcatcgaagagggcgagagcagccgtgttaaagaaatcctcaatgacgagcgctacaaggcctttaagcagttcaccagcgtgttcggtgtgggcgtgaaaacctcggaaaagtggtaccgtatgggcctccgtacggttgaagaagcaaaggccagtaagagtctgaagctgagcaagatgcagaaggcgggcttcctgtattacgaggatctggcgagcggtgttagtaaagaagaagccgatgccgttacgctcatcgtgaaggaaacggtgcgcactgttagtccggatgcgctggtgaccatcgccggcggtttccgccgtggcaaacctatgggccacgacgttgacctgctgatcacgattccgggccgtcctgaagatgacgagctgctccacaaagtggttgatctgctcaagaagcaaggtctgctgctgtacgaagacatccgtgagagcacgttcgtggaggggcaactgccaaatcctaaacctgacgccctggacaaccatcagaagtgcttcgccattctcaagctgtaccgtccgaaggtggataacagtgcggttgggacgagtaagaaaagtgacatggctgaggttaaggattggaaagcggttcgtgtggatctggtgattgcgccattcgagcagttcgcctatgcgctgctcggttggacgggcagcggccaatttcgtcgcgatactcgtcgctatgcggaggaagagcgcgacatgctgctcgacaaccatcgttgttacgacctgaaaaagggcatctttctgagtgcggacagcgaagaagagattttcggtcatctggacctggattatctggagccgtgggaacgcaacgcg

SEQ ID NO: 4860 - protein, 394 aa, synthetic construct
  REGION 1..394: note = Variant of terminal deoxynucleotidyl transferase
MHHHHHHGGSGHPEGNTPEKEVPSVIARHVSQYACQRKTTLNNYNKKFTDALEIMAENYKFKENLQACLEAKRAASVLKSLPFEVTSMKDIQGLPCITDDVRDVIEEIIEEGESSRVKEILNDERYKAFKQFTSVFGVGVKTSEKWYRMGLRTVEEAKASKSLKLSKMQKAGFLYYEDLASGVSKEEADAVTLIVKETVRTVSPDALVTIAGGFRRGKPMGHDVDLLITIPGRPEDDELLHKVVDLLKKQGLLLYEDIRESTFVEGQLPNPKPDALDNHQKCFAILKLYRPKVDNSAVGTSKKSDMAEVKDWKAVRVDLVIAPFEQFAYALLGWTGSGQFRRDTRRYAEEERDMLLDNHRCYDLKKGIFLSADSEEEIFGHLDLDYLEPWERNA

SEQ ID NO: 4861 - DNA, 1182 bp, synthetic construct
  misc_feature 1..1182: note = Variant of terminal deoxynucleotidyl transferase
  source 1..1182: mol_type = other DNA
atgcatcaccaccatcatcatgggggttctggtcatccggaaggtaataccccggagaaggaggtgccgagcgttatcgcccgtcatgttagtcagtacgcgtgccagcgcaagaccacgctgaataactacaacaaaaagttcaccgacgcgctggagatcatggccgagaactacaaatttaaagagaacctgcaggcgtgcctggaagccaagcgcgccgcgagtgtcctgaaaagcctgccgttcgaggttaccagcatgaaagacatccaaggtctgccgtgcattaccgacgacgtacgtgacgtgatcgaagagatcatcgaagagggcgagagcagccgtgttaaagaaatcctcaatgacgagcgctacaaggcctttaagcagttcaccagcgtgttcggtgtgggcgtgaaaacctcggaaaagtggtaccgtatgggcctccgtacggttgaagaagcaaaggccagtaagagtctgaagctgagcaagatgcagaaggcgggcttcctgtattacgaggatctggcgagcggtgttagtaaagaagaagccgatgccgttacgctcatcgtgaaggaaacggtgcgcactgttagtccggatgcgctggtgaccatcgccggcggtttccgccgtggcaaacctatgggccacgacgttgacctgctgatcacgattccgggccgtcctgaagatgacgagctgctccacaaagtggttgatctgctcaagaagcaaggtctgctgctgtacgaagacatccgtgagagcacgttcgtggaggggcaactgccaaatcctaaacctgacgccctggacaaccatcagaagatgttcgccattctcaagctgtaccgtccgaaggtggataacagtgcggttgggacgagtaagaaaagtgacatggctgaggttaaggattggaaagcggttcgtgtggatctggtgattgcgccattcgagcagttcgcctatgcgctgctcggttggacgggcagcggccaatttcgtcgcgatactcgtcgctatgcggaggaagagcgcgacatgctgctcgacaaccatcgtctctacgacctgaaaaagggcatctttctgagtgcggacagcgaagaagagattttcggtcatctggacctggattatctggagccgtgggaacgcaacgcg

SEQ ID NO: 4862 - protein, 394 aa, synthetic construct
  REGION 1..394: note = Variant of terminal deoxynucleotidyl transferase
MHHHHHHGGSGHPEGNTPEKEVPSVIARHVSQYACQRKTTLNNYNKKFTDALEIMAENYKFKENLQACLEAKRAASVLKSLPFEVTSMKDIQGLPCITDDVRDVIEEIIEEGESSRVKEILNDERYKAFKQFTSVFGVGVKTSEKWYRMGLRTVEEAKASKSLKLSKMQKAGFLYYEDLASGVSKEEADAVTLIVKETVRTVSPDALVTIAGGFRRGKPMGHDVDLLITIPGRPEDDELLHKVVDLLKKQGLLLYEDIRESTFVEGQLPNPKPDALDNHQKMFAILKLYRPKVDNSAVGTSKKSDMAEVKDWKAVRVDLVIAPFEQFAYALLGWTGSGQFRRDTRRYAEEERDMLLDNHRLYDLKKGIFLSADSEEEIFGHLDLDYLEPWERNA

SEQ ID NO: 4863 - DNA, 1182 bp, synthetic construct
  misc_feature 1..1182: note = Variant of terminal deoxynucleotidyl transferase
  source 1..1182: mol_type = other DNA
atgcatcaccaccatcatcatgggggttctggtcatccggaaggtaataccccggagaaggaggtgccgagcgttatcgcccgtcatgttagtcagtacgcgtgccagcgcaagaccacgctgaataactacaacaaaaagttcaccgacgcgctggagatcatggccgagaactacaaatttaaagagaacctgcaggcgaggctggaagccaagcgcgccgcgagtgtcctgaaaagcctgccgttcgaggttaccagcatgaaagacatccaaggtctgccgtgcattaccgacgacgtacgtgacgtgatcgaagagatcatcgaagagggcgagagcagccgtgttaaagaaatcctcaatgacgagcgctacaaggcctttaagcagttcaccagcgtgttcggtgtgggcgtgaaaacctcggaaaagtggtaccgtatgggcctccgtacggttgaagaagcaaaggccagtaagagtctgaagctgagcaagatgcagaaggcgggcttcctgtattacgaggatctggcgagcggtgttagtaaagaagaagccgatgccgttacgctcatcgtgaaggaaacggtgcgcactgttagtccggatgcgctggtgaccatcgccggcggtttccgccgtggcaaacctatgggccacgacgttgacctgctgatcacgattccgggccgtcctgaagatgacgagctgctccacaaagtggttgatctgctcaagaagcaaggtctgctgctgtacgaagacatccgtgagagcacgttcgtggaggggcaactgccaaatcctaaacctgacgccctggacaaccatcagaagtgcttcgccattctcaagctgtaccgtccgaaggtggataacagtgcggttgggacgagtaagaaaagtgacatggctgaggttaaggattggaaagcggttcgtgtggatctggtgattgcgccattcgagcagttcgcctatgcgctgctcggttggacgggcagcggccaatttcgtcgcgatactcgtcgctatgcggaggaagagcgcgacatgctgctcgacaaccatcgtctctacgacctgaaaaagggcatctttctgagtgcggacagcgaagaagagattttcggtcatctggacctggattatctggagccgtgggaacgcaacgcg

SEQ ID NO: 4864 - protein, 394 aa, synthetic construct
  REGION 1..394: note = Variant of terminal deoxynucleotidyl transferase
MHHHHHHGGSGHPEGNTPEKEVPSVIARHVSQYACQRKTTLNNYNKKFTDALEIMAENYKFKENLQARLEAKRAASVLKSLPFEVTSMKDIQGLPCITDDVRDVIEEIIEEGESSRVKEILNDERYKAFKQFTSVFGVGVKTSEKWYRMGLRTVEEAKASKSLKLSKMQKAGFLYYEDLASGVSKEEADAVTLIVKETVRTVSPDALVTIAGGFRRGKPMGHDVDLLITIPGRPEDDELLHKVVDLLKKQGLLLYEDIRESTFVEGQLPNPKPDALDNHQKCFAILKLYRPKVDNSAVGTSKKSDMAEVKDWKAVRVDLVIAPFEQFAYALLGWTGSGQFRRDTRRYAEEERDMLLDNHRLYDLKKGIFLSADSEEEIFGHLDLDYLEPWERNA

SEQ ID NO: 4865 - DNA, 1182 bp, synthetic construct
  misc_feature 1..1182: note = Variant of terminal deoxynucleotidyl transferase
  source 1..1182: mol_type = other DNA
atgcatcaccaccatcatcatgggggttctggtcatccggaaggtaataccccggagaaggaggtgccgagcgttatcgcccgtcatgttagtcagtacgcgtgccagcgcaagaccacgctgaataactacaacaaaaagttcaccgacgcgctggagatcatggccgagaactacaaatttaaagagaacctgcaggcgtgcctggaagccaagcgcgccgcgagtgtcctgaaaagcctgccgttcgagattaccagcatgaaagacatccaaggtctgccgtgcattaccgacgacgtacgtgacgtgatcgaagagatcatcgaagagggcgagagcagccgtgttaaagaaatcctcaatgacgagcgctacaaggcctttaagcagttcaccagcgtgttcggtgtgggcgtgaaaacctcggaaaagtggtaccgtatgggcctccgtacggttgaagaagcaaaggccagtaagagtctgaagctgagcaagatgcagaaggcgggcttcctgtattacgaggatctggcgagcggtgttagtaaagaagaagccgatgccgttacgctcatcgtgaaggaaacggtgcgcactgttagtccggatgcgctggtgaccatcgccggcggtttccgccgtggcaaacctatgggccacgacgttgacctgctgatcacgattccgggccgtcctgaagatgacgagctgctccacaaagtggttgatctgctcaagaagcaaggtctgctgctgtacgaagacatccgtgagagcacgttcgtggaggggcaactgccaaatcctaaacctgacgccctggacaaccatcagaagtgcttcgccattctcaagctgtaccgtccgaaggtggataacagtgcggttgggacgagtaagaaaagtgacatggctgaggttaaggattggaaagcggttcgtgtggatctggtgattgcgccattcgagcagttcgcctatgcgctgctcggttggacgggcagcggccaatttcgtcgcgatactcgtcgctatgcggaggaagagcgcgacatgctgctcgacaaccatcgtctctacgacctgaaaaagggcatctttctgagtgcggacagcgaagaagagattttcggtcatctggacctggattatctggagccgtgggaacgcaacgcg

SEQ ID NO: 4866 - protein, 394 aa, synthetic construct
  REGION 1..394: note = Variant of terminal deoxynucleotidyl transferase
MHHHHHHGGSGHPEGNTPEKEVPSVIARHVSQYACQRKTTLNNYNKKFTDALEIMAENYKFKENLQACLEAKRAASVLKSLPFEITSMKDIQGLPCITDDVRDVIEEIIEEGESSRVKEILNDERYKAFKQFTSVFGVGVKTSEKWYRMGLRTVEEAKASKSLKLSKMQKAGFLYYEDLASGVSKEEADAVTLIVKETVRTVSPDALVTIAGGFRRGKPMGHDVDLLITIPGRPEDDELLHKVVDLLKKQGLLLYEDIRESTFVEGQLPNPKPDALDNHQKCFAILKLYRPKVDNSAVGTSKKSDMAEVKDWKAVRVDLVIAPFEQFAYALLGWTGSGQFRRDTRRYAEEERDMLLDNHRLYDLKKGIFLSADSEEEIFGHLDLDYLEPWERNA

SEQ ID NO: 4867 - DNA, 1182 bp, synthetic construct
  misc_feature 1..1182: note = Variant of terminal deoxynucleotidyl transferase
  source 1..1182: mol_type = other DNA
atgcatcaccaccatcatcatgggggttctggtcatccggaaggtaataccccggagaaggaggtgccgagcgttatcgcccgtcatgttagtcagtacgcgtgccagcgcaagaccacgctgaataactacaacaaaaagttcaccgacgcgctggagatcatggccgagaactacaaatttaaagagaacggtcaggcgtgcctggaagccaagcgcgccgcgagtgtcctgaaaagcctgccgttcgaggttaccagcatgaaagacatccaaggtctgccgtgcattaccgacgacgtacgtgacgtgatcgaagagatcatcgaagagggcgagagcagccgtgttaaagaaatcctcaatgacgagcgctacaaggcctttaagcagttcaccagcgtgttcggtgtgggcgtgaaaacctcggaaaagtggtaccgtatgggcctccgtacggttgaagaagcaaaggccagtaagagtctgaagctgagcaagatgcagaaggcgggcttcctgtattacgaggatctggcgagcggtgttagtaaagaagaagccgatgccgttacgctcatcgtgaaggaaacggtgcgcactgttagtccggatgcgctggtgaccatcgccggcggtttccgccgtggcaaacctatgggccacgacgttgacctgctgatcacgattccgggccgtcctgaagatgacgagctgctccacaaagtggttgatctgctcaagaagcaaggtctgctgctgtacgaagacatccgtgagagcacgttcgtggaggggcaactgccaaatcctaaacctgacgccctggacaaccatcagaagtgcttcgccattctcaagctgtaccgtccgaaggtggataacagtgcggttgggacgagtaagaaaagtgacatggctgaggttaaggattggaaagcggttcgtgtggatctggtgattgcgccattcgagcagttcgcctatgcgctgctcggttggacgggcagcggccaatttcgtcgcgatactcgtcgctatgcggaggaagagcgcgacatgctgctcgacaaccatcgtctctacgacctgaaaaagggcatctttctgagtgcggacagcgaagaagagattttcggtcatctggacctggattatctggagccgtgggaacgcaacgcg

SEQ ID NO: 4868 - protein, 394 aa, synthetic construct
  REGION 1..394: note = Variant of terminal deoxynucleotidyl transferase
MHHHHHHGGSGHPEGNTPEKEVPSVIARHVSQYACQRKTTLNNYNKKFTDALEIMAENYKFKENGQACLEAKRAASVLKSLPFEVTSMKDIQGLPCITDDVRDVIEEIIEEGESSRVKEILNDERYKAFKQFTSVFGVGVKTSEKWYRMGLRTVEEAKASKSLKLSKMQKAGFLYYEDLASGVSKEEADAVTLIVKETVRTVSPDALVTIAGGFRRGKPMGHDVDLLITIPGRPEDDELLHKVVDLLKKQGLLLYEDIRESTFVEGQLPNPKPDALDNHQKCFAILKLYRPKVDNSAVGTSKKSDMAEVKDWKAVRVDLVIAPFEQFAYALLGWTGSGQFRRDTRRYAEEERDMLLDNHRLYDLKKGIFLSADSEEEIFGHLDLDYLEPWERNA

SEQ ID NO: 4869 - DNA, 1182 bp, synthetic construct
  misc_feature 1..1182: note = Variant of terminal deoxynucleotidyl transferase
  source 1..1182: mol_type = other DNA
atgcatcaccaccatcatcatgggggttctggtcatccggaaggtaataccccggagaaggaggtgccgagcgttatcgcccgtcatgttagtcagtacgcgtgccagcgcaagaccacgctgaataactacaacaaaaagttcaccgacgcgctggagatcatggccgagaactacaaatttaaagagaacctgcaggcgtgcctggaagccaagcgcgccgcgagtgtcctgaaaagcctgccgttcgaggttaccagcatgaaagacatccaaggtctgccgtgcattaccgacgacgtacgtgacgtgatcgaagagatcatcgaagagggcgagagcagccgtgttaaagaaatcctcaatgacgagcgctacaaggcctttaagcagttcaccagcgtgttcggtgtgggcgtgaaaacctcggaaaagtggtaccgtatgggcctccgtacggttgaagaagcaaaggccagtaagagtctgaagctgagcaagatgcagaaggcgggcttcctgtattacgaggatctggcgagcggtgttagtaaagaagaagccgatgccgttacgctcatcgtgaaggaaacggtgcgcactgttagtccggatgcgctggtgaccatcgccggcggtttccgccgtggcaaacctatgggccacgacgttgacctgctgatcacgattccgggccgtcctgaagatgacgagctgctccacaaagtggttgatctgctcaagaagcaaggtctgctgctgtacggtgacatccgtgagagcacgttcgtggaggggcaactgccaaatcctaaacctgacgccctggacaaccatcagaagtgcttcgccattctcaagctgtaccgtccgaaggtggataacagtgcggttgggacgagtaagaaaagtgacatggctgaggttaaggattggaaagcggttcgtgtggatctggtgattgcgccattcgagcagttcgcctatgcgctgctcggttggacgggcagcggccaatttcgtcgcgatactcgtcgctatgcggaggaagagcgcgacatgctgctcgacaaccatcgtctctacgacctgaaaaagggcatctttctgagtgcggacagcgaagaagagattttcggtcatctggacctggattatctggagccgtgggaacgcaacgcg

SEQ ID NO: 4870 - protein, 394 aa, synthetic construct
  REGION 1..394: note = Variant of terminal deoxynucleotidyl transferase
MHHHHHHGGSGHPEGNTPEKEVPSVIARHVSQYACQRKTTLNNYNKKFTDALEIMAENYKFKENLQACLEAKRAASVLKSLPFEVTSMKDIQGLPCITDDVRDVIEEIIEEGESSRVKEILNDERYKAFKQFTSVFGVGVKTSEKWYRMGLRTVEEAKASKSLKLSKMQKAGFLYYEDLASGVSKEEADAVTLIVKETVRTVSPDALVTIAGGFRRGKPMGHDVDLLITIPGRPEDDELLHKVVDLLKKQGLLLYGDIRESTFVEGQLPNPKPDALDNHQKCFAILKLYRPKVDNSAVGTSKKSDMAEVKDWKAVRVDLVIAPFEQFAYALLGWTGSGQFRRDTRRYAEEERDMLLDNHRLYDLKKGIFLSADSEEEIFGHLDLDYLEPWERNA

SEQ ID NO: 4871 - DNA, 1182 bp, synthetic construct
  misc_feature 1..1182: note = Variant of terminal deoxynucleotidyl transferase
  source 1..1182: mol_type = other DNA
atgcatcaccaccatcatcatgggggttctggtcatccggaaggtaataccccggagaaggaggtgccgagcgttatcgcccgtcatgttagtcagtacgcgtgccagcgcaagaccacgctgaataactacaacaaaaagttcaccgacgcgctggagatcatggccgagaactacaaatttaaagagaacctgcaggcgtgcctggaagccaagcgcgccgcgagtgtcctgaaaagcctgccgttcgaggttaccagcatgaaagacatccaaggtctgccgtgcattaccgacgacgtacgtgacgtgatcgaagagatcatcgaagagggcgagagcagccgtgttaaagaaatcctcaatgacgagcgctacaaggcctttaagcagttcaccagcgtgttcggtgtgggcgtgaaaacctcggaaaagtggtaccgtatgggcctccgtacggttgaagaagcaaaggccagtaagagtctgaagctgagcaagatgcagaaggcgggcttcctgtattacgaggatctggcgagcggtgttagtaaagaagaagccgatgccgttacgctcatcgtgaaggaaacggtgcgcactgttagtccggatgcgctggtgaccatcgccggcggtttccgccgtggcaaacctatgggccacgacgttgacctgctgatcacgattccgggccgtcctgaagatgacgagctgctccacaaagtggttgatctgctcaagaagcaaggtctgctgctgtacgaagacatccgtgagcggacgttcgtggaggggcaactgccaaatcctaaacctgacgccctggacaaccatcagaagtgcttcgccattctcaagctgtaccgtccgaaggtggataacagtgcggttgggacgagtaagaaaagtgacatggctgaggttaaggattggaaagcggttcgtgtggatctggtgattgcgccattcgagcagttcgcctatgcgctgctcggttggacgggcagcggccaatttcgtcgcgatactcgtcgctatgcggaggaagagcgcgacatgctgctcgacaaccatcgtctctacgacctgaaaaagggcatctttctgagtgcggacagcgaagaagagattttcggtcatctggacctggattatctggagccgtgggaacgcaacgcg

SEQ ID NO: 4872 - protein, 394 aa, synthetic construct
  REGION 1..394: note = Variant of terminal deoxynucleotidyl transferase
MHHHHHHGGSGHPEGNTPEKEVPSVIARHVSQYACQRKTTLNNYNKKFTDALEIMAENYKFKENLQACLEAKRAASVLKSLPFEVTSMKDIQGLPCITDDVRDVIEEIIEEGESSRVKEILNDERYKAFKQFTSVFGVGVKTSEKWYRMGLRTVEEAKASKSLKLSKMQKAGFLYYEDLASGVSKEEADAVTLIVKETVRTVSPDALVTIAGGFRRGKPMGHDVDLLITIPGRPEDDELLHKVVDLLKKQGLLLYEDIRERTFVEGQLPNPKPDALDNHQKCFAILKLYRPKVDNSAVGTSKKSDMAEVKDWKAVRVDLVIAPFEQFAYALLGWTGSGQFRRDTRRYAEEERDMLLDNHRLYDLKKGIFLSADSEEEIFGHLDLDYLEPWERNA

SEQ ID NO: 4873 - DNA, 1182 bp, synthetic construct
  misc_feature 1..1182: note = Variant of terminal deoxynucleotidyl transferase
  source 1..1182: mol_type = other DNA
atgcatcaccaccatcatcatgggggttctggtcatccggaaggtaataccccggagaaggaggtgccgagcgttatcgcccgtcatgttagtcagtacgcgtgccagcgcaagaccacgctgaataactacaacaaaaagttcaccgacgcgctggagatcatggccgagaactacaaatttaaagagaacctgcaggcgtgcctggaagccaagcgcgccgcgagtgtcctgaaaagcctgccgttcgaggttaccagcatgaaagacatccaaggtctgccgtgcattaccgacgacgtacgtgacgtgatcgaagagatcatcgaagagggcgagagcagccgtgttaaagaaatcctcaatgacgagcgctacaaggcctttaagcagttcaccagcgtgttcggtgtgggcgtgaaaacctcggaaaagtggtaccgtatgggcctccgtacggttgaagaagcaaaggccagtaagagtctgaagctgagcaagatgcagaaggcgggcttcctgtattacgaggatctggcgagcggtgttagtaaagaagaagccgatgccgttcttctcatcgtgaaggaaacggtgcgcactgttagtccggatgcgctggtgaccatcgccggcggtttccgccgtggcaaacctatgggccacgacgttgacctgctgatcacgattccgggccgtcctgaagatgacgagctgctccacaaagtggttgatctgctcaagaagcaaggtctgctgctgtacgaagacatccgtgagagcacgttcgtggaggggcaactgccaaatcctaaacctgacgccctggacaaccatcagaagtgcttcgccattctcaagctgtaccgtccgaaggtggataacagtgcggttgggacgagtaagaaaagtgacatggctgaggttaaggattggaaagcggttcgtgtggatctggtgattgcgccattcgagcagttcgcctatgcgctgctcggttggacgggcagcggccaatttcgtcgcgatactcgtcgctatgcggaggaagagcgcgacatgctgctcgacaaccatcgtctctacgacctgaaaaagggcatctttctgagtgcggacagcgaagaagagattttcggtcatctggacctggattatctggagccgtgggaacgcaacgcg

SEQ ID NO: 4874 - protein, 394 aa, synthetic construct
  REGION 1..394: note = Variant of terminal deoxynucleotidyl transferase
MHHHHHHGGSGHPEGNTPEKEVPSVIARHVSQYACQRKTTLNNYNKKFTDALEIMAENYKFKENLQACLEAKRAASVLKSLPFEVTSMKDIQGLPCITDDVRDVIEEIIEEGESSRVKEILNDERYKAFKQFTSVFGVGVKTSEKWYRMGLRTVEEAKASKSLKLSKMQKAGFLYYEDLASGVSKEEADAVLLIVKETVRTVSPDALVTIAGGFRRGKPMGHDVDLLITIPGRPEDDELLHKVVDLLKKQGLLLYEDIRESTFVEGQLPNPKPDALDNHQKCFAILKLYRPKVDNSAVGTSKKSDMAEVKDWKAVRVDLVIAPFEQFAYALLGWTGSGQFRRDTRRYAEEERDMLLDNHRLYDLKKGIFLSADSEEEIFGHLDLDYLEPWERNA

SEQ ID NO: 4875 - DNA, 1182 bp, synthetic construct
  misc_feature 1..1182: note = Variant of terminal deoxynucleotidyl transferase
  source 1..1182: mol_type = other DNA
atgcatcaccaccatcatcatgggggttctggtcatccggaaggtaataccccggagaaggaggtgccgagcgttatcgcccgtcatgttagtcagtacgcgtgccagcgcaagaccacgctgaataactacaacaaaaagttcaccgacgcgctggagatcatggccgagaactacaaatttaaagagaacctgcaggcgtgcctggaagccaagcgcgccggtagtgtcctgaaaagcctgccgttcgaggttaccagcatgaaagacatccaaggtctgccgtgcattaccgacgacgtacgtgacgtgatcgaagagatcatcgaagagggcgagagcagccgtgttaaagaaatcctcaatgacgagcgctacaaggcctttaagcagttcaccagcgtgttcggtgtgggcgtgaaaacctcggaaaagtggtaccgtatgggcctccgtacggttgaagaagcaaaggccagtaagagtctgaagctgagcaagatgcagaaggcgggcttcctgtattacgaggatctggcgagcggtgttagtaaagaagaagccgatgccgttacgctcatcgtgaaggaaacggtgcgcactgttagtccggatgcgctggtgaccatcgccggcggtttccgccgtggcaaacctatgggccacgacgttgacctgctgatcacgattccgggccgtcctgaagatgacgagctgctccacaaagtggttgatctgctcaagaagcaaggtctgctgctgtacgaagacatccgtgagagcacgttcgtggaggggcaactgccaaatcctaaacctgacgccctggacaaccatcagaagtgcttcgccattctcaagctgtaccgtccgaaggtggataacagtgcggttgggacgagtaagaaaagtgacatggctgaggttaaggattggaaagcggttcgtgtggatctggtgattgcgccattcgagcagttcgcctatgcgctgctcggttggacgggcagcggccaatttcgtcgcgatactcgtcgctatgcggaggaagagcgcgacatgctgctcgacaaccatcgtctctacgacctgaaaaagggcatctttctgagtgcggacagcgaagaagagattttcggtcatctggacctggattatctggagccgtgggaacgcaacgcg

SEQ ID NO: 4876 - protein, 394 aa, synthetic construct
  REGION 1..394: note = Variant of terminal deoxynucleotidyl transferase
MHHHHHHGGSGHPEGNTPEKEVPSVIARHVSQYACQRKTTLNNYNKKFTDALEIMAENYKFKENLQACLEAKRAGSVLKSLPFEVTSMKDIQGLPCITDDVRDVIEEIIEEGESSRVKEILNDERYKAFKQFTSVFGVGVKTSEKWYRMGLRTVEEAKASKSLKLSKMQKAGFLYYEDLASGVSKEEADAVTLIVKETVRTVSPDALVTIAGGFRRGKPMGHDVDLLITIPGRPEDDELLHKVVDLLKKQGLLLYEDIRESTFVEGQLPNPKPDALDNHQKCFAILKLYRPKVDNSAVGTSKKSDMAEVKDWKAVRVDLVIAPFEQFAYALLGWTGSGQFRRDTRRYAEEERDMLLDNHRLYDLKKGIFLSADSEEEIFGHLDLDYLEPWERNA

SEQ ID NO: 4877 - DNA, 1182 bp, synthetic construct
  misc_feature 1..1182: note = Variant of terminal deoxynucleotidyl transferase
  source 1..1182: mol_type = other DNA
atgcatcaccaccatcatcatgggggttctggtcatccggaaggtaataccccggagaaggaggtgccgagcgttatcgcccgtcatgttagtcagtacgcgtgccagcgcaagaccacgctgaataactacaacaaaaagttcaccgacgcgctggagatcatggccgagaactacaaatttaaagagaacctgcaggcgtgcctggaagccaagcgcgccgcgagtgtcctgaaaagcctgccgttcgaggttaccagcatgaaagacatccaaggtctgccgtgcattaccgacgacgtacgtgacgtgatcgaagagatcatcgaagagggcgagagcagccgtgttaaagaaatcctcaatgacgagcgctacaaggcctttaagcagttcaccagcgtgttcggtgtgggcgtgaaaacctcggaaaagtggtaccgtatgggcctccgtacggttgaagaagcaaaggccagtaagagtctgaagctgagcaagatgcagaaggcgggcttcctgtattacgaggatctggcgagcggtgttagtaaagaagaagccgatgccgttacgctcatcgtgaaggaaacggtgcgcactgttagtccggatgcgctggtgaccatcgccggcggtttccgccgtggcaaacctatgggccacgacgttgacctgctgatcacgattccgggccgtcctgaagatgacgagctgctccacaaagtggttgatctgctcaagaagcaaggtctgctgctgtacgaagacatccgtgagagcacgttcgtggaggggcaactgccaaatcctaaacctgacgccctggacaaccatcagaagtgcttctgtattctcaagctgtaccgtccgaaggtggataacagtgcggttgggacgagtaagaaaagtgacatggctgaggttaaggattggaaagcggttcgtgtggatctggtgattgcgccattcgagcagttcgcctatgcgctgctcggttggacgggcagcggccaatttcgtcgcgatactcgtcgctatgcggaggaagagcgcgacatgctgctcgacaaccatcgtctctacgacctgaaaaagggcatctttctgagtgcggacagcgaagaagagattttcggtcatctggacctggattatctggagccgtgggaacgcaacgcg

SEQ ID NO: 4878 - protein, 394 aa, synthetic construct
  REGION 1..394: note = Variant of terminal deoxynucleotidyl transferase
MHHHHHHGGSGHPEGNTPEKEVPSVIARHVSQYACQRKTTLNNYNKKFTDALEIMAENYKFKENLQACLEAKRAASVLKSLPFEVTSMKDIQGLPCITDDVRDVIEEIIEEGESSRVKEILNDERYKAFKQFTSVFGVGVKTSEKWYRMGLRTVEEAKASKSLKLSKMQKAGFLYYEDLASGVSKEEADAVTLIVKETVRTVSPDALVTIAGGFRRGKPMGHDVDLLITIPGRPEDDELLHKVVDLLKKQGLLLYEDIRESTFVEGQLPNPKPDALDNHQKCFCILKLYRPKVDNSAVGTSKKSDMAEVKDWKAVRVDLVIAPFEQFAYALLGWTGSGQFRRDTRRYAEEERDMLLDNHRLYDLKKGIFLSADSEEEIFGHLDLDYLEPWERNA

SEQ ID NO: 4879 - DNA, 1182 bp, synthetic construct
  misc_feature 1..1182: note = Variant of terminal deoxynucleotidyl transferase
  source 1..1182: mol_type = other DNA
atgcatcaccaccatcatcatgggggttctggtcatccggaaggtaataccccggagaaggaggtgccgagcgttatcgcccgtcatgttagtcagtacgcgtgccagcgcaagaccacgctgaataactacaacaaaaagttcaccgacgcgctggagatcatggccgagaactacaaatttaaagagaacctgcaggcgtgcctggaagccaagcgcgccgcgagtgtcctgaaaagcctgccgttcgaggttaccagcatgaaagacatccaaggtctgccgtgcattaccgacgacgtacgtgacgtgatcgaagagatcatcgaagagggcgagagcagccgtgttaaagaaatcctcaatgacgagcgctacaaggcctttaagcagttcaccagcgtgttcggtgtgggcgtgaaaacctcggaaaagtggtaccgtatgggcctccgtacggttgaagaagcaaaggccagtaagagtctgaagctgagcaagatgcagaaggcgggcttcctgtattacgaggatctggcgagcggtgttagtaaagaagaagccgatgccgttacgctcatcgtgaaggaaacggtgcgcactgttagtccggatgcgctggtgaccatcgccggcggtttccgccgtggcaaacctatgggccacgacgttgacctgctgatcacgattccgggccgtcctgaagatgacgagctgctccacaaagtggttgatctgctcaagaagcaaggtctgctgctgtacgaagacatccgtgagaagacgttcgtggaggggcaactgccaaatcctaaacctgacgccctggacaaccatcagaagtgcttcgccattctcaagctgtaccgtccgaaggtggataacagtgcggttgggacgagtaagaaaagtgacatggctgaggttaaggattggaaagcggttcgtgtggatctggtgattgcgccattcgagcagttcgcctatgcgctgctcggttggacgggcagcggccaatttcgtcgcgatactcgtcgctatgcggaggaagagcgcgacatgctgctcgacaaccatcgtctctacgacctgaaaaagggcatctttctgagtgcggacagcgaagaagagattttcggtcatctggacctggattatctggagccgtgggaacgcaacgcg

SEQ ID NO: 4880 - protein, 394 aa, synthetic construct
  REGION 1..394: note = Variant of terminal deoxynucleotidyl transferase
MHHHHHHGGSGHPEGNTPEKEVPSVIARHVSQYACQRKTTLNNYNKKFTDALEIMAENYKFKENLQACLEAKRAASVLKSLPFEVTSMKDIQGLPCITDDVRDVIEEIIEEGESSRVKEILNDERYKAFKQFTSVFGVGVKTSEKWYRMGLRTVEEAKASKSLKLSKMQKAGFLYYEDLASGVSKEEADAVTLIVKETVRTVSPDALVTIAGGFRRGKPMGHDVDLLITIPGRPEDDELLHKVVDLLKKQGLLLYEDIREKTFVEGQLPNPKPDALDNHQKCFAILKLYRPKVDNSAVGTSKKSDMAEVKDWKAVRVDLVIAPFEQFAYALLGWTGSGQFRRDTRRYAEEERDMLLDNHRLYDLKKGIFLSADSEEEIFGHLDLDYLEPWERNA

SEQ ID NO: 4881 - DNA, 1182 bp, synthetic construct
  misc_feature 1..1182: note = Variant of terminal deoxynucleotidyl transferase
  source 1..1182: mol_type = other DNA
atgcatcaccaccatcatcatgggggttctggtcatccggaaggtaataccccggagaaggaggtgccgagcgttatcgcccgtcatgttagtcagtacgcgtgccagcgcaagaccacgctgaataactacaacaaaaagttcaccgacgcgctggagatcatggccgagaactacaaatttaaagagaacctgcaggcgtgcctggaagccaagcgcgccgcgagtgtcctgaaaagcctgccgttcgaggttaccagcatgaaagacatccaaggtctgccgtgcattaccgacgacgtacgtgacgtgatcgaagagatcatcgaagagggcgagagcagccgtgttaaagaaatcctcaatgacgagcgctacaaggcctttaagcagttcaccagcgtgttcggtgtgggcgtgaaaacctcggaaaagtggtaccgtatgggcctccgtacggttgaagaagcaaaggccagtaagagtctgaagctgagcaagatgcagaaggcgggcttcctgtattacgaggatctggcgagcggtgttagtaaagaagaagccgatgccgttacgctcatcgtgaaggaaacggtgcgcactgttagtccggatgcgctggtgaccgtggccggcggtttccgccgtggcaaacctatgggccacgacgttgacctgctgatcacgattccgggccgtcctgaagatgacgagctgctccacaaagtggttgatctgctcaagaagcaaggtctgctgctgtacgaagacatccgtgagagcacgttcgtggaggggcaactgccaaatcctaaacctgacgccctggacaaccatcagaagtgcttcgccattctcaagctgtaccgtccgaaggtggataacagtgcggttgggacgagtaagaaaagtgacatggctgaggttaaggattggaaagcggttcgtgtggatctggtgattgcgccattcgagcagttcgcctatgcgctgctcggttggacgggcagcggccaatttcgtcgcgatactcgtcgctatgcggaggaagagcgcgacatgctgctcgacaaccatcgtctctacgacctgaaaaagggcatctttctgagtgcggacagcgaagaagagattttcggtcatctggacctggattatctggagccgtgggaacgcaacgcg

SEQ ID NO: 4882 - protein, 394 aa, synthetic construct
  REGION 1..394: note = Variant of terminal deoxynucleotidyl transferase
MHHHHHHGGSGHPEGNTPEKEVPSVIARHVSQYACQRKTTLNNYNKKFTDALEIMAENYKFKENLQACLEAKRAASVLKSLPFEVTSMKDIQGLPCITDDVRDVIEEIIEEGESSRVKEILNDERYKAFKQFTSVFGVGVKTSEKWYRMGLRTVEEAKASKSLKLSKMQKAGFLYYEDLASGVSKEEADAVTLIVKETVRTVSPDALVTVAGGFRRGKPMGHDVDLLITIPGRPEDDELLHKVVDLLKKQGLLLYEDIRESTFVEGQLPNPKPDALDNHQKCFAILKLYRPKVDNSAVGTSKKSDMAEVKDWKAVRVDLVIAPFEQFAYALLGWTGSGQFRRDTRRYAEEERDMLLDNHRLYDLKKGIFLSADSEEEIFGHLDLDYLEPWERNA

SEQ ID NO: 4883 - DNA, 1182 bp, synthetic construct
  misc_feature 1..1182: note = Variant of terminal deoxynucleotidyl transferase
  source 1..1182: mol_type = other DNA
atgcatcaccaccatcatcatgggggttctggtcatccggaaggtaataccccggagaaggaggtgccgagcgttatcgcccgtcatgttagtcagtacgcgtgccagcgcaagaccacgctgaataactacaacaaaaagttcaccgacgcgctggagatcatggccgagaactacaaatttaaagagaacctgcaggcgtgcctggaagccaagcgcgccgcgagtgtcctgaaaagcctgccgttcgaggttaccagcatgaaagacatccaaggtctgccgtgcattaccgacgacgtacgtgacgtgatcgaagagatcatcgaagagggcgagagcagccgtgttaaagaaatcctcaatgacgagcgctacaaggcctttaagcagttcaccagcgtgttcggtgtgggcgtgaaaacctcggaaaagtggtaccgtatgggcctccgtacggttgaagaagcaaaggccagtaagagtctgaagctgagcaagatgcagaaggcgggcttcctgtattacgaggatctggcgagcggtgttagtaaagaagaagccgatgccgttacgctcatcgtgaaggaaacggtgcgcactgttagtccggatgcgctggtgaccatcgccggcggtttccgccgtggcaaacctatgggccacgacgttgacctgctgatcacgattccgggccgtcctgaagatgacgagctgctccacaaagtggttgatctgctcaagaagcaaggtctgctgctgtacgaagacatccgtgagagcacgttcgtggaggggcaactgccaaatcctaaacctgacgccctggacaaccatcagaagtgcttcgccattctcaagctgtaccgtccgaaggtggataacagtgcggttgggacgagtaagaaaagtgacatggctgaggttaaggattggaaagcggttcgtgtggatctggtgattgcgccattcgagcagttcgcctatgcgctgctcggttggacgggcagcggccaatttcgtcgcgatactcgtcgctatgcggaggaagagcgcgacatgctgctcgacaaccatcgtctctacgacctgaaaaagggcatctttctgggtgcggacagcgaagaagagattttcggtcatctggacctggattatctggagccgtgggaacgcaacgcg

SEQ ID NO: 4884 - protein, 394 aa, synthetic construct
  REGION 1..394: note = Variant of terminal deoxynucleotidyl transferase
MHHHHHHGGSGHPEGNTPEKEVPSVIARHVSQYACQRKTTLNNYNKKFTDALEIMAENYKFKENLQACLEAKRAASVLKSLPFEVTSMKDIQGLPCITDDVRDVIEEIIEEGESSRVKEILNDERYKAFKQFTSVFGVGVKTSEKWYRMGLRTVEEAKASKSLKLSKMQKAGFLYYEDLASGVSKEEADAVTLIVKETVRTVSPDALVTIAGGFRRGKPMGHDVDLLITIPGRPEDDELLHKVVDLLKKQGLLLYEDIRESTFVEGQLPNPKPDALDNHQKCFAILKLYRPKVDNSAVGTSKKSDMAEVKDWKAVRVDLVIAPFEQFAYALLGWTGSGQFRRDTRRYAEEERDMLLDNHRLYDLKKGIFLGADSEEEIFGHLDLDYLEPWERNA

SEQ ID NO: 4885 - DNA, 1182 bp, synthetic construct
  misc_feature 1..1182: note = Variant of terminal deoxynucleotidyl transferase
  source 1..1182: mol_type = other DNA
atgcatcaccaccatcatcatgggggttctggtcatccggaaggtaataccccggagaaggaggtgccgagcgttatcgcccgtcatgttagtcagtacgcgtgccagcgcaagaccacgctgaataactacaacaaaaagttcaccgacgcgctggagatcatggccgagaactacaaatttaaagagaacctgcaggcgtgcctggaagccaagcgcgccgcgagtgtcctgaaaagcctgccgttcgaggttaccagcatgaaagacatccaaggtctgccgtgcattaccgacgacgtacgtgacgtgatcgaagagatcatcgaagagggcgagagcagccgtgttaaagaaatcctcaatgacgagcgctacaaggcctttaagcagttcaccagcgtgttcggtgtgggcgtgaaaacctcggaaaagtggtaccgtatgggcctccgtacggttgaagaagcaaaggccagtaagagtctgaagctgagcaagatgcagaaggcgggcttcctgtattacgaggatctggcgagcggtgttagtaaagaagaagccgatgccgttacgctcatcgtgaaggaaacggtgcgcactgttagtccggatgcgctggtgaccatcgccggcggtttccgccgtggcaaacctatgggccacgacgttgacctgctgatcacgattccgggccgtcctgaagatgacgagctgctccacaaagtggttgatctgctcaagaagcaaggtctgctgctgtacgaagacatccgtgagagcacgttcgtggaggggcaaattccaaatcctaaacctgacgccctggacaaccatcagaagtgcttcgccattctcaagctgtaccgtccgaaggtggataacagtgcggttgggacgagtaagaaaagtgacatggctgaggttaaggattggaaagcggttcgtgtggatctggtgattgcgccattcgagcagttcgcctatgcgctgctcggttggacgggcagcggccaatttcgtcgcgatactcgtcgctatgcggaggaagagcgcgacatgctgctcgacaaccatcgtctctacgacctgaaaaagggcatctttctgagtgcggacagcgaagaagagattttcggtcatctggacctggattatctggagccgtgggaacgcaacgcg

SEQ ID NO: 4886 - protein, 394 aa, synthetic construct
  REGION 1..394: note = Variant of terminal deoxynucleotidyl transferase
MHHHHHHGGSGHPEGNTPEKEVPSVIARHVSQYACQRKTTLNNYNKKFTDALEIMAENYKFKENLQACLEAKRAASVLKSLPFEVTSMKDIQGLPCITDDVRDVIEEIIEEGESSRVKEILNDERYKAFKQFTSVFGVGVKTSEKWYRMGLRTVEEAKASKSLKLSKMQKAGFLYYEDLASGVSKEEADAVTLIVKETVRTVSPDALVTIAGGFRRGKPMGHDVDLLITIPGRPEDDELLHKVVDLLKKQGLLLYEDIRESTFVEGQIPNPKPDALDNHQKCFAILKLYRPKVDNSAVGTSKKSDMAEVKDWKAVRVDLVIAPFEQFAYALLGWTGSGQFRRDTRRYAEEERDMLLDNHRLYDLKKGIFLSADSEEEIFGHLDLDYLEPWERNA

SEQ ID NO: 4887 - DNA, 1182 bp, synthetic construct
  misc_feature 1..1182: note = Variant of terminal deoxynucleotidyl transferase
  source 1..1182: mol_type = other DNA
atgcatcaccaccatcatcatgggggttctggtcatccggaaggtaataccccggagaaggaggtgccgagcgttatcgcccgtcatgttagtcagtacgcgtgccagcgcaagaccacgctgaataactacaacaaaaagttcaccgacgcgctggagatcatggccgagaactacaaatttaaagagaacctgcaggcgtgcctggaagccaagcgcgccgcgagtgtcctgaaaagcctgccgttcgaggttaccagcatgaaagacatccaaggtctgccgtgcattaccgacgacgtacgtgacgtgatcgaagagatcatcgaagagggcgagagcagccgtgttaaagaaatcctcaatgacgagcgctacaaggcctttaagcagttcaccagcgtgttcggtgtgggcgtgaaaacctcggaaaagtggtaccgtatgggcctccgtacggttgaagaagcaaaggccagtaagagtctgaagctgagcaagatgcagaaggcgggcttcctgtattacgaggatctggcgagcggtgttagtaaagaagaagccgatgccgttacgctcatcgtgaaggaaacggtgcgcactgttagtccggatgcgctggtgaccatcgccggcggtttccgccgtggcaaacctatgggccacgacgttgacctgctgatcacgattccgggccgtcctgaagatgacgagctgctccacaaagtggttgatctgctcaagaagcaaggtctgctgctgtacgaagacatccgtgagagcacgttcgtggaggggcaactgccaaatcctaaacctgacgccctggacaaccatcagaagtgcttcgccattctcaagctgtaccgtccgaaggtggataacagtgcggttgggacgagtaagaaaagtgacatggctgaggttaaggattggaaagcggttcgtgtggatctggtgattgcgccattcgagcagttcgcctatgcgctgctcggttggacgggcagcggccaatttcgtcgcgatactcgtcgctatgcgcgggaagagcgcgacatgctgctcgacaaccatcgtctctacgacctgaaaaagggcatctttctgagtgcggacagcgaagaagagattttcggtcatctggacctggattatctggagccgtgggaacgcaacgcg

SEQ ID NO: 4888 - protein, 394 aa, synthetic construct
  REGION 1..394: note = Variant of terminal deoxynucleotidyl transferase
MHHHHHHGGSGHPEGNTPEKEVPSVIARHVSQYACQRKTTLNNYNKKFTDALEIMAENYKFKENLQACLEAKRAASVLKSLPFEVTSMKDIQGLPCITDDVRDVIEEIIEEGESSRVKEILNDERYKAFKQFTSVFGVGVKTSEKWYRMGLRTVEEAKASKSLKLSKMQKAGFLYYEDLASGVSKEEADAVTLIVKETVRTVSPDALVTIAGGFRRGKPMGHDVDLLITIPGRPEDDELLHKVVDLLKKQGLLLYEDIRESTFVEGQLPNPKPDALDNHQKCFAILKLYRPKVDNSAVGTSKKSDMAEVKDWKAVRVDLVIAPFEQFAYALLGWTGSGQFRRDTRRYAREERDMLLDNHRLYDLKKGIFLSADSEEEIFGHLDLDYLEPWERNA

SEQ ID NO: 4889 - DNA, 1182 bp, synthetic construct
  misc_feature 1..1182: note = Variant of terminal deoxynucleotidyl transferase
  source 1..1182: mol_type = other DNA
atgcatcaccaccatcatcatgggggttctggtcatccggaaggtaataccccggagaaggaggtgccgagcgttatcgcccgtcatgttagtcagtacgcgtgccagcgcaagaccacgctgaataactacaacaaaaagttcaccgacgcgctggagatcatggccgagaactacaaatttaaagagaacctgcaggcgtgcctggaagccaagcgcgccgcgagtgtcctgaaaagcctgccgttcgaggttaccagcatgaaagacatccaaggtctgccgtgcattaccgacgacgtacgtgacgtgatcgaagagatcatcgaagagggcgagagcagccgtgttaaagaaatcctcaatgacgagcgctacaaggcctttaagcagttcaccagcgtgttcggtgtgggcgtgaaaacctcggaaaagtggtaccgtatgggcctccgtacggttgaagaagcaaaggccagtaagagtctgaagctgagcaagatgcagaaggcgggcttcctgtattacgaggatctggcgagcggtgttagtaaagaagaagccgatgccgttacgctcatcgtgaaggaaacggtgcgcactgttagtccggatgcgctggtgaccatcgccggcggtttccgccgtggcaaacctatgggccacgacgttgacctgctgatcacgattccgggccgtcctgaagatgacgagctgctccacaaagtggttgatctgctcaagaagcaaggtctgctgctgtacgaagacatccgtgagagcacgttcgtggaggggcaactgccaaatcctaaacctgacgccctggacaaccatcagaagtgcttcgccattctcaagctgtaccgtccgaaggtggataacagtgcggttgggacgagtaagaaaagtgacatggctgaggttaaggattggaaagcggttcgtgtggatctggtgattgcgccattcgagcagttcgcctatgcgctgctcggttggacgggcagcggccaatttcgtcgcgatactcgtcgctatgcggaggaagagcgcgacatgctgctcgacaaccatcgtctctacgacctgaaaaagggcatctttctgatggcggacagcgaagaagagattttcggtcatctggacctggattatctggagccgtgggaacgcaacgcg

SEQ ID NO: 4890 - protein, 394 aa, synthetic construct
  REGION 1..394: note = Variant of terminal deoxynucleotidyl transferase
MHHHHHHGGSGHPEGNTPEKEVPSVIARHVSQYACQRKTTLNNYNKKFTDALEIMAENYKFKENLQACLEAKRAASVLKSLPFEVTSMKDIQGLPCITDDVRDVIEEIIEEGESSRVKEILNDERYKAFKQFTSVFGVGVKTSEKWYRMGLRTVEEAKASKSLKLSKMQKAGFLYYEDLASGVSKEEADAVTLIVKETVRTVSPDALVTIAGGFRRGKPMGHDVDLLITIPGRPEDDELLHKVVDLLKKQGLLLYEDIRESTFVEGQLPNPKPDALDNHQKCFAILKLYRPKVDNSAVGTSKKSDMAEVKDWKAVRVDLVIAPFEQFAYALLGWTGSGQFRRDTRRYAEEERDMLLDNHRLYDLKKGIFLMADSEEEIFGHLDLDYLEPWERNA

SEQ ID NO: 4891 - DNA, 1182 bp, synthetic construct
  misc_feature 1..1182: note = Variant of terminal deoxynucleotidyl transferase
  source 1..1182: mol_type = other DNA
atgcatcaccaccatcatcatgggggttctggtcatccggaaggtaataccccggagaaggaggtgccgagcgttatcgcccgtcatgttagtcagtacgcgtgccagcgcaagaccacgctgaataactacaacaaaaagttcaccgacgcgctggagatcatggccgagaactacaaatttaaagagaacctgcaggcgatgctggaagccaagcgcgccgcgagtgtcctgaaaagcctgccgttcgaggttaccagcatgaaagacatccaaggtctgccgtgcattaccgacgacgtacgtgacgtgatcgaagagatcatcgaagagggcgagagcagccgtgttaaagaaatcctcaatgacgagcgctacaaggcctttaagcagttcaccagcgtgttcggtgtgggcgtgaaaacctcggaaaagtggtaccgtatgggcctccgtacggttgaagaagcaaaggccagtaagagtctgaagctgagcaagatgcagaaggcgggcttcctgtattacgaggatctggcgagcggtgttagtaaagaagaagccgatgccgttacgctcatcgtgaaggaaacggtgcgcactgttagtccggatgcgctggtgaccatcgccggcggtttccgccgtggcaaacctatgggccacgacgttgacctgctgatcacgattccgggccgtcctgaagatgacgagctgctccacaaagtggttgatctgctcaagaagcaaggtctgctgctgtacgaagacatccgtgagagcacgttcgtggaggggcaactgccaaatcctaaacctgacgccctggacaaccatcagaagtgcttcgccattctcaagctgtaccgtccgaaggtggataacagtgcggttgggacgagtaagaaaagtgacatggctgaggttaaggattggaaagcggttcgtgtggatctggtgattgcgccattcgagcagttcgcctatgcgctgctcggttggacgggcagcggccaatttcgtcgcgatactcgtcgctatgcggaggaagagcgcgacatgctgctcgacaaccatcgtctctacgacctgaaaaagggcatctttctgagtgcggacagcgaagaagagattttcggtcatctggacctggattatctggagccgtgggaacgcaacgcg

SEQ ID NO: 4892 - protein, 394 aa, synthetic construct
  REGION 1..394: note = Variant of terminal deoxynucleotidyl transferase
MHHHHHHGGSGHPEGNTPEKEVPSVIARHVSQYACQRKTTLNNYNKKFTDALEIMAENYKFKENLQAMLEAKRAASVLKSLPFEVTSMKDIQGLPCITDDVRDVIEEIIEEGESSRVKEILNDERYKAFKQFTSVFGVGVKTSEKWYRMGLRTVEEAKASKSLKLSKMQKAGFLYYEDLASGVSKEEADAVTLIVKETVRTVSPDALVTIAGGFRRGKPMGHDVDLLITIPGRPEDDELLHKVVDLLKKQGLLLYEDIRESTFVEGQLPNPKPDALDNHQKCFAILKLYRPKVDNSAVGTSKKSDMAEVKDWKAVRVDLVIAPFEQFAYALLGWTGSGQFRRDTRRYAEEERDMLLDNHRLYDLKKGIFLSADSEEEIFGHLDLDYLEPWERNA

SEQ ID NO: 4893 - DNA, 1182 bp, synthetic construct
  misc_feature 1..1182: note = Variant of terminal deoxynucleotidyl transferase
  source 1..1182: mol_type = other DNA
atgcatcaccaccatcatcatgggggttctggtcatccggaaggtaataccccggagaaggaggtgccgagcgttatcgcccgtcatgttagtcagtacgcgtgccagcgcaagaccacgctgaataactacaacaaaaagttcaccgacgcgctggagatcatggccgagaactacaaatttaaagagaacctgcaggcgtgcctggaagccaagcgcgccgcgagtgtcctgaaaagcctgccgttcgaggttaccagcatgaaagacatccaaggtctgccgtgcattaccgacgacgtacgtgacgtgatcgaagagatcatcgaagagggcgagagcagccgtgttaaagaaatcctcaatgacgagcgctacaaggcctttaagcagttcaccagcgtgttcggtgtgggcgtgaaaacctcggaaaagtggtaccgtatgggcctccgtacggttgaagaagcaaaggccagtaagagtctgaagctgagcaagatgcagaaggcgggcttcctgtattacgaggatctggcgagcggtgttagtaaagaagaagccgatgccgttacgctcatcgtgaaggaaacggtgcgcactgttagtccggatgcgctggtgacccttgccggcggtttccgccgtggcaaacctatgggccacgacgttgacctgctgatcacgattccgggccgtcctgaagatgacgagctgctccacaaagtggttgatctgctcaagaagcaaggtctgctgctgtacgaagacatccgtgagagcacgttcgtggaggggcaactgccaaatcctaaacctgacgccctggacaaccatcagaagtgcttcgccattctcaagctgtaccgtccgaaggtggataacagtgcggttgggacgagtaagaaaagtgacatggctgaggttaaggattggaaagcggttcgtgtggatctggtgattgcgccattcgagcagttcgcctatgcgctgctcggttggacgggcagcggccaatttcgtcgcgatactcgtcgctatgcggaggaagagcgcgacatgctgctcgacaaccatcgtctctacgacctgaaaaagggcatctttctgagtgcggacagcgaagaagagattttcggtcatctggacctggattatctggagccgtgggaacgcaacgcg

SEQ ID NO: 4894 - protein, 394 aa, synthetic construct
  REGION 1..394: note = Variant of terminal deoxynucleotidyl transferase
MHHHHHHGGSGHPEGNTPEKEVPSVIARHVSQYACQRKTTLNNYNKKFTDALEIMAENYKFKENLQACLEAKRAASVLKSLPFEVTSMKDIQGLPCITDDVRDVIEEIIEEGESSRVKEILNDERYKAFKQFTSVFGVGVKTSEKWYRMGLRTVEEAKASKSLKLSKMQKAGFLYYEDLASGVSKEEADAVTLIVKETVRTVSPDALVTLAGGFRRGKPMGHDVDLLITIPGRPEDDELLHKVVDLLKKQGLLLYEDIRESTFVEGQLPNPKPDALDNHQKCFAILKLYRPKVDNSAVGTSKKSDMAEVKDWKAVRVDLVIAPFEQFAYALLGWTGSGQFRRDTRRYAEEERDMLLDNHRLYDLKKGIFLSADSEEEIFGHLDLDYLEPWERNA

SEQ ID NO: 4895 - DNA, 1182 bp, synthetic construct
  misc_feature 1..1182: note = Variant of terminal deoxynucleotidyl transferase
  source 1..1182: mol_type = other DNA
atgcatcaccaccatcatcatgggggttctggtcatccggaaggtaataccccggagaaggaggtgccgagcgttatcgcccgtcatgttagtcagtacgcgtgccagcgcaagaccacgctgaataactacaacaaaaagttcaccgacgcgctggagatcatggccgagaactacaaatttaaagagaacctgcaggcgtgcctggaagccaagcgcgccgcgagtgtcctgaaaagcctgccgttcgaggttaccagcatgaaagacatccaaggtctgccgtgcattaccgacgacgtacgtgacgtgatcgaagagatcatcgaagagggcgagagcagccgtgttaaagaaatcctcaatgacgagcgctacaaggcctttaagcagttcaccagcgtgttcggtgtgggcgtgaaaacctcggaaaagtggtaccgtatgggcctccgtacggttgaagaagcaaaggccagtaagagtctgaagctgagcaagatgcagaaggcgggcttcctgtattacgaggatctggcgagcggtgttagtagggaagaagccgatgccgttacgctcatcgtgaaggaaacggtgcgcactgttagtccggatgcgctggtgaccatcgccggcggtttccgccgtggcaaacctatgggccacgacgttgacctgctgatcacgattccgggccgtcctgaagatgacgagctgctccacaaagtggttgatctgctcaagaagcaaggtctgctgctgtacgaagacatccgtgagagcacgttcgtggaggggcaactgccaaatcctaaacctgacgccctggacaaccatcagaagtgcttcgccattctcaagctgtaccgtccgaaggtggataacagtgcggttgggacgagtaagaaaagtgacatggctgaggttaaggattggaaagcggttcgtgtggatctggtgattgcgccattcgagcagttcgcctatgcgctgctcggttggacgggcagcggccaatttcgtcgcgatactcgtcgctatgcggaggaagagcgcgacatgctgctcgacaaccatcgtctctacgacctgaaaaagggcatctttctgagtgcggacagcgaagaagagattttcggtcatctggacctggattatctggagccgtgggaacgcaacgcg

SEQ ID NO: 4896 - protein, 394 aa, synthetic construct
  REGION 1..394: note = Variant of terminal deoxynucleotidyl transferase
MHHHHHHGGSGHPEGNTPEKEVPSVIARHVSQYACQRKTTLNNYNKKFTDALEIMAENYKFKENLQACLEAKRAASVLKSLPFEVTSMKDIQGLPCITDDVRDVIEEIIEEGESSRVKEILNDERYKAFKQFTSVFGVGVKTSEKWYRMGLRTVEEAKASKSLKLSKMQKAGFLYYEDLASGVSREEADAVTLIVKETVRTVSPDALVTIAGGFRRGKPMGHDVDLLITIPGRPEDDELLHKVVDLLKKQGLLLYEDIRESTFVEGQLPNPKPDALDNHQKCFAILKLYRPKVDNSAVGTSKKSDMAEVKDWKAVRVDLVIAPFEQFAYALLGWTGSGQFRRDTRRYAEEERDMLLDNHRLYDLKKGIFLSADSEEEIFGHLDLDYLEPWERNA

SEQ ID NO: 4897 - DNA, 1182 bp, synthetic construct
  misc_feature 1..1182: note = Variant of terminal deoxynucleotidyl transferase
  source 1..1182: mol_type = other DNA
atgcatcaccaccatcatcatgggggttctggtcatccggaaggtaataccccggagaaggaggtgccgagcgttatcgcccgtcatgttagtcagtacgcgtgccagcgcaagaccacgctgaataactacaacaaaaagttcaccgacgcgctggagatcatggccgagaactacaaatttaaagagaacaatcaggcgtgcctggaagccaagcgcgccgcgagtgtcctgaaaagcctgccgttcgaggttaccagcatgaaagacatccaaggtctgccgtgcattaccgacgacgtacgtgacgtgatcgaagagatcatcgaagagggcgagagcagccgtgttaaagaaatcctcaatgacgagcgctacaaggcctttaagcagttcaccagcgtgttcggtgtgggcgtgaaaacctcggaaaagtggtaccgtatgggcctccgtacggttgaagaagcaaaggccagtaagagtctgaagctgagcaagatgcagaaggcgggcttcctgtattacgaggatctggcgagcggtgttagtaaagaagaagccgatgccgttacgctcatcgtgaaggaaacggtgcgcactgttagtccggatgcgctggtgaccatcgccggcggtttccgccgtggcaaacctatgggccacgacgttgacctgctgatcacgattccgggccgtcctgaagatgacgagctgctccacaaagtggttgatctgctcaagaagcaaggtctgctgctgtacgaagacatccgtgagagcacgttcgtggaggggcaactgccaaatcctaaacctgacgccctggacaaccatcagaagtgcttcgccattctcaagctgtaccgtccgaaggtggataacagtgcggttgggacgagtaagaaaagtgacatggctgaggttaaggattggaaagcggttcgtgtggatctggtgattgcgccattcgagcagttcgcctatgcgctgctcggttggacgggcagcggccaatttcgtcgcgatactcgtcgctatgcggaggaagagcgcgacatgctgctcgacaaccatcgtctctacgacctgaaaaagggcatctttctgagtgcggacagcgaagaagagattttcggtcatctggacctggattatctggagccgtgggaacgcaacgcg

SEQ ID NO: 4898 - protein, 394 aa, synthetic construct
  REGION 1..394: note = Variant of terminal deoxynucleotidyl transferase
MHHHHHHGGSGHPEGNTPEKEVPSVIARHVSQYACQRKTTLNNYNKKFTDALEIMAENYKFKENNQACLEAKRAASVLKSLPFEVTSMKDIQGLPCITDDVRDVIEEIIEEGESSRVKEILNDERYKAFKQFTSVFGVGVKTSEKWYRMGLRTVEEAKASKSLKLSKMQKAGFLYYEDLASGVSKEEADAVTLIVKETVRTVSPDALVTIAGGFRRGKPMGHDVDLLITIPGRPEDDELLHKVVDLLKKQGLLLYEDIRESTFVEGQLPNPKPDALDNHQKCFAILKLYRPKVDNSAVGTSKKSDMAEVKDWKAVRVDLVIAPFEQFAYALLGWTGSGQFRRDTRRYAEEERDMLLDNHRLYDLKKGIFLSADSEEEIFGHLDLDYLEPWERNA

SEQ ID NO: 4899 - DNA, 1182 bp, synthetic construct
  misc_feature 1..1182: note = Variant of terminal deoxynucleotidyl transferase
  source 1..1182: mol_type = other DNA
atgcatcaccaccatcatcatgggggttctggtcatccggaaggtaataccccggagaaggaggtgccgagcgttatcgcccgtcatgttagtcagtacgcgtgccagcgcaagaccacgctgaataactacaacaaaaagttcaccgacgcgctggagatcatggccgagaactacaaatttaaagagaacctgcaggcgtgcctggaagccaagcgcgccgcgagtgtcctgaaaagcctgccgttcgaggttaccagcatgaaagacatccaaggtctgccgtgcattaccgacgacgtacgtgacgtgatcgaagagatcatcgaagagggcgagagcagccgtgttaaagaaatcctcaatgacgagcgctacaaggcctttaagcagttcaccagcgtgttcggtgtgggcgtgaaaacctcggaaaagtggtaccgtatgggcctccgtacggttgaagaagcaaaggccagtaagagtctgaagctgagcaagatgcagaaggcgggcttcctgtattacgaggatctggcgagcggtgttagtaaagaagaagccgatgccgttacgctcatcgtgaaggaaacggtgcgcactgttagtccggatgcgctggtgaccatcgccggcggtttccgccgtggcaaacctatgggccacgacgttgacctgctgatcacgattccgggccgtcctgaagatgacgagctgctccacaaagtggttgatctgctcaagaagcaaggtctgctgctgtacgaagacatccgtgagagcacgttcgtggaggggcaactgccaaatcctaaacctgacgttctggacaaccatcagaagtgcttcgccattctcaagctgtaccgtccgaaggtggataacagtgcggttgggacgagtaagaaaagtgacatggctgaggttaaggattggaaagcggttcgtgtggatctggtgattgcgccattcgagcagttcgcctatgcgctgctcggttggacgggcagcggccaatttcgtcgcgatactcgtcgctatgcggaggaagagcgcgacatgctgctcgacaaccatcgtctctacgacctgaaaaagggcatctttctgagtgcggacagcgaagaagagattttcggtcatctggacctggattatctggagccgtgggaacgcaacgcg

SEQ ID NO: 4900 - protein, 394 aa, synthetic construct
  REGION 1..394: note = Variant of terminal deoxynucleotidyl transferase
MHHHHHHGGSGHPEGNTPEKEVPSVIARHVSQYACQRKTTLNNYNKKFTDALEIMAENYKFKENLQACLEAKRAASVLKSLPFEVTSMKDIQGLPCITDDVRDVIEEIIEEGESSRVKEILNDERYKAFKQFTSVFGVGVKTSEKWYRMGLRTVEEAKASKSLKLSKMQKAGFLYYEDLASGVSKEEADAVTLIVKETVRTVSPDALVTIAGGFRRGKPMGHDVDLLITIPGRPEDDELLHKVVDLLKKQGLLLYEDIRESTFVEGQLPNPKPDVLDNHQKCFAILKLYRPKVDNSAVGTSKKSDMAEVKDWKAVRVDLVIAPFEQFAYALLGWTGSGQFRRDTRRYAEEERDMLLDNHRLYDLKKGIFLSADSEEEIFGHLDLDYLEPWERNA

SEQ ID NO: 4901 - DNA, 1182 bp, synthetic construct
  misc_feature 1..1182: note = Variant of terminal deoxynucleotidyl transferase
  source 1..1182: mol_type = other DNA
atgcatcaccaccatcatcatgggggttctggtcatccggaaggtaataccccggagaaggaggtgccgagcgttatcgcccgtcatgttagtcagtacgcgtgccagcgcaagaccacgctgaataactacaacaaaaagttcaccgacgcgctggagatcatggccgagaactacaaatttaaagagaacctgcaggcgtgcacggaagccaagcgcgccgcgagtgtcctgaaaagcctgccgttcgaggttaccagcatgaaagacatccaaggtctgccgtgcattaccgacgacgtacgtgacgtgatcgaagagatcatcgaagagggcgagagcagccgtgttaaagaaatcctcaatgacgagcgctacaaggcctttaagcagttcaccagcgtgttcggtgtgggcgtgaaaacctcggaaaagtggtaccgtatgggcctccgtacggttgaagaagcaaaggccagtaagagtctgaagctgagcaagatgcagaaggcgggcttcctgtattacgaggatctggcgagcggtgttagtaaagaagaagccgatgccgttacgctcatcgtgaaggaaacggtgcgcactgttagtccggatgcgctggtgaccatcgccggcggtttccgccgtggcaaacctatgggccacgacgttgacctgctgatcacgattccgggccgtcctgaagatgacgagctgctccacaaagtggttgatctgctcaagaagcaaggtctgctgctgtacgaagacatccgtgagagcacgttcgtggaggggcaactgccaaatcctaaacctgacgccctggacaaccatcagaagtgcttcgccattctcaagctgtaccgtccgaaggtggataacagtgcggttgggacgagtaagaaaagtgacatggctgaggttaaggattggaaagcggttcgtgtggatctggtgattgcgccattcgagcagttcgcctatgcgctgctcggttggacgggcagcggccaatttcgtcgcgatactcgtcgctatgcggaggaagagcgcgacatgctgctcgacaaccatcgtctctacgacctgaaaaagggcatctttctgagtgcggacagcgaagaagagattttcggtcatctggacctggattatctggagccgtgggaacgcaacgcg

SEQ ID NO: 4902 - protein, 394 aa, synthetic construct
  REGION 1..394: note = Variant of terminal deoxynucleotidyl transferase
MHHHHHHGGSGHPEGNTPEKEVPSVIARHVSQYACQRKTTLNNYNKKFTDALEIMAENYKFKENLQACTEAKRAASVLKSLPFEVTSMKDIQGLPCITDDVRDVIEEIIEEGESSRVKEILNDERYKAFKQFTSVFGVGVKTSEKWYRMGLRTVEEAKASKSLKLSKMQKAGFLYYEDLASGVSKEEADAVTLIVKETVRTVSPDALVTIAGGFRRGKPMGHDVDLLITIPGRPEDDELLHKVVDLLKKQGLLLYEDIRESTFVEGQLPNPKPDALDNHQKCFAILKLYRPKVDNSAVGTSKKSDMAEVKDWKAVRVDLVIAPFEQFAYALLGWTGSGQFRRDTRRYAEEERDMLLDNHRLYDLKKGIFLSADSEEEIFGHLDLDYLEPWERNA

SEQ ID NO: 4903 - DNA, 1182 bp, synthetic construct
  misc_feature 1..1182: note = Variant of terminal deoxynucleotidyl transferase
  source 1..1182: mol_type = other DNA
atgcatcaccaccatcatcatgggggttctggtcatccggaaggtaataccccggagaaggaggtgccgagcgttatcgcccgtcatgttagtcagtacgcgtgccagcgcaagaccacgctgaataactacaacaaaaagttcaccgacgcgctggagatcatggccgagaactacaaatttaaagagaacctgcaggcgtgcctggaagccaagcgcgccgcgagtgtcctgaaaagcctgccgttcgaggttaccagcatgaaagacatccaaggtctgccgtgcattaccgacgacgtacgtgacgtgatcgaagagatcatcgaagagggcgagagcagccgtgttaaagaaatcctcaatgacgagcgctacaaggcctttaagcagttcaccagcgtgttcggtgtgggcgtgaaaacctcggaaaagtggtaccgtatgggcctccgtacggttgaagaagcaaaggccagtaagagtctgaagctgagcaagatgcagaaggcgggcttcctgtattacgaggatctgcggagcggtgttagtaaagaagaagccgatgccgttacgctcatcgtgaaggaaacggtgcgcactgttagtccggatgcgctggtgaccatcgccggcggtttccgccgtggcaaacctatgggccacgacgttgacctgctgatcacgattccgggccgtcctgaagatgacgagctgctccacaaagtggttgatctgctcaagaagcaaggtctgctgctgtacgaagacatccgtgagagcacgttcgtggaggggcaactgccaaatcctaaacctgacgccctggacaaccatcagaagtgcttcgccattctcaagctgtaccgtccgaaggtggataacagtgcggttgggacgagtaagaaaagtgacatggctgaggttaaggattggaaagcggttcgtgtggatctggtgattgcgccattcgagcagttcgcctatgcgctgctcggttggacgggcagcggccaatttcgtcgcgatactcgtcgctatgcggaggaagagcgcgacatgctgctcgacaaccatcgtctctacgacctgaaaaagggcatctttctgagtgcggacagcgaagaagagattttcggtcatctggacctggattatctggagccgtgggaacgcaacgcg

SEQ ID NO: 4904 - protein, 394 aa, synthetic construct
  REGION 1..394: note = Variant of terminal deoxynucleotidyl transferase
MHHHHHHGGSGHPEGNTPEKEVPSVIARHVSQYACQRKTTLNNYNKKFTDALEIMAENYKFKENLQACLEAKRAASVLKSLPFEVTSMKDIQGLPCITDDVRDVIEEIIEEGESSRVKEILNDERYKAFKQFTSVFGVGVKTSEKWYRMGLRTVEEAKASKSLKLSKMQKAGFLYYEDLRSGVSKEEADAVTLIVKETVRTVSPDALVTIAGGFRRGKPMGHDVDLLITIPGRPEDDELLHKVVDLLKKQGLLLYEDIRESTFVEGQLPNPKPDALDNHQKCFAILKLYRPKVDNSAVGTSKKSDMAEVKDWKAVRVDLVIAPFEQFAYALLGWTGSGQFRRDTRRYAEEERDMLLDNHRLYDLKKGIFLSADSEEEIFGHLDLDYLEPWERNA

SEQ ID NO: 4905 - DNA, 1182 bp, synthetic construct
  misc_feature 1..1182: note = Variant of terminal deoxynucleotidyl transferase
  source 1..1182: mol_type = other DNA
atgcatcaccaccatcatcatgggggttctggtcatccggaaggtaataccccggagaaggaggtgccgagcgttatcgcccgtcatgttagtcagtacgcgtgccagcgcaagaccacgctgaataactacaacaaaaagttcaccgacgcgctggagatcatggccgagaactacaaatttaaagagaacctgcaggcgtgcctggaagccaagcgcgccgcgagtgtcctgaaaagcctgccgttcgaggttaccagcatgaaagacatccaaggtctgccgtgcattaccgacgacgtacgtgacattatcgaagagatcatcgaagagggcgagagcagccgtgttaaagaaatcctcaatgacgagcgctacaaggcctttaagcagttcaccagcgtgttcggtgtgggcgtgaaaacctcggaaaagtggtaccgtatgggcctccgtacggttgaagaagcaaaggccagtaagagtctgaagctgagcaagatgcagaaggcgggcttcctgtattacgaggatctggcgagcggtgttagtaaagaagaagccgatgccgttacgctcatcgtgaaggaaacggtgcgcactgttagtccggatgcgctggtgaccatcgccggcggtttccgccgtggcaaacctatgggccacgacgttgacctgctgatcacgattccgggccgtcctgaagatgacgagctgctccacaaagtggttgatctgctcaagaagcaaggtctgctgctgtacgaagacatccgtgagagcacgttcgtggaggggcaactgccaaatcctaaacctgacgccctggacaaccatcagaagtgcttcgccattctcaagctgtaccgtccgaaggtggataacagtgcggttgggacgagtaagaaaagtgacatggctgaggttaaggattggaaagcggttcgtgtggatctggtgattgcgccattcgagcagttcgcctatgcgctgctcggttggacgggcagcggccaatttcgtcgcgatactcgtcgctatgcggaggaagagcgcgacatgctgctcgacaaccatcgtctctacgacctgaaaaagggcatctttctgagtgcggacagcgaagaagagattttcggtcatctggacctggattatctggagccgtgggaacgcaacgcg

SEQ ID NO: 4906 - protein, 394 aa, synthetic construct
  REGION 1..394: note = Variant of terminal deoxynucleotidyl transferase
MHHHHHHGGSGHPEGNTPEKEVPSVIARHVSQYACQRKTTLNNYNKKFTDALEIMAENYKFKENLQACLEAKRAASVLKSLPFEVTSMKDIQGLPCITDDVRDIIEEIIEEGESSRVKEILNDERYKAFKQFTSVFGVGVKTSEKWYRMGLRTVEEAKASKSLKLSKMQKAGFLYYEDLASGVSKEEADAVTLIVKETVRTVSPDALVTIAGGFRRGKPMGHDVDLLITIPGRPEDDELLHKVVDLLKKQGLLLYEDIRESTFVEGQLPNPKPDALDNHQKCFAILKLYRPKVDNSAVGTSKKSDMAEVKDWKAVRVDLVIAPFEQFAYALLGWTGSGQFRRDTRRYAEEERDMLLDNHRLYDLKKGIFLSADSEEEIFGHLDLDYLEPWERNA

SEQ ID NO: 4907 - DNA, 1182 bp, synthetic construct
  misc_feature 1..1182: note = Variant of terminal deoxynucleotidyl transferase
  source 1..1182: mol_type = other DNA
atgcatcaccaccatcatcatgggggttctggtcatccggaaggtaataccccggagaaggaggtgccgagcgttatcgcccgtcatgttagtcagtacgcgtgccagcgcaagaccacgctgaataactacaacaaaaagttcaccgacgcgctggagatcatggccgagaactacaaatttaaagagaacctgcaggcgtgcctggaagccaagcgcgccgcgagtgtcctgaaaagcctgccgttcgaggttaccagcatgaaagacatccaaggtctgccgtgcattaccgacgacgtacgtgacgtgctggaagagatcatcgaagagggcgagagcagccgtgttaaagaaatcctcaatgacgagcgctacaaggcctttaagcagttcaccagcgtgttcggtgtgggcgtgaaaacctcggaaaagtggtaccgtatgggcctccgtacggttgaagaagcaaaggccagtaagagtctgaagctgagcaagatgcagaaggcgggcttcctgtattacgaggatctggcgagcggtgttagtaaagaagaagccgatgccgttacgctcatcgtgaaggaaacggtgcgcactgttagtccggatgcgctggtgaccatcgccggcggtttccgccgtggcaaacctatgggccacgacgttgacctgctgatcacgattccgggccgtcctgaagatgacgagctgctccacaaagtggttgatctgctcaagaagcaaggtctgctgctgtacgaagacatccgtgagagcacgttcgtggaggggcaactgccaaatcctaaacctgacgccctggacaaccatcagaagtgcttcgccattctcaagctgtaccgtccgaaggtggataacagtgcggttgggacgagtaagaaaagtgacatggctgaggttaaggattggaaagcggttcgtgtggatctggtgattgcgccattcgagcagttcgcctatgcgctgctcggttggacgggcagcggccaatttcgtcgcgatactcgtcgctatgcggaggaagagcgcgacatgctgctcgacaaccatcgtctctacgacctgaaaaagggcatctttctgagtgcggacagcgaagaagagattttcggtcatctggacctggattatctggagccgtgggaacgcaacgcg

SEQ ID NO: 4908 - protein, 394 aa, synthetic construct
  REGION 1..394: note = Variant of terminal deoxynucleotidyl transferase
MHHHHHHGGSGHPEGNTPEKEVPSVIARHVSQYACQRKTTLNNYNKKFTDALEIMAENYKFKENLQACLEAKRAASVLKSLPFEVTSMKDIQGLPCITDDVRDVLEEIIEEGESSRVKEILNDERYKAFKQFTSVFGVGVKTSEKWYRMGLRTVEEAKASKSLKLSKMQKAGFLYYEDLASGVSKEEADAVTLIVKETVRTVSPDALVTIAGGFRRGKPMGHDVDLLITIPGRPEDDELLHKVVDLLKKQGLLLYEDIRESTFVEGQLPNPKPDALDNHQKCFAILKLYRPKVDNSAVGTSKKSDMAEVKDWKAVRVDLVIAPFEQFAYALLGWTGSGQFRRDTRRYAEEERDMLLDNHRLYDLKKGIFLSADSEEEIFGHLDLDYLEPWERNA

SEQ ID NO: 4909 - DNA, 1182 bp, synthetic construct
  misc_feature 1..1182: note = Variant of terminal deoxynucleotidyl transferase
  source 1..1182: mol_type = other DNA
atgcatcaccaccatcatcatgggggttctggtcatccggaaggtaataccccggagaaggaggtgccgagcgttatcgcccgtcatgttagtcagtacgcgtgccagcgcaagaccacgctgaataactacaacaaaaagttcaccgacgcgctggagatcatggccgagaactacaaatttaaagagaacctgcaggcgtgcctggaagccaagaaagccgcgagtgtcctgaaaagcctgccgttcgaggttaccagcatgaaagacatccaaggtctgccgtgcattaccgacgacgtacgtgacgtgatcgaagagatcatcgaagagggcgagagcagccgtgttaaagaaatcctcaatgacgagcgctacaaggcctttaagcagttcaccagcgtgttcggtgtgggcgtgaaaacctcggaaaagtggtaccgtatgggcctccgtacggttgaagaagcaaaggccagtaagagtctgaagctgagcaagatgcagaaggcgggcttcctgtattacgaggatctggcgagcggtgttagtaaagaagaagccgatgccgttacgctcatcgtgaaggaaacggtgcgcactgttagtccggatgcgctggtgaccatcgccggcggtttccgccgtggcaaacctatgggccacgacgttgacctgctgatcacgattccgggccgtcctgaagatgacgagctgctccacaaagtggttgatctgctcaagaagcaaggtctgctgctgtacgaagacatccgtgagagcacgttcgtggaggggcaactgccaaatcctaaacctgacgccctggacaaccatcagaagtgcttcgccattctcaagctgtaccgtccgaaggtggataacagtgcggttgggacgagtaagaaaagtgacatggctgaggttaaggattggaaagcggttcgtgtggatctggtgattgcgccattcgagcagttcgcctatgcgctgctcggttggacgggcagcggccaatttcgtcgcgatactcgtcgctatgcggaggaagagcgcgacatgctgctcgacaaccatcgtctctacgacctgaaaaagggcatctttctgagtgcggacagcgaagaagagattttcggtcatctggacctggattatctggagccgtgggaacgcaacgcg

SEQ ID NO: 4910 - protein, 394 aa, synthetic construct
  REGION 1..394: note = Variant of terminal deoxynucleotidyl transferase
MHHHHHHGGSGHPEGNTPEKEVPSVIARHVSQYACQRKTTLNNYNKKFTDALEIMAENYKFKENLQACLEAKKAASVLKSLPFEVTSMKDIQGLPCITDDVRDVIEEIIEEGESSRVKEILNDERYKAFKQFTSVFGVGVKTSEKWYRMGLRTVEEAKASKSLKLSKMQKAGFLYYEDLASGVSKEEADAVTLIVKETVRTVSPDALVTIAGGFRRGKPMGHDVDLLITIPGRPEDDELLHKVVDLLKKQGLLLYEDIRESTFVEGQLPNPKPDALDNHQKCFAILKLYRPKVDNSAVGTSKKSDMAEVKDWKAVRVDLVIAPFEQFAYALLGWTGSGQFRRDTRRYAEEERDMLLDNHRLYDLKKGIFLSADSEEEIFGHLDLDYLEPWERNA

SEQ ID NO: 4911 - DNA, 1182 bp, synthetic construct
  misc_feature 1..1182: note = Variant of terminal deoxynucleotidyl transferase
  source 1..1182: mol_type = other DNA
atgcatcaccaccatcatcatgggggttctggtcatccggaaggtaataccccggagaaggaggtgccgagcgttatcgcccgtcatgttagtcagtacgcgtgccagcgcaagaccacgctgaataactacaacaaaaagttcaccgacgcgctggagatcatggccgagaactacaaatttaaagagaacctgcaggcgtgcctggaagccaagcgcgccgcgagtgtcctgaaaagcctgccgttcgaggttaccagcatgaaagacatccaaggtctgccgtgcattaccgacgacgtacgtgacgtgatcgaagagatcatcgaagagggcgagagcagccgtgttaaagaaatcctcaatgacgagcgctacaaggcctttaagcagttcaccagcgtgttcggtgtgggcgtgaaaacctcggaaaagtggtaccgtatgggcctccgtacggttgaagaagcaaaggccagtaagagtctgaagctgagcaagatgcagaaggcgggcttcctgtattacgaggatctggcgagcggtgttgataaagaagaagccgatgccgttacgctcatcgtgaaggaaacggtgcgcactgttagtccggatgcgctggtgaccatcgccggcggtttccgccgtggcaaacctatgggccacgacgttgacctgctgatcacgattccgggccgtcctgaagatgacgagctgctccacaaagtggttgatctgctcaagaagcaaggtctgctgctgtacgaagacatccgtgagagcacgttcgtggaggggcaactgccaaatcctaaacctgacgccctggacaaccatcagaagtgcttcgccattctcaagctgtaccgtccgaaggtggataacagtgcggttgggacgagtaagaaaagtgacatggctgaggttaaggattggaaagcggttcgtgtggatctggtgattgcgccattcgagcagttcgcctatgcgctgctcggttggacgggcagcggccaatttcgtcgcgatactcgtcgctatgcggaggaagagcgcgacatgctgctcgacaaccatcgtctctacgacctgaaaaagggcatctttctgagtgcggacagcgaagaagagattttcggtcatctggacctggattatctggagccgtgggaacgcaacgcg

SEQ ID NO: 4912 - protein, 394 aa, synthetic construct
  REGION 1..394: note = Variant of terminal deoxynucleotidyl transferase
MHHHHHHGGSGHPEGNTPEKEVPSVIARHVSQYACQRKTTLNNYNKKFTDALEIMAENYKFKENLQACLEAKRAASVLKSLPFEVTSMKDIQGLPCITDDVRDVIEEIIEEGESSRVKEILNDERYKAFKQFTSVFGVGVKTSEKWYRMGLRTVEEAKASKSLKLSKMQKAGFLYYEDLASGVDKEEADAVTLIVKETVRTVSPDALVTIAGGFRRGKPMGHDVDLLITIPGRPEDDELLHKVVDLLKKQGLLLYEDIRESTFVEGQLPNPKPDALDNHQKCFAILKLYRPKVDNSAVGTSKKSDMAEVKDWKAVRVDLVIAPFEQFAYALLGWTGSGQFRRDTRRYAEEERDMLLDNHRLYDLKKGIFLSADSEEEIFGHLDLDYLEPWERNA

SEQ ID NO: 4913 - DNA, 1182 bp, synthetic construct
  misc_feature 1..1182: note = Variant of terminal deoxynucleotidyl transferase
  source 1..1182: mol_type = other DNA
atgcatcaccaccatcatcatgggggttctggtcatccggaaggtaataccccggagaaggaggtgccgagcgttatcgcccgtcatgttagtcagtacgcgtgccagcgcaagaccacgctgaataactacaacaaaaagttcaccgacgcgctggagatcatggccgagaactacaaatttaaagagaacctgcaggcgtgcatggaagccaagcgcgccgcgagtgtcctgaaaagcctgccgttcgaggttaccagcatgaaagacatccaaggtctgccgtgcattaccgacgacgtacgtgacgtgatcgaagagatcatcgaagagggcgagagcagccgtgttaaagaaatcctcaatgacgagcgctacaaggcctttaagcagttcaccagcgtgttcggtgtgggcgtgaaaacctcggaaaagtggtaccgtatgggcctccgtacggttgaagaagcaaaggccagtaagagtctgaagctgagcaagatgcagaaggcgggcttcctgtattacgaggatctggcgagcggtgttagtaaagaagaagccgatgccgttacgctcatcgtgaaggaaacggtgcgcactgttagtccggatgcgctggtgaccatcgccggcggtttccgccgtggcaaacctatgggccacgacgttgacctgctgatcacgattccgggccgtcctgaagatgacgagctgctccacaaagtggttgatctgctcaagaagcaaggtctgctgctgtacgaagacatccgtgagagcacgttcgtggaggggcaactgccaaatcctaaacctgacgccctggacaaccatcagaagtgcttcgccattctcaagctgtaccgtccgaaggtggataacagtgcggttgggacgagtaagaaaagtgacatggctgaggttaaggattggaaagcggttcgtgtggatctggtgattgcgccattcgagcagttcgcctatgcgctgctcggttggacgggcagcggccaatttcgtcgcgatactcgtcgctatgcggaggaagagcgcgacatgctgctcgacaaccatcgtctctacgacctgaaaaagggcatctttctgagtgcggacagcgaagaagagattttcggtcatctggacctggattatctggagccgtgggaacgcaacgcg

SEQ ID NO: 4914 - protein, 394 aa, synthetic construct
  REGION 1..394: note = Variant of terminal deoxynucleotidyl transferase
MHHHHHHGGSGHPEGNTPEKEVPSVIARHVSQYACQRKTTLNNYNKKFTDALEIMAENYKFKENLQACMEAKRAASVLKSLPFEVTSMKDIQGLPCITDDVRDVIEEIIEEGESSRVKEILNDERYKAFKQFTSVFGVGVKTSEKWYRMGLRTVEEAKASKSLKLSKMQKAGFLYYEDLASGVSKEEADAVTLIVKETVRTVSPDALVTIAGGFRRGKPMGHDVDLLITIPGRPEDDELLHKVVDLLKKQGLLLYEDIRESTFVEGQLPNPKPDALDNHQKCFAILKLYRPKVDNSAVGTSKKSDMAEVKDWKAVRVDLVIAPFEQFAYALLGWTGSGQFRRDTRRYAEEERDMLLDNHRLYDLKKGIFLSADSEEEIFGHLDLDYLEPWERNA

SEQ ID NO: 4915 - DNA, 1182 bp, synthetic construct
  misc_feature 1..1182: note = Variant of terminal deoxynucleotidyl transferase
  source 1..1182: mol_type = other DNA
atgcatcaccaccatcatcatgggggttctggtcatccggaaggtaataccccggagaaggaggtgccgagcgttatcgcccgtcatgttagtcagtacgcgtgccagcgcaagaccacgctgaataactacaacaaaaagttcaccgacgcgctggacatcatggccgagaactacaaatttaaagagaacctgcaggcgtgcctggaagccaagcgcgccgcgagtgtcctgaaaagcctgccgttcgaggttaccagcatgaaagacatccaaggtctgccgtgcattaccgacgacgtacgtgacgtgatcgaagagatcatcgaagagggcgagagcagccgtgttaaagaaatcctcaatgacgagcgctacaaggcctttaagcagttcaccagcgtgttcggtgtgggcgtgaaaacctcggaaaagtggtaccgtatgggcctccgtacggttgaagaagcaaaggccagtaagagtctgaagctgagcaagatgcagaaggcgggcttcctgtattacgaggatctggcgagcggtgttagtaaagaagaagccgatgccgttacgctcatcgtgaaggaaacggtgcgcactgttagtccggatgcgctggtgaccatcgccggcggtttccgccgtggcaaacctatgggccacgacgttgacctgctgatcacgattccgggccgtcctgaagatgacgagctgctccacaaagtggttgatctgctcaagaagcaaggtctgctgctgtacgaagacatccgtgagagcacgttcgtggaggggcaactgccaaatcctaaacctgacgccctggacaaccatcagaagtgcttcgccattctcaagctgtaccgtccgaaggtggataacagtgcggttgggacgagtaagaaaagtgacatggctgaggttaaggattggaaagcggttcgtgtggatctggtgattgcgccattcgagcagttcgcctatgcgctgctcggttggacgggcagcggccaatttcgtcgcgatactcgtcgctatgcggaggaagagcgcgacatgctgctcgacaaccatcgtctctacgacctgaaaaagggcatctttctgagtgcggacagcgaagaagagattttcggtcatctggacctggattatctggagccgtgggaacgcaacgcg

SEQ ID NO: 4916 - protein, 394 aa, synthetic construct
  REGION 1..394: note = Variant of terminal deoxynucleotidyl transferase
MHHHHHHGGSGHPEGNTPEKEVPSVIARHVSQYACQRKTTLNNYNKKFTDALDIMAENYKFKENLQACLEAKRAASVLKSLPFEVTSMKDIQGLPCITDDVRDVIEEIIEEGESSRVKEILNDERYKAFKQFTSVFGVGVKTSEKWYRMGLRTVEEAKASKSLKLSKMQKAGFLYYEDLASGVSKEEADAVTLIVKETVRTVSPDALVTIAGGFRRGKPMGHDVDLLITIPGRPEDDELLHKVVDLLKKQGLLLYEDIRESTFVEGQLPNPKPDALDNHQKCFAILKLYRPKVDNSAVGTSKKSDMAEVKDWKAVRVDLVIAPFEQFAYALLGWTGSGQFRRDTRRYAEEERDMLLDNHRLYDLKKGIFLSADSEEEIFGHLDLDYLEPWERNA

SEQ ID NO: 4917 - DNA, 1182 bp, synthetic construct
  misc_feature 1..1182: note = Variant of terminal deoxynucleotidyl transferase
  source 1..1182: mol_type = other DNA
atgcatcaccaccatcatcatgggggttctggtcatccggaaggtaataccccggagaaggaggtgccgagcgttatcgcccgtcatgttagtcagtacgcgtgccagcgcaagaccacgctgaataactacaacaaaaagttcaccgacgcgctggagatcatggccgagaactacaaatttaaagagaacctgcaggcgtgcctggaagccaagcgcgccgcgagtgtcctgaaaagcctgccgttcgaggttaccagcatgaaagacatccaaggtctgccgtgcattaccgacgacgtacgtgacgtgatcgaagagatcatcgaagagggcgagagcagccgtgttaaagaaatcctcaatgacgagcgctacaaggcctttaagcagttcaccagcgtgttcggtgtgggcgtgaaaacctcggaaaagtggtaccgtatgggcctccgtacggttgaagaagcaaaggccagtaagagtctgaagctgagccgtatgcagaaggcgggcttcctgtattacgaggatctggcgagcggtgttagtaaagaagaagccgatgccgttacgctcatcgtgaaggaaacggtgcgcactgttagtccggatgcgctggtgaccatcgccggcggtttccgccgtggcaaacctatgggccacgacgttgacctgctgatcacgattccgggccgtcctgaagatgacgagctgctccacaaagtggttgatctgctcaagaagcaaggtctgctgctgtacgaagacatccgtgagagcacgttcgtggaggggcaactgccaaatcctaaacctgacgccctggacaaccatcagaagtgcttcgccattctcaagctgtaccgtccgaaggtggataacagtgcggttgggacgagtaagaaaagtgacatggctgaggttaaggattggaaagcggttcgtgtggatctggtgattgcgccattcgagcagttcgcctatgcgctgctcggttggacgggcagcggccaatttcgtcgcgatactcgtcgctatgcggaggaagagcgcgacatgctgctcgacaaccatcgtctctacgacctgaaaaagggcatctttctgagtgcggacagcgaagaagagattttcggtcatctggacctggattatctggagccgtgggaacgcaacgcg

SEQ ID NO: 4918 - protein, 394 aa, synthetic construct
  REGION 1..394: note = Variant of terminal deoxynucleotidyl transferase
MHHHHHHGGSGHPEGNTPEKEVPSVIARHVSQYACQRKTTLNNYNKKFTDALEIMAENYKFKENLQACLEAKRAASVLKSLPFEVTSMKDIQGLPCITDDVRDVIEEIIEEGESSRVKEILNDERYKAFKQFTSVFGVGVKTSEKWYRMGLRTVEEAKASKSLKLSRMQKAGFLYYEDLASGVSKEEADAVTLIVKETVRTVSPDALVTIAGGFRRGKPMGHDVDLLITIPGRPEDDELLHKVVDLLKKQGLLLYEDIRESTFVEGQLPNPKPDALDNHQKCFAILKLYRPKVDNSAVGTSKKSDMAEVKDWKAVRVDLVIAPFEQFAYALLGWTGSGQFRRDTRRYAEEERDMLLDNHRLYDLKKGIFLSADSEEEIFGHLDLDYLEPWERNA

SEQ ID NO: 4919 - DNA, 1182 bp, synthetic construct
  misc_feature 1..1182: note = Variant of terminal deoxynucleotidyl transferase
  source 1..1182: mol_type = other DNA
atgcatcaccaccatcatcatgggggttctggtcatccggaaggtaataccccggagaaggaggtgccgagcgttatcgcccgtcatgttagtcagtacgcgtgccagcgcaagaccacgctgaataactacaacaaaaagttcaccgacgcgctggagatcatggccgagaactacaaatttaaagagaacctgcaggcgtgcctggaagccaagcgcgccgcgagtgtcctgaaaagcctgccgttcgaggttaccagcatgaaagacatccaaggtctgccgtgcattaccgacgacgtacgtgacgtgatcgaagagatcatcgaagagggcgagagcagccgtgttaaagaaatcctcaatgacgagcgctacaaggcctttaagcagttcaccagcgtgttcggtgtgggcgtgaaaacctcggaaaagtggtaccgtatgggcctccgtacggttgaagaagcaaaggccagtaagagtctgaagctgagcaagatgcagaaggcgggcttcctgtattacgaggatctggcgagcggtgttagtaaagaagaagccgatgccgttacgctcatcgtgaaggaaacggtgcgcactgttagtccggatgcgctggtgaccatcgccggcggtttccgccgtggcaaacctatgggccacgacgttgacctgctgatcacgattccgggccgtcctgaagatgacgagctgctccacaaagtggttgatctgctcaagaagcaaggtctgctgctgtacgaagacatccgtgagagcacgttcgtggaggggcaactgccaaatcctaaacctgacgccctggacaaccatcagaagtgcttcgccattctcaagctgtaccgtccgaaggtggataacagtgcggttgggacgagtaagaaaagtgacatggctgaggttaaggattggaaagcggttcgtgtggatctggtgattgcgccattcgagcagttcgcctatgcgctgctcggttggacgggcagcggccaatttcgtcgcgatatgcgtcgctatgcggaggaagagcgcgacatgctgctcgacaaccatcgtctctacgacctgaaaaagggcatctttctgagtgcggacagcgaagaagagattttcggtcatctggacctggattatctggagccgtgggaacgcaacgcg

SEQ ID NO: 4920 - protein, 394 aa, synthetic construct
  REGION 1..394: note = Variant of terminal deoxynucleotidyl transferase
MHHHHHHGGSGHPEGNTPEKEVPSVIARHVSQYACQRKTTLNNYNKKFTDALEIMAENYKFKENLQACLEAKRAASVLKSLPFEVTSMKDIQGLPCITDDVRDVIEEIIEEGESSRVKEILNDERYKAFKQFTSVFGVGVKTSEKWYRMGLRTVEEAKASKSLKLSKMQKAGFLYYEDLASGVSKEEADAVTLIVKETVRTVSPDALVTIAGGFRRGKPMGHDVDLLITIPGRPEDDELLHKVVDLLKKQGLLLYEDIRESTFVEGQLPNPKPDALDNHQKCFAILKLYRPKVDNSAVGTSKKSDMAEVKDWKAVRVDLVIAPFEQFAYALLGWTGSGQFRRDMRRYAEEERDMLLDNHRLYDLKKGIFLSADSEEEIFGHLDLDYLEPWERNA

SEQ ID NO: 4921 - DNA, 1182 bp, synthetic construct
  misc_feature 1..1182: note = Variant of terminal deoxynucleotidyl transferase
  source 1..1182: mol_type = other DNA
atgcatcaccaccatcatcatgggggttctggtcatccggaaggtaataccccggagaaggaggtgccgagcgttatcgcccgtcatgttagtcagtacgcgtgccagcgcaagaccacgctgaataactacaacaaaaagttcaccgacgcgctggagatcatggccgagaactacaaatttaaagagaacctgcaggcgtgcctggaagccaagcgcgccgcgagtgtcctgaaaagcctgccgttcgaggttaccagcatgaaagacatccaaggtctgccgtgcattaccgacgacgtacgtgacgtgatcgaagagatcatcgaagagggcgagagcagccgtgttaaagaaatcctcaatgacgagcgctacaaggcctttaagcagttcaccagcgtgttcggtgtgggcgtgaaaacctcggaaaagtggtaccgtatgggcctccgtacggttgaagaagcaaaggccagtaagagtctgaagctgagcaagatgcagaaggcgggcttcctgtattacgaggatctggcgagcggtgttagtaaagaagaagccgatgccgttacgctcatcgtgaaggaaacggtgcgcactgttagtccggatgcgctggtgaccatcgccggcggtttccgccgtggcaaacctatgggccacgacgttgacctgctgatcacgattccgggccgtcctgaagatgacgagctgctccacaaagtggttgatctgctcaagaagcaaggtctgctgctgtacgaagacatccgtgagagcacgttcgtggaggggcaactgccaaatcctaaacctgacgccctggacaaccatcagaagtgcttcgccattctcaagctgtaccgtccgaaggtggataacagtgcggttgggacgagtaagaaaagtgacatggctgaggttaaggattggaaagcggttcgtgtggatctggtgattgcgccattcgagcagttcgcctatgcgctgctcggttggacgggcagcggccaatttcgtcgcgatactcgtcgctatgcggaggaagagcgcgacatgctgctcgacaaccatcgtctctacgacctgaaaaagggcatctttctgagtgcggacagcgaagaagaggttttcggtcatctggacctggattatctggagccgtgggaacgcaacgcg

SEQ ID NO: 4922 - protein, 394 aa, synthetic construct
  REGION 1..394: note = Variant of terminal deoxynucleotidyl transferase
MHHHHHHGGSGHPEGNTPEKEVPSVIARHVSQYACQRKTTLNNYNKKFTDALEIMAENYKFKENLQACLEAKRAASVLKSLPFEVTSMKDIQGLPCITDDVRDVIEEIIEEGESSRVKEILNDERYKAFKQFTSVFGVGVKTSEKWYRMGLRTVEEAKASKSLKLSKMQKAGFLYYEDLASGVSKEEADAVTLIVKETVRTVSPDALVTIAGGFRRGKPMGHDVDLLITIPGRPEDDELLHKVVDLLKKQGLLLYEDIRESTFVEGQLPNPKPDALDNHQKCFAILKLYRPKVDNSAVGTSKKSDMAEVKDWKAVRVDLVIAPFEQFAYALLGWTGSGQFRRDTRRYAEEERDMLLDNHRLYDLKKGIFLSADSEEEVFGHLDLDYLEPWERNA

SEQ ID NO: 4923 - DNA, 1182 bp, synthetic construct
  misc_feature 1..1182: note = Variant of terminal deoxynucleotidyl transferase
  source 1..1182: mol_type = other DNA
atgcatcaccaccatcatcatgggggttctggtcatccggaaggtaataccccggagaaggaggtgccgagcgttatcgcccgtcatgttagtcagtacgcgtgccagcgcaagaccacgctgaataactacaacaaaaagttcaccgacgcgctggagatcatggccgagaactacaaatttaaagagaacctgcaggcgtgcctggaagccaagcgcgccgcgagtgtcctgaaaagcctgccgttcgaggttaccagcatgaaagacatccaaggtctgccgtgcattaccgacgacgtacgtgacgtgatcgaagagatcatcgaagagggcgagagcagccgtgttaaagaaatcctcaatgacgagcgctacaaggcctttaagcagttcaccagcgtgttcggtgtgggcgtgaaaacctcggaaaagtggtaccgtatgggcctccgtacggttgaagaagcaaaggccagtaagagtctgaagctgagcaagatgcagaaggcgggcttcctgtattacgaggatctggcgagcggtgttagtaaagaagaagccgatgccgttcagctcatcgtgaaggaaacggtgcgcactgttagtccggatgcgctggtgaccatcgccggcggtttccgccgtggcaaacctatgggccacgacgttgacctgctgatcacgattccgggccgtcctgaagatgacgagctgctccacaaagtggttgatctgctcaagaagcaaggtctgctgctgtacgaagacatccgtgagagcacgttcgtggaggggcaactgccaaatcctaaacctgacgccctggacaaccatcagaagtgcttcgccattctcaagctgtaccgtccgaaggtggataacagtgcggttgggacgagtaagaaaagtgacatggctgaggttaaggattggaaagcggttcgtgtggatctggtgattgcgccattcgagcagttcgcctatgcgctgctcggttggacgggcagcggccaatttcgtcgcgatactcgtcgctatgcggaggaagagcgcgacatgctgctcgacaaccatcgtctctacgacctgaaaaagggcatctttctgagtgcggacagcgaagaagagattttcggtcatctggacctggattatctggagccgtgggaacgcaacgcg

SEQ ID NO: 4924 - protein, 394 aa, synthetic construct
  REGION 1..394: note = Variant of terminal deoxynucleotidyl transferase
MHHHHHHGGSGHPEGNTPEKEVPSVIARHVSQYACQRKTTLNNYNKKFTDALEIMAENYKFKENLQACLEAKRAASVLKSLPFEVTSMKDIQGLPCITDDVRDVIEEIIEEGESSRVKEILNDERYKAFKQFTSVFGVGVKTSEKWYRMGLRTVEEAKASKSLKLSKMQKAGFLYYEDLASGVSKEEADAVQLIVKETVRTVSPDALVTIAGGFRRGKPMGHDVDLLITIPGRPEDDELLHKVVDLLKKQGLLLYEDIRESTFVEGQLPNPKPDALDNHQKCFAILKLYRPKVDNSAVGTSKKSDMAEVKDWKAVRVDLVIAPFEQFAYALLGWTGSGQFRRDTRRYAEEERDMLLDNHRLYDLKKGIFLSADSEEEIFGHLDLDYLEPWERNA

SEQ ID NO: 4925 - DNA, 1182 bp, synthetic construct
  misc_feature 1..1182: note = Variant of terminal deoxynucleotidyl transferase
  source 1..1182: mol_type = other DNA
atgcatcaccaccatcatcatgggggttctggtcatccggaaggtaataccccggagaaggaggtgccgagcgttatcgcccgtcatgttagtcagtacgcgtgccagcgcaagaccacgctgaataactacaacaaaaagttcaccgacgcgctggagatcatggccgagaactacaaatttaaagagaacctgcaggcgtgcctggaagccaagcgcgccgcgagtgtcctgaaaagcctgccgttcgaggttaccagcatgaaagacatccaaggtctgccgtgcattaccgacgacgtacgtgacgtgatcgaagagatcatcgaagagggcgagagcagccgtgttaaagaaatcctcaatgacgagcgctacaaggcctttaagcagttcaccagcgtgttcggtgtgggcgtgaaaacctcggaaaagtggtaccgtatgggcctccgtacggttgaagaagcaaaggccagtaagagtctgaagctgagcaagatgcagaaggcgggcttcctgtattacgaggatctggcgagcggtgttagtaaagaagaagccgatgccgttacgctcatcgtgaaggaaacggtgcgcactgttagtccggatgcgctggtgaccatcgccggcggtttccgccgtggcaaacctatgggccacgacgttgacctgctgatcacgattccgggccgtcctgaagatgacgagctgctccacaaagtggttgatctgctcaagaagcaaggtctgctgctgtacgaagacatccgtgagagcacgttcgtggaggggcaactgccaaatcctaaacctgacgccctggacaaccatcagaagtgcttcgccattctcaagctgtaccgtccgaaggtggataacagtgcggttgggacgagtaagaaaagtgacatggctgaggttaaggattggaaagcggttcgtgtggatctggtgattgcgccattcgagcagttcgcctatgcgctgctcggttggacgggcagcggccaatttcgtcgcgatactcgtcgctatgcggaggaagagcgcgacatgctgctcgacaaccatcgtctctacgacctgaaaaagggcatctttctgaaggcggacagcgaagaagagattttcggtcatctggacctggattatctggagccgtgggaacgcaacgcg

SEQ ID NO: 4926 - protein, 394 aa, synthetic construct
  REGION 1..394: note = Variant of terminal deoxynucleotidyl transferase
MHHHHHHGGSGHPEGNTPEKEVPSVIARHVSQYACQRKTTLNNYNKKFTDALEIMAENYKFKENLQACLEAKRAASVLKSLPFEVTSMKDIQGLPCITDDVRDVIEEIIEEGESSRVKEILNDERYKAFKQFTSVFGVGVKTSEKWYRMGLRTVEEAKASKSLKLSKMQKAGFLYYEDLASGVSKEEADAVTLIVKETVRTVSPDALVTIAGGFRRGKPMGHDVDLLITIPGRPEDDELLHKVVDLLKKQGLLLYEDIRESTFVEGQLPNPKPDALDNHQKCFAILKLYRPKVDNSAVGTSKKSDMAEVKDWKAVRVDLVIAPFEQFAYALLGWTGSGQFRRDTRRYAEEERDMLLDNHRLYDLKKGIFLKADSEEEIFGHLDLDYLEPWERNA

SEQ ID NO: 4927 - DNA, 1182 bp, synthetic construct
  misc_feature 1..1182: note = Variant of terminal deoxynucleotidyl transferase
  source 1..1182: mol_type = other DNA
atgcatcaccaccatcatcatgggggttctggtcatccggaaggtaataccccggagaaggaggtgccgagcgttatcgcccgtcatgttagtcagtacgcgtgccagcgcaagaccacgctgaataactacaacaaaaagttcaccgacgcgctggagatcatggccgagaactacaaatttaaagagaacctgcaggcgtgcctggaagccaagcgcgccgcgagtgtcctgaaaagcctgccgttcgaggttaccagcatgaaagacatccaaggtctgccgtgcattaccgacgacgtacgtgacgtgatcgaagagatcatcgaagagggcgagagcagccgtgttaaagaaatcctcaatgacgagcgctacaaggcctttaagcagttcaccagcgtgttcggtgtgggcgtgaaaacctcggaaaagtggtaccgtatgggcctccgtacggttgaagaagcaaaggccagtaagagtctgaagctgagcaagatgcagaaggcgggcttcctgtattacgaggatctggcgagcggtgttagtaaagaagaagccgatgccgttacgctcatcgtgaaggaaacggtgcgcactgttagtccggatgcgctggtgaccatcgccggcggtttccgccgtggcaaacctattggccacgacgttgacctgctgatcacgattccgggccgtcctgaagatgacgagctgctccacaaagtggttgatctgctcaagaagcaaggtctgctgctgtacgaagacatccgtgagagcacgttcgtggaggggcaactgccaaatcctaaacctgacgccctggacaaccatcagaagtgcttcgccattctcaagctgtaccgtccgaaggtggataacagtgcggttgggacgagtaagaaaagtgacatggctgaggttaaggattggaaagcggttcgtgtggatctggtgattgcgccattcgagcagttcgcctatgcgctgctcggttggacgggcagcggccaatttcgtcgcgatactcgtcgctatgcggaggaagagcgcgacatgctgctcgacaaccatcgtctctacgacctgaaaaagggcatctttctgagtgcggacagcgaagaagagattttcggtcatctggacctggattatctggagccgtgggaacgcaacgcg

SEQ ID NO: 4928 - protein, 394 aa, synthetic construct
  REGION 1..394: note = Variant of terminal deoxynucleotidyl transferase
MHHHHHHGGSGHPEGNTPEKEVPSVIARHVSQYACQRKTTLNNYNKKFTDALEIMAENYKFKENLQACLEAKRAASVLKSLPFEVTSMKDIQGLPCITDDVRDVIEEIIEEGESSRVKEILNDERYKAFKQFTSVFGVGVKTSEKWYRMGLRTVEEAKASKSLKLSKMQKAGFLYYEDLASGVSKEEADAVTLIVKETVRTVSPDALVTIAGGFRRGKPIGHDVDLLITIPGRPEDDELLHKVVDLLKKQGLLLYEDIRESTFVEGQLPNPKPDALDNHQKCFAILKLYRPKVDNSAVGTSKKSDMAEVKDWKAVRVDLVIAPFEQFAYALLGWTGSGQFRRDTRRYAEEERDMLLDNHRLYDLKKGIFLSADSEEEIFGHLDLDYLEPWERNA

SEQ ID NO: 4929 - DNA, 1182 bp, synthetic construct
  misc_feature 1..1182: note = Variant of terminal deoxynucleotidyl transferase
  source 1..1182: mol_type = other DNA
atgcatcaccaccatcatcatgggggttctggtcatccggaaggtaataccccggagaaggaggtgccgagcgttatcgcccgtcatgttagtcagtacgcgtgccagcgcaagaccacgctgaataactacaacaaaaagttcaccgacgcgctggagatcatggccgagaactacaaatttaaagagaacctgcaggcgtgcctggaagccaagcgcgccgcgagtgtcctgaaaagcctgccgttcgaggttaccagcatgaaagacatccaaggtctgccgtgcattaccgacgacgtacgtgacgtgatcgaagagatcatcgaagagggcgagagcagccgtgttaaagaaatcctcaatgacgagcgctacaaggcctttaagcagttcaccagcgtgttcggtgtgggcgtgaaaacctcggaaaagtggtaccgtatgggcctccgtacggttgaagaagcaaaggccagtaagagtctgaagctgagcaagatgcagaaggcgggcttcctgtattacgaggatctggcgagcggtgttagtaaagaagaagccgatgccgttacgctcatcgtgaaggaaacggtgcgcactgttagtccggatgcgctggtgaccatcgccggcggtttccgccgtggcaaacctatgggccacgacgttgacctgctgatcacgattccgggccgtcctgaagatgacgagctgctccacaaagtggttgatctgctcaagaagcaaggtctgctgctgtacgaagacatccgtgagagcacgttcgtggaggggcaactgccaaatcctaaacctgacgccctggacaaccatcagaagtgcttcgccattctcaagctgtaccgtccgaaggtggataacagtgcggttgggacgagtaagaaaagtgacatggctgaggttaaggattggaaagcggttcgtgtggatctggtgattgcgccattcgagcagttcgcctatgcgctgctcggttggacgggcagcggccaatttcgtcgcgatactcgtcgctatgcggaggaagagcgcgacatgctgctcgacaaccatcagctctacgacctgaaaaagggcatctttctgagtgcggacagcgaagaagagattttcggtcatctggacctggattatctggagccgtgggaacgcaacgcg

SEQ ID NO: 4930 - protein, 394 aa, synthetic construct
  REGION 1..394: note = Variant of terminal deoxynucleotidyl transferase
MHHHHHHGGSGHPEGNTPEKEVPSVIARHVSQYACQRKTTLNNYNKKFTDALEIMAENYKFKENLQACLEAKRAASVLKSLPFEVTSMKDIQGLPCITDDVRDVIEEIIEEGESSRVKEILNDERYKAFKQFTSVFGVGVKTSEKWYRMGLRTVEEAKASKSLKLSKMQKAGFLYYEDLASGVSKEEADAVTLIVKETVRTVSPDALVTIAGGFRRGKPMGHDVDLLITIPGRPEDDELLHKVVDLLKKQGLLLYEDIRESTFVEGQLPNPKPDALDNHQKCFAILKLYRPKVDNSAVGTSKKSDMAEVKDWKAVRVDLVIAPFEQFAYALLGWTGSGQFRRDTRRYAEEERDMLLDNHQLYDLKKGIFLSADSEEEIFGHLDLDYLEPWERNA

SEQ ID NO: 4931 - DNA, 1182 bp, synthetic construct
  misc_feature 1..1182: note = Variant of terminal deoxynucleotidyl transferase
  source 1..1182: mol_type = other DNA
atgcatcaccaccatcatcatgggggttctggtcatccggaaggtaataccccggagaaggaggtgccgagcgttatcgcccgtcatgttagtcagtacgcgtgccagcgcaagaccacgctgaataactacaacaaaaagttcaccgacgcgctggagatcatggccgagaactacaaatttaaagagaacctgcaggcgtgcctggaagccaagcgcgccgcgagtgtcctgaaaagcctgccgttcgaggttaccagcatgaaagacatccaaggtctgccgtgcattaccgacgacgtacgtgacgtgatcgaagagatcatcgaagagggcgagagcagccgtgttaaagaaatcctcaatgacgagcgctacaaggcctttaagcagttcaccagcgtgttcggtgtgggcgtgaaaacctcggaaaagtggtaccgtatgggcctccgtacggttgaagaagcaaaggccagtaagagtctgaagctgagcaagatgcagaaggcgggcttcctgtattacgaggatctggcgagcggtgttagtaaagaagaagccgatgccgttacgctcatcgtgaaggaaacggtgcgcactgttagtccggatgcgctggtgaccatcgccggcggtttccgccgtggcaaacctatgggccacgacgttgacctgctgatcacgattccgggccgtcctgaagatgacgaggtcctccacaaagtggttgatctgctcaagaagcaaggtctgctgctgtacgaagacatccgtgagagcacgttcgtggaggggcaactgccaaatcctaaacctgacgccctggacaaccatcagaagtgcttcgccattctcaagctgtaccgtccgaaggtggataacagtgcggttgggacgagtaagaaaagtgacatggctgaggttaaggattggaaagcggttcgtgtggatctggtgattgcgccattcgagcagttcgcctatgcgctgctcggttggacgggcagcggccaatttcgtcgcgatactcgtcgctatgcggaggaagagcgcgacatgctgctcgacaaccatcgtctctacgacctgaaaaagggcatctttctgagtgcggacagcgaagaagagattttcggtcatctggacctggattatctggagccgtgggaacgcaacgcg

SEQ ID NO: 4932 - protein, 394 aa, synthetic construct
  REGION 1..394: note = Variant of terminal deoxynucleotidyl transferase
MHHHHHHGGSGHPEGNTPEKEVPSVIARHVSQYACQRKTTLNNYNKKFTDALEIMAENYKFKENLQACLEAKRAASVLKSLPFEVTSMKDIQGLPCITDDVRDVIEEIIEEGESSRVKEILNDERYKAFKQFTSVFGVGVKTSEKWYRMGLRTVEEAKASKSLKLSKMQKAGFLYYEDLASGVSKEEADAVTLIVKETVRTVSPDALVTIAGGFRRGKPMGHDVDLLITIPGRPEDDEVLHKVVDLLKKQGLLLYEDIRESTFVEGQLPNPKPDALDNHQKCFAILKLYRPKVDNSAVGTSKKSDMAEVKDWKAVRVDLVIAPFEQFAYALLGWTGSGQFRRDTRRYAEEERDMLLDNHRLYDLKKGIFLSADSEEEIFGHLDLDYLEPWERNA

SEQ ID NO: 4933 - DNA, 1182 bp, synthetic construct
  misc_feature 1..1182: note = Variant of terminal deoxynucleotidyl transferase
  source 1..1182: mol_type = other DNA
atgcatcaccaccatcatcatgggggttctggtcatccggaaggtaataccccggagaaggaggtgccgagcgttatcgcccgtcatgttagtcagtacgcgtgccagcgcaagaccacgctgaataactacaacaaaaagttcaccgacgcgctggagatcatggccctgaactacaaatttaaagagaacctgcaggcgtgcctggaagccaagcgcgccgcgagtgtcctgaaaagcctgccgttcgaggttaccagcatgaaagacatccaaggtctgccgtgcattaccgacgacgtacgtgacgtgatcgaagagatcatcgaagagggcgagagcagccgtgttaaagaaatcctcaatgacgagcgctacaaggcctttaagcagttcaccagcgtgttcggtgtgggcgtgaaaacctcggaaaagtggtaccgtatgggcctccgtacggttgaagaagcaaaggccagtaagagtctgaagctgagcaagatgcagaaggcgggcttcctgtattacgaggatctggcgagcggtgttagtaaagaagaagccgatgccgttacgctcatcgtgaaggaaacggtgcgcactgttagtccggatgcgctggtgaccatcgccggcggtttccgccgtggcaaacctatgggccacgacgttgacctgctgatcacgattccgggccgtcctgaagatgacgagctgctccacaaagtggttgatctgctcaagaagcaaggtctgctgctgtacgaagacatccgtgagagcacgttcgtggaggggcaactgccaaatcctaaacctgacgccctggacaaccatcagaagtgcttcgccattctcaagctgtaccgtccgaaggtggataacagtgcggttgggacgagtaagaaaagtgacatggctgaggttaaggattggaaagcggttcgtgtggatctggtgattgcgccattcgagcagttcgcctatgcgctgctcggttggacgggcagcggccaatttcgtcgcgatactcgtcgctatgcggaggaagagcgcgacatgctgctcgacaaccatcgtctctacgacctgaaaaagggcatctttctgagtgcggacagcgaagaagagattttcggtcatctggacctggattatctggagccgtgggaacgcaacgcg

SEQ ID NO: 4934 - protein, 394 aa, synthetic construct
  REGION 1..394: note = Variant of terminal deoxynucleotidyl transferase
MHHHHHHGGSGHPEGNTPEKEVPSVIARHVSQYACQRKTTLNNYNKKFTDALEIMALNYKFKENLQACLEAKRAASVLKSLPFEVTSMKDIQGLPCITDDVRDVIEEIIEEGESSRVKEILNDERYKAFKQFTSVFGVGVKTSEKWYRMGLRTVEEAKASKSLKLSKMQKAGFLYYEDLASGVSKEEADAVTLIVKETVRTVSPDALVTIAGGFRRGKPMGHDVDLLITIPGRPEDDELLHKVVDLLKKQGLLLYEDIRESTFVEGQLPNPKPDALDNHQKCFAILKLYRPKVDNSAVGTSKKSDMAEVKDWKAVRVDLVIAPFEQFAYALLGWTGSGQFRRDTRRYAEEERDMLLDNHRLYDLKKGIFLSADSEEEIFGHLDLDYLEPWERNA

SEQ ID NO: 4935 - DNA, 1182 bp, synthetic construct
  misc_feature 1..1182: note = Variant of terminal deoxynucleotidyl transferase
  source 1..1182: mol_type = other DNA
atgcatcaccaccatcatcatgggggttctggtcatccggaaggtaataccccggagaaggaggtgccgagcgttatcgcccgtcatgttagtcagtacgcgtgccagcgcaagaccacgctgaataactacaacaaaaagttcaccgacgcgctggagatcatggccgagaactacaaatttaaagagaacctgcaggcgtgcctggaagccaagcgcgccgcgagtgtcctgaaaagcctgccgttcgaggttaccagcatgaaagacatccaaggtctgccgtgcattaccgacgacgtacgtgacgtgatcgaagagatcatcgaagagggcgagagcagccgtgttaaagaaatcctcaatgacgagcgctacaaggcctttaagcagttcaccagcgtgttcggtgtgggcgtgaaaacctcggaaaagtggtaccgtatgggcctccgtacggttgaagaagcaaaggccagtaagagtctgaagctgagcaagatgcagaaggcgggcttcctgtattacgaggatctgggtagcggtgttagtaaagaagaagccgatgccgttacgctcatcgtgaaggaaacggtgcgcactgttagtccggatgcgctggtgaccatcgccggcggtttccgccgtggcaaacctatgggccacgacgttgacctgctgatcacgattccgggccgtcctgaagatgacgagctgctccacaaagtggttgatctgctcaagaagcaaggtctgctgctgtacgaagacatccgtgagagcacgttcgtggaggggcaactgccaaatcctaaacctgacgccctggacaaccatcagaagtgcttcgccattctcaagctgtaccgtccgaaggtggataacagtgcggttgggacgagtaagaaaagtgacatggctgaggttaaggattggaaagcggttcgtgtggatctggtgattgcgccattcgagcagttcgcctatgcgctgctcggttggacgggcagcggccaatttcgtcgcgatactcgtcgctatgcggaggaagagcgcgacatgctgctcgacaaccatcgtctctacgacctgaaaaagggcatctttctgagtgcggacagcgaagaagagattttcggtcatctggacctggattatctggagccgtgggaacgcaacgcg

SEQ ID NO: 4936 - protein, 394 aa, synthetic construct
  REGION 1..394: note = Variant of terminal deoxynucleotidyl transferase
MHHHHHHGGSGHPEGNTPEKEVPSVIARHVSQYACQRKTTLNNYNKKFTDALEIMAENYKFKENLQACLEAKRAASVLKSLPFEVTSMKDIQGLPCITDDVRDVIEEIIEEGESSRVKEILNDERYKAFKQFTSVFGVGVKTSEKWYRMGLRTVEEAKASKSLKLSKMQKAGFLYYEDLGSGVSKEEADAVTLIVKETVRTVSPDALVTIAGGFRRGKPMGHDVDLLITIPGRPEDDELLHKVVDLLKKQGLLLYEDIRESTFVEGQLPNPKPDALDNHQKCFAILKLYRPKVDNSAVGTSKKSDMAEVKDWKAVRVDLVIAPFEQFAYALLGWTGSGQFRRDTRRYAEEERDMLLDNHRLYDLKKGIFLSADSEEEIFGHLDLDYLEPWERNA

SEQ ID NO: 4937 - DNA, 1182 bp, synthetic construct
  misc_feature 1..1182: note = Variant of terminal deoxynucleotidyl transferase
  source 1..1182: mol_type = other DNA
atgcatcaccaccatcatcatgggggttctggtcatccggaaggtaataccccggagaaggaggtgccgagcgttatcgcccgtcatgttagtcagtacgcgtgccagcgcaagaccacgctgaataactacaacaaaaagttcaccgacgcgctggagatcatggccgagaactacaaatttaaagagaacctgcaggcgtgcctggaagccaagcgcgccgcgagtgtcctgaaaagcctgccgttcgaggttaccagcatgaaagacatccaaggtctgccgtgcattaccgacgacgtacgtgacgtgatcgaagagatcatcgaagagggcgagagcagccgtgttaaagaaatcctcaatgacgagcgctacaaggcctttaagcagttcaccagcgtgttcggtgtgggcgtgaaaacctcggaaaagtggtaccgtatgggcctccgtacggttgaagaagcaaaggccagtaagagtctgaagctgagcaagatgcagaaggcgggcttcctgtattacgaggatctggcgagcggtgttagtaaagaagaagccgatgccgttacgctcatcgtgaaggaaacggtgcgcactgttagtccggatgcgctggtgaccatcgccggcggtttccgccgtggcaaacctatgggccacgacgttgacctgctgatcacgattccgggccgtcctgaagatgacgagctgctccacaaagtggttgatctgctcaagaagcaaggtctgctgctgtacgaagacatccgtgagagcacgttcgtggaggggcaactgccaaatcctaaacctgacgccctggacaaccatcagaagtgcttcgccattctcaagctgtaccgtccgaaggtggataacagtgcggttgggacgagtaagaaaagtgacatggctgaggttaaggattggaaagcggttcgtgtggatctggtgattgcgccattcgagcagttcgcctatgcgctgctcggttggacgggcagcggccaatttcgtcgcgatactcgtcgctatgcggaggaagagcgcgacatgctgctcgacaaccatcgtctctacgacctgaaaaagggcatctttctggttgcggacagcgaagaagagattttcggtcatctggacctggattatctggagccgtgggaacgcaacgcg

SEQ ID NO: 4938 - protein, 394 aa, synthetic construct
  REGION 1..394: note = Variant of terminal deoxynucleotidyl transferase
MHHHHHHGGSGHPEGNTPEKEVPSVIARHVSQYACQRKTTLNNYNKKFTDALEIMAENYKFKENLQACLEAKRAASVLKSLPFEVTSMKDIQGLPCITDDVRDVIEEIIEEGESSRVKEILNDERYKAFKQFTSVFGVGVKTSEKWYRMGLRTVEEAKASKSLKLSKMQKAGFLYYEDLASGVSKEEADAVTLIVKETVRTVSPDALVTIAGGFRRGKPMGHDVDLLITIPGRPEDDELLHKVVDLLKKQGLLLYEDIRESTFVEGQLPNPKPDALDNHQKCFAILKLYRPKVDNSAVGTSKKSDMAEVKDWKAVRVDLVIAPFEQFAYALLGWTGSGQFRRDTRRYAEEERDMLLDNHRLYDLKKGIFLVADSEEEIFGHLDLDYLEPWERNA

SEQ ID NO: 4939 - DNA, 1182 bp, synthetic construct
  misc_feature 1..1182: note = Variant of terminal deoxynucleotidyl transferase
  source 1..1182: mol_type = other DNA
atgcatcaccaccatcatcatgggggttctggtcatccggaaggtaataccccggagaaggaggtgccgagcgttatcgcccgtcatgttagtcagtacgcgtgccagcgcaagaccacgctgaataactacaacaaaaagttcaccgacgcgctggagatcatggccgagaactacaaatttaaagagaacctgcaggcgtgcctggaagccaagcgcgccgcgagtgtcctgaaaagcctgccgttcgaggttaccagcatgaaagacatccaaggtctgccgtgcattaccgacgacgtacgtgacgtgatcgaagagatcatcgaagagggcgagagcagccgtgttaaagaaatcctcaatgacgagcgctacaaggcctttaagcagttcaccagcgtgttcggtgtgggcgtgaaaacctcggaaaagtggtaccgtatgggcctccgtacggttgaagaagcaaaggccagtaagagtctgaagctgagcaagatgcagaaggcgggcttcctgtattacgaggatctggcgagcggtgttagtaaagaagaagccgatgccgttacgctcatcgtgaaggaaacggtgcgcactgttagtccggatgcgctggtgaccatcgccggcggtttccgccgtggcaaacctatgggccacgacgttgacctgctgatcacgattccgggccgtcctgaagatgacgagctgctccacaaagtggttgatctgctcaagaagcaaggtctgctgctgtacgaagacatccgtgagagcacgttcgtggagaggcaactgccaaatcctaaacctgacgccctggacaaccatcagaagtgcttcgccattctcaagctgtaccgtccgaaggtggataacagtgcggttgggacgagtaagaaaagtgacatggctgaggttaaggattggaaagcggttcgtgtggatctggtgattgcgccattcgagcagttcgcctatgcgctgctcggttggacgggcagcggccaatttcgtcgcgatactcgtcgctatgcggaggaagagcgcgacatgctgctcgacaaccatcgtctctacgacctgaaaaagggcatctttctgagtgcggacagcgaagaagagattttcggtcatctggacctggattatctggagccgtgggaacgcaacgcg

SEQ ID NO: 4940 - protein, 394 aa, synthetic construct
  REGION 1..394: note = Variant of terminal deoxynucleotidyl transferase
MHHHHHHGGSGHPEGNTPEKEVPSVIARHVSQYACQRKTTLNNYNKKFTDALEIMAENYKFKENLQACLEAKRAASVLKSLPFEVTSMKDIQGLPCITDDVRDVIEEIIEEGESSRVKEILNDERYKAFKQFTSVFGVGVKTSEKWYRMGLRTVEEAKASKSLKLSKMQKAGFLYYEDLASGVSKEEADAVTLIVKETVRTVSPDALVTIAGGFRRGKPMGHDVDLLITIPGRPEDDELLHKVVDLLKKQGLLLYEDIRESTFVERQLPNPKPDALDNHQKCFAILKLYRPKVDNSAVGTSKKSDMAEVKDWKAVRVDLVIAPFEQFAYALLGWTGSGQFRRDTRRYAEEERDMLLDNHRLYDLKKGIFLSADSEEEIFGHLDLDYLEPWERNA

SEQ ID NO: 4941 - DNA, 1182 bp, synthetic construct
  misc_feature 1..1182: note = Variant of terminal deoxynucleotidyl transferase
  source 1..1182: mol_type = other DNA
atgcatcaccaccatcatcatgggggttctggtcatccggaaggtaataccccggagaaggaggtgccgagcgttatcgcccgtcatgttagtcagtacgcgtgccagcgcaagaccacgctgaataactacaacaaaaagttcaccgacgcgctggagatcatggccgaggattacaaatttaaagagaacctgcaggcgtgcctggaagccaagcgcgccgcgagtgtcctgaaaagcctgccgttcgaggttaccagcatgaaagacatccaaggtctgccgtgcattaccgacgacgtacgtgacgtgatcgaagagatcatcgaagagggcgagagcagccgtgttaaagaaatcctcaatgacgagcgctacaaggcctttaagcagttcaccagcgtgttcggtgtgggcgtgaaaacctcggaaaagtggtaccgtatgggcctccgtacggttgaagaagcaaaggccagtaagagtctgaagctgagcaagatgcagaaggcgggcttcctgtattacgaggatctggcgagcggtgttagtaaagaagaagccgatgccgttacgctcatcgtgaaggaaacggtgcgcactgttagtccggatgcgctggtgaccatcgccggcggtttccgccgtggcaaacctatgggccacgacgttgacctgctgatcacgattccgggccgtcctgaagatgacgagctgctccacaaagtggttgatctgctcaagaagcaaggtctgctgctgtacgaagacatccgtgagagcacgttcgtggaggggcaactgccaaatcctaaacctgacgccctggacaaccatcagaagtgcttcgccattctcaagctgtaccgtccgaaggtggataacagtgcggttgggacgagtaagaaaagtgacatggctgaggttaaggattggaaagcggttcgtgtggatctggtgattgcgccattcgagcagttcgcctatgcgctgctcggttggacgggcagcggccaatttcgtcgcgatactcgtcgctatgcggaggaagagcgcgacatgctgctcgacaaccatcgtctctacgacctgaaaaagggcatctttctgagtgcggacagcgaagaagagattttcggtcatctggacctggattatctggagccgtgggaacgcaacgcg

SEQ ID NO: 4942 - protein, 394 aa, synthetic construct
  REGION 1..394: note = Variant of terminal deoxynucleotidyl transferase
MHHHHHHGGSGHPEGNTPEKEVPSVIARHVSQYACQRKTTLNNYNKKFTDALEIMAEDYKFKENLQACLEAKRAASVLKSLPFEVTSMKDIQGLPCITDDVRDVIEEIIEEGESSRVKEILNDERYKAFKQFTSVFGVGVKTSEKWYRMGLRTVEEAKASKSLKLSKMQKAGFLYYEDLASGVSKEEADAVTLIVKETVRTVSPDALVTIAGGFRRGKPMGHDVDLLITIPGRPEDDELLHKVVDLLKKQGLLLYEDIRESTFVEGQLPNPKPDALDNHQKCFAILKLYRPKVDNSAVGTSKKSDMAEVKDWKAVRVDLVIAPFEQFAYALLGWTGSGQFRRDTRRYAEEERDMLLDNHRLYDLKKGIFLSADSEEEIFGHLDLDYLEPWERNA

SEQ ID NO: 4943 - DNA, 1182 bp, synthetic construct
  misc_feature 1..1182: note = Variant of terminal deoxynucleotidyl transferase
  source 1..1182: mol_type = other DNA
atgcatcaccaccatcatcatgggggttctggtcatccggaaggtaataccccggagaaggaggtgccgagcgttatcgcccgtcatgttagtcagtacgcgtgccagcgcaagaccacgctgaataactacaacaaaaagttcaccgacgcgctggagatcatggccgagaactacaaatttaaagagaacctgcaggcgtgcctggaagccaagcgcgccgcgagtgtcctgaaaagcctgccgttcgaggttaccagcatgaaagacatccaaggtctgccgtgcattaccgacgacgtacgtgacgtgatcgaagagatcatcgaagagggcgagagcagccgtgttaaagaaatcctcaatgacgagcgctacaaggcctttaagcagttcaccagcgtgttcggtgtgggcgtgaaaacctcggaaaagtggtaccgtatgggcctccgtacggttgaagaagcaaaggccagtaagagtctgaagctgagcaagatgcagaaggcgggcttcctgtattacgaggatctggcgagcggtgttagtaaagaagaagccgatgccgttacgctcatcgtgaaggaaacggtgcgcactgttagtccggatgcgctggtgaccatcgccggcggtttccgccgtggcaaacctatgggccacgacgttgacctgctgatcacgattccgggccgtcctgaagatgacgagctgctccacaaagtggttgatctgctcaagaagcaaggtctgctgctgtacgaagacatccgtgagagcacgttcgtggaggggcaactgccaaatcctaaacctgacgccctggacaaccatcagaagtgcttcgccattctcaagctgtaccgtccgaaggtggataacagtgcggttgggacgagtaagaaaagtgacatggctgaggttaaggattggaaagcggttcgtgtggatctggtgattgcgccattcagccagttcgcctatgcgctgctcggttggacgggcagcggccaatttcgtcgcgatactcgtcgctatgcggaggaagagcgcgacatgctgctcgacaaccatcgtctctacgacctgaaaaagggcatctttctgagtgcggacagcgaagaagagattttcggtcatctggacctggattatctggagccgtgggaacgcaacgcg

SEQ ID NO: 4944 - protein, 394 aa, synthetic construct
  REGION 1..394: note = Variant of terminal deoxynucleotidyl transferase
MHHHHHHGGSGHPEGNTPEKEVPSVIARHVSQYACQRKTTLNNYNKKFTDALEIMAENYKFKENLQACLEAKRAASVLKSLPFEVTSMKDIQGLPCITDDVRDVIEEIIEEGESSRVKEILNDERYKAFKQFTSVFGVGVKTSEKWYRMGLRTVEEAKASKSLKLSKMQKAGFLYYEDLASGVSKEEADAVTLIVKETVRTVSPDALVTIAGGFRRGKPMGHDVDLLITIPGRPEDDELLHKVVDLLKKQGLLLYEDIRESTFVEGQLPNPKPDALDNHQKCFAILKLYRPKVDNSAVGTSKKSDMAEVKDWKAVRVDLVIAPFSQFAYALLGWTGSGQFRRDTRRYAEEERDMLLDNHRLYDLKKGIFLSADSEEEIFGHLDLDYLEPWERNA

SEQ ID NO: 4945 - DNA, 1182 bp, synthetic construct
  misc_feature 1..1182: note = Variant of terminal deoxynucleotidyl transferase
  source 1..1182: mol_type = other DNA
atgcatcaccaccatcatcatgggggttctggtcatccggaaggtaataccccggagaaggaggtgccgagcgttatcgcccgtcatgttagtcagtacgcgtgccagcgcaagaccacgctgaataactacaacaaaaagttcaccgacgcgctggagatcatggccgagaactacaaatttaaagagaacctgcaggcgtgcctggaagccaagcgcgccgcgagtgtcctgaaaagcctgccgttcgaggttaccagcatgaaagacatccaaggtctgccgtgcattaccgacgacgtacgtgacgtgatcgaagagatcatcgaagagggcgagagcagccgtgttaaagaaatcctcaatgacgagcgctacaaggcctttaagcagttcaccagcgtgttcggtgtgggcgtgaaaacctcggaaaagtggtaccgtatgggcctccgtacggttgaagaagcaaaggccagtaagagtctgaagctgagcaagatgcagaaggcgggcttcctgtattacgaggatctggcgagcggtgttagtaaagaagaagccgatgccgttacgctcatcgtgaaggaaacggtgcgcactgttagtccggatgcgctggtgaccatcgccggcggtttccgccgtggcaaacctatgggccacgacgttgacctgctgatcacgattccgggccgtcctgaagatgacgagctgctccacaaagtggttgatctgctcaagaagcaaggtctgctgctgtacgaagacatccgtgagagcacgttcgtggaggggcaactgccaaatcctaaacctgacgccctggacaaccatcagaagtgcttcgccattctcaagctgtaccgtccgaaggtggataacagtgcggttgggacgagtaagaaaagtgacatggctgaggttaaggattggaaagcggttcgtgtggatctggtgattgcgccattcgagcagttcgcctatgcgctgctcggttggacgggcagcggccaatttcgtcgcgatatccgtcgctatgcggaggaagagcgcgacatgctgctcgacaaccatcgtctctacgacctgaaaaagggcatctttctgagtgcggacagcgaagaagagattttcggtcatctggacctggattatctggagccgtgggaacgcaacgcg

SEQ ID NO: 4946 - protein, 394 aa, synthetic construct
  REGION 1..394: note = Variant of terminal deoxynucleotidyl transferase
MHHHHHHGGSGHPEGNTPEKEVPSVIARHVSQYACQRKTTLNNYNKKFTDALEIMAENYKFKENLQACLEAKRAASVLKSLPFEVTSMKDIQGLPCITDDVRDVIEEIIEEGESSRVKEILNDERYKAFKQFTSVFGVGVKTSEKWYRMGLRTVEEAKASKSLKLSKMQKAGFLYYEDLASGVSKEEADAVTLIVKETVRTVSPDALVTIAGGFRRGKPMGHDVDLLITIPGRPEDDELLHKVVDLLKKQGLLLYEDIRESTFVEGQLPNPKPDALDNHQKCFAILKLYRPKVDNSAVGTSKKSDMAEVKDWKAVRVDLVIAPFEQFAYALLGWTGSGQFRRDIRRYAEEERDMLLDNHRLYDLKKGIFLSADSEEEIFGHLDLDYLEPWERNA

SEQ ID NO: 4947 - DNA, 1182 bp, synthetic construct
  misc_feature 1..1182: note = Variant of terminal deoxynucleotidyl transferase
  source 1..1182: mol_type = other DNA
atgcatcaccaccatcatcatgggggttctggtcatccggaaggtaataccccggagaaggaggtgccgagcgttatcgcccgtcatgttagtcagtacgcgtgccagcgcaagaccacgctgaataactacaacaaaaagttcaccgacgcgctggagatcatggccgagaactacaaatttaaagagaacctgcaggcgtgcctggaagccaagcgcgccgcgagtgtcctgaaaagcctgccgttcgaggttaccagcatgaaagacatccaaggtctgccgtgcattaccgacgacgtacgtgacgtgatcgaagagatcatcgaagagggcgagagcagccgtgttaaagaaatcctcaatgacgagcgctacaaggcctttaagcagttcaccagcgtgttcggtgtgggcgtgaaaacctcggaaaagtggtaccgtatgggcctccgtacggttgaagaagcaaaggccagtaagagtctgaagctgagcaagatgcagaaggcgggcttcctgtattacgaggatctggcgagcggtgttagtaaagaagaagccgatgccgttacgctcatcgtgaaggaaacggtgcgcactgttagtccggatgcgctggtgaccatcgccggcggtttccgccgtggcaaacctatgggccacgacgttgacctgctgatcacgattccgggccgtcctgaagatgacgagctgctccacaaagtggttgatctgctcaagaagcaaggtctgctgctgtacgaagacatccgtgagagcacgttcgtggaggggcaactgccaaatcctaaaccttgggccctggacaaccatcagaagtgcttcgccattctcaagctgtaccgtccgaaggtggataacagtgcggttgggacgagtaagaaaagtgacatggctgaggttaaggattggaaagcggttcgtgtggatctggtgattgcgccattcgagcagttcgcctatgcgctgctcggttggacgggcagcggccaatttcgtcgcgatactcgtcgctatgcggaggaagagcgcgacatgctgctcgacaaccatcgtctctacgacctgaaaaagggcatctttctgagtgcggacagcgaagaagagattttcggtcatctggacctggattatctggagccgtgggaacgcaacgcg

SEQ ID NO: 4948 - protein, 394 aa, synthetic construct
  REGION 1..394: note = Variant of terminal deoxynucleotidyl transferase
MHHHHHHGGSGHPEGNTPEKEVPSVIARHVSQYACQRKTTLNNYNKKFTDALEIMAENYKFKENLQACLEAKRAASVLKSLPFEVTSMKDIQGLPCITDDVRDVIEEIIEEGESSRVKEILNDERYKAFKQFTSVFGVGVKTSEKWYRMGLRTVEEAKASKSLKLSKMQKAGFLYYEDLASGVSKEEADAVTLIVKETVRTVSPDALVTIAGGFRRGKPMGHDVDLLITIPGRPEDDELLHKVVDLLKKQGLLLYEDIRESTFVEGQLPNPKPWALDNHQKCFAILKLYRPKVDNSAVGTSKKSDMAEVKDWKAVRVDLVIAPFEQFAYALLGWTGSGQFRRDTRRYAEEERDMLLDNHRLYDLKKGIFLSADSEEEIFGHLDLDYLEPWERNA

SEQ ID NO: 4949 - DNA, 1182 bp, synthetic construct
  misc_feature 1..1182: note = Variant of terminal deoxynucleotidyl transferase
  source 1..1182: mol_type = other DNA
atgcatcaccaccatcatcatgggggttctggtcatccggaaggtaataccccggagaaggaggtgccgagcgttatcgcccgtcatgttagtcagtacgcgtgccagcgcaagaccacgctgaataactacaacaaaaagttcaccgacgcgctggagatcatggccgagaactacaaatttaaagagaacctgcaggcgtgcctggaagccaagcgcgccgcgagtgtcctgaaaagcctgccgttcgaggttaccagcatgaaagacatccaaggtctgccgtgcattaccgacgacgtacgtgacgtgatcgaagagatcatcgaagagggcgagagcagccgtgttaaagaaatcctcaatgacgagcgctacaaggcctttaagcagttcaccagcgtgttcggtgtgggcgtgaaaacctcggaaaagtggtaccgtatgggcctccgtacggttgaagaagcaaaggccagtaagagtctgaagctgagcaagatgcagaaggcgggcttcctgtattacgaggatctggcgagcggtgttagttttgaagaagccgatgccgttacgctcatcgtgaaggaaacggtgcgcactgttagtccggatgcgctggtgaccatcgccggcggtttccgccgtggcaaacctatgggccacgacgttgacctgctgatcacgattccgggccgtcctgaagatgacgagctgctccacaaagtggttgatctgctcaagaagcaaggtctgctgctgtacgaagacatccgtgagagcacgttcgtggaggggcaactgccaaatcctaaacctgacgccctggacaaccatcagaagtgcttcgccattctcaagctgtaccgtccgaaggtggataacagtgcggttgggacgagtaagaaaagtgacatggctgaggttaaggattggaaagcggttcgtgtggatctggtgattgcgccattcgagcagttcgcctatgcgctgctcggttggacgggcagcggccaatttcgtcgcgatactcgtcgctatgcggaggaagagcgcgacatgctgctcgacaaccatcgtctctacgacctgaaaaagggcatctttctgagtgcggacagcgaagaagagattttcggtcatctggacctggattatctggagccgtgggaacgcaacgcg

SEQ ID NO: 4950 - protein, 394 aa, synthetic construct
  REGION 1..394: note = Variant of terminal deoxynucleotidyl transferase
MHHHHHHGGSGHPEGNTPEKEVPSVIARHVSQYACQRKTTLNNYNKKFTDALEIMAENYKFKENLQACLEAKRAASVLKSLPFEVTSMKDIQGLPCITDDVRDVIEEIIEEGESSRVKEILNDERYKAFKQFTSVFGVGVKTSEKWYRMGLRTVEEAKASKSLKLSKMQKAGFLYYEDLASGVSFEEADAVTLIVKETVRTVSPDALVTIAGGFRRGKPMGHDVDLLITIPGRPEDDELLHKVVDLLKKQGLLLYEDIRESTFVEGQLPNPKPDALDNHQKCFAILKLYRPKVDNSAVGTSKKSDMAEVKDWKAVRVDLVIAPFEQFAYALLGWTGSGQFRRDTRRYAEEERDMLLDNHRLYDLKKGIFLSADSEEEIFGHLDLDYLEPWERNA

SEQ ID NO: 4951 - DNA, 1182 bp, synthetic construct
  misc_feature 1..1182: note = Variant of terminal deoxynucleotidyl transferase
  source 1..1182: mol_type = other DNA
atgcatcaccaccatcatcatgggggttctggtcatccggaaggtaataccccggagaaggaggtgccgagcgttatcgcccgtcatgttagtcagtacgcgtgccagcgcaagaccacgctgaataactacaacaaaaagttcaccgacgcgctggagatcatggccgagaactacaaatttaaagagaacctgcaggcgtgcctggaagccaagcgcgccgcgagtgtcctgaaaagcctgccgttcgaggttaccagcatgaaagacatccaaggtctgccgtgcattaccgacgacgtacgtgacgtgatcgaagagatcatcgaagagggcgagagcagccgtgttaaagaaatcctcaatgacgagcgctacaaggcctttaagcagttcaccagcgtgttcggtgtgggcgtgaaaacctcggaaaagtggtaccgtatgggcctccgtacggttgaagaagcaaaggccagtaagagtctgaagctgagcaagatgcagaaggcgggcttcctgtattacgaggatctggcgagcggtgttagtaaagaagaagccgatgccgttacgctcatcgtgaaggaaacggtgcgcactgttagtccggatgcgctggtgaccatcgccggcggtttccgccgtggcaaacctatgggccacgacgttgacctgctgatcacgattccgggccgtcctgaagatgacgagctgctccacaaagtggttgatctgctcaagaagcaaggtctgctgctgtacgaagacatccgtgagagcacgttcgtggaggggcaactgccaaatcctaaacctgacaagctggacaaccatcagaagtgcttcgccattctcaagctgtaccgtccgaaggtggataacagtgcggttgggacgagtaagaaaagtgacatggctgaggttaaggattggaaagcggttcgtgtggatctggtgattgcgccattcgagcagttcgcctatgcgctgctcggttggacgggcagcggccaatttcgtcgcgatactcgtcgctatgcggaggaagagcgcgacatgctgctcgacaaccatcgtctctacgacctgaaaaagggcatctttctgagtgcggacagcgaagaagagattttcggtcatctggacctggattatctggagccgtgggaacgcaacgcg

SEQ ID NO: 4952 - protein, 394 aa, synthetic construct
  REGION 1..394: note = Variant of terminal deoxynucleotidyl transferase
MHHHHHHGGSGHPEGNTPEKEVPSVIARHVSQYACQRKTTLNNYNKKFTDALEIMAENYKFKENLQACLEAKRAASVLKSLPFEVTSMKDIQGLPCITDDVRDVIEEIIEEGESSRVKEILNDERYKAFKQFTSVFGVGVKTSEKWYRMGLRTVEEAKASKSLKLSKMQKAGFLYYEDLASGVSKEEADAVTLIVKETVRTVSPDALVTIAGGFRRGKPMGHDVDLLITIPGRPEDDELLHKVVDLLKKQGLLLYEDIRESTFVEGQLPNPKPDKLDNHQKCFAILKLYRPKVDNSAVGTSKKSDMAEVKDWKAVRVDLVIAPFEQFAYALLGWTGSGQFRRDTRRYAEEERDMLLDNHRLYDLKKGIFLSADSEEEIFGHLDLDYLEPWERNA

SEQ ID NO: 4953 - DNA, 1182 bp, synthetic construct
  misc_feature 1..1182: note = Variant of terminal deoxynucleotidyl transferase
  source 1..1182: mol_type = other DNA
atgcatcaccaccatcatcatgggggttctggtcatccggaaggtaataccccggagaaggaggtgccgagcgttatcgcccgtcatgttagtcagtacgcgtgccagcgcaagaccacgctgaataactacaacaaaaagttcaccgacgcgctggagatcatggccgagaactacaaatttaaagagaacctgcaggcgtgcctggaagccaagcgcgccgcgagtgtcctgaaaagcctgccgttcgaggttaccagcatgaaagacatccaaggtctgccgtgcattaccgacgacgtacgtgacgtgatcgaagagatcatcgaagagggcgagagcagccgtgttaaagaaatcctcaatgacgagcgctacaaggcctttaagcagttcaccagcgtgttcggtgtgggcgtgaaaacctcggaaaagtggtaccgtatgggcctccgtacggtcgaagaagcaaaggccagtaagagtctgaagctgagcaagatgcagaaggcgggcttcctgtattacgaggatctggcgagcggtgttagtaaagaagaagccgatgccgttacgctcatcgtgaaggaaacggtgcgcactgttagtccggatgcgctggtgaccatcgccggcggtttccgccgtggcaaacctatgggccacgacgttgacctgctgatcacgattccgggccgtcctgaagatgacgagctgctccacaaagtggttgatctgctcaagaagcaaggtctgctgctgtacgaagacatccgtgaggcgacgttcgtggaggggcaactgccaaatcctaaacctgacgccctggacaaccatcagaagtgcttcgccattctcaagctgtaccgtccgaaggtggataacagtgcggttgggacgagtaagaaaagtgacatggctgaggttaaggattggaaagcggttcgtgtggatctggtgattgcgccattcgagcagttcgcctatgcgctgctcggttggacgggcagcggccaatttcgtcgcgatactcgtcgctatgcggaggaagagcgcgacatgctgctcgacaaccatcgtctctacgacctgaaaaagggcatctttctgagtgcggacagcgaagaagagattttcggtcatctggacctggattatctggagccgtgggaacgcaacgcg

SEQ ID NO: 4954 - protein, 394 aa, synthetic construct
  REGION 1..394: note = Variant of terminal deoxynucleotidyl transferase
MHHHHHHGGSGHPEGNTPEKEVPSVIARHVSQYACQRKTTLNNYNKKFTDALEIMAENYKFKENLQACLEAKRAASVLKSLPFEVTSMKDIQGLPCITDDVRDVIEEIIEEGESSRVKEILNDERYKAFKQFTSVFGVGVKTSEKWYRMGLRTVEEAKASKSLKLSKMQKAGFLYYEDLASGVSKEEADAVTLIVKETVRTVSPDALVTIAGGFRRGKPMGHDVDLLITIPGRPEDDELLHKVVDLLKKQGLLLYEDIREATFVEGQLPNPKPDALDNHQKCFAILKLYRPKVDNSAVGTSKKSDMAEVKDWKAVRVDLVIAPFEQFAYALLGWTGSGQFRRDTRRYAEEERDMLLDNHRLYDLKKGIFLSADSEEEIFGHLDLDYLEPWERNA

SEQ ID NO: 4955 - DNA, 1182 bp, synthetic construct
  misc_feature 1..1182: note = Variant of terminal deoxynucleotidyl transferase
  source 1..1182: mol_type = other DNA
atgcatcaccaccatcatcatgggggttctggtcatccggaaggtaataccccggagaaggaggtgccgagcgttatcgcccgtcatgttagtcagtacgcgtgccagcgcaagaccacgctgaataactacaacaaaaagttcaccgacgcgctggagatcatggccgagaactacaaatttaaagagaactggcaggcgtgcctggaagccaagcgcgccgcgagtgtcctgaaaagcctgccgttcgaggttaccagcatgaaagacatccaaggtctgccgtgcattaccgacgacgtacgtgacgtgatcgaagagatcatcgaagagggcgagagcagccgtgttaaagaaatcctcaatgacgagcgctacaaggcctttaagcagttcaccagcgtgttcggtgtgggcgtgaaaacctcggaaaagtggtaccgtatgggcctccgtacggttgaagaagcaaaggccagtaagagtctgaagctgagcaagatgcagaaggcgggcttcctgtattacgaggatctggcgagcggtgttagtaaagaagaagccgatgccgttacgctcatcgtgaaggaaacggtgcgcactgttagtccggatgcgctggtgaccatcgccggcggtttccgccgtggcaaacctatgggccacgacgttgacctgctgatcacgattccgggccgtcctgaagatgacgagctgctccacaaagtggttgatctgctcaagaagcaaggtctgctgctgtacgaagacatccgtgagagcacgttcgtggaggggcaactgccaaatcctaaacctgacgccctggacaaccatcagaagtgcttcgccattctcaagctgtaccgtccgaaggtggataacagtgcggttgggacgagtaagaaaagtgacatggctgaggttaaggattggaaagcggttcgtgtggatctggtgattgcgccattcgagcagttcgcctatgcgctgctcggttggacgggcagcggccaatttcgtcgcgatactcgtcgctatgcggaggaagagcgcgacatgctgctcgacaaccatcgtctctacgacctgaaaaagggcatctttctgagtgcggacagcgaagaagagattttcggtcatctggacctggattatctggagccgtgggaacgcaacgcg

SEQ ID NO: 4956 - protein, 394 aa, synthetic construct
  REGION 1..394: note = Variant of terminal deoxynucleotidyl transferase
MHHHHHHGGSGHPEGNTPEKEVPSVIARHVSQYACQRKTTLNNYNKKFTDALEIMAENYKFKENWQACLEAKRAASVLKSLPFEVTSMKDIQGLPCITDDVRDVIEEIIEEGESSRVKEILNDERYKAFKQFTSVFGVGVKTSEKWYRMGLRTVEEAKASKSLKLSKMQKAGFLYYEDLASGVSKEEADAVTLIVKETVRTVSPDALVTIAGGFRRGKPMGHDVDLLITIPGRPEDDELLHKVVDLLKKQGLLLYEDIRESTFVEGQLPNPKPDALDNHQKCFAILKLYRPKVDNSAVGTSKKSDMAEVKDWKAVRVDLVIAPFEQFAYALLGWTGSGQFRRDTRRYAEEERDMLLDNHRLYDLKKGIFLSADSEEEIFGHLDLDYLEPWERNA

SEQ ID NO: 4957 - DNA, 1182 bp, synthetic construct
  misc_feature 1..1182: note = Variant of terminal deoxynucleotidyl transferase
  source 1..1182: mol_type = other DNA
atgcatcaccaccatcatcatgggggttctggtcatccggaaggtaataccccggagaaggaggtgccgagcgttatcgcccgtcatgttagtcagtacgcgtgccagcgcaagaccacgctgaataactacaacaaaaagttcaccgacgcgctggagatcatggccgagaactacaaatttaaagataacctgcaggcgtgcctggaagccaagcgcgccgcgagtgtcctgaaaagcctgccgttcgaggttaccagcatgaaagacatccaaggtctgccgtgcattaccgacgacgtacgtgacgtgatcgaagagatcatcgaagagggcgagagcagccgtgttaaagaaatcctcaatgacgagcgctacaaggcctttaagcagttcaccagcgtgttcggtgtgggcgtgaaaacctcggaaaagtggtaccgtatgggcctccgtacggttgaagaagcaaaggccagtaagagtctgaagctgagcaagatgcagaaggcgggcttcctgtattacgaggatctggcgagcggtgttagtaaagaagaagccgatgccgttacgctcatcgtgaaggaaacggtgcgcactgttagtccggatgcgctggtgaccatcgccggcggtttccgccgtggcaaacctatgggccacgacgttgacctgctgatcacgattccgggccgtcctgaagatgacgagctgctccacaaagtggttgatctgctcaagaagcaaggtctgctgctgtacgaagacatccgtgagagcacgttcgtggaggggcaactgccaaatcctaaacctgacgccctggacaaccatcagaagtgcttcgccattctcaagctgtaccgtccgaaggtggataacagtgcggttgggacgagtaagaaaagtgacatggctgaggttaaggattggaaagcggttcgtgtggatctggtgattgcgccattcgagcagttcgcctatgcgctgctcggttggacgggcagcggccaatttcgtcgcgatactcgtcgctatgcggaggaagagcgcgacatgctgctcgacaaccatcgtctctacgacctgaaaaagggcatctttctgagtgcggacagcgaagaagagattttcggtcatctggacctggattatctggagccgtgggaacgcaacgcg

SEQ ID NO: 4958 - protein, 394 aa, synthetic construct
  REGION 1..394: note = Variant of terminal deoxynucleotidyl transferase
MHHHHHHGGSGHPEGNTPEKEVPSVIARHVSQYACQRKTTLNNYNKKFTDALEIMAENYKFKDNLQACLEAKRAASVLKSLPFEVTSMKDIQGLPCITDDVRDVIEEIIEEGESSRVKEILNDERYKAFKQFTSVFGVGVKTSEKWYRMGLRTVEEAKASKSLKLSKMQKAGFLYYEDLASGVSKEEADAVTLIVKETVRTVSPDALVTIAGGFRRGKPMGHDVDLLITIPGRPEDDELLHKVVDLLKKQGLLLYEDIRESTFVEGQLPNPKPDALDNHQKCFAILKLYRPKVDNSAVGTSKKSDMAEVKDWKAVRVDLVIAPFEQFAYALLGWTGSGQFRRDTRRYAEEERDMLLDNHRLYDLKKGIFLSADSEEEIFGHLDLDYLEPWERNA

SEQ ID NO: 4959 - DNA, 1182 bp, synthetic construct
  misc_feature 1..1182: note = Variant of terminal deoxynucleotidyl transferase
  source 1..1182: mol_type = other DNA
atgcatcaccaccatcatcatgggggttctggtcatccggaaggtaataccccggagaaggaggtgccgagcgttatcgcccgtcatgttagtcagtacgcgtgccagcgcaagaccacgctgaataactacaacaaaaagttcaccgaagcgctggagatcatggccgagaactacaaatttaaagagaacctgcaggcgtgcctggaagccaagcgcgccgcgagtgtcctgaaaagcctgccgttcgaggttaccagcatgaaagacatccaaggtctgccgtgcattaccgacgacgtacgtgacgtgatcgaagagatcatcgaagagggcgagagcagccgtgttaaagaaatcctcaatgacgagcgctacaaggcctttaagcagttcaccagcgtgttcggtgtgggcgtgaaaacctcggaaaagtggtaccgtatgggcctccgtacggttgaagaagcaaaggccagtaagagtctgaagctgagcaagatgcagaaggcgggcttcctgtattacgaggatctggcgagcggtgttagtaaagaagaagccgatgccgttacgctcatcgtgaaggaaacggtgcgcactgttagtccggatgcgctggtgaccatcgccggcggtttccgccgtggcaaacctatgggccacgacgttgacctgctgatcacgattccgggccgtcctgaagatgacgagctgctccacaaagtggttgatctgctcaagaagcaaggtctgctgctgtacgaagacatccgtgagagcacgttcgtggaggggcaactgccaaatcctaaacctgacgccctggacaaccatcagaagtgcttcgccattctcaagctgtaccgtccgaaggtggataacagtgcggttgggacgagtaagaaaagtgacatggctgaggttaaggattggaaagcggttcgtgtggatctggtgattgcgccattcgagcagttcgcctatgcgctgctcggttggacgggcagcggccaatttcgtcgcgatactcgtcgctatgcggaggaagagcgcgacatgctgctcgacaaccatcgtctctacgacctgaaaaagggcatctttctgagtgcggacagcgaagaagagattttcggtcatctggacctggattatctggagccgtgggaacgcaacgcg

SEQ ID NO: 4960 - protein, 394 aa, synthetic construct
  REGION 1..394: note = Variant of terminal deoxynucleotidyl transferase
MHHHHHHGGSGHPEGNTPEKEVPSVIARHVSQYACQRKTTLNNYNKKFTEALEIMAENYKFKENLQACLEAKRAASVLKSLPFEVTSMKDIQGLPCITDDVRDVIEEIIEEGESSRVKEILNDERYKAFKQFTSVFGVGVKTSEKWYRMGLRTVEEAKASKSLKLSKMQKAGFLYYEDLASGVSKEEADAVTLIVKETVRTVSPDALVTIAGGFRRGKPMGHDVDLLITIPGRPEDDELLHKVVDLLKKQGLLLYEDIRESTFVEGQLPNPKPDALDNHQKCFAILKLYRPKVDNSAVGTSKKSDMAEVKDWKAVRVDLVIAPFEQFAYALLGWTGSGQFRRDTRRYAEEERDMLLDNHRLYDLKKGIFLSADSEEEIFGHLDLDYLEPWERNA

SEQ ID NO: 4961 - DNA, 1182 bp, synthetic construct
  misc_feature 1..1182: note = Variant of terminal deoxynucleotidyl transferase
  source 1..1182: mol_type = other DNA
atgcatcaccaccatcatcatgggggttctggtcatccggaaggtaataccccggagaaggaggtgccgagcgttatcgcccgtcatgttagtcagtacgcgtgccagcgcaagaccacgctgaataactacaacaaaaagttcaccgacgcgctggagatcatggccgagaactacaaatttaaagagaacctgcaggcgtgccatgaagccaagcgcgccgcgagtgtcctgaaaagcctgccgttcgaggttaccagcatgaaagacatccaaggtctgccgtgcattaccgacgacgtacgtgacgtgatcgaagagatcatcgaagagggcgagagcagccgtgttaaagaaatcctcaatgacgagcgctacaaggcctttaagcagttcaccagcgtgttcggtgtgggcgtgaaaacctcggaaaagtggtaccgtatgggcctccgtacggttgaagaagcaaaggccagtaagagtctgaagctgagcaagatgcagaaggcgggcttcctgtattacgaggatctggcgagcggtgttagtaaagaagaagccgatgccgttacgctcatcgtgaaggaaacggtgcgcactgttagtccggatgcgctggtgaccatcgccggcggtttccgccgtggcaaacctatgggccacgacgttgacctgctgatcacgattccgggccgtcctgaagatgacgagctgctccacaaagtggttgatctgctcaagaagcaaggtctgctgctgtacgaagacatccgtgagagcacgttcgtggaggggcaactgccaaatcctaaacctgacgccctggacaaccatcagaagtgcttcgccattctcaagctgtaccgtccgaaggtggataacagtgcggttgggacgagtaagaaaagtgacatggctgaggttaaggattggaaagcggttcgtgtggatctggtgattgcgccattcgagcagttcgcctatgcgctgctcggttggacgggcagcggccaatttcgtcgcgatactcgtcgctatgcggaggaagagcgcgacatgctgctcgacaaccatcgtctctacgacctgaaaaagggcatctttctgagtgcggacagcgaagaagagattttcggtcatctggacctggattatctggagccgtgggaacgcaacgcg

SEQ ID NO: 4962 - protein, 394 aa, synthetic construct
  REGION 1..394: note = Variant of terminal deoxynucleotidyl transferase
MHHHHHHGGSGHPEGNTPEKEVPSVIARHVSQYACQRKTTLNNYNKKFTDALEIMAENYKFKENLQACHEAKRAASVLKSLPFEVTSMKDIQGLPCITDDVRDVIEEIIEEGESSRVKEILNDERYKAFKQFTSVFGVGVKTSEKWYRMGLRTVEEAKASKSLKLSKMQKAGFLYYEDLASGVSKEEADAVTLIVKETVRTVSPDALVTIAGGFRRGKPMGHDVDLLITIPGRPEDDELLHKVVDLLKKQGLLLYEDIRESTFVEGQLPNPKPDALDNHQKCFAILKLYRPKVDNSAVGTSKKSDMAEVKDWKAVRVDLVIAPFEQFAYALLGWTGSGQFRRDTRRYAEEERDMLLDNHRLYDLKKGIFLSADSEEEIFGHLDLDYLEPWERNA

SEQ ID NO: 4963 - DNA, 1182 bp, synthetic construct
  misc_feature 1..1182: note = Variant of terminal deoxynucleotidyl transferase
  source 1..1182: mol_type = other DNA
atgcatcaccaccatcatcatgggggttctggtcatccggaaggtaataccccggagaaggaggtgccgagcgttatcgcccgtcatgttagtcagtacgcgtgccagcgcaagaccacgctgaataactacaacaaaaagttcaccgacgcgctggagatcatggccgagaactacaaatttaaagagaacctgcaggcgtgcctggaagccaagcgcgccgcgagtgtcctgaaaagcctgccgttcgaggttaccagcatgaaagacatccaaggtctgccgtgcattaccgacgacgtacgtgacgtgatcgaagagatcatcgaagagggcgagagcagccgtgttaaagaaatcctcaatgacgagcgctacaaggcctttaagcagttcaccagcgtgttcggtgtgggcgtgaaaacctcggaaaagtggtaccgtatgggcctccgtacggttgaagaagcaaaggccagtaagagtctgaagctgagcaagatgcagaaggcgggcttcctgtattacgaggatctggcgagcggtgttagtaaagaagaagccgatgccgttacgctcatcgtgaaggaaacggtgcgcactgttagtccggatgcgctggtgaccatcgccggcggtttccgccgtggcaaacctatgggccacgacgttgacctgctgatcacgattccgggccgtcctgaagatgacgagctgctccacaaagtggttgatctgctcaagaagcaaggtctgctgctgtacgaagacatccgtgagagcacgttcgtggaggggcaactgccaaatcctaaaggggacgccctggacaaccatcagaagtgcttcgccattctcaagctgtaccgtccgaaggtggataacagtgcggttgggacgagtaagaaaagtgacatggctgaggttaaggattggaaagcggttcgtgtggatctggtgattgcgccattcgagcagttcgcctatgcgctgctcggttggacgggcagcggccaatttcgtcgcgatactcgtcgctatgcggaggaagagcgcgacatgctgctcgacaaccatcgtctctacgacctgaaaaagggcatctttctgagtgcggacagcgaagaagagattttcggtcatctggacctggattatctggagccgtgggaacgcaacgcg

SEQ ID NO: 4964 - protein, 394 aa, synthetic construct
  REGION 1..394: note = Variant of terminal deoxynucleotidyl transferase
MHHHHHHGGSGHPEGNTPEKEVPSVIARHVSQYACQRKTTLNNYNKKFTDALEIMAENYKFKENLQACLEAKRAASVLKSLPFEVTSMKDIQGLPCITDDVRDVIEEIIEEGESSRVKEILNDERYKAFKQFTSVFGVGVKTSEKWYRMGLRTVEEAKASKSLKLSKMQKAGFLYYEDLASGVSKEEADAVTLIVKETVRTVSPDALVTIAGGFRRGKPMGHDVDLLITIPGRPEDDELLHKVVDLLKKQGLLLYEDIRESTFVEGQLPNPKGDALDNHQKCFAILKLYRPKVDNSAVGTSKKSDMAEVKDWKAVRVDLVIAPFEQFAYALLGWTGSGQFRRDTRRYAEEERDMLLDNHRLYDLKKGIFLSADSEEEIFGHLDLDYLEPWERNA

SEQ ID NO: 4965 - DNA, 1182 bp, synthetic construct
  misc_feature 1..1182: note = Variant of terminal deoxynucleotidyl transferase
  source 1..1182: mol_type = other DNA
atgcatcaccaccatcatcatgggggttctggtcatccggaaggtaataccccggagaaggaggtgccgagcgttatcgcccgtcatgttagtcagtacgcgtgccagcgcaagaccacgctgaataactacaacaaaaagttcaccgacgcgctggagatcatggccgagaactacaaatttaaagagaacctgcaggcgtgcctggaagccaagcgcgccgcgagtgtcctgaaaagcctgccgttcgaggttaccagcatgaaagacatccaaggtctgccgtgcattaccgacgacgtacgtgacgtgatcgaagagatcatcgaagagggcgagagcagccgtgttaaagaaatcctcaatgacgagcgctacaaggcctttaagcagttcaccagcgtgttcggtgtgggcgtgaaaacctcggaaaagtggtaccgtatgggcctccgtacggttgaagaagcaaaggccagtaagagtctgaagctgagcaagatgcagaaggcgggcttcctgtattacgaggatctggcgagcggtgttagtaaagaagaagccgatgccgttacgctcatcgtgaaggaaacggtgcgcactgttagtccggatgcgctggtgaccactgccggcggtttccgccgtggcaaacctatgggccacgacgttgacctgctgatcacgattccgggccgtcctgaagatgacgagctgctccacaaagtggttgatctgctcaagaagcaaggtctgctgctgtacgaagacatccgtgagagcacgttcgtggaggggcaactgccaaatcctaaacctgacgccctggacaaccatcagaagtgcttcgccattctcaagctgtaccgtccgaaggtggataacagtgcggttgggacgagtaagaaaagtgacatggctgaggttaaggattggaaagcggttcgtgtggatctggtgattgcgccattcgagcagttcgcctatgcgctgctcggttggacgggcagcggccaatttcgtcgcgatactcgtcgctatgcggaggaagagcgcgacatgctgctcgacaaccatcgtctctacgacctgaaaaagggcatctttctgagtgcggacagcgaagaagagattttcggtcatctggacctggattatctggagccgtgggaacgcaacgcg

SEQ ID NO: 4966 - protein, 394 aa, synthetic construct
  REGION 1..394: note = Variant of terminal deoxynucleotidyl transferase
MHHHHHHGGSGHPEGNTPEKEVPSVIARHVSQYACQRKTTLNNYNKKFTDALEIMAENYKFKENLQACLEAKRAASVLKSLPFEVTSMKDIQGLPCITDDVRDVIEEIIEEGESSRVKEILNDERYKAFKQFTSVFGVGVKTSEKWYRMGLRTVEEAKASKSLKLSKMQKAGFLYYEDLASGVSKEEADAVTLIVKETVRTVSPDALVTTAGGFRRGKPMGHDVDLLITIPGRPEDDELLHKVVDLLKKQGLLLYEDIRESTFVEGQLPNPKPDALDNHQKCFAILKLYRPKVDNSAVGTSKKSDMAEVKDWKAVRVDLVIAPFEQFAYALLGWTGSGQFRRDTRRYAEEERDMLLDNHRLYDLKKGIFLSADSEEEIFGHLDLDYLEPWERNA

SEQ ID NO: 4967 - DNA, 1182 bp, synthetic construct
  misc_feature 1..1182: note = Variant of terminal deoxynucleotidyl transferase
  source 1..1182: mol_type = other DNA
atgcatcaccaccatcatcatgggggttctggtcatccggaaggtaataccccggagaaggaggtgccgagcgttatcgcccgtcatgttagtcagtacgcgtgccagcgcaagaccacgctgaataactacaacaaaaagttcaccgacgcgctggagatcatggccgagaactacaaatttaaagagaacctgcaggcgtgcctggaagccaagcgcgccgcgagtgtcctgaaaagcctgccgttcgaggttaccagcatgaaagacatccaaggtctgccgtgcattaccgacgacgtacgtgacgtgatcgaagagatcatcgaagagggcgagagcagccgtgttaaagaaatcctcaatgacgagcgctacaaggcctttaagcagttcaccagcgtgttcggtgtgggcgtgaaaacctcggaaaagtggtaccgtatgggcctccgtacggttgaagaagcaaaggccagtaagagtctgaagctgagcaagatgcagaaggcgggcttcctgtattacgaggatctggcgagcggtgttagtaaagaagaagccgatgccgttacgctcatcgtgaaggaaacggtgcgcactgttagtccggatgcgctggtgaccatcgccggcggtttccgccgtggcaaacctatgggccacgacgttgacctgctgatcacgattccgggccgtcctgaagatgacgagctgctccacaaagtggttgatctgctcaagaagcaaggtctgctgctgtacgaagacatccgtgagagcacgttcgtgaaggggcaactgccaaatcctaaacctgacgccctggacaaccatcagaagtgcttcgccattctcaagctgtaccgtccgaaggtggataacagtgcggttgggacgagtaagaaaagtgacatggctgaggttaaggattggaaagcggttcgtgtggatctggtgattgcgccattcgagcagttcgcctatgcgctgctcggttggacgggcagcggccaatttcgtcgcgatactcgtatgtatgcggaggaagagcgcgacatgctgctcgacaaccatcgtctctacgacctgaaaaagggcatctttctgagtgcggacagcgaagaagagattttcggtcatctggacctggattatctggagccgtgggaacgcaacgcg

SEQ ID NO: 4968 - protein, 394 aa, synthetic construct
  REGION 1..394: note = Variant of terminal deoxynucleotidyl transferase
MHHHHHHGGSGHPEGNTPEKEVPSVIARHVSQYACQRKTTLNNYNKKFTDALEIMAENYKFKENLQACLEAKRAASVLKSLPFEVTSMKDIQGLPCITDDVRDVIEEIIEEGESSRVKEILNDERYKAFKQFTSVFGVGVKTSEKWYRMGLRTVEEAKASKSLKLSKMQKAGFLYYEDLASGVSKEEADAVTLIVKETVRTVSPDALVTIAGGFRRGKPMGHDVDLLITIPGRPEDDELLHKVVDLLKKQGLLLYEDIRESTFVKGQLPNPKPDALDNHQKCFAILKLYRPKVDNSAVGTSKKSDMAEVKDWKAVRVDLVIAPFEQFAYALLGWTGSGQFRRDTRMYAEEERDMLLDNHRLYDLKKGIFLSADSEEEIFGHLDLDYLEPWERNA

SEQ ID NO: 4969 - DNA, 1182 bp, synthetic construct
  misc_feature 1..1182: note = Variant of terminal deoxynucleotidyl transferase
  source 1..1182: mol_type = other DNA
atgcatcaccaccatcatcatgggggttctggtcatccggaaggtaataccccggagaaggaggtgccgagcgttatcgcccgtcatgttagtcagtacgcgtgccagcgcaagaccacgctgaataactacaacaaaaagttcaccgacgcgctggagatcatggccgagaactacaaatttaaagagaacctgcaggcgtgcctggaagccaagcgcgccgcgagtgtcctgaaaagcctgccgttcgaggttaccagcatgaaagacatccaaggtctgccgtgcattaccgacgacgtacgtgacgtgatcgaagagatcatcgaagagggcgagagcagccgtgttaaagaaatcctcaatgacgagcgctacaaggcctttaagcagttcaccagcgtgttcggtgtgggcgtgaaaacctcggaaaagtggtaccgtatgggcctccgtacggttgaagaagcaaaggccagtaagagtctgaagctgagcaagatgcagaaggcgggcttcctgtattacgaggatctggcgagcggtgttagtaaagaagaagccgatgccgttacgctcatcgtgaaggaaacggtgcgcactgttagtccggatgcgctggtgaccatcgccggcggtttccgccgtggcaaacctatgggccacgacgttgacctgctgatcacgattccgggccgtcctgaagatgacgagctgctccacaaagtggttgatctgctcaagaagcaaggtctgctgctgtacgaagacatccgtgagagcacgttcgtggaggggcaactgccaaatcctaaacctgacgccctggacaaccatcagaagtgcttcgccattctcaagctgtaccgtccgaaggtggataacagtgcggttgggacgagtaagaaaagtgacatggctgaggttaaggattggaaagcggttcgtgtggatctggtgattgcgccattcgagcagttcgcctatgcgctgctcggttggacgggcagcggccaatttcgtcgcgatactcgtcgctatgcggaggaagagcgcgacatgctgctcgacaaccatcgtctctacgacctgaaaaagggcatctttctgagtgcggacagcgaagaagagattttcggtcatctggacctggattttctggagccgtgggaacgcaacgcg

SEQ ID NO: 4970 - protein, 394 aa, synthetic construct
  REGION 1..394: note = Variant of terminal deoxynucleotidyl transferase
MHHHHHHGGSGHPEGNTPEKEVPSVIARHVSQYACQRKTTLNNYNKKFTDALEIMAENYKFKENLQACLEAKRAASVLKSLPFEVTSMKDIQGLPCITDDVRDVIEEIIEEGESSRVKEILNDERYKAFKQFTSVFGVGVKTSEKWYRMGLRTVEEAKASKSLKLSKMQKAGFLYYEDLASGVSKEEADAVTLIVKETVRTVSPDALVTIAGGFRRGKPMGHDVDLLITIPGRPEDDELLHKVVDLLKKQGLLLYEDIRESTFVEGQLPNPKPDALDNHQKCFAILKLYRPKVDNSAVGTSKKSDMAEVKDWKAVRVDLVIAPFEQFAYALLGWTGSGQFRRDTRRYAEEERDMLLDNHRLYDLKKGIFLSADSEEEIFGHLDLDFLEPWERNA

SEQ ID NO: 4971 - DNA, 1182 bp, synthetic construct
  misc_feature 1..1182: note = Variant of terminal deoxynucleotidyl transferase
  source 1..1182: mol_type = other DNA
atgcatcaccaccatcatcatgggggttctggtcatccggaaggtaataccccggagaaggaggtgccgagcgttatcgcccgtcatgttagtcagtacgcgtgccagcgcaagaccacgctgaataactacaacaaaaagttcaccgacgcgctggagatcatggccgagaactacaaatttaaagagaacctgcaggcgtgcctggaagccaagcgcgccgcgagtgtcctgaaaagcctgccgttcgaggttaccagcatgaaagacatccaaggtctgccgtgcattaccgacgacgtacgtgacgtgatcgaagagatcatcgaagagggcgagagcagccgtgttaaagaaatcctcaataacgagcgctacaaggcctttaagcagttcaccagcgtgttcggtgtgggcgtgaaaacctcggaaaagtggtaccgtatgggcctccgtacggttgaagaagcaaaggccagtaagagtctgaagctgagcaagatgcagaaggcgggcttcctgtattacgaggatctggcgagcggtgttagtaaagaagaagccgatgccgttacgctcatcgtgaaggaaacggtgcgcactgttagtccggatgcgctggtgaccatcgccggcggtttccgccgtggcaaacctatgggccacgacgttgacctgctgatcacgattccgggtcgtcctgaagatgacgagctgctccacaaagtggttgatctgctcaagaagcaaggtctgctgctgtacgaagacatccgtgagagcacgttcgtggaggggcaactgccaaatcctaaacctgacgccctggacaaccatcagaagtgcttcgccattctcaagctgtaccgtccgaaggtggataacagtgcggttgggacgagtaagaaaagtgacatggctgaggttaaggattggaaagcggttcgtgtggatctggtgattgcgccattcgagcagttcgcctatgcgctgctcggttggacgggcagcggccaatttcgtcgcgatactcgtcgctatgcggaggaagagcgcgacatgctgctcgacaaccatcgtctctacgacctgaaaaagggcatctttctgagtgcggacagcgaagaagagattttcggtcatctggacctggattatctggagccgtgggaacgcaacgcg

SEQ ID NO: 4972 - protein, 394 aa, synthetic construct
  REGION 1..394: note = Variant of terminal deoxynucleotidyl transferase
MHHHHHHGGSGHPEGNTPEKEVPSVIARHVSQYACQRKTTLNNYNKKFTDALEIMAENYKFKENLQACLEAKRAASVLKSLPFEVTSMKDIQGLPCITDDVRDVIEEIIEEGESSRVKEILNNERYKAFKQFTSVFGVGVKTSEKWYRMGLRTVEEAKASKSLKLSKMQKAGFLYYEDLASGVSKEEADAVTLIVKETVRTVSPDALVTIAGGFRRGKPMGHDVDLLITIPGRPEDDELLHKVVDLLKKQGLLLYEDIRESTFVEGQLPNPKPDALDNHQKCFAILKLYRPKVDNSAVGTSKKSDMAEVKDWKAVRVDLVIAPFEQFAYALLGWTGSGQFRRDTRRYAEEERDMLLDNHRLYDLKKGIFLSADSEEEIFGHLDLDYLEPWERNA

SEQ ID NO: 4973 - DNA, 1182 bp, synthetic construct
  misc_feature 1..1182: note = Variant of terminal deoxynucleotidyl transferase
  source 1..1182: mol_type = other DNA
atgcatcaccaccatcatcatgggggttctggtcatccggaaggtaataccccggagaaggaggtgccgagcgttatcgcccgtcatgttagtcagtacgcgtgccagcgcaagaccacgctgaataactacaacaaaaagttcaccgacgcgctggagatcatggccgagaactacaaatttaaagagaacctgcaggcgtgcctggaagccaagcgcgccgcgagtgtcctgaaaagcctgccgttcgaggttaccagcatgaaagacatccaaggtgttccgtgcattaccgacgacgtacgtgacgtgatcgaagagatcatcgaagagggcgagagcagccgtgttaaagaaatcctcaatgacgagcgctacaaggcctttaagcagttcaccagcgtgttcggtgtgggcgtgaaaacctcggaaaagtggtaccgtatgggcctccgtacggttgaagaagcaaaggccagtaagagtctgaagctgagcaagatgcagaaggcgggcttcctgtattacgaggatctggcgagcggtgttagtaaagaagaagccgatgccgttacgctcatcgtgaaggaaacggtgcgcactgttagtccggatgcgctggtgaccatcgccggcggtttccgccgtggcaaacctatgggccacgacgttgacctgctgatcacgattccgggccgtcctgaagatgacgagctgctccacaaagtggttgatctgctcaagaagcaaggtctgctgctgtacgaagacatccgtgagagcacgttcgtggaggggcaactgccaaatcctaaacctgacgccctggacaaccatcagaagtgcttcgccattctcaagctgtaccgtccgaaggtggataacagtgcggttgggacgagtaagaaaagtgacatggctgaggttaaggattggaaagcggttcgtgtggatctggtgattgcgccattcgagcagttcgcctatgcgctgctcggttggacgggcagcggccaatttcgtcgcgatactcgtcgctatgcggaggaagagcgcgacatgctgctcgacaaccatcgtctctacgacctgaaaaagggcatctttctgagtgcggacagcgaagaagagattttcggtcatctggacctggattatctggagccgtgggaacgcaacgcg

SEQ ID NO: 4974 - protein, 394 aa, synthetic construct
  REGION 1..394: note = Variant of terminal deoxynucleotidyl transferase
MHHHHHHGGSGHPEGNTPEKEVPSVIARHVSQYACQRKTTLNNYNKKFTDALEIMAENYKFKENLQACLEAKRAASVLKSLPFEVTSMKDIQGVPCITDDVRDVIEEIIEEGESSRVKEILNDERYKAFKQFTSVFGVGVKTSEKWYRMGLRTVEEAKASKSLKLSKMQKAGFLYYEDLASGVSKEEADAVTLIVKETVRTVSPDALVTIAGGFRRGKPMGHDVDLLITIPGRPEDDELLHKVVDLLKKQGLLLYEDIRESTFVEGQLPNPKPDALDNHQKCFAILKLYRPKVDNSAVGTSKKSDMAEVKDWKAVRVDLVIAPFEQFAYALLGWTGSGQFRRDTRRYAEEERDMLLDNHRLYDLKKGIFLSADSEEEIFGHLDLDYLEPWERNA

SEQ ID NO: 4975 - DNA, 1182 bp, synthetic construct
  misc_feature 1..1182: note = Variant of terminal deoxynucleotidyl transferase
  source 1..1182: mol_type = other DNA
atgcatcaccaccatcatcatgggggttctggtcatccggaaggtaataccccggagaaggaggtgccgagcgttatcgcccgtcatgttagtcagtacgcgtgccagcgcaagaccacgctgaataactacaacaaaaagttcaccgacgcgctggagatcatggccgagaactacaaatttaaagagaacctgcaggcgtgcctggaagccaagcgcgccgcgagtgtcctgaaaagcctgccgttcgaggttaccagcatgaaagacatccaaggtctgccgtgcattaccgacgacgtacgtgacgtgatcgaagagatcatcgaagagggcgagagcagccgtgttaaagaaatcctcaatgacgagcgctacaaggcctttaagcagttcaccagcgtgttcggtgtgggcgtgaaaacctcggaaaagtggtaccgtatgggcctccgtacggttgaagaagcaaaggccagtaagagtctgaagctgagcaagatgcagaaggcgggcttcctgtattacgaggatctggcgagcggtgttagtaaagaagatgccgatgccgttacgctcatcgtgaaggaaacggtgcgcactgttagtccggatgcgctggtgaccatcgccggcggtttccgccgtggcaaacctatgggccacgacgttgacctgctgatcacgattccgggccgtcctgaagatgacgagctgctccacaaagtggttgatctgctcaagaagcaaggtctgctgctgtacgaagacatccgtgagagcacgttcgtggaggggcaactgccaaatcctaaacctgacgccctggacaaccatcagaagtgcttcgccattctcaagctgtaccgtccgaaggtggataacagtgcggttgggacgagtaagaaaagtgacatggctgaggttaaggattggaaagcggttcgtgtggatctggtgattgcgccattcgagcagttcgcctatgcgctgctcggttggacgggcagcggccaatttcgtcgcgatactcgtcgctatgcggaggaagagcgcgacatgctgctcgacaaccatcgtctctacgacctgaaaaagggcatctttctgagtgcggacagcgaagaagagattttcggtcatctggacctggattatctggagccgtgggaacgcaacgcg

SEQ ID NO: 4976 - protein, 394 aa, synthetic construct
  REGION 1..394: note = Variant of terminal deoxynucleotidyl transferase
MHHHHHHGGSGHPEGNTPEKEVPSVIARHVSQYACQRKTTLNNYNKKFTDALEIMAENYKFKENLQACLEAKRAASVLKSLPFEVTSMKDIQGLPCITDDVRDVIEEIIEEGESSRVKEILNDERYKAFKQFTSVFGVGVKTSEKWYRMGLRTVEEAKASKSLKLSKMQKAGFLYYEDLASGVSKEDADAVTLIVKETVRTVSPDALVTIAGGFRRGKPMGHDVDLLITIPGRPEDDELLHKVVDLLKKQGLLLYEDIRESTFVEGQLPNPKPDALDNHQKCFAILKLYRPKVDNSAVGTSKKSDMAEVKDWKAVRVDLVIAPFEQFAYALLGWTGSGQFRRDTRRYAEEERDMLLDNHRLYDLKKGIFLSADSEEEIFGHLDLDYLEPWERNA

SEQ ID NO: 4977 - DNA, 1182 bp, synthetic construct
  misc_feature 1..1182: note = Variant of terminal deoxynucleotidyl transferase
  source 1..1182: mol_type = other DNA
atgcatcaccaccatcatcatgggggttctggtcatccggaaggtaataccccggagaaggaggtgccgagcgttatcgcccgtcatgttagtcagtacgcgtgccagcgcaagaccacgctgaataactacaacaaaaagttcaccgacgcgctggagatcatggccgagaactacaaatttaaagagaacctgcaggcgtgcctggaagccaagcgcgccgcgagtgtcctgaaaagcctgccgttcgaggttaccagcatgaaagacatccaaggtctgccgtgcattaccgacgacgtacgtgacgtgatcgaagagatcatcgaagagggcgagagcagccgtgttaaagaaatcctcaatgacgagcgctacaaggcctttaagcagttcaccagcgtgttcggtgtgggcgtgaaaacctcggaaaagtggtaccgtatgggcctccgtacggttgaagaagcaaaggccagtaagagtctgaagctgagcaagatgcagaaggcgggcttcctgtattacgaggatctggcgagcggtgttagtaaagaagaagccgatgccgttacgctcatcgtgaaggaaacggtgcgcactgttagtccggatgcgctggtgaccatcgccggcggtttccgccgtggcaaacctatgggccacgacgttgacctgctgatcacgattccgggccgtcctgaagatgacgagctgctccacaaagtggttgatctgctcaagaagcaaggtctgattctgtacgaagacatccgtgagagcacgttcgtggaggggcaactgccaaatcctaaacctgacgccctggacaaccatcagaagtgcttcgccattctcaagctgtaccgtccgaaggtggataacagtgcggttgggacgagtaagaaaagtgacatggctgaggttaaggattggaaagcggttcgtgtggatctggtgattgcgccattcgagcagttcgcctatgcgctgctcggttggacgggcagcggccaatttcgtcgcgatactcgtcgctatgcggaggaagagcgcgacatgctgctcgacaaccatcgtctctacgacctgaaaaagggcatctttctgagtgcggacagcgaagaagagattttcggtcatctggacctggattatctggagccgtgggaacgcaacgcg

SEQ ID NO: 4978 - protein, 394 aa, synthetic construct
  REGION 1..394: note = Variant of terminal deoxynucleotidyl transferase
MHHHHHHGGSGHPEGNTPEKEVPSVIARHVSQYACQRKTTLNNYNKKFTDALEIMAENYKFKENLQACLEAKRAASVLKSLPFEVTSMKDIQGLPCITDDVRDVIEEIIEEGESSRVKEILNDERYKAFKQFTSVFGVGVKTSEKWYRMGLRTVEEAKASKSLKLSKMQKAGFLYYEDLASGVSKEEADAVTLIVKETVRTVSPDALVTIAGGFRRGKPMGHDVDLLITIPGRPEDDELLHKVVDLLKKQGLILYEDIRESTFVEGQLPNPKPDALDNHQKCFAILKLYRPKVDNSAVGTSKKSDMAEVKDWKAVRVDLVIAPFEQFAYALLGWTGSGQFRRDTRRYAEEERDMLLDNHRLYDLKKGIFLSADSEEEIFGHLDLDYLEPWERNA

SEQ ID NO: 4979 - DNA, 1182 bp, synthetic construct
  misc_feature 1..1182: note = Variant of terminal deoxynucleotidyl transferase
  source 1..1182: mol_type = other DNA
atgcatcaccaccatcatcatgggggttctggtcatccggaaggtaataccccggagaaggaggtgccgagcgttatcgcccgtcatgttagtcagtacgcgtgccagcgcaagaccacgctgaataactacaacaaaaagttcaccgacgcgctggagatcatggccgagaactacaaatttaaagagaacctgcaggcgtgcctggaagccaagcgcgccgcgagtgtcctgaaaagcctgccgttcgaggttaccagcatgaaagacatccaaggtctgccgtgcattaccgacgacgtacgtgacgtgatcgaagagatcatcgaagagggcgagagcagccgtgttaaagaaatcctcaatgacgagcgctacaaggcctttaagcagttcaccagcgtgttcggtgtgggcgtgaaaacctcggaaaagtggtaccgtatgggcctccgtacggttgaagaagcaaaggccagtaagagtctgaagctgagcaagatgcagaaggcgggcttcctgtattacgaggatctggcgagcggtgttagtaaagaagaagccgatgccgttacgctcatcgtgaaggaaacggtgcgcactgttagtccggatgcgctggtgaccatcgccggcggtttccgccgtggcaaacctatgggccacgacgttgacctgctgatcacgattccgggccgtcctgaagatgacgagctgctccacaaagtggttgatctgctcaagaagcaaggtctgctgctgtacgaagacatccgtgagagcacgttcgtggaggggcaactgccaaatcctaaacctgacgccctggacaaccatcagaagtgcttctcgattctcaagctgtaccgtccgaaggtggataacagtgcggttgggacgagtaagaaaagtgacatggctgaggttaaggattggaaagcggttcgtgtggatctggtgattgcgccattcgagcagttcgcctatgcgctgctcggttggacgggcagcggccaatttcgtcgcgatactcgtcgctatgcggaggaagagcgcgacatgctgctcgacaaccatcgtctctacgacctgaaaaagggcatctttctgagtgcggacagcgaagaagagattttcggtcatctggacctggattatctggagccgtgggaacgcaacgcg

SEQ ID NO: 4980 - protein, 394 aa, synthetic construct
  REGION 1..394: note = Variant of terminal deoxynucleotidyl transferase
MHHHHHHGGSGHPEGNTPEKEVPSVIARHVSQYACQRKTTLNNYNKKFTDALEIMAENYKFKENLQACLEAKRAASVLKSLPFEVTSMKDIQGLPCITDDVRDVIEEIIEEGESSRVKEILNDERYKAFKQFTSVFGVGVKTSEKWYRMGLRTVEEAKASKSLKLSKMQKAGFLYYEDLASGVSKEEADAVTLIVKETVRTVSPDALVTIAGGFRRGKPMGHDVDLLITIPGRPEDDELLHKVVDLLKKQGLLLYEDIRESTFVEGQLPNPKPDALDNHQKCFSILKLYRPKVDNSAVGTSKKSDMAEVKDWKAVRVDLVIAPFEQFAYALLGWTGSGQFRRDTRRYAEEERDMLLDNHRLYDLKKGIFLSADSEEEIFGHLDLDYLEPWERNA

SEQ ID NO: 4981 - DNA, 1182 bp, synthetic construct
  misc_feature 1..1182: note = Variant of terminal deoxynucleotidyl transferase
  source 1..1182: mol_type = other DNA
atgcatcaccaccatcatcatgggggttctggtcatccggaaggtaataccccggagaaggaggtgccgagcgttatcgcccgtcatgttagtcagtacgcgtgccagcgcaagaccacgctgaataactacaacaaaaagttcaccgacgcgctggagatcatggccgagaactacaaatttaaagagaacctgcaggcgtgcctggaagccaagcgcgccgcgagtgtcctgaaaagcctgccgttcgaggttaccagcatgaaagacatccaaggtctgccgtgcattaccgacgacgtacgtgacgtgatcgaagagatcatcgaagagggcgagagcagccgtgttaaagaaatcctcaatgacgagcgctacaaggcctttaagcagttcaccagcgtgttcggtgtgggcgtgaaaacctcggaaaagtggtaccgtatgggcctccgtacggttgaagaagcaaaggccagtaagagtctgaagctgagcaagatgcagaaggcgggcttcctgtattacgaggatctggcgagcggtgttagtaaagaagaagccgatgccgttacgctcatcgtgaaggaaacggtgcgcactgttagtccggatgcgctggtgaccatcgccggcggtttccgccgtcgtaaacctatgggccacgacgttgacctgctgatcacgattccgggccgtcctgaagatgacgagctgctccacaaagtggttgatctgctcaagaagcaaggtctgctgctgtacgaagacatccgtgagagcacgttcgtggaggggcaactgccaaatcctaaacctgacgccctggacaaccatcagaagtgcttcgccattctcaagctgtaccgtccgaaggtggataacagtgcggttgggacgagtaagaaaagtgacatggctgaggttaaggattggaaagcggttcgtgtggatctggtgattgcgccattcgagcagttcgcctatgcgctgctcggttggacgggcagcggccaatttcgtcgcgatactcgtcgctatgcggaggaagagcgcgacatgctgctcgacaaccatcgtctctacgacctgaaaaagggcatctttctgagtgcggacagcgaagaagagattttcggtcatctggacctggattatctggagccgtgggaacgcaacgcg

SEQ ID NO: 4982 - protein, 394 aa, synthetic construct
  REGION 1..394: note = Variant of terminal deoxynucleotidyl transferase
MHHHHHHGGSGHPEGNTPEKEVPSVIARHVSQYACQRKTTLNNYNKKFTDALEIMAENYKFKENLQACLEAKRAASVLKSLPFEVTSMKDIQGLPCITDDVRDVIEEIIEEGESSRVKEILNDERYKAFKQFTSVFGVGVKTSEKWYRMGLRTVEEAKASKSLKLSKMQKAGFLYYEDLASGVSKEEADAVTLIVKETVRTVSPDALVTIAGGFRRRKPMGHDVDLLITIPGRPEDDELLHKVVDLLKKQGLLLYEDIRESTFVEGQLPNPKPDALDNHQKCFAILKLYRPKVDNSAVGTSKKSDMAEVKDWKAVRVDLVIAPFEQFAYALLGWTGSGQFRRDTRRYAEEERDMLLDNHRLYDLKKGIFLSADSEEEIFGHLDLDYLEPWERNA

SEQ ID NO: 4983 - DNA, 1182 bp, synthetic construct
  misc_feature 1..1182: note = Variant of terminal deoxynucleotidyl transferase
  source 1..1182: mol_type = other DNA
atgcatcaccaccatcatcatgggggttctggtcatccggaaggtaataccccggagaaggaggtgccgagcgttatcgcccgtcatgttagtcagtacgcgtgccagcgcaagaccacgctgaataactacaacaaaaagttcaccgacgcgctggagatcatggccgagaactacaaatttaaagagaacctgcaggcgtgcctggaagccaagcgcgccgcgagtgtcctgaaaagcctgccgttcgaggttaccagcatgaaagacatccaaggtctgccgtgcattaccgacgacgtacgtgacgtgatcgaagagatcatcgaagagggcgagagcagccgtgttaaagaaatcctcaatgacgagcgctacaaggcctttaagcagttcaccagcgtgttcggtgtgggcgtgaaaacctcggaaaagtggtaccgtatgggcctccgtacggttgaagaagcaaaggccagtaagagtctgaagctgagcaagatgcagaaggcgggcttcctgtattacgaggatctggcgagcggtgttagtaaagaagaagccgatgccgttacgctcatcgtgaaggaaacggtgcgcactgttagtccggatgcgctggtgaccatcgccggcggtttccgccgtggcaaacctatgggccacgacgttgacctgctgatcacgattccgggccgtcctgaagatgacgagctgctccacaaagtggttgatctgctcaagaagcaaggtctgctgctgtacgaagacatccgtgagagcacgttcgtggaggggcaactgccaaatcctaaacctgacgccctggacaaccatcagaagtgcttcgccattctcaagctgtaccgtccgaaggtggataacagtgcggttgggacgagtaagaaaagtgacatggctgaggttaaggattggaaagcggttcgtgtggatctggtgattgcgccattcgagcagttcgcctatgcgctgctcggttggacgggcagcggccaatttcgtcgcgatactcgtcgctatgcggaggaagagcgctgtatgctgctcgacaaccatcgtctctacgacctgaaaaagggcatctttctgagtgcggacagcgaagaagagattttcggtcatctggacctggattatctggagccgtgggaacgcaacgcg

SEQ ID NO: 4984 - protein, 394 aa, synthetic construct
  REGION 1..394: note = Variant of terminal deoxynucleotidyl transferase
MHHHHHHGGSGHPEGNTPEKEVPSVIARHVSQYACQRKTTLNNYNKKFTDALEIMAENYKFKENLQACLEAKRAASVLKSLPFEVTSMKDIQGLPCITDDVRDVIEEIIEEGESSRVKEILNDERYKAFKQFTSVFGVGVKTSEKWYRMGLRTVEEAKASKSLKLSKMQKAGFLYYEDLASGVSKEEADAVTLIVKETVRTVSPDALVTIAGGFRRGKPMGHDVDLLITIPGRPEDDELLHKVVDLLKKQGLLLYEDIRESTFVEGQLPNPKPDALDNHQKCFAILKLYRPKVDNSAVGTSKKSDMAEVKDWKAVRVDLVIAPFEQFAYALLGWTGSGQFRRDTRRYAEEERCMLLDNHRLYDLKKGIFLSADSEEEIFGHLDLDYLEPWERNA

SEQ ID NO: 4985 - DNA, 1182 bp, synthetic construct
  misc_feature 1..1182: note = Variant of terminal deoxynucleotidyl transferase
  source 1..1182: mol_type = other DNA
atgcatcaccaccatcatcatgggggttctggtcatccggaaggtaataccccggagaaggaggtgccgagcgttatcgcccgtcatgttagtcagtacgcgtgccagcgcaagaccacgctgaataactacaacaaaaagttcaccgacgcgctggagatcatggccgagaactacaaatttaaagagaacctgcaggcgtgcctggaagccaagcgcgccgcgagtgtcctgaaaagcctgccgttcgaggttaccagcatgaaagacatccaaggtctgccgtgcattaccgacgacgtacgtgacgtgatcgaagagatcatcgaagagggcgagagcagccgtgttaaagaaatcctcaatgacgagcgctacaaggcctttaagcagttcaccagcgtgttcggtgtgggcgtgaaaacctcggaaaagtggtaccgtatgggcctccgtacggttgaagaagcaaaggccagtaagagtctgaagctgagcaagatgcagaaggcgggcttcctgtattacgaggatctggcgagcggtgttagtaaagaagaagccgatgccgttacgctcatcgtgaaggaaacggtgcgcactgttagtccggatgcgctggtgaccatcgccggcggtttccgccgtggcaaacctatgggccacgacgttgacctgctgatcacgattccgggccgtcctgaagatgacgagctgctccacaaagtggttgatctgctcaagaagcaaggtctgctgctgtacgaagacatccgtgagagcacgttcgtggaggggcaactgccaaatcctaaacctgacgccctggacaaccatcagaagtgcttcgccattctcaagctgtaccgtccgaaggtggataacagtgcggttgggacgagtaagaaaagtgacatggctgaggttaaggattggaaagcggttcgtgtggatctggtgattgcgccattcgagcagttcgcctatgcgctgctcggttggacgggcagcggccaatttcgtcgcgatactcgtcgctatgcggaggaagagcgcgacatgctgctcgacaaccatcgtctctacgacctgaaaaagggcatctttctgactgcggacagcgaagaagagattttcggtcatctggacctggattatctggagccgtgggaacgcaacgcg

SEQ ID NO: 4986 - protein, 394 aa, synthetic construct
  REGION 1..394: note = Variant of terminal deoxynucleotidyl transferase
MHHHHHHGGSGHPEGNTPEKEVPSVIARHVSQYACQRKTTLNNYNKKFTDALEIMAENYKFKENLQACLEAKRAASVLKSLPFEVTSMKDIQGLPCITDDVRDVIEEIIEEGESSRVKEILNDERYKAFKQFTSVFGVGVKTSEKWYRMGLRTVEEAKASKSLKLSKMQKAGFLYYEDLASGVSKEEADAVTLIVKETVRTVSPDALVTIAGGFRRGKPMGHDVDLLITIPGRPEDDELLHKVVDLLKKQGLLLYEDIRESTFVEGQLPNPKPDALDNHQKCFAILKLYRPKVDNSAVGTSKKSDMAEVKDWKAVRVDLVIAPFEQFAYALLGWTGSGQFRRDTRRYAEEERDMLLDNHRLYDLKKGIFLTADSEEEIFGHLDLDYLEPWERNA

SEQ ID NO: 4987 - DNA, 1182 bp, synthetic construct
  misc_feature 1..1182: note = Variant of terminal deoxynucleotidyl transferase
  source 1..1182: mol_type = other DNA
atgcatcaccaccatcatcatgggggttctggtcatccggaaggtaataccccggagaaggaggtgccgagcgttatcgcccgtcatgttagtcagtacgcgtgccagcgcaagaccacgctgaataactacaacaaaaagttcaccgacgcgctggagatcatggccgagaactacaaatttaaagagaacctgcaggcgtgcctggaagccaagcgcgccgcgagtgtcctgaaaagcctgccgttcgaggttaccagcatgaaagacatccaaggtctgccgtgcattaccgacgacgtacgtgacgtgatcgaagagatcatcgaagagggcgagagcagccgtgttaaagaaatcctcaatgacgagcgctacaaggcctttaagcagttcaccagcgtgttcggtgtgggcgtgaaaacctcggaaaagtggtaccgtatgggcctccgtacggttgaagaagcaaaggccagtaagagtctgaagctgagcaagatgcagaaggcgggcttcctgtattacgaggatctggcgagcggtgttagtaaagaagaagccgatgccgttacgctcatcgtgaaggaaacggtgcgcactgttagtccggatgcgctggtgaccatcgccggcggtttccgccgtggcaaacctatgggccacgacgttgacctgctgatcacgattccgggccgtcctgaagatgacgagctgctccacaaagtggttgatctgctcaagaagcaaggtctgctgctgtacgaagacatccgtgagagcacgttcgtggaggggaagctgccaaatcctaaacctgacgccctggacaaccatcagaagtgcttcgccattctcaagctgtaccgtccgaaggtggataacagtgcggttgggacgagtaagaaaagtgacatggctgaggttaaggattggaaagcggttcgtgtggatctggtgattgcgccattcgagcagttcgcctatgcgctgctcggttggacgggcagcggccaatttcgtcgcgatactcgtcgctatgcggaggaagagcgcgacatgctgctcgacaaccatcgtctctacgacctgaaaaagggcatctttctgagtgcggacagcgaagaagagattttcggtcatctggacctggattatctggagccgtgggaacgcaacgcg

SEQ ID NO: 4988 - protein, 394 aa, synthetic construct
  REGION 1..394: note = Variant of terminal deoxynucleotidyl transferase
MHHHHHHGGSGHPEGNTPEKEVPSVIARHVSQYACQRKTTLNNYNKKFTDALEIMAENYKFKENLQACLEAKRAASVLKSLPFEVTSMKDIQGLPCITDDVRDVIEEIIEEGESSRVKEILNDERYKAFKQFTSVFGVGVKTSEKWYRMGLRTVEEAKASKSLKLSKMQKAGFLYYEDLASGVSKEEADAVTLIVKETVRTVSPDALVTIAGGFRRGKPMGHDVDLLITIPGRPEDDELLHKVVDLLKKQGLLLYEDIRESTFVEGKLPNPKPDALDNHQKCFAILKLYRPKVDNSAVGTSKKSDMAEVKDWKAVRVDLVIAPFEQFAYALLGWTGSGQFRRDTRRYAEEERDMLLDNHRLYDLKKGIFLSADSEEEIFGHLDLDYLEPWERNA

SEQ ID NO: 4989 - DNA, 1182 bp, synthetic construct
  misc_feature 1..1182: note = Variant of terminal deoxynucleotidyl transferase
  source 1..1182: mol_type = other DNA
atgcatcaccaccatcatcatgggggttctggtcatccggaaggtaataccccggagaaggaggtgccgagcgttatcgcccgtcatgttagtcagtacgcgtgccagcgcaagaccacgctgaataactacaacaaaaagttcaccgacgcgctggagatcatggccgagaactacaaatttaaagagaacctgcaggcgtgcctggaagccaagcgcgccgcgagtgtcctgaaaagcctgccgttcgaggttaccagcatgaaagacatccaaggtctgccgtgcattaccgacgacgtacgtgacgtgatcgaagagatcatcgaagagggcgagagcagccgtgttaaagaaatcctcaatgacgagcgctacaaggcctttaagcagttcaccagcgtgttcggtgtgggcgtgaaaacctcggaaaagtggtaccgtatgggcctccgtacggttgaagaagcaaaggccagtaagagtctgaagctgagcaagatgcagaaggcgggcttcctgtattacgaggatctggcgagcggtgttagtaaagaagaagccgatgccgttacgctcatcgtgaaggaaacggtgcgcactgttagtccggatgcgctggtgaccatcgccggcggtttccgccgtggcaaacctatgggccacgacgttgacctgctgatcacgattccgggccgtcctgaagatgacgagctgctccacaaagtggttgatctgctcaagaagcaaggtctgctgctgtacgaagacatccgtgagagcacgttcgtggaggggcaactgccaaatcctaaacctgacgccctggacaaccatcagaagtgcttcgccattctcaagctgtaccgtccgaaggtggataacagtgcggttgggacgagtaagaaaagtgacatggctgaggttaaggattggaaagcggttcgtgtggatctggtgattgcgccattcgagcagttcgcctatgcgctgctcggttggacgggcagcggccaatttcgtcgcgatactcgtcgctatgcgcatgaagagcgcgacatgctgctcgacaaccatcgtctctacgacctgaaaaagggcatctttctgagtgcggacagcgaagaagagattttcggtcatctggacctggattatctggagccgtgggaacgcaacgcg

SEQ ID NO: 4990 - protein, 394 aa, synthetic construct
  REGION 1..394: note = Variant of terminal deoxynucleotidyl transferase
MHHHHHHGGSGHPEGNTPEKEVPSVIARHVSQYACQRKTTLNNYNKKFTDALEIMAENYKFKENLQACLEAKRAASVLKSLPFEVTSMKDIQGLPCITDDVRDVIEEIIEEGESSRVKEILNDERYKAFKQFTSVFGVGVKTSEKWYRMGLRTVEEAKASKSLKLSKMQKAGFLYYEDLASGVSKEEADAVTLIVKETVRTVSPDALVTIAGGFRRGKPMGHDVDLLITIPGRPEDDELLHKVVDLLKKQGLLLYEDIRESTFVEGQLPNPKPDALDNHQKCFAILKLYRPKVDNSAVGTSKKSDMAEVKDWKAVRVDLVIAPFEQFAYALLGWTGSGQFRRDTRRYAHEERDMLLDNHRLYDLKKGIFLSADSEEEIFGHLDLDYLEPWERNA

SEQ ID NO: 4991 - DNA, 1182 bp, synthetic construct
  misc_feature 1..1182: note = Variant of terminal deoxynucleotidyl transferase
  source 1..1182: mol_type = other DNA
atgcatcaccaccatcatcatgggggttctggtcatccggaaggtaataccccggagaaggaggtgccgagcgttatcgcccgtcatgttagtcagtacgcgtgccagcgcaagaccacgctgaataactacaacaaaaagttcaccgacgcgctggagatcatggccgagaactacaaatttaaagagaacctgcaggcgtgcctggaagccaagcgcgccgcgagtgtcctgaaaagcctgccgttcgaggttaccagcatgaaagacatccaaggtctgccgtgcattaccgacgacgtacgtgacgtgatcgaagagatcatcgaagagggcgagagcagccgtgttaaagaaatcctcaatgacgagcgctacaaggcctttaagcagttcaccagcgtgttcggtgtgggcgtgaaaacctcggaaaagtggtaccgtatgggcctccgtacggttgaagaagcaaaggccagtaagagtctgaagctgagcaagatgcagaaggcgggcttcctgtattacgaggatctggcgagcggtgttagtaaagaagaagccgatgccgttacgctcatcgtgaaggaaacggtgcgcactgttagtccggatgcgctggtggctatcgccggcggtttccgccgtggcaaacctatgggccacgacgttgacctgctgatcacgattccgggccgtcctgaagatgacgagctgctccacaaagtggttgatctgctcaagaagcaaggtctgctgctgtacgaagacatccgtgagagcacgttcgtggaggggcaactgccaaatcctaaacctgacgccctggacaaccatcagaagtgcttcgccattctcaagctgtaccgtccgaaggtggataacagtgcggttgggacgagtaagaaaagtgacatggctgaggttaaggattggaaagcggttcgtgtggatctggtgattgcgccattcgagcagttcgcctatgcgctgctcggttggacgggcagcggccaatttcgtcgcgatactcgtcgctatgcggaggaagagcgcgacatgctgctcgacaaccatcgtctctacgacctgaaaaagggcatctttctgagtgcggacagcgaagaagagattttcggtcatctggacctggattatctggagccgtgggaacgcaacgcg

SEQ ID NO: 4992 - protein, 394 aa, synthetic construct
  REGION 1..394: note = Variant of terminal deoxynucleotidyl transferase
MHHHHHHGGSGHPEGNTPEKEVPSVIARHVSQYACQRKTTLNNYNKKFTDALEIMAENYKFKENLQACLEAKRAASVLKSLPFEVTSMKDIQGLPCITDDVRDVIEEIIEEGESSRVKEILNDERYKAFKQFTSVFGVGVKTSEKWYRMGLRTVEEAKASKSLKLSKMQKAGFLYYEDLASGVSKEEADAVTLIVKETVRTVSPDALVAIAGGFRRGKPMGHDVDLLITIPGRPEDDELLHKVVDLLKKQGLLLYEDIRESTFVEGQLPNPKPDALDNHQKCFAILKLYRPKVDNSAVGTSKKSDMAEVKDWKAVRVDLVIAPFEQFAYALLGWTGSGQFRRDTRRYAEEERDMLLDNHRLYDLKKGIFLSADSEEEIFGHLDLDYLEPWERNA

SEQ ID NO: 4993 - DNA, 1182 bp, synthetic construct
  misc_feature 1..1182: note = Variant of terminal deoxynucleotidyl transferase
  source 1..1182: mol_type = other DNA
atgcatcaccaccatcatcatgggggttctggtcatccggaaggtaataccccggagaaggaggtgccgagcgttatcgcccgtcatgttagtcagtacgcgtgccagcgcaagaccacgctgaataactacaacaaaaagttcaccgacgcgctggagatcatggccgagaactacaaatttaaagagaacctgcaggcgtgcctggaagccaagcgcgccgcgagtgtcctgaaaagcctgccgttcgaggttaccagcatgaaagacatccaaggtctgccgtgcattaccgacgacgtacgtgacgtgatcgaagagatcatcgaagagggcgagagcagccgtgttaaagaaatcctcaatgacgagcgctacaaggcctttaagcagttcaccagcgtgttcggtgtgggcgtgaaaacctcggaaaagtggtaccgtatgggcctccgtacggttgaagaagcaaaggccagtaagagtctgaagctgagcaagatgcagaaggcgggcttcctgtattacgaggatctggcgagcggtgttagtaaagaagaagccgatgccgttacgctcatcgtgaaggaaacggtgcgcactgttagtccggatgcgctggtgaccatcgccggcggtttccgccgtggcaaacctatgggccacgacgttgacctgctgatcacgattccgggccgtcctgaagatgacgagctgctccacaaagtggttgatctgctcaagaagcaaggtctgctgctgtacgaagacatccgtaatagcacgttcgtggaggggcaactgccaaatcctaaacctgacgccctggacaaccatcagaagtgcttcgccattctcaagctgtaccgtccgaaggtggataacagtgcggttgggacgagtaagaaaagtgacatggctgaggttaaggattggaaagcggttcgtgtggatctggtgattgcgccattcgagcagttcgcctatgcgctgctcggttggacgggcagcggccaatttcgtcgcgatactcgtcgctatgcggaggaagagcgcgacatgctgctcgacaaccatcgtctctacgacctgaaaaagggcatctttctgagtgcggacagcgaagaagagattttcggtcatctggacctggattatctggagccgtgggaacgcaacgcg

SEQ ID NO: 4994 - protein, 394 aa, synthetic construct
  REGION 1..394: note = Variant of terminal deoxynucleotidyl transferase
MHHHHHHGGSGHPEGNTPEKEVPSVIARHVSQYACQRKTTLNNYNKKFTDALEIMAENYKFKENLQACLEAKRAASVLKSLPFEVTSMKDIQGLPCITDDVRDVIEEIIEEGESSRVKEILNDERYKAFKQFTSVFGVGVKTSEKWYRMGLRTVEEAKASKSLKLSKMQKAGFLYYEDLASGVSKEEADAVTLIVKETVRTVSPDALVTIAGGFRRGKPMGHDVDLLITIPGRPEDDELLHKVVDLLKKQGLLLYEDIRNSTFVEGQLPNPKPDALDNHQKCFAILKLYRPKVDNSAVGTSKKSDMAEVKDWKAVRVDLVIAPFEQFAYALLGWTGSGQFRRDTRRYAEEERDMLLDNHRLYDLKKGIFLSADSEEEIFGHLDLDYLEPWERNA

SEQ ID NO: 4995 - DNA, 1182 bp, synthetic construct
  misc_feature 1..1182: note = Variant of terminal deoxynucleotidyl transferase
  source 1..1182: mol_type = other DNA
atgcatcaccaccatcatcatgggggttctggtcatccggaaggtaataccccggagaaggaggtgccgagcgttatcgcccgtcatgttagtcagtacgcgtgccagcgcaagaccacgctgaataactacaacaaaaagttcaccgacgcgctggagatcatggccgagaactacaaatttaaagagaacctgcaggcgtgcctggaagccaagcgcgccgcgagtgtcctgaaaagcctgccgttcgaggttaccagcatgaaagacatccaaggtctgccgtgcattaccgacgacgtacgtgacgtgatcgaagagatcatcgaagagggcgagagcagccgtgttaaagaaatcctcaatgacgagcgctacaaggcctttaagcagttcaccagcgtgttcggtgtgggcgtgaaaacctcggaaaagtggtaccgtatgggcctccgtacggttgaagaagcaaaggccagtaagagtctgaagctgagcaagatgcagaaggcgggcttcctgtattacgaggatctggcgagcggtgttagtaaagaagaagccgatgccgttacgctcatcgtgaaggaaacggtgcgcactgttagtccggatgcgctggtgaccatcgccggcggtttccgccgtggcaaacctatgggccacgacgttgacctgctgatcacgattccgggccgtcctgaagatgacgagctgctccacaaagtggttgatctgctcaagaagcaaggtctgctgctgtacgaagacatccgtgagagcacgttcgtggaggggcaactgccaaatcctaaacctgacgccctggacaaccatcagaagtgcttcgccattctcaagctgtaccgtccgaaggtggataacagtgcggttgggacgagtaagaaaagtgacatggctgaggttaaggattggaaagcggttcgtgtggatctggtgattgcgccattcgagcagttcgcctatgcgctgctcggttggacgggcagcggccaatttcgtcgcgatactcgtcgctatgcggaggaagagcgcgacatgctgctcgacaaccatcgtctctacgacctgcagaagggcatctttctgagtgcggacagcgaagaagagattttcggtcatctggacctggattatctggagccgtgggaacgcaacgcg

SEQ ID NO: 4996 - protein, 394 aa, synthetic construct
  REGION 1..394: note = Variant of terminal deoxynucleotidyl transferase
MHHHHHHGGSGHPEGNTPEKEVPSVIARHVSQYACQRKTTLNNYNKKFTDALEIMAENYKFKENLQACLEAKRAASVLKSLPFEVTSMKDIQGLPCITDDVRDVIEEIIEEGESSRVKEILNDERYKAFKQFTSVFGVGVKTSEKWYRMGLRTVEEAKASKSLKLSKMQKAGFLYYEDLASGVSKEEADAVTLIVKETVRTVSPDALVTIAGGFRRGKPMGHDVDLLITIPGRPEDDELLHKVVDLLKKQGLLLYEDIRESTFVEGQLPNPKPDALDNHQKCFAILKLYRPKVDNSAVGTSKKSDMAEVKDWKAVRVDLVIAPFEQFAYALLGWTGSGQFRRDTRRYAEEERDMLLDNHRLYDLQKGIFLSADSEEEIFGHLDLDYLEPWERNA

SEQ ID NO: 4997 - DNA, 1182 bp, synthetic construct
  misc_feature 1..1182: note = Variant of terminal deoxynucleotidyl transferase
  source 1..1182: mol_type = other DNA
atgcatcaccaccatcatcatgggggttctggtcatccggaaggtaataccccggagaaggaggtgccgagcgttatcgcccgtcatgttagtcagtacgcgtgccagcgcaagaccacgctgaataactacaacaaaaagttcaccgacgcgctggagatcatggccgagaactacaaatttaaagagaacgtgcaggcgtgcctggaagccaagcgcgccgcgagtgtcctgaaaagcctgccgttcgaggttaccagcatgaaagacatccaaggtctgccgtgcattaccgacgacgtacgtgacgtgatcgaagagatcatcgaagagggcgagagcagccgtgttaaagaaatcctcaatgacgagcgctacaaggcctttaagcagttcaccagcgtgttcggtgtgggcgtgaaaacctcggaaaagtggtaccgtatgggcctccgtacggttgaagaagcaaaggccagtaagagtctgaagctgagcaagatgcagaaggcgggcttcctgtattacgaggatctggcgagcggtgttagtaaagaagaagccgatgccgttacgctcatcgtgaaggaaacggtgcgcactgttagtccggatgcgctggtgaccatcgccggcggtttccgccgtggcaaacctatgggccacgacgttgacctgctgatcacgattccgggccgtcctgaagatgacgagctgctccacaaagtggttgatctgctcaagaagcaaggtctgctgctgtacgaagacatccgtgagagcacgttcgtggaggggcaactgccaaatcctaaacctgacgccctggacaaccatcagaagtgcttcgccattctcaagctgtaccgtccgaaggtggataacagtgcggttgggacgagtaagaaaagtgacatggctgaggttaaggattggaaagcggttcgtgtggatctggtgattgcgccattcgagcagttcgcctatgcgctgctcggttggacgggcagcggccaatttcgtcgcgatactcgtcgctatgcggaggaagagcgcgacatgctgctcgacaaccatcgtctctacgacctgaaaaagggcatctttctgagtgcggacagcgaagaagagattttcggtcatctggacctggattatctggagccgtgggaacgcaacgcg

SEQ ID NO: 4998 - protein, 394 aa, synthetic construct
  REGION 1..394: note = Variant of terminal deoxynucleotidyl transferase
MHHHHHHGGSGHPEGNTPEKEVPSVIARHVSQYACQRKTTLNNYNKKFTDALEIMAENYKFKENVQACLEAKRAASVLKSLPFEVTSMKDIQGLPCITDDVRDVIEEIIEEGESSRVKEILNDERYKAFKQFTSVFGVGVKTSEKWYRMGLRTVEEAKASKSLKLSKMQKAGFLYYEDLASGVSKEEADAVTLIVKETVRTVSPDALVTIAGGFRRGKPMGHDVDLLITIPGRPEDDELLHKVVDLLKKQGLLLYEDIRESTFVEGQLPNPKPDALDNHQKCFAILKLYRPKVDNSAVGTSKKSDMAEVKDWKAVRVDLVIAPFEQFAYALLGWTGSGQFRRDTRRYAEEERDMLLDNHRLYDLKKGIFLSADSEEEIFGHLDLDYLEPWERNA

SEQ ID NO: 4999 - DNA, 1182 bp, synthetic construct
  misc_feature 1..1182: note = Variant of terminal deoxynucleotidyl transferase
  source 1..1182: mol_type = other DNA
atgcatcaccaccatcatcatgggggttctggtcatccggaaggtaataccccggagaaggaggtgccgagcgttatcgcccgtcatgttagtcagtacgcgtgccagcgcaagaccacgctgaataactacaacaaaaagttcaccgacgcgctggagatcatggccgagaactacaaatttaaagagaacctgcaggcgtgcctggaagccaagcgcgccgcgagtgtcctgaaaagcctgccgttcgaggttaccagcatgaaagacatccaaggtctgccgtgcattaccgacgacgtacgtgacgtgatcgaagagatcatcgaagagggcgagagcagccgtgttaaagaaatcctcaatgacgagcgctacaaggcctttaagcagttcaccagcgtgttcggtgtgggcgtgaaaacctcggaaaagtggtaccgtatgggcctccgtacggttgaagaagcaaaggccagtaagagtctgaagctgagcaagatgcagaaggcgggcttcctgtattacgaggatctggcgagcggtgttagtaaagaagaagccgatgccgttacgctcatcgtgaaggaaacggtgcgcactgttagtccggatgcgctggtgaccatcgccggcggtttccgccgtggcaaacctatgggccacgacgttgacctgctgatcacgattccgggccgtcctgaagatgacgagctgctccacaaagtggttgatctgctcaagaagcaaggtctgctgctgtacgaagacatccgtgagagcacgttcgtggaggggcaactgccaaatcctaaacctgacgccctggacaaccatcagaagtgcttcgccattctcaagctgtaccgtccgaaggtggataacagtgcggttgggacgagtaagaaaagtgacatggctgaggttaaggattggaaagcggttcgtgtggatctggtgattgcgccattcgagcagttcgcctatgcgctgctcggttggacgggcagcggccaatttcgtcgcgatactcgtcgctatgcggaggaagagcgcgacatgctgctcgacaaccatcgtctctacgacctgaaaaagggcatctttctgagtgcggacagcgaagaagagattttcggtcatctggacgttgattatctggagccgtgggaacgcaacgcg

SEQ ID NO: 5000 - protein, 394 aa, synthetic construct
  REGION 1..394: note = Variant of terminal deoxynucleotidyl transferase
MHHHHHHGGSGHPEGNTPEKEVPSVIARHVSQYACQRKTTLNNYNKKFTDALEIMAENYKFKENLQACLEAKRAASVLKSLPFEVTSMKDIQGLPCITDDVRDVIEEIIEEGESSRVKEILNDERYKAFKQFTSVFGVGVKTSEKWYRMGLRTVEEAKASKSLKLSKMQKAGFLYYEDLASGVSKEEADAVTLIVKETVRTVSPDALVTIAGGFRRGKPMGHDVDLLITIPGRPEDDELLHKVVDLLKKQGLLLYEDIRESTFVEGQLPNPKPDALDNHQKCFAILKLYRPKVDNSAVGTSKKSDMAEVKDWKAVRVDLVIAPFEQFAYALLGWTGSGQFRRDTRRYAEEERDMLLDNHRLYDLKKGIFLSADSEEEIFGHLDVDYLEPWERNA

SEQ ID NO: 5001 - DNA, 1182 bp, synthetic construct
  misc_feature 1..1182: note = Variant of terminal deoxynucleotidyl transferase
  source 1..1182: mol_type = other DNA
atgcatcaccaccatcatcatgggggttctggtcatccggaaggtaataccccggagaaggaggtgccgagcgttatcgcccgtcatgttagtcagtacgcgtgccagcgcaagaccacgctgaataactacaacaaaaagttcaccgacgcgctggagatcatggccgagaactacaaatttaaagagaacctgcaggcgtgcctgagggccaagcgcgccgcgagtgtcctgaaaagcctgccgttcgaggttaccagcatgaaagacatccaaggtctgccgtgcattaccgacgacgtacgtgacgtgatcgaagagatcatcgaagagggcgagagcagccgtgttaaagaaatcctcaatgacgagcgctacaaggcctttaagcagttcaccagcgtgttcggtgtgggcgtgaaaacctcggaaaagtggtaccgtatgggcctccgtacggttgaagaagcaaaggccagtaagagtctgaagctgagcaagatgcagaaggcgggcttcctgtattacgaggatctggcgagcggtgttagtaaagaagaagccgatgccgttacgctcatcgtgaaggaaacggtgcgcactgttagtccggatgcgctggtgaccatcgccggcggtttccgccgtggcaaacctatgggccacgacgttgacctgctgatcacgattccgggccgtcctgaagatgacgagctgctccacaaagtggttgatctgctcaagaagcaaggtctgctgctgtacgaagacatccgtgagagcacgttcgtggaggggcaactgccaaatcctaaacctgacgccctggacaaccatcagaagtgcttcgccattctcaagctgtaccgtccgaaggtggataacagtgcggttgggacgagtaagaaaagtgacatggctgaggttaaggattggaaagcggttcgtgtggatctggtgattgcgccattcgagcagttcgcctatgcgctgctcggttggacgggcagcggccaatttcgtcgcgatactcgtcgctatgcggaggaagagcgcgacatgctgctcgacaaccatcgtctctacgacctgaaaaagggcatctttctgagtgcggacagcgaagaagagattttcggtcatctggacctggattatctggagccgtgggaacgcaacgcg

SEQ ID NO: 5002 - protein, 394 aa, synthetic construct
  REGION 1..394: note = Variant of terminal deoxynucleotidyl transferase
MHHHHHHGGSGHPEGNTPEKEVPSVIARHVSQYACQRKTTLNNYNKKFTDALEIMAENYKFKENLQACLRAKRAASVLKSLPFEVTSMKDIQGLPCITDDVRDVIEEIIEEGESSRVKEILNDERYKAFKQFTSVFGVGVKTSEKWYRMGLRTVEEAKASKSLKLSKMQKAGFLYYEDLASGVSKEEADAVTLIVKETVRTVSPDALVTIAGGFRRGKPMGHDVDLLITIPGRPEDDELLHKVVDLLKKQGLLLYEDIRESTFVEGQLPNPKPDALDNHQKCFAILKLYRPKVDNSAVGTSKKSDMAEVKDWKAVRVDLVIAPFEQFAYALLGWTGSGQFRRDTRRYAEEERDMLLDNHRLYDLKKGIFLSADSEEEIFGHLDLDYLEPWERNA

SEQ ID NO: 5003 - DNA, 1182 bp, synthetic construct
  misc_feature 1..1182: note = Variant of terminal deoxynucleotidyl transferase
  source 1..1182: mol_type = other DNA
atgcatcaccaccatcatcatgggggttctggtcatccggaaggtaataccccggagaaggaggtgccgagcgttatcgcccgtcatgttagtcagtacgcgtgccagcgcaagaccacgctgaataactacaacaaaaagttcaccgacgcgctggagatcatggccgagaactacaaatttaaagagaacctgcaggcgtgcctgaaggccaagcgcgccgcgagtgtcctgaaaagcctgccgttcgaggttaccagcatgaaagacatccaaggtctgccgtgcattaccgacgacgtacgtgacgtgatcgaagagatcatcgaagagggcgagagcagccgtgttaaagaaatcctcaatgacgagcgctacaaggcctttaagcagttcaccagcgtgttcggtgtgggcgtgaaaacctcggaaaagtggtaccgtatgggcctccgtacggttgaagaagcaaaggccagtaagagtctgaagctgagcaagatgcagaaggcgggcttcctgtattacgaggatctggcgagcggtgttagtaaagaagaagccgatgccgttacgctcatcgtgaaggaaacggtgcgcactgttagtccggatgcgctggtgaccatcgccggcggtttccgccgtggcaaacctatgggccacgacgttgacctgctgatcacgattccgggccgtcctgaagatgacgagctgctccacaaagtggttgatctgctcaagaagcaaggtctgctgctgtacgaagacatccgtgagagcacgttcgtggaggggcaactgccaaatcctaaacctgacgccctggacaaccatcagaagtgcttcgccattctcaagctgtaccgtccgaaggtggataacagtgcggttgggacgagtaagaaaagtgacatggctgaggttaaggattggaaagcggttcgtgtggatctggtgattgcgccattcgagcagttcgcctatgcgctgctcggttggacgggcagcggccaatttcgtcgcgatactcgtcgctatgcggaggaagagcgcgacatgctgctcgacaaccatcgtctctacgacctgaaaaagggcatctttctgagtgcggacagcgaagaagagattttcggtcatctggacctggattatctggagccgtgggaacgcaacgcg

SEQ ID NO: 5004 - protein, 394 aa, synthetic construct
  REGION 1..394: note = Variant of terminal deoxynucleotidyl transferase
MHHHHHHGGSGHPEGNTPEKEVPSVIARHVSQYACQRKTTLNNYNKKFTDALEIMAENYKFKENLQACLKAKRAASVLKSLPFEVTSMKDIQGLPCITDDVRDVIEEIIEEGESSRVKEILNDERYKAFKQFTSVFGVGVKTSEKWYRMGLRTVEEAKASKSLKLSKMQKAGFLYYEDLASGVSKEEADAVTLIVKETVRTVSPDALVTIAGGFRRGKPMGHDVDLLITIPGRPEDDELLHKVVDLLKKQGLLLYEDIRESTFVEGQLPNPKPDALDNHQKCFAILKLYRPKVDNSAVGTSKKSDMAEVKDWKAVRVDLVIAPFEQFAYALLGWTGSGQFRRDTRRYAEEERDMLLDNHRLYDLKKGIFLSADSEEEIFGHLDLDYLEPWERNA

SEQ ID NO: 5005 - DNA, 1182 bp, synthetic construct
  misc_feature 1..1182: note = Variant of terminal deoxynucleotidyl transferase
  source 1..1182: mol_type = other DNA
atgcatcaccaccatcatcatgggggttctggtcatccggaaggtaataccccggagaaggaggtgccgagcgttatcgcccgtcatgttagtcagtacgcgtgccagcgcaagaccacgctgaataactacaacaaaaagttcaccgacgcgctggagatcatggccgagaactacaaatttaaagagaacctgcaggcgtgcctggaagccaagcgcgccgcgagtgtcctgaaaagcctgccgttcgaggttaccagcatgaaagacatccaaggtctgccgtgcattaccgacgacgtacgtgacgtgatcgaagagatcatcgaagagggcgagagcagccgtgttaaagaaatcctcaatgacgagcgctacaaggcctttaagcagttcaccagcgtgttcggtgtgggcgtgaaaacctcggaaaagtggtaccgtatgggcctccgtacggttgaagaagcaaaggccagtaagagtctgaagctgagcaagatgcagaaggcgggcttcctgtattacgaggatctggcgagcggtgttagtaaagaagaagccgatgccgttacgctcatcgtgaaggaaacggtgcgcactgttagtccggatgcgctggtgaccatcgccggcggtttccgccgtggcaaacctatgggccacgacgttgacctgctgatcacgattccgggccgtcctgaagatgacgagctgctccacaaagtggttgatctgctcaagaagcaaggtctgctgctgtacgaagacatccgtgagagcacgttcgtggaggggcaactgccaaatcctaaacctgacgccctggacaaccatcagaagtgcttcgccattctcaagctgtaccgtccgaaggtggataacagtgcggttgggacgagtaagaaaagtgacatggctgaggttaaggattggaaagcggttcgtgtggatctggtgattgcgccattcgagcagttcgcctatgcgctgctcggttggacgggcagcggccaatttcgtcgcgatactcgtcgctatgcggaggaagagcgcgacatgctgctcgacgcgcatcgtctctacgacctgaaaaagggcatctttctgagtgcggacagcgaagaagagattttcggtcatctggacctggattatctggagccgtgggaacgcaacgcg

SEQ ID NO: 5006 - protein, 394 aa, synthetic construct
  REGION 1..394: note = Variant of terminal deoxynucleotidyl transferase
MHHHHHHGGSGHPEGNTPEKEVPSVIARHVSQYACQRKTTLNNYNKKFTDALEIMAENYKFKENLQACLEAKRAASVLKSLPFEVTSMKDIQGLPCITDDVRDVIEEIIEEGESSRVKEILNDERYKAFKQFTSVFGVGVKTSEKWYRMGLRTVEEAKASKSLKLSKMQKAGFLYYEDLASGVSKEEADAVTLIVKETVRTVSPDALVTIAGGFRRGKPMGHDVDLLITIPGRPEDDELLHKVVDLLKKQGLLLYEDIRESTFVEGQLPNPKPDALDNHQKCFAILKLYRPKVDNSAVGTSKKSDMAEVKDWKAVRVDLVIAPFEQFAYALLGWTGSGQFRRDTRRYAEEERDMLLDAHRLYDLKKGIFLSADSEEEIFGHLDLDYLEPWERNA

SEQ ID NO: 5007 - DNA, 1182 bp, synthetic construct
  misc_feature 1..1182: note = Variant of terminal deoxynucleotidyl transferase
  source 1..1182: mol_type = other DNA
atgcatcaccaccatcatcatgggggttctggtcatccggaaggtaataccccggagaaggaggtgccgagcgttatcgcccgtcatgttagtcagtacgcgtgccagcgcaagaccacgctgaataactacaacaaaaagttcaccgacgcgctggagatcatggccgagaactacaaatttaaagagaacctgcaggcggtactggaagccaagcgcgccgcgagtgtcctgaaaagcctgccgttcgaggttaccagcatgaaagacatccaaggtctgccgtgcattaccgacgacgtacgtgacgtgatcgaagagatcatcgaagagggcgagagcagccgtgttaaagaaatcctcaatgacgagcgctacaaggcctttaagcagttcaccagcgtgttcggtgtgggcgtgaaaacctcggaaaagtggtaccgtatgggcctccgtacggttgaagaagcaaaggccagtaagagtctgaagctgagcaagatgcagaaggcgggcttcctgtattacgaggatctggcgagcggtgttagtaaagaagaagccgatgccgttacgctcatcgtgaaggaaacggtgcgcactgttagtccggatgcgctggtgaccatcgccggcggtttccgccgtggcaaacctatgggccacgacgttgacctgctgatcacgattccgggccgtcctgaagatgacgagctgctccacaaagtggttgatctgctcaagaagcaaggtctgctgctgtacgaagacatccgtgagagcacgttcgtggaggggcaactgccaaatcctaaacctgacgccctggacaaccatcagaagtgcttcgccattctcaagctgtaccgtccgaaggtggataacagtgcggttgggacgagtaagaaaagtgacatggctgaggttaaggattggaaagcggttcgtgtggatctggtgattgcgccattcgagcagttcgcctatgcgctgctcggttggacgggcagcggccaatttcgtcgcgatactcgtcgctatgcggaggaagagcgcgacatgctgctcgacaaccatcgtctctacgacctgaaaaagggcatctttctgagtgcggacagcgaagaagagattttcggtcatctggacctggattatctggagccgtgggaacgcaacgcg

SEQ ID NO: 5008 - protein, 394 aa, synthetic construct
  REGION 1..394: note = Variant of terminal deoxynucleotidyl transferase
MHHHHHHGGSGHPEGNTPEKEVPSVIARHVSQYACQRKTTLNNYNKKFTDALEIMAENYKFKENLQAVLEAKRAASVLKSLPFEVTSMKDIQGLPCITDDVRDVIEEIIEEGESSRVKEILNDERYKAFKQFTSVFGVGVKTSEKWYRMGLRTVEEAKASKSLKLSKMQKAGFLYYEDLASGVSKEEADAVTLIVKETVRTVSPDALVTIAGGFRRGKPMGHDVDLLITIPGRPEDDELLHKVVDLLKKQGLLLYEDIRESTFVEGQLPNPKPDALDNHQKCFAILKLYRPKVDNSAVGTSKKSDMAEVKDWKAVRVDLVIAPFEQFAYALLGWTGSGQFRRDTRRYAEEERDMLLDNHRLYDLKKGIFLSADSEEEIFGHLDLDYLEPWERNA

SEQ ID NO: 5009 - DNA, 1182 bp, synthetic construct
  misc_feature 1..1182: note = Variant of terminal deoxynucleotidyl transferase
  source 1..1182: mol_type = other DNA
atgcatcaccaccatcatcatgggggttctggtcatccggaaggtaataccccggagaaggaggtgccgagcgttatcgcccgtcatgttagtcagtacgcgtgccagcgcaagaccacgctgaataactacaacaaaaagttcaccgacgcgctggagatcatggccgagaactacaaatttaaagagaacctgcaggcgtgcggggaagccaagcgcgccgcgagtgtcctgaaaagcctgccgttcgaggttaccagcatgaaagacatccaaggtctgccgtgcattaccgacgacgtacgtgacgtgatcgaagagatcatcgaagagggcgagagcagccgtgttaaagaaatcctcaatgacgagcgctacaaggcctttaagcagttcaccagcgtgttcggtgtgggcgtgaaaacctcggaaaagtggtaccgtatgggcctccgtacggttgaagaagcaaaggccagtaagagtctgaagctgagcaagatgcagaaggcgggcttcctgtattacgaggatctggcgagcggtgttagtaaagaagaagccgatgccgttacgctcatcgtgaaggaaacggtgcgcactgttagtccggatgcgctggtgaccatcgccggcggtttccgccgtggcaaacctatgggccacgacgttgacctgctgatcacgattccgggccgtcctgaagatgacgagctgctccacaaagtggttgatctgctcaagaagcaaggtctgctgctgtacgaagacatccgtgagagcacgttcgtggaggggcaactgccaaatcctaaacctgacgccctggacaaccatcagaagtgcttcgccattctcaagctgtaccgtccgaaggtggataacagtgcggttgggacgagtaagaaaagtgacatggctgaggttaaggattggaaagcggttcgtgtggatctggtgattgcgccattcgagcagttcgcctatgcgctgctcggttggacgggcagcggccaatttcgtcgcgatactcgtcgctatgcggaggaagagcgcgacatgctgctcgacaaccatcgtctctacgacctgaaaaagggcatctttctgagtgcggacagcgaagaagagattttcggtcatctggacctggattatctggagccgtgggaacgcaacgcg

SEQ ID NO: 5010 - protein, 394 aa, synthetic construct
  REGION 1..394: note = Variant of terminal deoxynucleotidyl transferase
MHHHHHHGGSGHPEGNTPEKEVPSVIARHVSQYACQRKTTLNNYNKKFTDALEIMAENYKFKENLQACGEAKRAASVLKSLPFEVTSMKDIQGLPCITDDVRDVIEEIIEEGESSRVKEILNDERYKAFKQFTSVFGVGVKTSEKWYRMGLRTVEEAKASKSLKLSKMQKAGFLYYEDLASGVSKEEADAVTLIVKETVRTVSPDALVTIAGGFRRGKPMGHDVDLLITIPGRPEDDELLHKVVDLLKKQGLLLYEDIRESTFVEGQLPNPKPDALDNHQKCFAILKLYRPKVDNSAVGTSKKSDMAEVKDWKAVRVDLVIAPFEQFAYALLGWTGSGQFRRDTRRYAEEERDMLLDNHRLYDLKKGIFLSADSEEEIFGHLDLDYLEPWERNA

SEQ ID NO: 5011 - DNA, 1182 bp, synthetic construct
  misc_feature 1..1182: note = Variant of terminal deoxynucleotidyl transferase
  source 1..1182: mol_type = other DNA
atgcatcaccaccatcatcatgggggttctggtcatccggaaggtaataccccggagaaggaggtgccgagcgttatcgcccgtcatgttagtcagtacgcgtgccagcgcaagaccacgctgaataactacaacaaaaagttcaccgacgcgctggagatcatggtagagaactacaaatttaaagagaacctgcaggcgtgcctggaagccaagcgcgccgcgagtgtcctgaaaagcctgccgttcgaggttaccagcatgaaagacatccaaggtctgccgtgcattaccgacgacgtacgtgacgtgatcgaagagatcatcgaagagggcgagagcagccgtgttaaagaaatcctcaatgacgagcgctacaaggcctttaagcagttcaccagcgtgttcggtgtgggcgtgaaaacctcggaaaagtggtaccgtatgggcctccgtacggttgaagaagcaaaggccagtaagagtctgaagctgagcaagatgcagaaggcgggcttcctgtattacgaggatctggcgagcggtgttagtaaagaagaagccgatgccgttacgctcatcgtgaaggaaacggtgcgcactgttagtccggatgcgctggtgaccatcgccggcggtttccgccgtggcaaacctatgggccacgacgttgacctgctgatcacgattccgggccgtcctgaagatgacgagctgctccacaaagtggttgatctgctcaagaagcaaggtctgctgctgtacgaagacatccgtgagagcacgttcgtggaggggcaactgccaaatcctaaacctgacgccctggacaaccatcagaagtgcttcgccattctcaagctgtaccgtccgaaggtggataacagtgcggttgggacgagtaagaaaagtgacatggctgaggttaaggattggaaagcggttcgtgtggatctggtgattgcgccattcgagcagttcgcctatgcgctgctcggttggacgggcagcggccaatttcgtcgcgatactcgtcgctatgcggaggaagagcgcgacatgctgctcgacaaccatcgtctctacgacctgaaaaagggcatctttctgagtgcggacagcgaagaagagattttcggtcatctggacctggattatctggagccgtgggaacgcaacgcg

SEQ ID NO: 5012 - protein, 394 aa, synthetic construct
  REGION 1..394: note = Variant of terminal deoxynucleotidyl transferase
MHHHHHHGGSGHPEGNTPEKEVPSVIARHVSQYACQRKTTLNNYNKKFTDALEIMVENYKFKENLQACLEAKRAASVLKSLPFEVTSMKDIQGLPCITDDVRDVIEEIIEEGESSRVKEILNDERYKAFKQFTSVFGVGVKTSEKWYRMGLRTVEEAKASKSLKLSKMQKAGFLYYEDLASGVSKEEADAVTLIVKETVRTVSPDALVTIAGGFRRGKPMGHDVDLLITIPGRPEDDELLHKVVDLLKKQGLLLYEDIRESTFVEGQLPNPKPDALDNHQKCFAILKLYRPKVDNSAVGTSKKSDMAEVKDWKAVRVDLVIAPFEQFAYALLGWTGSGQFRRDTRRYAEEERDMLLDNHRLYDLKKGIFLSADSEEEIFGHLDLDYLEPWERNA

SEQ ID NO: 5013 - DNA, 1182 bp, synthetic construct
  misc_feature 1..1182: note = Variant of terminal deoxynucleotidyl transferase
  source 1..1182: mol_type = other DNA
atgcatcaccaccatcatcatgggggttctggtcatccggaaggtaataccccggagaaggaggtgccgagcgttatcgcccgtcatgttagtcagtacgcgtgccagcgcaagaccacgctgaataactacaacaaaaagttcaccgacgcgctggagatcatggccgagaactacaaatttaaagagaacctgcaggcgtgcctggaagccaagcgcgccgcgagtgtcctgaaaagcctgccgttcgaggttaccagcatgaaagacatccaaggtctgccgtgcattaccgacgacgtacgtgacgtgatcgaagagatcatcgaagagggcgagagcagccgtgttaaagaaatcctcaatgacgagcgctacaaggcctttaagcagttcaccagcgtgttcggtgtgggcgtgaaaacctcggaaaagtggtaccgtatgggcctccgtacggttgaagaagcaaaggccagtaagagtctgaagctgagcaagatgcagaaggcgggcttcctgtattacgaggatctggcgagcggtgttagtaaagaagaagccgatgccgttacgctcatcgtgaaggaaacggtgcgcactgttagtccggatgcgctggtgaccatcgccggcggtttccgccgtggcaaacctatgggccacgacgttgacctgctgatcacgattccgggccgtcctgaagatgacgagctgctccacaaagtggttgatctgctcaagaagcaaggtctgctgctgtacgaagacatccgtgagagcacgttcgtggaggggcaactgccaaatcctaaacctgacgccctggacaaccatcagaagtgcttcgccattctcaagctgtaccgtccgaaggtggataacagtgcggttgggacgagtaagaaaagtgacatggctgaggttaaggattggaaagcggttcgtgtggatctggtgattgcgccattcgagcagttcgcctatgcgctgctcggttggacgggcagcggccaatttcgtcgcgatactcgtcgctatgcggagtgtgagcgcgacatgctgctcgacaaccatcgtctctacgacctgaaaaagggcatctttctgagtgcggacagcgaagaagagattttcggtcatctggacctggattatctggagccgtgggaacgcaacgcg

SEQ ID NO: 5014 - protein, 394 aa, synthetic construct
  REGION 1..394: note = Variant of terminal deoxynucleotidyl transferase
MHHHHHHGGSGHPEGNTPEKEVPSVIARHVSQYACQRKTTLNNYNKKFTDALEIMAENYKFKENLQACLEAKRAASVLKSLPFEVTSMKDIQGLPCITDDVRDVIEEIIEEGESSRVKEILNDERYKAFKQFTSVFGVGVKTSEKWYRMGLRTVEEAKASKSLKLSKMQKAGFLYYEDLASGVSKEEADAVTLIVKETVRTVSPDALVTIAGGFRRGKPMGHDVDLLITIPGRPEDDELLHKVVDLLKKQGLLLYEDIRESTFVEGQLPNPKPDALDNHQKCFAILKLYRPKVDNSAVGTSKKSDMAEVKDWKAVRVDLVIAPFEQFAYALLGWTGSGQFRRDTRRYAECERDMLLDNHRLYDLKKGIFLSADSEEEIFGHLDLDYLEPWERNA

SEQ ID NO: 5015 - DNA, 1182 bp, synthetic construct
  misc_feature 1..1182: note = Variant of terminal deoxynucleotidyl transferase
  source 1..1182: mol_type = other DNA
atgcatcaccaccatcatcatgggggttctggtcatccggaaggtaataccccggagaaggaggtgccgagcgttatcgcccgtcatgttagtcagtacgcgtgccagcgcaagaccacgctgaataactacaacaaaaagttcaccgacgcgctggagatcatggccgagaactacaaatttaaagagaacctgcaggcgtgcctggaagccaagcgcgccgcgagtgtcctgaaaagcctgccgttcgaggttaccagcatgaaagacatccaaggtctgccgtgcattaccgacgacgtacgtgacgtgatcgaagagatcatcgaagagggcgagagcagccgtgttaaagaaatcctcaatgacgagcgctacaaggcctttaagcagttcaccagcgtgttcggtgtgggcgtgaaaacctcggaaaagtggtaccgtatgggcctccgtacggttgaagaagcaaaggccagtaagagtctgaagctgagcaagatgcagaaggcgggcttcctgtattacgaggatctggcgagcggtgttagtaaagaagaagccgatgccgttacgctcatcgtgaaggaaacggtgcgcactgttagtccggatgcgctggtgaccatcgccggcggtttccgccgtggcaaacctatgggccacgacgttgacctgctgatcacgattccgggccgtcctgaagatgacgagctgctccacaaagtggttgatctgctcaagaagcaaggtctgctgctgtacgaagacatccgtgagagcacgttcgtggaggggcaactgccaaatcctaaacctgacgccctggacaaccatcagaagtgcttcgccattctcaagctgtaccgtccgaaggtggataacagtgcggttgggacgagtaagaaaagtgacatggctgaggttaaggattggaaagcggttcgtgtggatctggtgattgcgccattcgagcagttcgcctatgcgctgctcggttggacgggcagcggccaatttcgtcgcgatactcgtcgctatgcggaggaagagcgcgacatgctgctcgacaaccataagctctacgacctgaaaaagggcatctttctgagtgcggacagcgaagaagagattttcggtcatctggacctggattatctggagccgtgggaacgcaacgcg

SEQ ID NO: 5016 - protein, 394 aa, synthetic construct
  REGION 1..394: note = Variant of terminal deoxynucleotidyl transferase
MHHHHHHGGSGHPEGNTPEKEVPSVIARHVSQYACQRKTTLNNYNKKFTDALEIMAENYKFKENLQACLEAKRAASVLKSLPFEVTSMKDIQGLPCITDDVRDVIEEIIEEGESSRVKEILNDERYKAFKQFTSVFGVGVKTSEKWYRMGLRTVEEAKASKSLKLSKMQKAGFLYYEDLASGVSKEEADAVTLIVKETVRTVSPDALVTIAGGFRRGKPMGHDVDLLITIPGRPEDDELLHKVVDLLKKQGLLLYEDIRESTFVEGQLPNPKPDALDNHQKCFAILKLYRPKVDNSAVGTSKKSDMAEVKDWKAVRVDLVIAPFEQFAYALLGWTGSGQFRRDTRRYAEEERDMLLDNHKLYDLKKGIFLSADSEEEIFGHLDLDYLEPWERNA

SEQ ID NO: 5017 - DNA, 1182 bp, synthetic construct
  misc_feature 1..1182: note = Variant of terminal deoxynucleotidyl transferase
  source 1..1182: mol_type = other DNA
atgcatcaccaccatcatcatgggggttctggtcatccggaaggtaataccccggagaaggaggtgccgagcgttatcgcccgtcatgttagtcagtacgcgtgccagcgcaagaccacgctgaataactacaacaaaaagttcaccgacgcgctggagatcatggccgagaactacaaatttaaagagaacctgcaggcgcagctggaagccaagcgcgccgcgagtgtcctgaaaagcctgccgttcgaggttaccagcatgaaagacatccaaggtctgccgtgcattaccgacgacgtacgtgacgtgatcgaagagatcatcgaagagggcgagagcagccgtgttaaagaaatcctcaatgacgagcgctacaaggcctttaagcagttcaccagcgtgttcggtgtgggcgtgaaaacctcggaaaagtggtaccgtatgggcctccgtacggttgaagaagcaaaggccagtaagagtctgaagctgagcaagatgcagaaggcgggcttcctgtattacgaggatctggcgagcggtgttagtaaagaagaagccgatgccgttacgctcatcgtgaaggaaacggtgcgcactgttagtccggatgcgctggtgaccatcgccggcggtttccgccgtggcaaacctatgggccacgacgttgacctgctgatcacgattccgggccgtcctgaagatgacgagctgctccacaaagtggttgatctgctcaagaagcaaggtctgctgctgtacgaagacatccgtgagagcacgttcgtggaggggcaactgccaaatcctaaacctgacgccctggacaaccatcagaagtgcttcgccattctcaagctgtaccgtccgaaggtggataacagtgcggttgggacgagtaagaaaagtgacatggctgaggttaaggattggaaagcggttcgtgtggatctggtgattgcgccattcgagcagttcgcctatgcgctgctcggttggacgggcagcggccaatttcgtcgcgatactcgtcgctatgcggaggaagagcgcgacatgctgctcgacaaccatcgtctctacgacctgaaaaagggcatctttctgagtgcggacagcgaagaagagattttcggtcatctggacctggattatctggagccgtgggaacgcaacgcg

SEQ ID NO: 5018 - protein, 394 aa, synthetic construct
  REGION 1..394: note = Variant of terminal deoxynucleotidyl transferase
MHHHHHHGGSGHPEGNTPEKEVPSVIARHVSQYACQRKTTLNNYNKKFTDALEIMAENYKFKENLQAQLEAKRAASVLKSLPFEVTSMKDIQGLPCITDDVRDVIEEIIEEGESSRVKEILNDERYKAFKQFTSVFGVGVKTSEKWYRMGLRTVEEAKASKSLKLSKMQKAGFLYYEDLASGVSKEEADAVTLIVKETVRTVSPDALVTIAGGFRRGKPMGHDVDLLITIPGRPEDDELLHKVVDLLKKQGLLLYEDIRESTFVEGQLPNPKPDALDNHQKCFAILKLYRPKVDNSAVGTSKKSDMAEVKDWKAVRVDLVIAPFEQFAYALLGWTGSGQFRRDTRRYAEEERDMLLDNHRLYDLKKGIFLSADSEEEIFGHLDLDYLEPWERNA

SEQ ID NO: 5019 - DNA, 1182 bp, synthetic construct
  misc_feature 1..1182: note = Variant of terminal deoxynucleotidyl transferase
  source 1..1182: mol_type = other DNA
atgcatcaccaccatcatcatgggggttctggtcatccggaaggtaataccccggagaaggaggtgccgagcgttatcgcccgtcatgttagtcagtacgcgtgccagcgcaagaccacgctgaataactacaacaaaaagttcaccgacgcgctggagatcatggccgagaactacaaatttaaagagaacctgcaggcgtgcctggaagccaagcgcgccgcgagtgtcctgaaaagcctgccgttcgaggttaccagcatgaaagacatccaaggtctgccgtgcattaccgacgacgtacgtgacgtgatcgaagagatcatcgaagagggcgagagcagccgtgttaaagaaatcctcaatgacgagcgctacaaggcctttaagcagttcaccagcgtgttcggtgtgggcgtgaaaacctcggaaaagtggtaccgtatgggcctccgtacggttgaagaagcaaaggccagtaagagtctgaagctgagcaagatgcagaaggcgggcttcctgcactacgaggatctggcgagcggtgttagtaaagaagaagccgatgccgttacgctcatcgtgaaggaaacggtgcgcactgttagtccggatgcgctggtgaccatcgccggcggtttccgccgtggcaaacctatgggccacgacgttgacctgctgatcacgattccgggccgtcctgaagatgacgagctgctccacaaagtggttgatctgctcaagaagcaaggtctgctgctgtacgaagacatccgtgagagcacgttcgtggaggggcaactgccaaatcctaaacctgacgccctggacaaccatcagaagtgcttcgccattctcaagctgtaccgtccgaaggtggataacagtgcggttgggacgagtaagaaaagtgacatggctgaggttaaggattggaaagcggttcgtgtggatctggtgattgcgccattcgagcagttcgcctatgcgctgctcggttggacgggcagcggccaatttcgtcgcgatactcgtcgctatgcggaggaagagcgcgacatgctgctcgacaaccatcgtctctacgacctgaaaaagggcatctttctgagtgcggacagcgaagaagagattttcggtcatctggacctggattatctggagccgtgggaacgcaacgcg

SEQ ID NO: 5020 - protein, 394 aa, synthetic construct
  REGION 1..394: note = Variant of terminal deoxynucleotidyl transferase
MHHHHHHGGSGHPEGNTPEKEVPSVIARHVSQYACQRKTTLNNYNKKFTDALEIMAENYKFKENLQACLEAKRAASVLKSLPFEVTSMKDIQGLPCITDDVRDVIEEIIEEGESSRVKEILNDERYKAFKQFTSVFGVGVKTSEKWYRMGLRTVEEAKASKSLKLSKMQKAGFLHYEDLASGVSKEEADAVTLIVKETVRTVSPDALVTIAGGFRRGKPMGHDVDLLITIPGRPEDDELLHKVVDLLKKQGLLLYEDIRESTFVEGQLPNPKPDALDNHQKCFAILKLYRPKVDNSAVGTSKKSDMAEVKDWKAVRVDLVIAPFEQFAYALLGWTGSGQFRRDTRRYAEEERDMLLDNHRLYDLKKGIFLSADSEEEIFGHLDLDYLEPWERNA

SEQ ID NO: 5021 - DNA, 1182 bp, synthetic construct
  misc_feature 1..1182: note = Variant of terminal deoxynucleotidyl transferase
  source 1..1182: mol_type = other DNA
atgcatcaccaccatcatcatgggggttctggtcatccggaaggtaataccccggagaaggaggtgccgagcgttatcgcccgtcatgttagtcagtacgcgtgccagcgcaagaccacgctgaataactacaacaaaaagttcaccgacgcgctggagatcatggccgagaactacaaatttaaagagaacctgcaggcgtgcctggaagccaagcgcgccatgagtgtcctgaaaagcctgccgttcgaggttaccagcatgaaagacatccaaggtctgccgtgcattaccgacgacgtacgtgacgtgatcgaagagatcatcgaagagggcgagagcagccgtgttaaagaaatcctcaatgacgagcgctacaaggcctttaagcagttcaccagcgtgttcggtgtgggcgtgaaaacctcggaaaagtggtaccgtatgggcctccgtacggttgaagaagcaaaggccagtaagagtctgaagctgagcaagatgcagaaggcgggcttcctgtattacgaggatctggcgagcggtgttagtaaagaagaagccgatgccgttacgctcatcgtgaaggaaacggtgcgcactgttagtccggatgcgctggtgaccatcgccggcggtttccgccgtggcaaacctatgggccacgacgttgacctgctgatcacgattccgggccgtcctgaagatgacgagctgctccacaaagtggttgatctgctcaagaagcaaggtctgctgctgtacgaagacatccgtgagagcacgttcgtggaggggcaactgccaaatcctaaacctgacgccctggacaaccatcagaagtgcttcgccattctcaagctgtaccgtccgaaggtggataacagtgcggttgggacgagtaagaaaagtgacatggctgaggttaaggattggaaagcggttcgtgtggatctggtgattgcgccattcgagcagttcgcctatgcgctgctcggttggacgggcagcggccaatttcgtcgcgatactcgtcgctatgcggaggaagagcgcgacatgctgctcgacaaccatcgtctctacgacctgaaaaagggcatctttctgagtgcggacagcgaagaagagattttcggtcatctggacctggattatctggagccgtgggaacgcaacgcg

SEQ ID NO: 5022 - protein, 394 aa, synthetic construct
  REGION 1..394: note = Variant of terminal deoxynucleotidyl transferase
MHHHHHHGGSGHPEGNTPEKEVPSVIARHVSQYACQRKTTLNNYNKKFTDALEIMAENYKFKENLQACLEAKRAMSVLKSLPFEVTSMKDIQGLPCITDDVRDVIEEIIEEGESSRVKEILNDERYKAFKQFTSVFGVGVKTSEKWYRMGLRTVEEAKASKSLKLSKMQKAGFLYYEDLASGVSKEEADAVTLIVKETVRTVSPDALVTIAGGFRRGKPMGHDVDLLITIPGRPEDDELLHKVVDLLKKQGLLLYEDIRESTFVEGQLPNPKPDALDNHQKCFAILKLYRPKVDNSAVGTSKKSDMAEVKDWKAVRVDLVIAPFEQFAYALLGWTGSGQFRRDTRRYAEEERDMLLDNHRLYDLKKGIFLSADSEEEIFGHLDLDYLEPWERNA

SEQ ID NO: 5023 - DNA, 1182 bp, synthetic construct
  misc_feature 1..1182: note = Variant of terminal deoxynucleotidyl transferase
  source 1..1182: mol_type = other DNA
atgcatcaccaccatcatcatgggggttctggtcatccggaaggtaataccccggagaaggaggtgccgagcgttatcgcccgtcatgttagtcagtacgcgtgccagcgcaagaccacgctgaataactacaacaaaaagttcaccgacgcgctggagatcatggccgagaactacaaatttaaagagaacctgcaggcgtgcctggaagccaagcgcgccgcgagtgtcctgaaaagcctgccgttcgaggttaccagcatgaaagacatccaaggtctgccgtgcattaccgacgacgtacgtgacgtgatcgaagagatcatcgaagagggcgagagcagccgtgttaaagaaatcctcaatgacgagcgctacaaggcctttaagcagttcaccagcgtgttcggtgtgggcgtgaaaacctcggaaaagtggtaccgtatgggcctccgtacggttgaagaagcaaaggccagtaagagtctgaagctgagcaagatgcagaaggcgggcttcctgtattacgaggatctggcgagcggtgttagtaaagaagaagccgatgccgttacgctcatcgtgaaggaaacggtgcgcactgttagtccggatgcgctggtgaccatcgccggcggtttccgccgtggcaaacctatgggccacgacgttgacctgctgatcacgattccgggccgtcctgaagatgacgagctgctccacaaagtggttgatctgctcaagaagcaaggtctgctgctgtacgaagacatccgtgagagcacgttcgtggaggggcaactgccaaatcctaaacctggggccctggacaaccatcagaagtgcttcgccattctcaagctgtaccgtccgaaggtggataacagtgcggttgggacgagtaagaaaagtgacatggctgaggttaaggattggaaagcggttcgtgtggatctggtgattgcgccattcgagcagttcgcctatgcgctgctcggttggacgggcagcggccaatttcgtcgcgatactcgtcgctatgcggaggaagagcgcgacatgctgctcgacaaccatcgtctctacgacctgaaaaagggcatctttctgagtgcggacagcgaagaagagattttcggtcatctggacctggattatctggagccgtgggaacgcaacgcg

SEQ ID NO: 5024 - protein, 394 aa, synthetic construct
  REGION 1..394: note = Variant of terminal deoxynucleotidyl transferase
MHHHHHHGGSGHPEGNTPEKEVPSVIARHVSQYACQRKTTLNNYNKKFTDALEIMAENYKFKENLQACLEAKRAASVLKSLPFEVTSMKDIQGLPCITDDVRDVIEEIIEEGESSRVKEILNDERYKAFKQFTSVFGVGVKTSEKWYRMGLRTVEEAKASKSLKLSKMQKAGFLYYEDLASGVSKEEADAVTLIVKETVRTVSPDALVTIAGGFRRGKPMGHDVDLLITIPGRPEDDELLHKVVDLLKKQGLLLYEDIRESTFVEGQLPNPKPGALDNHQKCFAILKLYRPKVDNSAVGTSKKSDMAEVKDWKAVRVDLVIAPFEQFAYALLGWTGSGQFRRDTRRYAEEERDMLLDNHRLYDLKKGIFLSADSEEEIFGHLDLDYLEPWERNA

SEQ ID NO: 5025 - DNA, 1182 bp, synthetic construct
  misc_feature 1..1182: note = Variant of terminal deoxynucleotidyl transferase
  source 1..1182: mol_type = other DNA
atgcatcaccaccatcatcatgggggttctggtcatccggaaggtaataccccggagaaggaggtgccgagcgttatcgcccgtcatgttagtcagtacgcgtgccagcgcaagaccacgctgaataactacaacaaaaagttcaccgacgcgctggagatcatggccgagaactacaaatttaaagagaacctgcaggcgtgcctggaagccaagcgcgccgcgagtgtcctgaaaagcctgccgttcgaggttaccagcatgaaagacatccaaggtctgccgtgcattaccgacgacgtacgtgacgtgatcgaagagatcatcgaagagggcgagagcagccgtgttaaagaaatcctcaatgacgagcgctacaaggcctttaagcagttcaccagcgtgttcggtgtgggcgtgaaaacctcggaaaagtggtaccgtatgggcctccgtacggttgaagaagcaaaggccagtaagagtctgaagctgagcaagatgcagaaggcgggcttcctgtattacgaggatctggcgagcggtgttagtaaagaagaagccgatgccgttacgctcatcgtgaaggaaacggtgcgcactgttagtccggatgcgctggtgaccatcgccggcggtttccgccgtggcaaacctatgggccacgacgttgacctgctgatcacgattccgggccgtcctgaagatgacgagctgctccacaaagtggttgatctgctcaagaagcaaggtctgctgctgtacgaagacatccgtgagagcacgttcgtggaggggcaactgccaaatcctaaacctgacgccctggacaaccatcagaagtgcttcgccattctcaagctgtaccgtccgaaggtggataacagtgcggttgggacgagtaagaaaagtgacatggctgaggttaaggattggaaagcggttcgtgtggatctggtgattgcgccattcgagcagttcgcctataccctgctcggttggacgggcagcggccaatttcgtcgcgatactcgtcgctatgcggaggaagagcgcgacatgctgctcgacaaccatcgtctctacgacctgaaaaagggcatctttctgagtgcggacagcgaagaagagattttcggtcatctggacctggattatctggagccgtgggaacgcaacgcg

SEQ ID NO: 5026 - protein, 394 aa, synthetic construct
  REGION 1..394: note = Variant of terminal deoxynucleotidyl transferase
MHHHHHHGGSGHPEGNTPEKEVPSVIARHVSQYACQRKTTLNNYNKKFTDALEIMAENYKFKENLQACLEAKRAASVLKSLPFEVTSMKDIQGLPCITDDVRDVIEEIIEEGESSRVKEILNDERYKAFKQFTSVFGVGVKTSEKWYRMGLRTVEEAKASKSLKLSKMQKAGFLYYEDLASGVSKEEADAVTLIVKETVRTVSPDALVTIAGGFRRGKPMGHDVDLLITIPGRPEDDELLHKVVDLLKKQGLLLYEDIRESTFVEGQLPNPKPDALDNHQKCFAILKLYRPKVDNSAVGTSKKSDMAEVKDWKAVRVDLVIAPFEQFAYTLLGWTGSGQFRRDTRRYAEEERDMLLDNHRLYDLKKGIFLSADSEEEIFGHLDLDYLEPWERNA

SEQ ID NO: 5027 - DNA, 1182 bp, synthetic construct
  misc_feature 1..1182: note = Variant of terminal deoxynucleotidyl transferase
  source 1..1182: mol_type = other DNA
atgcatcaccaccatcatcatgggggttctggtcatccggaaggtaataccccggagaaggaggtgccgagcgttatcgcccgtcatgttagtcagtacgcgtgccagcgcaagaccacgctgaataactacaacaaaaagttcaccgacgcgctggagatcatggccgagaactacaaatttaaagagaacgcgcaggcgtgcctggaagccaagcgcgccgcgagtgtcctgaaaagcctgccgttcgaggttaccagcatgaaagacatccaaggtctgccgtgcattaccgacgacgtacgtgacgtgatcgaagagatcatcgaagagggcgagagcagccgtgttaaagaaatcctcaatgacgagcgctacaaggcctttaagcagttcaccagcgtgttcggtgtgggcgtgaaaacctcggaaaagtggtaccgtatgggcctccgtacggttgaagaagcaaaggccagtaagagtctgaagctgagcaagatgcagaaggcgggcttcctgtattacgaggatctggcgagcggtgttagtaaagaagaagccgatgccgttacgctcatcgtgaaggaaacggtgcgcactgttagtccggatgcgctggtgaccatcgccggcggtttccgccgtggcaaacctatgggccacgacgttgacctgctgatcacgattccgggccgtcctgaagatgacgagctgctccacaaagtggttgatctgctcaagaagcaaggtctgctgctgtacgaagacatccgtgagagcacgttcgtggaggggcaactgccaaatcctaaacctgacgccctggacaaccatcagaagtgcttcgccattctcaagctgtaccgtccgaaggtggataacagtgcggttgggacgagtaagaaaagtgacatggctgaggttaaggattggaaagcggttcgtgtggatctggtgattgcgccattcgagcagttcgcctatgcgctgctcggttggacgggcagcggccaatttcgtcgcgatactcgtcgctatgcggaggaagagcgcgacatgctgctcgacaaccatcgtctctacgacctgaaaaagggcatctttctgagtgcggacagcgaagaagagattttcggtcatctggacctggattatctggagccgtgggaacgcaacgcg

SEQ ID NO: 5028 - protein, 394 aa, synthetic construct
  REGION 1..394: note = Variant of terminal deoxynucleotidyl transferase
MHHHHHHGGSGHPEGNTPEKEVPSVIARHVSQYACQRKTTLNNYNKKFTDALEIMAENYKFKENAQACLEAKRAASVLKSLPFEVTSMKDIQGLPCITDDVRDVIEEIIEEGESSRVKEILNDERYKAFKQFTSVFGVGVKTSEKWYRMGLRTVEEAKASKSLKLSKMQKAGFLYYEDLASGVSKEEADAVTLIVKETVRTVSPDALVTIAGGFRRGKPMGHDVDLLITIPGRPEDDELLHKVVDLLKKQGLLLYEDIRESTFVEGQLPNPKPDALDNHQKCFAILKLYRPKVDNSAVGTSKKSDMAEVKDWKAVRVDLVIAPFEQFAYALLGWTGSGQFRRDTRRYAEEERDMLLDNHRLYDLKKGIFLSADSEEEIFGHLDLDYLEPWERNA

SEQ ID NO: 5029 - DNA, 1182 bp, synthetic construct
  misc_feature 1..1182: note = Variant of terminal deoxynucleotidyl transferase
  source 1..1182: mol_type = other DNA
atgcatcaccaccatcatcatgggggttctggtcatccggaaggtaataccccggagaaggaggtgccgagcgttatcgcccgtcatgttagtcagtacgcgtgccagcgcaagaccacgctgaataactacaacaaaaagttcaccgacgcgctggagatcatggccgagaactacaaatttaaagagaacctgcaggcgtgcctggaagccaagcgcgccgcgagtgtcctgaaaagcctgccgttcgaggttaccagcatgaaagacatccaaggtctgccgtgcattaccgacgacgtacgtgacgtgatcgaagagatcatcgaagagggcgagagcagccgtgttaaagaaatcctcaatgacgagcgctacaaggcctttaagcagttcaccagcgtgttcggtgtgggcgtgaaaacctcggaaaagtggtaccgtatgggcctccgtacggttgaagaagcaaaggccagtaagagtctgaagctgagcaagatgcagaaggcgggcttcctgtatcacgaggatctggcgagcggtgttagtaaagaagaagccgatgccgttacgctcatcgtgaaggaaacggtgcgcactgttagtccggatgcgctggtgaccatcgccggcggtttccgccgtggcaaacctatgggccacgacgttgacctgctgatcacgattccgggccgtcctgaagatgacgagctgctccacaaagtggttgatctgctcaagaagcaaggtctgctgctgtacgaagacatccgtgagagcacgttcgtggaggggcaactgccaaatcctaaacctgacgccctggacaaccatcagaagtgcttcgccattctcaagctgtaccgtccgaaggtggataacagtgcggttgggacgagtaagaaaagtgacatggctgaggttaaggattggaaagcggttcgtgtggatctggtgattgcgccattcgagcagttcgcctatgcgctgctcggttggacgggcagcggccaatttcgtcgcgatactcgtcgctatgcggaggaagagcgcgacatgctgctcgacaaccatcgtctctacgacctgaaaaagggcatctttctgagtgcggacagcgaagaagagattttcggtcatctggacctggattatctggagccgtgggaacgcaacgcg

SEQ ID NO: 5030 - protein, 394 aa, synthetic construct
  REGION 1..394: note = Variant of terminal deoxynucleotidyl transferase
MHHHHHHGGSGHPEGNTPEKEVPSVIARHVSQYACQRKTTLNNYNKKFTDALEIMAENYKFKENLQACLEAKRAASVLKSLPFEVTSMKDIQGLPCITDDVRDVIEEIIEEGESSRVKEILNDERYKAFKQFTSVFGVGVKTSEKWYRMGLRTVEEAKASKSLKLSKMQKAGFLYHEDLASGVSKEEADAVTLIVKETVRTVSPDALVTIAGGFRRGKPMGHDVDLLITIPGRPEDDELLHKVVDLLKKQGLLLYEDIRESTFVEGQLPNPKPDALDNHQKCFAILKLYRPKVDNSAVGTSKKSDMAEVKDWKAVRVDLVIAPFEQFAYALLGWTGSGQFRRDTRRYAEEERDMLLDNHRLYDLKKGIFLSADSEEEIFGHLDLDYLEPWERNA

SEQ ID NO: 5031 - DNA, 1182 bp, synthetic construct
  misc_feature 1..1182: note = Variant of terminal deoxynucleotidyl transferase
  source 1..1182: mol_type = other DNA
atgcatcaccaccatcatcatgggggttctggtcatccggaaggtaataccccggagaaggaggtgccgagcgttatcgcccgtcatgttagtcagtacgcgtgccagcgcaagaccacgctgaataactacaacaaaaagttcaccgacgcgctggagatcatggccgagaactacaaatttaaagagaacctgcaggcgtgcctggaagccaagcgcgccgcgagtgtcctgaaaagcctgccgttcgaggttaccagcatgaaagacatccaaggtctgccgtgcattaccgacgacgtacgtgacgtgatcgaagagatcatcgaagagggcgagagcagccgtgttaaagaaatcctcaatgacgagcgctacaaggcctttaagcagttcaccagcgtgttcggtgtgggcgtgaaaacctcggaaaagtggtaccgtatgggcctccgtacggttgaagaagcaaaggccagtaagagtctgaagctgagcaagatgcagaaggcgggcttcctgtattacgaggatctggcgagcggtgttagtaaagaagaagccgatgccgttacgctcatcgtgaaggaaacggtgcgcactgttagtccggatgcgctggtgaccatcgccggcggtttccgccgtggcaaacctatgggccacgacgttgacctgctgatcacgattccgggccgtcctgaagatgacgagctgctccacaaagtggttgatctgctcaagaagcaaggtctgctgctgtacagtgacatccgtgagagcacgttcgtggaggggcaactgccaaatcctaaacctgacgccctggacaaccatcagaagtgcttcgccattctcaagctgtaccgtccgaaggtggataacagtgcggttgggacgagtaagaaaagtgacatggctgaggttaaggattggaaagcggttcgtgtggatctggtgattgcgccattcgagcagttcgcctatgcgctgctcggttggacgggcagcggccaatttcgtcgcgatactcgtcgctatgcggaggaagagcgcgacatgctgctcgacaaccatcgtctctacgacctgaaaaagggcatctttctgagtgcggacagcgaagaagagattttcggtcatctggacctggattatctggagccgtgggaacgcaacgcg

SEQ ID NO: 5032 - protein, 394 aa, synthetic construct
  REGION 1..394: note = Variant of terminal deoxynucleotidyl transferase
MHHHHHHGGSGHPEGNTPEKEVPSVIARHVSQYACQRKTTLNNYNKKFTDALEIMAENYKFKENLQACLEAKRAASVLKSLPFEVTSMKDIQGLPCITDDVRDVIEEIIEEGESSRVKEILNDERYKAFKQFTSVFGVGVKTSEKWYRMGLRTVEEAKASKSLKLSKMQKAGFLYYEDLASGVSKEEADAVTLIVKETVRTVSPDALVTIAGGFRRGKPMGHDVDLLITIPGRPEDDELLHKVVDLLKKQGLLLYSDIRESTFVEGQLPNPKPDALDNHQKCFAILKLYRPKVDNSAVGTSKKSDMAEVKDWKAVRVDLVIAPFEQFAYALLGWTGSGQFRRDTRRYAEEERDMLLDNHRLYDLKKGIFLSADSEEEIFGHLDLDYLEPWERNA

SEQ ID NO: 5033 - DNA, 1182 bp, synthetic construct
  misc_feature 1..1182: note = Variant of terminal deoxynucleotidyl transferase
  source 1..1182: mol_type = other DNA
atgcatcaccaccatcatcatgggggttctggtcatccggaaggtaataccccggagaaggaggtgccgagcgttatcgcccgtcatgttagtcagtacgcgtgccagcgcaagaccacgctgaataactacaacaaaaagttcaccgacgcgctggagatcatggccgagaactacaaatttaaagagaacctgcaggcgtgcctggaagccaagcgcgccgcgagtgtcctgaaaagcctgccgttcgaggttaccagcatgaaagacatccaaggtctgccgtgcattaccgacgacgtacgtgacgtgatcgaagagatcatcgaagagggcgagagcagccgtgttaaagaaatcctcaatgacgagcgctacaaggcctttaagcagttcaccagcgtgttcggtgtgggcgtgaaaacctcggaaaagtggtaccgtatgggcctccgtacggttgaagaagcaaaggccagtaagagtctgaagctgagcaagatgcagaaggcgggcttcctgtattacgaggatctggcgagcggtgttagtaaagaagaagccgatgccgttacgctcatcgtgaaggaaacggtgcgcactgttagtccggatgcgctggtgaccatcgccggcggtttccgccgtggcaaacctatgggccacgacgttgacctgctgatcacgattccgggccgtcctgaagatgacgagctgctccacaaagtggttgatctgctcaagaagcaaggtctgctgctgtacgaagacatccgtgagcatacgttcgtggaggggcaactgccaaatcctaaacctgacgccctggacaaccatcagaagtgcttcgccattctcaagctgtaccgtccgaaggtggataacagtgcggttgggacgagtaagaaaagtgacatggctgaggttaaggattggaaagcggttcgtgtggatctggtgattgcgccattcgagcagttcgcctatgcgctgctcggttggacgggcagcggccaatttcgtcgcgatactcgtcgctatgcggaggaagagcgcgacatgctgctcgacaaccatcgtctctacgacctgaaaaagggcatctttctgagtgcggacagcgaagaagagattttcggtcatctggacctggattatctggagccgtgggaacgcaacgcg

SEQ ID NO: 5034 - protein, 394 aa, synthetic construct
  REGION 1..394: note = Variant of terminal deoxynucleotidyl transferase
MHHHHHHGGSGHPEGNTPEKEVPSVIARHVSQYACQRKTTLNNYNKKFTDALEIMAENYKFKENLQACLEAKRAASVLKSLPFEVTSMKDIQGLPCITDDVRDVIEEIIEEGESSRVKEILNDERYKAFKQFTSVFGVGVKTSEKWYRMGLRTVEEAKASKSLKLSKMQKAGFLYYEDLASGVSKEEADAVTLIVKETVRTVSPDALVTIAGGFRRGKPMGHDVDLLITIPGRPEDDELLHKVVDLLKKQGLLLYEDIREHTFVEGQLPNPKPDALDNHQKCFAILKLYRPKVDNSAVGTSKKSDMAEVKDWKAVRVDLVIAPFEQFAYALLGWTGSGQFRRDTRRYAEEERDMLLDNHRLYDLKKGIFLSADSEEEIFGHLDLDYLEPWERNA

SEQ ID NO: 5035 - DNA, 1182 bp, synthetic construct
  misc_feature 1..1182: note = Variant of terminal deoxynucleotidyl transferase
  source 1..1182: mol_type = other DNA
atgcatcaccaccatcatcatgggggttctggtcatccggaaggtaataccccggagaaggaggtgccgagcgttatcgcccgtcatgttagtcagtacgcgtgccagcgcaagaccacgctgaataactacaacaaaaagttcaccgacgcgctggagatcatggccgagaactacaaatttaaagagaacctgcaggcgtgcctggaagccaagcgcgccgcgagtgtcctgaaaagcctgccgttcgaggttaccagcatgaaagacatccaaggtctgccgtgcattaccgacgacgtacgtgacgtgatcgaagagatcatcgaagagggcgagagcagccgtgttaaagaaatcctcaatgacgagcgctacaaggcctttaagcagttcaccagcgtgttcggtgtgggcgtgaaaacctcggaaaagtggtaccgtatgggcctccgtacggttgaagaagcaaaggccagtaagagtctgaagctgagcaagatgcagaaggcgggcttcctgtattacgaggatctggcgagcggtgttagtaaagaagaagccgatgccgttacgctcatcgtgaaggaaacggtgcgcactgttagtccggatgcgctggtgaccatcgccggcggtttccgccgtggcaaacctatgggccacgacgttgacctgctgatcacgattccgggccgtcctgaagatgacgagctgctccacaaagtggttgatctgctcaagaagcaaggtctgctgctgtacgaagacatccgtgagagcacgttcgtggaggggcaactgccaaatcctaaacctgacgccctggacaaccatcagaagtgcttcgccattctcaagctgtaccgtccgaaggtggataacagtgcggttgggacgagtaagaaaagtgacatggctgaggttaaggattggaaagcggttcgtgtggatctggtgattgcgccattcgagcagttcgcctatgcgctgctcggttggacgggcagcggccaatttcgtcgcgatactcgtaagtatgcggaggaagagcgcgacatgctgctcgacaaccatcgtctctacgacctgaaaaagggcatctttctgagtgcggacagcgaagaagagattttcggtcatctggacctggattatctggagccgtgggaacgcaacgcg

SEQ ID NO: 5036 - protein, 394 aa, synthetic construct
  REGION 1..394: note = Variant of terminal deoxynucleotidyl transferase
MHHHHHHGGSGHPEGNTPEKEVPSVIARHVSQYACQRKTTLNNYNKKFTDALEIMAENYKFKENLQACLEAKRAASVLKSLPFEVTSMKDIQGLPCITDDVRDVIEEIIEEGESSRVKEILNDERYKAFKQFTSVFGVGVKTSEKWYRMGLRTVEEAKASKSLKLSKMQKAGFLYYEDLASGVSKEEADAVTLIVKETVRTVSPDALVTIAGGFRRGKPMGHDVDLLITIPGRPEDDELLHKVVDLLKKQGLLLYEDIRESTFVEGQLPNPKPDALDNHQKCFAILKLYRPKVDNSAVGTSKKSDMAEVKDWKAVRVDLVIAPFEQFAYALLGWTGSGQFRRDTRKYAEEERDMLLDNHRLYDLKKGIFLSADSEEEIFGHLDLDYLEPWERNA

SEQ ID NO: 5037 - DNA, 1182 bp, synthetic construct
  misc_feature 1..1182: note = Variant of terminal deoxynucleotidyl transferase
  source 1..1182: mol_type = other DNA
atgcatcaccaccatcatcatgggggttctggtcatccggaaggtaataccccggagaaggaggtgccgagcgttatcgcccgtcatgttagtcagtacgcgtgccagcgcaagaccacgctgaataactacaacaaaaagttcaccgacgcgctggagatcatggccgagaactacaaatttaaagagaacctgcaggcgtgcctgaatgccaagcgcgccgcgagtgtcctgaaaagcctgccgttcgaggttaccagcatgaaagacatccaaggtctgccgtgcattaccgacgacgtacgtgacgtgatcgaagagatcatcgaagagggcgagagcagccgtgttaaagaaatcctcaatgacgagcgctacaaggcctttaagcagttcaccagcgtgttcggtgtgggcgtgaaaacctcggaaaagtggtaccgtatgggcctccgtacggttgaagaagcaaaggccagtaagagtctgaagctgagcaagatgcagaaggcgggcttcctgtattacgaggatctggcgagcggtgttagtaaagaagaagccgatgccgttacgctcatcgtgaaggaaacggtgcgcactgttagtccggatgcgctggtgaccatcgccggcggtttccgccgtggcaaacctatgggccacgacgttgacctgctgatcacgattccgggccgtcctgaagatgacgagctgctccacaaagtggttgatctgctcaagaagcaaggtctgctgctgtacgaagacatccgtgagagcacgttcgtggaggggcaactgccaaatcctaaacctgacgccctggacaaccatcagaagtgcttcgccattctcaagctgtaccgtccgaaggtggataacagtgcggttgggacgagtaagaaaagtgacatggctgaggttaaggattggaaagcggttcgtgtggatctggtgattgcgccattcgagcagttcgcctatgcgctgctcggttggacgggcagcggccaatttcgtcgcgatactcgtcgctatgcggaggaagagcgcgacatgctgctcgacaaccatcgtctctacgacctgaaaaagggcatctttctgagtgcggacagcgaagaagagattttcggtcatctggacctggattatctggagccgtgggaacgcaacgcg

SEQ ID NO: 5038 - protein, 394 aa, synthetic construct
  REGION 1..394: note = Variant of terminal deoxynucleotidyl transferase
MHHHHHHGGSGHPEGNTPEKEVPSVIARHVSQYACQRKTTLNNYNKKFTDALEIMAENYKFKENLQACLNAKRAASVLKSLPFEVTSMKDIQGLPCITDDVRDVIEEIIEEGESSRVKEILNDERYKAFKQFTSVFGVGVKTSEKWYRMGLRTVEEAKASKSLKLSKMQKAGFLYYEDLASGVSKEEADAVTLIVKETVRTVSPDALVTIAGGFRRGKPMGHDVDLLITIPGRPEDDELLHKVVDLLKKQGLLLYEDIRESTFVEGQLPNPKPDALDNHQKCFAILKLYRPKVDNSAVGTSKKSDMAEVKDWKAVRVDLVIAPFEQFAYALLGWTGSGQFRRDTRRYAEEERDMLLDNHRLYDLKKGIFLSADSEEEIFGHLDLDYLEPWERNA

SEQ ID NO: 5039 - DNA, 1182 bp, synthetic construct
  misc_feature 1..1182: note = Variant of terminal deoxynucleotidyl transferase
  source 1..1182: mol_type = other DNA
atgcatcaccaccatcatcatgggggttctggtcatccggaaggtaataccccggagaaggaggtgccgagcgttatcgcccgtcatgttagtcagtacgcgtgccagcgcaagaccacgctgaataactacaacaaaaagttcaccgacgcgctggagatcatggccgagaactacaaatttaaagagaacctgcaggcgtgcctggaagccaagcgcgccgcgagtgtcctgaaaagcctgccgttcgaggttaccagcatgaaagacatccaaggtctgccgtgcattaccgacgacgtacgtgacgtgatcgaagagatcatcgaagagggcgagagcagccgtgttaaagaaatcctcaatgacgagcgctacaaggcctttaagcagttcaccagcgtgttcggtgtgggcgtgaaaacctcggaaaagtggtaccgtatgggcctccgtacggttgaagaagcaaaggccagtaagagtctgaagctgagcaagatgcagaaggcgggcttcctgtattacgaggatctggcgagcggtgttagtaaagaagaagccgatgccgttacgctcatcgtgaaggaaacggtgcgcactgttagtccggatgcgctggtgaccatcgccggcggtttccgccgtggcaaacctatgggccacgacgttgacctgctgatcacgattccgggccgtcctgaagatgacgagctgctccacaaagtggttgatctgctcaagaagcaaggtctgctgctgtacgaagacatccgtgagagcacgttcgtggaggggcaactgccaaatcggaaacctgacgccctggacaaccatcagaagtgcttcgccattctcaagctgtaccgtccgaaggtggataacagtgcggttgggacgagtaagaaaagtgacatggctgaggttaaggattggaaagcggttcgtgtggatctggtgattgcgccattcgagcagttcgcctatgcgctgctcggttggacgggcagcggccaatttcgtcgcgatactcgtcgctatgcggaggaagagcgcgacatgctgctcgacaaccatcgtctctacgacctgaaaaagggcatctttctgagtgcggacagcgaagaagagattttcggtcatctggacctggattatctggagccgtgggaacgcaacgcg

SEQ ID NO: 5040 - protein, 394 aa, synthetic construct
  REGION 1..394: note = Variant of terminal deoxynucleotidyl transferase
MHHHHHHGGSGHPEGNTPEKEVPSVIARHVSQYACQRKTTLNNYNKKFTDALEIMAENYKFKENLQACLEAKRAASVLKSLPFEVTSMKDIQGLPCITDDVRDVIEEIIEEGESSRVKEILNDERYKAFKQFTSVFGVGVKTSEKWYRMGLRTVEEAKASKSLKLSKMQKAGFLYYEDLASGVSKEEADAVTLIVKETVRTVSPDALVTIAGGFRRGKPMGHDVDLLITIPGRPEDDELLHKVVDLLKKQGLLLYEDIRESTFVEGQLPNRKPDALDNHQKCFAILKLYRPKVDNSAVGTSKKSDMAEVKDWKAVRVDLVIAPFEQFAYALLGWTGSGQFRRDTRRYAEEERDMLLDNHRLYDLKKGIFLSADSEEEIFGHLDLDYLEPWERNA

SEQ ID NO: 5041 - DNA, 1182 bp, synthetic construct
  misc_feature 1..1182: note = Variant of terminal deoxynucleotidyl transferase
  source 1..1182: mol_type = other DNA
atgcatcaccaccatcatcatgggggttctggtcatccggaaggtaataccccggagaaggaggtgccgagcgttatcgcccgtcatgttagtcagtacgcgtgccagcgcaagaccacgctgaataactacaacaaaaagctgaccgacgcgctggagatcatggccgagaactacaaatttaaagagaacctgcaggcgtgcctggaagccaagcgcgccgcgagtgtcctgaaaagcctgccgttcgaggttaccagcatgaaagacatccaaggtctgccgtgcattaccgacgacgtacgtgacgtgatcgaagagatcatcgaagagggcgagagcagccgtgttaaagaaatcctcaatgacgagcgctacaaggcctttaagcagttcaccagcgtgttcggtgtgggcgtgaaaacctcggaaaagtggtaccgtatgggcctccgtacggttgaagaagcaaaggccagtaagagtctgaagctgagcaagatgcagaaggcgggcttcctgtattacgaggatctggcgagcggtgttagtaaagaagaagccgatgccgttacgctcatcgtgaaggaaacggtgcgcactgttagtccggatgcgctggtgaccatcgccggcggtttccgccgtggcaaacctatgggccacgacgttgacctgctgatcacgattccgggccgtcctgaagatgacgagctgctccacaaagtggttgatctgctcaagaagcaaggtctgctgctgtacgaagacatccgtgagagcacgttcgtggaggggcaactgccaaatcctaaacctgacgccctggacaaccatcagaagtgcttcgccattctcaagctgtaccgtccgaaggtggataacagtgcggttgggacgagtaagaaaagtgacatggctgaggttaaggattggaaagcggttcgtgtggatctggtgattgcgccattcgagcagttcgcctatgcgctgctcggttggacgggcagcggccaatttcgtcgcgatactcgtcgctatgcggaggaagagcgcgacatgctgctcgacaaccatcgtctctacgacctgaaaaagggcatctttctgagtgcggacagcgaagaagagattttcggtcatctggacctggattatctggagccgtgggaacgcaacgcg

SEQ ID NO: 5042 - protein, 394 aa, synthetic construct
  REGION 1..394: note = Variant of terminal deoxynucleotidyl transferase
MHHHHHHGGSGHPEGNTPEKEVPSVIARHVSQYACQRKTTLNNYNKKLTDALEIMAENYKFKENLQACLEAKRAASVLKSLPFEVTSMKDIQGLPCITDDVRDVIEEIIEEGESSRVKEILNDERYKAFKQFTSVFGVGVKTSEKWYRMGLRTVEEAKASKSLKLSKMQKAGFLYYEDLASGVSKEEADAVTLIVKETVRTVSPDALVTIAGGFRRGKPMGHDVDLLITIPGRPEDDELLHKVVDLLKKQGLLLYEDIRESTFVEGQLPNPKPDALDNHQKCFAILKLYRPKVDNSAVGTSKKSDMAEVKDWKAVRVDLVIAPFEQFAYALLGWTGSGQFRRDTRRYAEEERDMLLDNHRLYDLKKGIFLSADSEEEIFGHLDLDYLEPWERNA

SEQ ID NO: 5043 - DNA, 1182 bp, synthetic construct
  misc_feature 1..1182: note = Variant of terminal deoxynucleotidyl transferase
  source 1..1182: mol_type = other DNA
atgcatcaccaccatcatcatgggggttctggtcatccggaaggtaataccccggagaaggaggtgccgagcgttatcgcccgtcatgttagtcagtacgcgtgccagcgcaagaccacgctgaataactacaacaaaaagttcaccgacgcgctggagatcatggccgagaactacaaatttaaagagaacctgcaggcgtgcctggaagccaagcgcgccgcgagtgtcctgaaaagcctgccgttcgaggttaccagcatgaaagacatccaaggtctgccgtgcattaccgacgacgtacgtgacgtgatcgaagagatcatcgaagagggcgagagcagccgtgttaaagaaatcctcaatgacgagcgctacaaggcctttaagcagttcaccagcgtgttcggtgtgggcgtgaaaacctcggaaaagtggtaccgtatgggcctccgtacggttgaagaagcaaaggccagtaagagtctgaagctgagcaagatgcagaaggcgggcttcctgtattacgaggatctggcgagcggtgttagtatggaagaagccgatgccgttacgctcatcgtgaaggaaacggtgcgcactgttagtccggatgcgctggtgaccatcgccggcggtttccgccgtggcaaacctatgggccacgacgttgacctgctgatcacgattccgggccgtcctgaagatgacgagctgctccacaaagtggttgatctgctcaagaagcaaggtctgctgctgtacgaagacatccgtgagagcacgttcgtggaggggcaactgccaaatcctaaacctgacgccctggacaaccatcagaagtgcttcgccattctcaagctgtaccgtccgaaggtggataacagtgcggttgggacgagtaagaaaagtgacatggctgaggttaaggattggaaagcggttcgtgtggatctggtgattgcgccattcgagcagttcgcctatgcgctgctcggttggacgggcagcggccaatttcgtcgcgatactcgtcgctatgcggaggaagagcgcgacatgctgctcgacaaccatcgtctctacgacctgaaaaagggcatctttctgagtgcggacagcgaagaagagattttcggtcatctggacctggattatctggagccgtgggaacgcaacgcg

SEQ ID NO: 5044 - protein, 394 aa, synthetic construct
  REGION 1..394: note = Variant of terminal deoxynucleotidyl transferase
MHHHHHHGGSGHPEGNTPEKEVPSVIARHVSQYACQRKTTLNNYNKKFTDALEIMAENYKFKENLQACLEAKRAASVLKSLPFEVTSMKDIQGLPCITDDVRDVIEEIIEEGESSRVKEILNDERYKAFKQFTSVFGVGVKTSEKWYRMGLRTVEEAKASKSLKLSKMQKAGFLYYEDLASGVSMEEADAVTLIVKETVRTVSPDALVTIAGGFRRGKPMGHDVDLLITIPGRPEDDELLHKVVDLLKKQGLLLYEDIRESTFVEGQLPNPKPDALDNHQKCFAILKLYRPKVDNSAVGTSKKSDMAEVKDWKAVRVDLVIAPFEQFAYALLGWTGSGQFRRDTRRYAEEERDMLLDNHRLYDLKKGIFLSADSEEEIFGHLDLDYLEPWERNA

SEQ ID NO: 5045 - DNA, 1182 bp, synthetic construct
  misc_feature 1..1182: note = Variant of terminal deoxynucleotidyl transferase
  source 1..1182: mol_type = other DNA
atgcatcaccaccatcatcatgggggttctggtcatccggaaggtaataccccggagaaggaggtgccgagcgttatcgcccgtcatgttagtcagtacgcgtgccagcgcaagaccacgctgaataactacaacaaaaagttcaccgacgcgctggagatcatggccgagaactacaaatttaaagagaacctgcaggcgtgcctggaagccaagcgcgccgcgagtgtcctgaaaagcctgccgttcgaggttaccagcatgaaagacatccaaggtctgccgtgcattaccgacgacgtacgtgacgtgatcgaagagatcatcgaagagggcgagagcagccgtgttaaagaaatcctcaatgacgagcgctacaaggcctttaagcagttcaccagcgtgttcggtgtgggcgtgaaaacctcggaaaagtggtaccgtatgggcctccgtacggttgaagaagcaaaggccagtaagagtctgaagctgagcaagatgcagaaggcgggcttcctgtattacgaggatctggcgagcggtgttagtaaagaagaagccgatgccgttacgctcatcgtgaaggaaacggtgcgcactgttagtccggatgcgctggtgaccatcgccggcggtttccgccgtggcaaacctatgggccacgacgttgacctgctgatcacgattccgggccgtcctgaagatgacgagctgctccacaaagtggttgatctgctcaagaagcaaggtctgctgctgtacgaagacatccgtgagagcacgttcgtggaggggcaactgccaaatcctaaacctgacgccctggacaaccatcagaagtgcttcgccattctcaagctgtaccgtccgaaggtggataacagtgcggttgggacgagtaagaaaagtgacatggctgaggttaaggattggaaagcggttcgtgtggatctggtgattgcgccattcgagcagttcgcctatgcgctgctcggttggacgggcagcggccaatttcgtcgcgatactcgtcgctatgcggaggaagagcgcgacatgctgctcgacaaccatcgtctctacgacctgaaaaagggcatcttgctgagtgcggacagcgaagaagagattttcggtcatctggacctggattatctggagccgtgggaacgcaacgcg

SEQ ID NO: 5046 - protein, 394 aa, synthetic construct
  REGION 1..394: note = Variant of terminal deoxynucleotidyl transferase
MHHHHHHGGSGHPEGNTPEKEVPSVIARHVSQYACQRKTTLNNYNKKFTDALEIMAENYKFKENLQACLEAKRAASVLKSLPFEVTSMKDIQGLPCITDDVRDVIEEIIEEGESSRVKEILNDERYKAFKQFTSVFGVGVKTSEKWYRMGLRTVEEAKASKSLKLSKMQKAGFLYYEDLASGVSKEEADAVTLIVKETVRTVSPDALVTIAGGFRRGKPMGHDVDLLITIPGRPEDDELLHKVVDLLKKQGLLLYEDIRESTFVEGQLPNPKPDALDNHQKCFAILKLYRPKVDNSAVGTSKKSDMAEVKDWKAVRVDLVIAPFEQFAYALLGWTGSGQFRRDTRRYAEEERDMLLDNHRLYDLKKGILLSADSEEEIFGHLDLDYLEPWERNA

SEQ ID NO: 5047 - DNA, 1182 bp, synthetic construct
  misc_feature 1..1182: note = Variant of terminal deoxynucleotidyl transferase
  source 1..1182: mol_type = other DNA
atgcatcaccaccatcatcatgggggttctggtcatccggaaggtaataccccggagaaggaggtgccgagcgttatcgcccgtcatgttagtcagtacgcgtgccagcgcaagaccacgctgaataactacaacaaaaagttcaccgacgcgctggagatcatggccgagaactacaaatttaaagagaacctgcaggcgtgcctggaagccaagcgcgccgcgagtgtcctgaaaagcctgccgttcgaggttaccagcatgaaagacatccaaggtctgccgtgcattaccgacgacgtacgtgacgtgatcgaagagatcatcgaagagggcgagagcagccgtgttaaagaaatcctcaatgacgagcgctacaaggcctttaagcagttcaccagcgtgttcggtgtgggcgtgaaaacctcggaaaagtggtaccgtatgggcctccgtacggttgaagaagcaaaggccagtaagagtctgaagctgagcaagatgcagaaggcgggcttcctgtattacgaggatctggcgagcggtgttagtaaagaagaagccgatgccgttacgctcatcgtgaaggaaacggtgcgcactgttagtccggatgcgctggtgaccatcgccggcggtttccgccgtggcaaacctatgggccacgacgttgacctgctgatcacgattccgggccgtcctgaagatgacgagctgctccacaaagtggttgatctgctcaagaagcaaggtctgctgctgtacgaagacatccgtgagagcacgttcgtggaggggcaactgccaaatcctaaacctgacgccctggacaaccatggtaagtgcttcgccattctcaagctgtaccgtccgaaggtggataacagtgcggttgggacgagtaagaaaagtgacatggctgaggttaaggattggaaagcggttcgtgtggatctggtgattgcgccattcgagcagttcgcctatgcgctgctcggttggacgggcagcggccaatttcgtcgcgatactcgtcgctatgcggaggaagagcgcgacatgctgctcgacaaccatcgtctctacgacctgaaaaagggcatctttctgagtgcggacagcgaagaagagattttcggtcatctggacctggattatctggagccgtgggaacgcaacgcg

SEQ ID NO: 5048 - protein, 394 aa, synthetic construct
  REGION 1..394: note = Variant of terminal deoxynucleotidyl transferase
MHHHHHHGGSGHPEGNTPEKEVPSVIARHVSQYACQRKTTLNNYNKKFTDALEIMAENYKFKENLQACLEAKRAASVLKSLPFEVTSMKDIQGLPCITDDVRDVIEEIIEEGESSRVKEILNDERYKAFKQFTSVFGVGVKTSEKWYRMGLRTVEEAKASKSLKLSKMQKAGFLYYEDLASGVSKEEADAVTLIVKETVRTVSPDALVTIAGGFRRGKPMGHDVDLLITIPGRPEDDELLHKVVDLLKKQGLLLYEDIRESTFVEGQLPNPKPDALDNHGKCFAILKLYRPKVDNSAVGTSKKSDMAEVKDWKAVRVDLVIAPFEQFAYALLGWTGSGQFRRDTRRYAEEERDMLLDNHRLYDLKKGIFLSADSEEEIFGHLDLDYLEPWERNA

SEQ ID NO: 5049 - DNA, 1182 bp, synthetic construct
  misc_feature 1..1182: note = Variant of terminal deoxynucleotidyl transferase
  source 1..1182: mol_type = other DNA
atgcatcaccaccatcatcatgggggttctggtcatccggaaggtaataccccggagaaggaggtgccgagcgttatcgcccgtcatgttagtccgtacgcgtgccagcgcaagaccacgctgaataactacaacaaaaagttcaccgacgcgctggagatcatggccgagaactacaagtttaaagagaacctgcaggcgtgcctggaagccaagcgcgccgcgagtgtcctgaaaagcctgccgttcgaggttaccagcatgaaagacatccaaggtctgccgtgcattaccgacgacgtacgtcctgtgatcgaagagatcatcgaagtaggcgagagcagccgtgttaaagaaatcctcaatgacgagcgctacaaggcctttaagcagttcaccagcgtgttcggtgtgggcgtgaaaacctcggaaaagtggtaccgtatgggcctccgtacggttgaagaagcaaaggccagtaagtttctgaagctgagcaagatgcagaaggcgggcttcctgtattacgaggatctggcgagcggtgttagtaaagaagaagccgatgccgttacgctgatcgtgaaggaaacggtgcgcactgttagtccggatgcgctggtgaccatcgccggcggtttccgccgtggcaaacctatgggccacgacgttgacctgctgatcacgattccgggccgtcctactgatccggagctgctccacaaagtggttgatctgctcaagaagcaaggtctgctgctgtacgaagacatccgtgagagcacgttcgtgccacaacagctgccaaatcctaaacctgacgccctggacaaccatcagaagtgcttcgccattctcaagctgtaccgtccgaaggtggataacagtgcggttgggacgagtaagaaaagtgacatggctgaggttaaggattggaaagcggttcgtgtggatctggtggtcgctccagatgagcagttcgcctatgcgctgctcggttggacgggcagcggccaatttcgtcgcgatactcgtcgctatgcggaggaagagcgcgacatgctgctcgacaaccatcgtctctacgacctgaaaaagggcatctttctgagtgcggacagcgaagaagagattttcggtcatctggacctggattatctggagccgtgggaacgcaacgcg

SEQ ID NO: 5050 - protein, 394 aa, synthetic construct
  REGION 1..394: note = Variant of terminal deoxynucleotidyl transferase
MHHHHHHGGSGHPEGNTPEKEVPSVIARHVSPYACQRKTTLNNYNKKFTDALEIMAENYKFKENLQACLEAKRAASVLKSLPFEVTSMKDIQGLPCITDDVRPVIEEIIEVGESSRVKEILNDERYKAFKQFTSVFGVGVKTSEKWYRMGLRTVEEAKASKFLKLSKMQKAGFLYYEDLASGVSKEEADAVTLIVKETVRTVSPDALVTIAGGFRRGKPMGHDVDLLITIPGRPTDPELLHKVVDLLKKQGLLLYEDIRESTFVPQQLPNPKPDALDNHQKCFAILKLYRPKVDNSAVGTSKKSDMAEVKDWKAVRVDLVVAPDEQFAYALLGWTGSGQFRRDTRRYAEEERDMLLDNHRLYDLKKGIFLSADSEEEIFGHLDLDYLEPWERNA

SEQ ID NO: 5051 - DNA, 1182 bp, synthetic construct
  misc_feature 1..1182: note = Variant of terminal deoxynucleotidyl transferase
  source 1..1182: mol_type = other DNA
atgcatcaccaccatcatcatgggggttctggtcatccggaaggtaataccccggagaaggaggtgccgagcgttatcgcccgtcatgttagtcaatacgcgtgccagcgcaagaccacgctgaataactacaacaaaaagttcaccgacgcgctggagatcatggccgagaactacaagtttaaagagaacctgcaggcgtgcctggaagccaagcgcgccgcgagtgtcctgaaaagcctgccgttcgaggttaccagcatgaaagacatccaaggtctgccgtgcattaccgacgacgtacgtcctgtgatcgaagagatcatcgaagtaggcgagagcagccgtgttaaagaaatcctcaatgacgagcgctacaaggcctttaagcagttcaccagcgtgttcggtgtgggcgtgaaaacctcggaaaagtggtaccgtatgggcctccgtacgcgcgaagaagcaaaggccagtaagagtctgaagctgaacaagatgcagaaggcgggcttcctgtattacgaggatctggcgagcggtgttagtaaagaagaagccgatgccgttacgctcatcgtgaaggaaacggtgcgcactgttagtccggatgcgctggtgaccatcgccggcggtttccgccgtggcaaacctatgggccacgacgttgacctgctgatcacgattccgggccgtcctacggatgacgagctgctccacaaagtggttgatctgctcaagaagcaaggtctgctgctgtacgaagacatccgtgagagcacgttcgtggaggggcaactgccaaatcctaaacctgacgccctggacaaccatcagaagtgcttcgccattctcaagctgtaccgtccgaaggtggataacagtgcggttgggacgagtaagaaaagtgacatggctgaggttaaggattggaaagcggttcgtgtggatctggtggtcgctccagatgagcagttcgcctatgcgctgctcggttggacgggcagcggccaatttcgtcgcgatactcgtcgctacgcggaggaagagcgcgacatgctgctcgacaaccatcgtctctacgacctgaaaaagggcatctttctgagtgcggacagcgaagaagagattttcggtcatctggacctggattatctggagccgtgggaacgcaacgcg

SEQ ID NO: 5052 - protein, 394 aa, synthetic construct
  REGION 1..394: note = Variant of terminal deoxynucleotidyl transferase
MHHHHHHGGSGHPEGNTPEKEVPSVIARHVSQYACQRKTTLNNYNKKFTDALEIMAENYKFKENLQACLEAKRAASVLKSLPFEVTSMKDIQGLPCITDDVRPVIEEIIEVGESSRVKEILNDERYKAFKQFTSVFGVGVKTSEKWYRMGLRTREEAKASKSLKLNKMQKAGFLYYEDLASGVSKEEADAVTLIVKETVRTVSPDALVTIAGGFRRGKPMGHDVDLLITIPGRPTDDELLHKVVDLLKKQGLLLYEDIRESTFVEGQLPNPKPDALDNHQKCFAILKLYRPKVDNSAVGTSKKSDMAEVKDWKAVRVDLVVAPDEQFAYALLGWTGSGQFRRDTRRYAEEERDMLLDNHRLYDLKKGIFLSADSEEEIFGHLDLDYLEPWERNA

SEQ ID NO: 5053 - DNA, 1182 bp, synthetic construct
  misc_feature 1..1182: note = Variant of terminal deoxynucleotidyl transferase
  source 1..1182: mol_type = other DNA
atgcatcaccaccatcatcatgggggttctggtcatccggaaggtaataccccggagaaggaggtgccgagcgttatcgcccgtcatgttagtcagtacgcgtgccagcgcaagaccacgctgaataactacaacaaaaagttcaccgacgcgctggagatcatggccgagaactacaagtttaaagagaacctgcaggcgtgcctggaagccaagcgcgccgcgagtgtcctgaaaagcctgccgttcgaggttaccagcatgaaagacatccaaggtctgccgtgcattaccgacgacgtacgtcctgtgatcgaagagatcatcgaagtaggcgagagcagccgtgttaaagaaatcctcaatgacgagcgctacaaggcctttaagcagttcaccagcgtgttcggtgtgggcgtgaaaacctcggaaaagtggtaccgtatgggcctccgtacggttgaagaagcaaaggccagtaagcgcctgaagctgagcaagatgcagaaggcgggcttcctgtattacgaggatctggcgagcggtgttagtaaagaagaagccgatgccgttacgctgatcgtgaaggaaacggtgcgcactgttagtccggatgcgctggtgaccatcgccggcggtttccgccgtggcaaacctatgggccacgacgttgacctgctgatcacgattccgggccgtcctactgatccggagctgctccacaaagtggttgatctgctcaagaagcaaggtctgctgctgtacgaagacatccgtgagagcacgttcgtgccacaaatgctgccaaatcctaaacctgacgccctggacaaccatcagaagtgcttcgccattctcaagctgtaccgtccgaaggtggataacagtgcggttgggacgagtctgaaaagtgacatggctgaggttaaggattggaaagcggttcgtgtggatctggtggtcgctccagatgagcagttcgcctatgcgctgctcggttggacgggcagcggccaatttcgtcgcgatactcgtcgctatgcggaggaagagcgcgacatgctgctcgacaaccatcgtctctacgacctgaaaaagggcatctttctgagtgcggacagcgaagaagagattttcggtcatctggacctggattatctggagccgtgggaacgcaacgcg

SEQ ID NO: 5054 - protein, 394 aa, synthetic construct
  REGION 1..394: note = Variant of terminal deoxynucleotidyl transferase
MHHHHHHGGSGHPEGNTPEKEVPSVIARHVSQYACQRKTTLNNYNKKFTDALEIMAENYKFKENLQACLEAKRAASVLKSLPFEVTSMKDIQGLPCITDDVRPVIEEIIEVGESSRVKEILNDERYKAFKQFTSVFGVGVKTSEKWYRMGLRTVEEAKASKRLKLSKMQKAGFLYYEDLASGVSKEEADAVTLIVKETVRTVSPDALVTIAGGFRRGKPMGHDVDLLITIPGRPTDPELLHKVVDLLKKQGLLLYEDIRESTFVPQMLPNPKPDALDNHQKCFAILKLYRPKVDNSAVGTSLKSDMAEVKDWKAVRVDLVVAPDEQFAYALLGWTGSGQFRRDTRRYAEEERDMLLDNHRLYDLKKGIFLSADSEEEIFGHLDLDYLEPWERNA

SEQ ID NO: 5055 - DNA, 1182 bp, synthetic construct
  misc_feature 1..1182: note = Variant of terminal deoxynucleotidyl transferase
  source 1..1182: mol_type = other DNA
atgcatcaccaccatcatcatgggggttctggtcatccggaaggtaataccccggagaaggaggtgccgagcgttatcgcccgtcatgttagtcaatacgcgtgccagcgcaagaccacgctgaataactacaacaaaaagttcaccgacgcgctggagatcatggccgagaactacaagtttaaagagaacctgcaggcgtgcctggaagccaagcgcgccgcgagtgtcctgaaaagcctgccgttcgaggttaccagcatgaaagacatccaaggtctgccgtgcattaccgacgacgtacgtcctgtgatcgaagagatcatcgaagtaggcgagagcagccgtgttaaagaaatcctcaatgacgagcgctacaaggcctttaagcagttcaccagcgtgttcggtgtgggcgtgaaaacctcggaaaagtggtaccgtatgggcctccgtacggtagaagaagcaaaggccagtaagagtctgaagctgaacaagatgcagaaggcgggcttcctgtattacgaggatctggcgagcggtgttagtaaagaagaagccgatgccgttacgctcatcgtgaaggaaacggtgcgcactgttagtccggatgcgctggtgaccctggccggcggtttccgccgtggcaaacctatgggccacgacgttgacctgctgatcacgattccgggccgtcctacggatgacgagctgctccacaaagtggttgatctgctcaagaagcaaggtctgctgctgtacgaagacatccgtgagagcacgttcgtggaggggcaactgccaaatcctaaacctgacgccctggacaaccatcagaagtgcttcgccattctcaagctgtaccgtccgaaggtggataacagtgcggttgggacgagtaagaaaagtgacatggctgaggttaaggattggaaagcggttcgtgtggatctggtggtcgctccagatgagcagttcgcctatgcgctgctcggttggacgggcagcggccaatttcgtcgcgatactcgtcgctatgcggaggaagagcgcgacatgctgctcgacaaccatcgtctctacgacctgaaaaagggcatctttctgagtgcggacagcgaagaagagattttcggtcatctggacctggattatctggaaccgtgggaacgcaacgcg

SEQ ID NO: 5056 - protein, 394 aa, synthetic construct
  REGION 1..394: note = Variant of terminal deoxynucleotidyl transferase
MHHHHHHGGSGHPEGNTPEKEVPSVIARHVSQYACQRKTTLNNYNKKFTDALEIMAENYKFKENLQACLEAKRAASVLKSLPFEVTSMKDIQGLPCITDDVRPVIEEIIEVGESSRVKEILNDERYKAFKQFTSVFGVGVKTSEKWYRMGLRTVEEAKASKSLKLNKMQKAGFLYYEDLASGVSKEEADAVTLIVKETVRTVSPDALVTLAGGFRRGKPMGHDVDLLITIPGRPTDDELLHKVVDLLKKQGLLLYEDIRESTFVEGQLPNPKPDALDNHQKCFAILKLYRPKVDNSAVGTSKKSDMAEVKDWKAVRVDLVVAPDEQFAYALLGWTGSGQFRRDTRRYAEEERDMLLDNHRLYDLKKGIFLSADSEEEIFGHLDLDYLEPWERNA

SEQ ID NO: 5057 - DNA, 1182 bp, synthetic construct
  misc_feature 1..1182: note = Variant of terminal deoxynucleotidyl transferase
  source 1..1182: mol_type = other DNA
atgcatcaccaccatcatcatgggggttctggtcatccggaaggtaataccccggagaaggaggtgccgagcgttatcgcccgtcatgttagtccgtacgcgtgccagcgcaagaccacgctgaataactacaacaaaaagttcaccgacgcgctggagatcatggccgagaactacaagtttaaagagaacctgcaggcgtgcctggaagccaagcgcgccgcgagtgtcctgaaaagcctgccgttcgaggttaccagcatgaaagacatccaaggtctgccgtgcattaccgacgacgtacgtcctgtgatcgaagagatcatcgaagtaggcgagagcagccgtgttaaagaaatcctcaatgacgagcgctacaaggcctttaagcagttcaccagcgtgttcggtgtgggcgtgaaaacctcggaaaagtggtaccgtatgggcctccgtacggttgaagaagcaaaggccagtaagagtctgaagctgagcaagatgcagaaggcgggcttcctgtattacgaggatctggcgagcggtgttagtaaagaagaagccgatgccgttacgctgatcgtgaaggaaacggtgcgcactgttagtccggatgcgctggtgaccatcgccggcggtttccgccgtggcaaacctatgggccacgacgttgacctgctgatcacgattccgggccgtcctactgatgatgagctgctccacaaagtggttgatctgctcaagaagcaaggtctgctgctgtacgaagacatccgtgagagcacgttcgtggaggggcagctgccaaatcctaaacctgacgccctggacaaccatcagaagtgcttcgccattctcaagctgtaccgtccgaaggtggataacagtgcggttgggacgagtctgaaaagtgacatggctgaggttaaggattggaaagcggttcgtgtggatctggtggtcgctccagatgagcagttcgcctatgcgctgctcggttggacgggcagcggccaatttcgtcgcgatactcgtcgctatgcggaggaagagcgcgacatgctgctcgacaaccatcgtctctacgacctgaaaaagggcatctttctgagtgcggacagcgaagaagagattttcggtcatctggacctggattatctggagccgtgggaacgcaacgcg

SEQ ID NO: 5058 - protein, 394 aa, synthetic construct
  REGION 1..394: note = Variant of terminal deoxynucleotidyl transferase
MHHHHHHGGSGHPEGNTPEKEVPSVIARHVSPYACQRKTTLNNYNKKFTDALEIMAENYKFKENLQACLEAKRAASVLKSLPFEVTSMKDIQGLPCITDDVRPVIEEIIEVGESSRVKEILNDERYKAFKQFTSVFGVGVKTSEKWYRMGLRTVEEAKASKSLKLSKMQKAGFLYYEDLASGVSKEEADAVTLIVKETVRTVSPDALVTIAGGFRRGKPMGHDVDLLITIPGRPTDDELLHKVVDLLKKQGLLLYEDIRESTFVEGQLPNPKPDALDNHQKCFAILKLYRPKVDNSAVGTSLKSDMAEVKDWKAVRVDLVVAPDEQFAYALLGWTGSGQFRRDTRRYAEEERDMLLDNHRLYDLKKGIFLSADSEEEIFGHLDLDYLEPWERNA

SEQ ID NO: 5059 - DNA, 1182 bp, synthetic construct
  misc_feature 1..1182: note = Variant of terminal deoxynucleotidyl transferase
  source 1..1182: mol_type = other DNA
atgcatcaccaccatcatcatgggggttctggtcatccggaaggtaataccccggagaaggaggtgccgagcgttatcgcccgtcatgttagtcaatacgcgtgccagcgcaagaccacgctgaataactacaacaaaaagttcaccgacgcgctgaccatcatggccgagaactacaagtttaaagagaacctgcaggcgtgcctggaagccaagcgcgccgcgagtgtcctgaaaagcctgccgttcgaggttaccagcatgaaagacatccaaggtctgccgtgcattaccgacgacgtacgtcctgtgatcgaagagatcatcgaagtaggcgagagcagccgtgttaaagaaatcctcaatgacgagcgctacaaggcctttaagcagttcaccagcgtgttcggtgtgggcgtgaaaacctcggaaaagtggtaccgtatgggcctccgtacggttgaagaagcaaaggccagtaagagtatgaagctgagcaagatgcagaaggcgggcttcctgtattacgaggatctggcgagcggtgttagtaaagaagaagccgatgccgttacgctcatcgtgaaggaaacggtgcgccgcgttagtccggatgcgctggtgaccatcgccggcggtttccgccgtggcaaacctatgggccacgacgttgacctgctgatcacgattccgggccgtcctacggatgacgagctgctccacaaagtggttgatctgctcaagaagcaaggtctgctgctgtacgaagacatccgtgagagcacgttcgtggaggggcaactgccaaatcctaaacctgacgcactggacaaccatcagaagtgcttcgccattctcaagctgtaccgtccgaaggtggataacagtgcggttgggacgagtaagaaaagtgacatggctgaggttaaggattggaaagcggttcgtgtggatctggtggtcgcgccagatcatcagttcgccttcgcgctgctcggttggacgggcagcggccaatttcgtcgcgatactcgtcgctatgcggaggaagagcgcgacatgctgctcgacaaccatcgtctctacgacctgaaaaagggcatctttctgagtgcggacagcgaagaagagattttcggtcatctggacctggattatctggagccgtgggaacgcaacgcg

SEQ ID NO: 5060 - protein, 394 aa, synthetic construct
  REGION 1..394: note = Variant of terminal deoxynucleotidyl transferase
MHHHHHHGGSGHPEGNTPEKEVPSVIARHVSQYACQRKTTLNNYNKKFTDALTIMAENYKFKENLQACLEAKRAASVLKSLPFEVTSMKDIQGLPCITDDVRPVIEEIIEVGESSRVKEILNDERYKAFKQFTSVFGVGVKTSEKWYRMGLRTVEEAKASKSMKLSKMQKAGFLYYEDLASGVSKEEADAVTLIVKETVRRVSPDALVTIAGGFRRGKPMGHDVDLLITIPGRPTDDELLHKVVDLLKKQGLLLYEDIRESTFVEGQLPNPKPDALDNHQKCFAILKLYRPKVDNSAVGTSKKSDMAEVKDWKAVRVDLVVAPDHQFAFALLGWTGSGQFRRDTRRYAEEERDMLLDNHRLYDLKKGIFLSADSEEEIFGHLDLDYLEPWERNA

SEQ ID NO: 5061 - DNA, 1182 bp, synthetic construct
  misc_feature 1..1182: note = Variant of terminal deoxynucleotidyl transferase
  source 1..1182: mol_type = other DNA
atgcatcaccaccatcatcatgggggttctggtcatccggaaggtaataccccggagaaggaggtgccgagcgttatcgcccgtcatgttagtcaatacgcgtgccagcgcaagaccacgctgaataactacaacaaaaagttcaccgacgcgctggagatcatggccgagaactacaagtttaaagagaacctgcaggcgtgcctggaagccaagcgcgccgcgagtgtcctgaaaagcctgccgttcgaggttaccagcatgaaagacatccaaggtctgccgtgcattaccgacgacgtacgtcctgtgatcgaagagatcatcgaagtaggcgagagcagccgtgttaaagaaatcctcaatgacgagcgctacaaggcctttaagcagttcaccagcgtgttcggtgtgggcgtgaaaacctcggaaaagtggtaccgtatgggcctccgtacggttgaagaagcaaaggccagtaagagtctgaagctgaacaagatgcagaaggcgggcttcctgtattacgaggatctggcgagcggtgttagtaaagaagaagccgatgccgttacgctcatcgtgaaggaaacggtgcgcactgttagtccggatgcgctggtgaccatcgccggcggtttccgccgtggcaaacctatgggccacgacgttgacctgctgatcacgattccgggccgtcctacggatgacgagctgctccacaaagtggttgatctgctcaagaagcaaggtctgctgctgtacgaagacatccgtgagagcacgttcgtggaggggcaactgccaaatcctaaacctgacgccctggacaaccatcagaagtgcttcgccattctcaagctgtaccgtccgaaggtggataaccgtgcggttgggacgagtaagaaaagtgacatggctgaggttaaggattggaaagcggttcgtgtggatctggtggtcgctccagatgagcagttcgcctatgcgctgctcggttggacgggcagcggccaatttcgtcgcgatactcgtcgctacgcggaggaagagcgcgacatgctgctcgacaaccatcgtctctacgacctgaaaaagggcatctttctgagtgcggacagcgaagaagagattttcggtcatctggacctggattatctggagccgtgggaacgcaacgcg

SEQ ID NO: 5062 - protein, 394 aa, synthetic construct
  REGION 1..394: note = Variant of terminal deoxynucleotidyl transferase
MHHHHHHGGSGHPEGNTPEKEVPSVIARHVSQYACQRKTTLNNYNKKFTDALEIMAENYKFKENLQACLEAKRAASVLKSLPFEVTSMKDIQGLPCITDDVRPVIEEIIEVGESSRVKEILNDERYKAFKQFTSVFGVGVKTSEKWYRMGLRTVEEAKASKSLKLNKMQKAGFLYYEDLASGVSKEEADAVTLIVKETVRTVSPDALVTIAGGFRRGKPMGHDVDLLITIPGRPTDDELLHKVVDLLKKQGLLLYEDIRESTFVEGQLPNPKPDALDNHQKCFAILKLYRPKVDNRAVGTSKKSDMAEVKDWKAVRVDLVVAPDEQFAYALLGWTGSGQFRRDTRRYAEEERDMLLDNHRLYDLKKGIFLSADSEEEIFGHLDLDYLEPWERNA

SEQ ID NO: 5063 - DNA, 1182 bp, synthetic construct
  misc_feature 1..1182: note = Variant of terminal deoxynucleotidyl transferase
  source 1..1182: mol_type = other DNA
atgcatcaccaccatcatcatgggggttctggtcatccggaaggtaataccccggagaaggaggtgccgagcgttatcgcccgtcatgttagtccgtacgcgtgccagcgcaagaccacgctgaataactacaacaaaaagttcaccgacgcgctggagatcatggccgagaactacaagtttaaagagaacctgcaggcgtgcctggaagccaagcgcgccgcgagtgtcctgaaaagcctgccgttcgaggttaccagcatgaaagacatccaaggtctgccgtgcattaccgacgacgtacgtcctgtgatcgaagagatcatcgaagtaggcgagagcagccgtgttaaagaaatcctcaatgacgagcgctacaaggcctttaagcagttcaccagcgtgttcggtgtgggcgtgaaaacctcggaaaagtggtaccgtatgggcctccgtacggttgaagaagcaaaggccagtcgcagcctgaagctgagcaagatgcagaaggcgggcttcctgtattacgaggatctggcgagcggtgttagtaaagaagaagccgatgccgttacggctatcgtgaaggaaacggtgcgcactgttagtccggatgcgctggtgaccatcgccggcggtttccgccgtggcaaacctatgggccacgacgttgacctgctgatcacgattccgggccgtcctactgatccggagctgctccacaaagtggttgatctgctcaagaagcaaggtctgctgctgtacgaagacatccgtgagagcacgttcgtggaggggcagctgccaaatcctaaacctgacgccctggacaaccatcagaagtgcttcgccattctcaagctgtaccgtccgaaggtggataacagtgcggttgggacgagtaagaaaagtgacatggctgaggttaaggattggaaagcggttcgtgtggatctggtggtcgctccagatgagcagttcgcctatgcgctgctcggttggacgggcagcggccaatttcgtcgcgatactcgtcgctatgcggaggaagagcgcgacatgctgctcgacaaccatagcctctacgacctgaaaaagggcatctttctgagtgcggacagcgaagaagagattttcggtcatctggacctggattatctggagccgtgggaacgcaacgcg

SEQ ID NO: 5064 - protein, 394 aa, synthetic construct
  REGION 1..394: note = Variant of terminal deoxynucleotidyl transferase
MHHHHHHGGSGHPEGNTPEKEVPSVIARHVSPYACQRKTTLNNYNKKFTDALEIMAENYKFKENLQACLEAKRAASVLKSLPFEVTSMKDIQGLPCITDDVRPVIEEIIEVGESSRVKEILNDERYKAFKQFTSVFGVGVKTSEKWYRMGLRTVEEAKASRSLKLSKMQKAGFLYYEDLASGVSKEEADAVTAIVKETVRTVSPDALVTIAGGFRRGKPMGHDVDLLITIPGRPTDPELLHKVVDLLKKQGLLLYEDIRESTFVEGQLPNPKPDALDNHQKCFAILKLYRPKVDNSAVGTSKKSDMAEVKDWKAVRVDLVVAPDEQFAYALLGWTGSGQFRRDTRRYAEEERDMLLDNHSLYDLKKGIFLSADSEEEIFGHLDLDYLEPWERNA

SEQ ID NO: 5065 - DNA, 1182 bp, synthetic construct
  misc_feature 1..1182: note = Variant of terminal deoxynucleotidyl transferase
  source 1..1182: mol_type = other DNA
atgcatcaccaccatcatcatgggggttctggtcatccggaaggtaataccccggagaaggaggtgccgagcgttatcgcccgtcatgttagtcaatacgcgtgccagcgcaagaccacgctgaataactacaacaaaaagttcaccgacgcgctggaaatcatggccgagaactacaagtttaaagagaacctgcaggcgtgcctggaagccaagcgcgccgcgagtgtcctgaaaagcctgccgttcgaggttaccagcatgaaagacatccaaggtctgccgtgcattaccgacgacgtacgtcctgtgatcgaagagatcatcgaagtaggcgagagcagccgtgttaaagaaatcctcaatgacgagcgctacaaggcctttaagcagttcaccagcgtgttcggtgtgggcgtgaaaacctcggaaaagtggtaccgtatgggcctccgtacggttgaagaagcaaaggccagtaagagtctgaagctgagcaagatgcagaaggcgggcttcctgtattacgaggatctggcgagcggtgttagtaaagaagaagccgatgccgttacgctcatcgtgaaggaaacggtgcgcactgttagtccggatgcgctggtgaccatcgccggcggtttccgccgtggcaaacctatgggccacgacgttgacctgctgatcacgattccgggccgtcctacggatgacgagctgctccacaaagtggttgatctgctcaagaagcaaggtctgctgctgtacgaagacatccgtgagagcacgttcgtggaggggcaactgccaaatcctaaacctgacgccctggacaaccatcagaagtgcttcgccattctcaagctgtaccgtccgaaggtggataacagtgcggttgggacgagtaagaaaagtgacatggctgaggttaaggattggaaagcggttcgtgtggatctggtggtcgctccagatgagcagttcgcctatgcgctgctcggttggacgggcagcggccaatttcgtcgcgatactcgtcgctatgcggaggaagagcgcgacatgctgctcgacaaccatcgtctctacgacctgaaaaagggcatctttctgcgtgcggacagcgaagaagagattttcggtcatctggacctggattatctggagccgtgggaacgcaacgcg

SEQ ID NO: 5066 - protein, 394 aa, synthetic construct
  REGION 1..394: note = Variant of terminal deoxynucleotidyl transferase
MHHHHHHGGSGHPEGNTPEKEVPSVIARHVSQYACQRKTTLNNYNKKFTDALEIMAENYKFKENLQACLEAKRAASVLKSLPFEVTSMKDIQGLPCITDDVRPVIEEIIEVGESSRVKEILNDERYKAFKQFTSVFGVGVKTSEKWYRMGLRTVEEAKASKSLKLSKMQKAGFLYYEDLASGVSKEEADAVTLIVKETVRTVSPDALVTIAGGFRRGKPMGHDVDLLITIPGRPTDDELLHKVVDLLKKQGLLLYEDIRESTFVEGQLPNPKPDALDNHQKCFAILKLYRPKVDNSAVGTSKKSDMAEVKDWKAVRVDLVVAPDEQFAYALLGWTGSGQFRRDTRRYAEEERDMLLDNHRLYDLKKGIFLRADSEEEIFGHLDLDYLEPWERNA

SEQ ID NO: 5067 - DNA, 1182 bp, synthetic construct
  misc_feature 1..1182: note = Variant of terminal deoxynucleotidyl transferase
  source 1..1182: mol_type = other DNA
atgcatcaccaccatcatcatgggggttctggtcatccggaaggtaataccccggagaaggaggtgccgagcgttatcgcccgtcatgttagtcaatacgcgtgccagcgcaagaccacgctgaataactacaacaaaaagttcaccgacgcgctggagatcatggccgagaactacaagtttaaagagaacctgcaggcgtgcctggaagccaagcgcgccgcgagtgtcctgaaaagcctgccgttcgaggttaccagcatgaaagacatccaaggtctgccgtgcattaccgacgacgtacgtcctgtgatcgaagagatcatcgaagtaggcgagagcagccgtgttaaagaaatcctcaatgacgagcgctacaaggcctttaagcagttcaccagcgtgttcggtgtgggcgtgaaaacctcggaaaagtggtaccgtatgggcctccgtacgcgcgaagaagcaaaggccagtaagagtctgaagctgagcaagatgcagaaggcgggcttcctgtattacgaggatctggcgagcggtgttagtaaagaagaagccgatgccgttacgctcatcgtgaaggaaacggtgcgcactgttagtccggatgcgctggtgaccatcgccggcggtttccgccgtggcaaacctatgggccacgacgttgacctgctgatcacgattccgggccgtcctacggatgacgagctgctccacaaagtggttgatctgctcaagaagcaaggtctgctgctgtacgaagacatccgtgagagcacgttcgtggaggggcaactgccaaatcctaaacctgacgccctggacaaccatcagaagtgcttcgccattctcaagctgtaccgtccgaaggtggataacagtgcggttgggacgagtaagaaaagtgacatggctgaggttaaggattggaaagcggttcgtgtggatctggtggtcgctccagatgagcagttcgcctatgcgctgctcggttggacgggcagcggcatgtttcgtcgcgatactcgtcgctacgcggaggaagagcgcgacatgctgctcgacaaccatcgtctctacgacctgaaaaagggcatctttctgagtgcggacagcgaagaagagattttcggtcatctggacctggattatctggagccgtgggaacgcaacgcg

SEQ ID NO: 5068 - protein, 394 aa, synthetic construct
  REGION 1..394: note = Variant of terminal deoxynucleotidyl transferase
MHHHHHHGGSGHPEGNTPEKEVPSVIARHVSQYACQRKTTLNNYNKKFTDALEIMAENYKFKENLQACLEAKRAASVLKSLPFEVTSMKDIQGLPCITDDVRPVIEEIIEVGESSRVKEILNDERYKAFKQFTSVFGVGVKTSEKWYRMGLRTREEAKASKSLKLSKMQKAGFLYYEDLASGVSKEEADAVTLIVKETVRTVSPDALVTIAGGFRRGKPMGHDVDLLITIPGRPTDDELLHKVVDLLKKQGLLLYEDIRESTFVEGQLPNPKPDALDNHQKCFAILKLYRPKVDNSAVGTSKKSDMAEVKDWKAVRVDLVVAPDEQFAYALLGWTGSGMFRRDTRRYAEEERDMLLDNHRLYDLKKGIFLSADSEEEIFGHLDLDYLEPWERNA

SEQ ID NO: 5069 - DNA, 1182 bp, synthetic construct
  misc_feature 1..1182: note = Variant of terminal deoxynucleotidyl transferase
  source 1..1182: mol_type = other DNA
atgcatcaccaccatcatcatgggggttctggtcatccggaaggtaataccccggagaaggaggtgccgagcgttatcgcccgtcatgttagtcagtacgcgtgccagcgcaagaccacgctgaataactacaacaaaaagttcaccgacgcgctggagatcatggccgagaactacaagtttaaagagaacctgcaggcgtgcctggaagccaagcgcgccgcgagtgtcctgaaaagcctgccgttcgaggttaccagcatgaaagacatccaaggtctgccgtgcattaccgacgacgtacgtcctgtgatcgaagagatcatcgaagtaggcgagagcagccgtgttaaagaaatcctcaatgacgagcgctacaaggcctttaagcagttcaccagcgtgttcggtgtgggcgtgaaaacctcggaaaagtggtaccgtatgggcctccgtacggttgaagaagcaaaggccagtaagtttctgaagctgagcaagatgcagaaggcgggcttcctgtattacgaggatctggcgagcggtgttagtaaagaagaagccgatgccgttacggctatcgtgaaggaaacggtgcgcactgttagtccggatgcgctggtgaccatcgccggcggtttccgccgtggcaaacctatgggccacgacgttgacctgctgatcacgattccgaatcgtcctactgatgatgagctgctccacaaagtggttgatctgctcaagaagcaaggtctgctgctgtacgaagacatccgtgagagcacgttcgtggaggggatgctgccaaatcctaaacctgacgccctggacaaccatcagaagtgcttcgccattctcaagctgtaccgtccgaaggtggataacagtgcggttgggacgagtctgaaaagtgacatggctgaggttaaggattggaaagcggttcgtgtggatctggtggtcgctccagatgagcagttcgcctatgcgctgctcggttggacgggcagcggccaatttcgtcgcgatactcgtcgctatgcggaggaagagcgcgacatgctgctcgacaaccatagcctctacgacctgaaaaagggcatctttctgagtgcggacagcgaagaagagattttcggtcatctggacctggattatctggagccgtgggaacgcaacgcg

SEQ ID NO: 5070 - protein, 394 aa, synthetic construct
  REGION 1..394: note = Variant of terminal deoxynucleotidyl transferase
MHHHHHHGGSGHPEGNTPEKEVPSVIARHVSQYACQRKTTLNNYNKKFTDALEIMAENYKFKENLQACLEAKRAASVLKSLPFEVTSMKDIQGLPCITDDVRPVIEEIIEVGESSRVKEILNDERYKAFKQFTSVFGVGVKTSEKWYRMGLRTVEEAKASKFLKLSKMQKAGFLYYEDLASGVSKEEADAVTAIVKETVRTVSPDALVTIAGGFRRGKPMGHDVDLLITIPNRPTDDELLHKVVDLLKKQGLLLYEDIRESTFVEGMLPNPKPDALDNHQKCFAILKLYRPKVDNSAVGTSLKSDMAEVKDWKAVRVDLVVAPDEQFAYALLGWTGSGQFRRDTRRYAEEERDMLLDNHSLYDLKKGIFLSADSEEEIFGHLDLDYLEPWERNA

SEQ ID NO: 5071 - DNA, 1182 bp, synthetic construct
  misc_feature 1..1182: note = Variant of terminal deoxynucleotidyl transferase
  source 1..1182: mol_type = other DNA
atgcatcaccaccatcatcatgggggttctggtcatccggaaggtaataccccggagaaggaggtgccgagcgttatcgcccgtcatgttagtcaatacgcgtgccagcgcaagaccacgctgaataactacaacaaaaagttcaccgacgcgctggaaatcatggccgagaactacaagtttaaagagaacctgcaggcgtgcctggaagccaagcgcgccgcgagtgtcctgaaaagcctgccgttcgaggttaccagcatgaaagacatccaaggtctgccgtgcattaccgacgacgtacgtcctgtgatcgaagagatcatcgaagtaggcgagagcagccgtgttaaagaaatcctcaatgacgagcgctacaaggcctttaagcagttcaccagcgtgttcggtgtgggcgtgaaaacctcggaaaagtggtaccgtatgggcctccgtacggttgaagaagcaaaggccagtaagagtctgaagctgagcaagatgcagaaggcgggcttcctgtattacgaggatctggcgagcggtgttagtaaagaagaagccgatgccgttacgctcatcgtgaaggaaacggtgcgccgcgttagtccggatgcgctggtgaccatcgccggcggtttccgccgtggcaaacctatgggccacgacgttgacctgctgatcacgattccgggccgtcctacggatgacgagctgctccacaaagtggttgatctgctcaagaagcaaggtctgctgctgtacgaagacatccgtgagagcacgttcgtggaggggcaactgccaaatcctaaacctgacgccctggacaaccatcagaagtgcttcgccattctcaagctgtaccgtccgaaggtggataacagtgcggttgggacgagtaagaaaagtgacatggctgaggttaaggattggaaagcggttcgtgtggatctggtggtcgcgccagatgaacagttcgcctatgcgctgctcggttggacgggcagcggccaatttcgtcgcgatactcgtcgctatgcggaggaagagcgcgacatgctgctcgacaaccatcgtctctacgacctgaaaaagggcatctttctgcgtgcggacagcgaagaagagattttcggtcatctggacctggattatctggagccgtgggaacgcaacgcg

SEQ ID NO: 5072 - protein, 394 aa, synthetic construct
  REGION 1..394: note = Variant of terminal deoxynucleotidyl transferase
MHHHHHHGGSGHPEGNTPEKEVPSVIARHVSQYACQRKTTLNNYNKKFTDALEIMAENYKFKENLQACLEAKRAASVLKSLPFEVTSMKDIQGLPCITDDVRPVIEEIIEVGESSRVKEILNDERYKAFKQFTSVFGVGVKTSEKWYRMGLRTVEEAKASKSLKLSKMQKAGFLYYEDLASGVSKEEADAVTLIVKETVRRVSPDALVTIAGGFRRGKPMGHDVDLLITIPGRPTDDELLHKVVDLLKKQGLLLYEDIRESTFVEGQLPNPKPDALDNHQKCFAILKLYRPKVDNSAVGTSKKSDMAEVKDWKAVRVDLVVAPDEQFAYALLGWTGSGQFRRDTRRYAEEERDMLLDNHRLYDLKKGIFLRADSEEEIFGHLDLDYLEPWERNA

SEQ ID NO: 5073 - DNA, 1182 bp, synthetic construct
  misc_feature 1..1182: note = Variant of terminal deoxynucleotidyl transferase
  source 1..1182: mol_type = other DNA
atgcatcaccaccatcatcatgggggttctggtcatccggaaggtaataccccggagaaggaggtgccgagcgttatcgcccgtcatgttagtcaatacgcgtgccagcgcaagaccacgctgaataactacaacaaaaagttcaccgacgcgctggagatcatggccgagaactacaagtttaaagagaacctgcaggcgtgcctggaagccaagcgcgccgcgagtgtcctgaaaagcctgccgttcgaggttaccagcatgaaagacatccaaggtctgccgtgcattaccgacgacgtacgtcctgtgatcgaagagatcatcgaagtaggcgagagcagccgtgttaaagaaatcctcaatgacgagcgctacaaggcctttaagcagttcaccagcgtgttcggtgtgggcgtgaaaacctcggaaaagtggtaccgtatgggcctccgtacggttgaagaagcaaaggccagtaagagtctgaagctgaacaagatgcagaaggcgggcttcctgtattacgaggatctggcgagcggtgttagtaaagaagaagccgatgccgttacgctcatcgtgaaggaaacggtgcgcactgttagtccggatgcgctggtgaccatcgccggcggtttccgccgtggcaaacctatgggccacgacgttgacctgctgatcacgattccgggccgtcctacggatgacgagctgctccacaaagtggttgatctgctcaagaagcaaggtctgctgctgtacgaagacatccgtgagagcacgttcgtggaggggcaactgccaaatcctaaacctgacgccctggacaaccatcagaagtgcttcgccattctcaagctgtaccgtccgaaggtggataacagtgcggttgggacgagtaagaaaagtgacatggctgaggttaaggattggaaagcggttcgtgtggatctggtggtcgctccagatgagcagttcgcctatgcgctgctcggttggacgggcagcggccaatttcgtcgcgatactcgttggttcgcggaggaagagcgcgacatgctgctcgacaaccatcgtctctacgacctgaaaaagggcatctttctgagtgcggacagcgaagaagagattttcggtcatctggacctggattatctggagccgtgggaacgcaacgcg

SEQ ID NO: 5074 - protein, 394 aa, synthetic construct
  REGION 1..394: note = Variant of terminal deoxynucleotidyl transferase
MHHHHHHGGSGHPEGNTPEKEVPSVIARHVSQYACQRKTTLNNYNKKFTDALEIMAENYKFKENLQACLEAKRAASVLKSLPFEVTSMKDIQGLPCITDDVRPVIEEIIEVGESSRVKEILNDERYKAFKQFTSVFGVGVKTSEKWYRMGLRTVEEAKASKSLKLNKMQKAGFLYYEDLASGVSKEEADAVTLIVKETVRTVSPDALVTIAGGFRRGKPMGHDVDLLITIPGRPTDDELLHKVVDLLKKQGLLLYEDIRESTFVEGQLPNPKPDALDNHQKCFAILKLYRPKVDNSAVGTSKKSDMAEVKDWKAVRVDLVVAPDEQFAYALLGWTGSGQFRRDTRWFAEEERDMLLDNHRLYDLKKGIFLSADSEEEIFGHLDLDYLEPWERNA

SEQ ID NO: 5075 - DNA, 1182 bp, synthetic construct
  misc_feature 1..1182: note = Variant of terminal deoxynucleotidyl transferase
  source 1..1182: mol_type = other DNA
atgcatcaccaccatcatcatgggggttctggtcatccggaaggtaataccccggagaaggaggtgccgagcgttatcgcccgtcatgttagtcaatacgcgtgccagcgcaagaccacgctgaataactacaacaaaaagttcaccgacgcgctggagatcatggccgagaactacaagtttaaagagaacctgcaggcgtgcctggaagccaagcgcgccgcgagtgtcctgaaaagcctgccgttcgaggttaccagcatgaaagacatccaaggtctgccgtgcattaccgacgacgtacgtcctgtgatcgaagagatcatcgaagtaggcgagagcagccgtgttaaagaaatcctcaatgacgagcgctacaaggcctttaagcagttcaccagcgtgttcggtgtgggcgtgaaaacctcggaaaagtggtaccgtatgggcctccgtacgcgcgaagaagcaaaggccagtaagagtctgaagctgaccaagatgcagaaggcgggcttcctgtattacgaggatctggcgagcggtgttagtaaagaagaagccgatgccgttacgctcatcgtgaaggaaacggtgcgcactgttagtccggatgcgctggtgaccctggccggcggtttccgccgtggcaaacctatgggccacgacgttgacctgctgatcacgattccgggccgtcctacggatgacgagctgctccacaaagtggttgatctgctcaagaagcaaggtctgctgctgtacgaagacatccgtgagagcacgttcgtggaggggcaactgccaaatcctaaacctgacgccctggacaaccatcagaagtgcttcgccattctcaagctgtaccgtccgaaggtggataaccgtgcggttgggacgagtaagaaaagtgacatggctgaggttaaggattggaaagcggttcgtgtggatctggtggtcgctccagatgagcagttcgcctatgcgctgctcggttggacgggcagcggccagtttcgtcgcgatactcgtcgctatgcggaggaagagcgcgacatgctgctcgacaaccatcgtctctacgacctgaaaaagggcatctttctgagtgcggacagcgaagaagagattttcggtcatctggacctggattatctggaaccgtgggaacgcaacgcg

SEQ ID NO: 5076 - protein, 394 aa, synthetic construct
  REGION 1..394: note = Variant of terminal deoxynucleotidyl transferase
MHHHHHHGGSGHPEGNTPEKEVPSVIARHVSQYACQRKTTLNNYNKKFTDALEIMAENYKFKENLQACLEAKRAASVLKSLPFEVTSMKDIQGLPCITDDVRPVIEEIIEVGESSRVKEILNDERYKAFKQFTSVFGVGVKTSEKWYRMGLRTREEAKASKSLKLTKMQKAGFLYYEDLASGVSKEEADAVTLIVKETVRTVSPDALVTLAGGFRRGKPMGHDVDLLITIPGRPTDDELLHKVVDLLKKQGLLLYEDIRESTFVEGQLPNPKPDALDNHQKCFAILKLYRPKVDNRAVGTSKKSDMAEVKDWKAVRVDLVVAPDEQFAYALLGWTGSGQFRRDTRRYAEEERDMLLDNHRLYDLKKGIFLSADSEEEIFGHLDLDYLEPWERNA

SEQ ID NO: 5077 - DNA, 1182 bp, synthetic construct
  misc_feature 1..1182: note = Variant of terminal deoxynucleotidyl transferase
  source 1..1182: mol_type = other DNA
atgcatcaccaccatcatcatgggggttctggtcatccggaaggtaataccccggagaaggaggtgccgagcgttatcgcccgtcatgttagtcaatacgcgtgccagcgcaagaccacgctgaataactacaacaaaaagttcaccgacgcgctggagatcatggccgagaactacaagtttaaagagaacctgcaggcgtgcctggaagccaagcgcgccgcgagtgtcctgaaaagcctgccgttcgaggttaccagcatgaaagacatccaaggtctgccgtgcattaccgacgacgtacgtcctgtgatcgaagagatcatcgaagtaggcgagagcagccgtgttaaagaaatcctcaatgacgagcgctacaaggcctttaagcagttcaccagcgtgttcggtgtgggcgtgaaaacctcggaaaagtggtaccgtatgggcctccgtacggttgaagaagcaaaggccagtaagtttctgaagctgagcaagatgcagaaggcgggcttcctgtattacgaggatctggcgagcggtgttagtaaagaagaagccgatgccgttacgctgatcgtgaaggaaacggtgcgcactgttagtccggatgcgctggtgaccatcgccggcggtttccgccgtggcaaacctatgggccacgacgttgacctgctgatcacgattccgggccgtcctacggatgacgagctgctccacaaagtggttgatctgctcaagaagcaaggtctgctgctgtacgaagacatccgtgagagcacgttcgtggaggggatgctgccaaatcctaaacctgacgccctggacaaccatcagaagtgcttcgccattctcaagctgtaccgtccgaaggtggataacagtgcggttgggacgagtaagaaaagtgacatggctgaggttaaggattggaaagcggttcgtgtggatctggtggtcgctccagatgagcagttcgcctatgcgctgctcggttggacgggcagcggccaatttcgtcgcgatactcgtcgctatgcggaggaagagcgcgacatgctgctcgacaaccatagcctctacgacctgaaaaagggcatctttctgagtgcggacagcgaagaagagattttcggtcatctggacctggattatctggagccgtgggaacgcaacgcg

SEQ ID NO: 5078 - protein, 394 aa, synthetic construct
  REGION 1..394: note = Variant of terminal deoxynucleotidyl transferase
MHHHHHHGGSGHPEGNTPEKEVPSVIARHVSQYACQRKTTLNNYNKKFTDALEIMAENYKFKENLQACLEAKRAASVLKSLPFEVTSMKDIQGLPCITDDVRPVIEEIIEVGESSRVKEILNDERYKAFKQFTSVFGVGVKTSEKWYRMGLRTVEEAKASKFLKLSKMQKAGFLYYEDLASGVSKEEADAVTLIVKETVRTVSPDALVTIAGGFRRGKPMGHDVDLLITIPGRPTDDELLHKVVDLLKKQGLLLYEDIRESTFVEGMLPNPKPDALDNHQKCFAILKLYRPKVDNSAVGTSKKSDMAEVKDWKAVRVDLVVAPDEQFAYALLGWTGSGQFRRDTRRYAEEERDMLLDNHSLYDLKKGIFLSADSEEEIFGHLDLDYLEPWERNA

SEQ ID NO: 5079 - DNA, 1182 bp, synthetic construct
  misc_feature 1..1182: note = Variant of terminal deoxynucleotidyl transferase
  source 1..1182: mol_type = other DNA
atgcatcaccaccatcatcatgggggttctggtcatccggaaggtaataccccggagaaggaggtgccgagcgttatcgcccgtcatgttagtccgtacgcgtgccagcgcaagaccacgctgaataactacaacaaaaagttcaccgacgcgctggagatcatggccgagaactacaagtttaaagagaacctgcaggcgtgcctggaagccaagcgcgccgcgagtgtcctgaaaagcctgccgttcgaggttaccagcatgaaagacatccaaggtctgccgtgcattaccgacgacgtacgtcctgtgatcgaagagatcatcgaagtaggcgagagcagccgtgttaaagaaatcctcaatgacgagcgctacaaggcctttaagcagttcaccagcgtgttcggtgtgggcgtgaaaacctcggaaaagtggtaccgtatgggcctccgtacggttgaagaagcaaaggccagtaagagcctgaagctgagcaagatgcagaaggcgggcttcctgtattacgaggatctggcgagcggtgttagtaaagaagaagccgatgccgttacgctcatcgtgaaggaaacggtgcgcactgttagtccggatgcgctggtgaccatcgccggcggtttccgccgtggcaaacctatgggccacgacgttgacctgctgatcacgattccgggccgtcctacggatgacgagctgctccacaaagtggttgatctgctcaagaagcaaggtctgctgctgtacgaagacatccgtgagagcacgttcgtggaggggcaactgccaaatcctaaacctgacgccctggacaaccatcagaagtgcttcgccattctcaagctgtaccgtccgaaggtggataacagtgcggttgggacgagtaagaaaagtgacatggctgaggttaaggattggaaagcggttcgtgtggatctggtggtcgctccagatgagcagttcgcctatgcgctgctcggttggacgggcagcggccaatttcgtcgcgatactcgtcgctatgcggaggaagagcgcgacatgctgctcgacaaccatcgtctctacgacctgaaaaagggcatctttctgagtgcggacagcgaagaagagattttcggtcatctggacctggattatctggagccgtgggaacgcaacgcg

SEQ ID NO: 5080 - protein, 394 aa, synthetic construct
  REGION 1..394: note = Variant of terminal deoxynucleotidyl transferase
MHHHHHHGGSGHPEGNTPEKEVPSVIARHVSPYACQRKTTLNNYNKKFTDALEIMAENYKFKENLQACLEAKRAASVLKSLPFEVTSMKDIQGLPCITDDVRPVIEEIIEVGESSRVKEILNDERYKAFKQFTSVFGVGVKTSEKWYRMGLRTVEEAKASKSLKLSKMQKAGFLYYEDLASGVSKEEADAVTLIVKETVRTVSPDALVTIAGGFRRGKPMGHDVDLLITIPGRPTDDELLHKVVDLLKKQGLLLYEDIRESTFVEGQLPNPKPDALDNHQKCFAILKLYRPKVDNSAVGTSKKSDMAEVKDWKAVRVDLVVAPDEQFAYALLGWTGSGQFRRDTRRYAEEERDMLLDNHRLYDLKKGIFLSADSEEEIFGHLDLDYLEPWERNA

SEQ ID NO: 5081 - DNA, 1182 bp, synthetic construct
  misc_feature 1..1182: note = Variant of terminal deoxynucleotidyl transferase
  source 1..1182: mol_type = other DNA
atgcatcaccaccatcatcatgggggttctggtcatccggaaggtaataccccggagaaggaggtgccgagcgttatcgcccgtcatgttagtcaatacgcgtgccagcgcaagaccacgctgaataactacaacaaaaagttcaccgacgcgctggagatcatggccgagaactacaagtttaaagagaacctgcaggcgtgcctggaagccaagcgcgccgcgagtgtcctgaaaagcctgccgttcgaggttaccagcatgaaagacatccaaggtctgccgtgcattaccgacgacgtacgtcctgtgatcgaagagatcatcgaagtaggcgagagcagccgtgttaaagaaatcctcaatgacgagcgctacaaggcctttaagcagttcaccagcgtgttcggtgtgggcgtgaaaacctcggaaaagtggtaccgtatgggcctccgtacggtagaagaagcaaaggccagtaagagtctgaagctgagcaagatgcagaaggcgggcttcctgtattacgaggatctggcgagcggtgttagtaaagaagaagccgatgccgttacgctcatcgtgaaggaaacggtgcgcactgttagtccggatgcgctggtgaccctggccggcggtttccgccgtggcaaacctatgggccacgacgttgacctgctgatcacgattccgggccgtcctacggatgacgagctgctccacaaagtggttgatctgctcaagaagcaaggtctgctgctgtacgaagacatccgtgagagcacgttcgtggaggggcaactgccaaatcctaaacctgacgccctggacaaccatcagaagtgcttcgccattctcaagctgtaccgtccgaaggtggataacagtgcggttgggacgagtaagaaaagtgacatggctgaggttaaggattggaaagcggttcgtgtggatctggtggtcgctccagatgagcagttcgcctatgcgctgctcggttggacgggcagcggcatgtttcgtcgcgatactcgtcgctatgcggaggaagagcgcgacatgctgctcgacaaccatcgtctctacgacctgaaaaagggcatctttctgagtgcggacagcgaagaagagattttcggtcatctggacctggattatctggaaccgtgggaacgcaacgcg

SEQ ID NO: 5082 - protein, 394 aa, synthetic construct
  REGION 1..394: note = Variant of terminal deoxynucleotidyl transferase
MHHHHHHGGSGHPEGNTPEKEVPSVIARHVSQYACQRKTTLNNYNKKFTDALEIMAENYKFKENLQACLEAKRAASVLKSLPFEVTSMKDIQGLPCITDDVRPVIEEIIEVGESSRVKEILNDERYKAFKQFTSVFGVGVKTSEKWYRMGLRTVEEAKASKSLKLSKMQKAGFLYYEDLASGVSKEEADAVTLIVKETVRTVSPDALVTLAGGFRRGKPMGHDVDLLITIPGRPTDDELLHKVVDLLKKQGLLLYEDIRESTFVEGQLPNPKPDALDNHQKCFAILKLYRPKVDNSAVGTSKKSDMAEVKDWKAVRVDLVVAPDEQFAYALLGWTGSGMFRRDTRRYAEEERDMLLDNHRLYDLKKGIFLSADSEEEIFGHLDLDYLEPWERNA

SEQ ID NO: 5083 - DNA, 1182 bp, synthetic construct
  misc_feature 1..1182: note = Variant of terminal deoxynucleotidyl transferase
  source 1..1182: mol_type = other DNA
atgcatcaccaccatcatcatgggggttctggtcatccggaaggtaataccccggagaaggaggtgccgagcgttatcgcccgtcatgttagtcaatacgcgtgccagcgcaagaccacgctgaataactacaacaaaaagttcaccgacgcgctgaccatcatggccgagaactacaagtttaaagagaacctgcaggcgtgcctggaagccaagcgcgccgcgagtgtcctgaaaagcctgccgttcgaggttaccagcatgaaagacatccaaggtctgccgtgcattaccgacgacgtacgtcctgtgatcgaagagatcatcgaagtaggcgagagcagccgtgttaaagaaatcctcaatgacgagcgctacaaggcctttaagcagttcaccagcgtgttcggtgtgggcgtgaaaacctcggaaaagtggtaccgtatgggcctccgtacggttgaagaagcaaaggccagtaagagtctgaagctgagcaagatgcagaaggcgggcttcctgtattacgaggatctggcgagcggtgttagtaaagaagaagccgatgccgttacgctcatcgtgaaggaaacggtgcgccgcgttagtccggatgcgctggtgaccatcgccggcggtttccgccgtggcaaacctatgggccacgacgttgacctgctgatcacgattccgggccgtcctacggatgacgagctgctccacaaagtggttgatctgctcaagaagcaaggtctgctgctgtacgaagacatccgtgagagcacgttcgtggaggggcaactgccaaatcctaaacctgacgccctggacaaccatcagaagtgcttcgccattctcaagctgtaccgtccgaaggtggataacagtgcggttgggacgagtaagaaaagtgacatggctgaggttaaggattggaaagcggttcgtgtggatctggtggtcgctccagatgagcagttcgcctatgcgctgctcggttggacgggcagcggccaatttcgtcgcgatactcgtcgctatgcggaggaagagcgcgacatgctgctcgacaaccatcgtctctacgacctgaaaaagggcatctttctgagtgcggacagcgaagaagagattttcggtcatctggacctggattatctggagccgtgggaacgcaacgcg

SEQ ID NO: 5084 - protein, 394 aa, synthetic construct
  REGION 1..394: note = Variant of terminal deoxynucleotidyl transferase
MHHHHHHGGSGHPEGNTPEKEVPSVIARHVSQYACQRKTTLNNYNKKFTDALTIMAENYKFKENLQACLEAKRAASVLKSLPFEVTSMKDIQGLPCITDDVRPVIEEIIEVGESSRVKEILNDERYKAFKQFTSVFGVGVKTSEKWYRMGLRTVEEAKASKSLKLSKMQKAGFLYYEDLASGVSKEEADAVTLIVKETVRRVSPDALVTIAGGFRRGKPMGHDVDLLITIPGRPTDDELLHKVVDLLKKQGLLLYEDIRESTFVEGQLPNPKPDALDNHQKCFAILKLYRPKVDNSAVGTSKKSDMAEVKDWKAVRVDLVVAPDEQFAYALLGWTGSGQFRRDTRRYAEEERDMLLDNHRLYDLKKGIFLSADSEEEIFGHLDLDYLEPWERNA

SEQ ID NO: 5085 - DNA, 1182 bp, synthetic construct
  misc_feature 1..1182: note = Variant of terminal deoxynucleotidyl transferase
  source 1..1182: mol_type = other DNA
atgcatcaccaccatcatcatgggggttctggtcatccggaaggtaataccccggagaaggaggtgccgagcgttatcgcccgtcatgttagtcaatacgcgtgccagcgcaagaccacgctgaataactacaacaaaaagttcaccgacgcgctggagatcatggccgagaactacaagtttaaagagaacctgcaggcgtgcctggaagccaagcgcgccgcgagtgtcctgaaaagcctgccgttcgaggttaccagcatgaaagacatccaaggtctgccgtgcattaccgacgacgtacgtcctgtgatcgaagagatcatcgaagtaggcgagagcagccgtgttaaagaaatcctcaatgacgagcgctacaaggcctttaagcagttcaccagcgtgttcggtgtgggcgtgaaaacctcggaaaagtggtaccgtatgggcctccgtacggttgaagaagcaaaggccagtggctttctgaagctgagcaagatgcagaaggcgggcttcctgtattacgaggatctggcgagcggtgttagtaaagaagaagccgatgccgttacgctgatcgtgaaggaaacggtgcgcactgttagtccggatgcgctggtgaccatcgccggcggtttccgccgtggcaaacctatgggccacgacgttgacctgctgatcacgattccgggccgtcctacggatgacgagctgctccacaaagtggttgatctgctcaagaagcaaggtctgctgctgtacgaagacatccgtgagagcacgttcgtggaggggcaactgccaaatcctaaacctgacgccctggacaaccatcagaagtgcttcgccattctcaagctgtaccgtccgaaggtggataacagtgcggttgggacgagtaagaaaagtgacatggctgaggttaaggattggaaagcggttcgtgtggatctggtggtcgctccagatgagcagttcgcctatgcgctgctcggttggacgggcagcggccaatttcgtcgcgatactcgtcgctatgcggaggaagagcgcgacatgctgctcgacaaccatcgcctctacgacctgaaaaagggcatctttctgagtgcggacagcgaagaagagattttcggtcatctggacctggattatctggagccgtgggaacgcaacgcg

SEQ ID NO: 5086 - protein, 394 aa, synthetic construct
  REGION 1..394: note = Variant of terminal deoxynucleotidyl transferase
MHHHHHHGGSGHPEGNTPEKEVPSVIARHVSQYACQRKTTLNNYNKKFTDALEIMAENYKFKENLQACLEAKRAASVLKSLPFEVTSMKDIQGLPCITDDVRPVIEEIIEVGESSRVKEILNDERYKAFKQFTSVFGVGVKTSEKWYRMGLRTVEEAKASGFLKLSKMQKAGFLYYEDLASGVSKEEADAVTLIVKETVRTVSPDALVTIAGGFRRGKPMGHDVDLLITIPGRPTDDELLHKVVDLLKKQGLLLYEDIRESTFVEGQLPNPKPDALDNHQKCFAILKLYRPKVDNSAVGTSKKSDMAEVKDWKAVRVDLVVAPDEQFAYALLGWTGSGQFRRDTRRYAEEERDMLLDNHRLYDLKKGIFLSADSEEEIFGHLDLDYLEPWERNA

SEQ ID NO: 5087 - DNA, 1182 bp, synthetic construct
  misc_feature 1..1182: note = Variant of terminal deoxynucleotidyl transferase
  source 1..1182: mol_type = other DNA
atgcatcaccaccatcatcatgggggttctggtcatccggaaggtaataccccggagaaggaggtgccgagcgttatcgcccgtcatgttagtcagtacgcgtgccagcgcaagaccacgctgaataactacaacaaaaagttcaccgacgcgctggagatcatggccgagaactacaagtttaaagagaacctgcaggcgtgcctggaagccaagcgcgccgcgagtgtcctgaaaagcctgccgttcgaggttaccagcatgaaagacatccaaggtctgccgtgcattaccgacgacgtacgtcctgtgatcgaagagatcatcgaagtaggcgagagcagccgtgttaaagaaatcctcaatgacgagcgctacaaggcctttaagcagttcaccagcgtgttcggtgtgggcgtgaaaacctcggaaaagtggtaccgtatgggcctccgtacggttgaagaagcaaaggccagtaagagcctgaagctgagcaagatgcagaaggcgggcttcctgtattacgaggatctggcgagcggtgttagtaaagaagaagccgatgccgttacgctcatcgtgaaggaaacggtgcgcactgttagtccggatgcgctggtgaccatcgccggcggtttccgccgtggcaaacctatgggccacgacgttgacctgctgatcacgattccgggccgtcctactgatccggagctgctccacaaagtggttgatctgctcaagaagcaaggtctgctgctgtacgaagacatccgtgagagcacgttcgtgccagggcagctgccaaatcctaaacctgacgccctggacaaccatcagaagtgcttcgccattctcaagctgtaccgtccgaaggtggataacagtgcggttgggacgagtaagaaaagtgacatggctgaggttaaggattggaaagcggttcgtgtggatctggtggtcgctccagatgagcagttcgcctatgcgctgctcggttggacgggcagcggccaatttcgtcgcgatactcgtcgctatgcggaggaagagcgcgacatgctgctcgacaaccatcgtctctacgacctgaaaaagggcatctttctgagtgcggacagcgaagaagagattttcggtcatctggacctggattatctggagccgtgggaacgcaacgcg

SEQ ID NO: 5088 - protein, 394 aa, synthetic construct
  REGION 1..394: note = Variant of terminal deoxynucleotidyl transferase
MHHHHHHGGSGHPEGNTPEKEVPSVIARHVSQYACQRKTTLNNYNKKFTDALEIMAENYKFKENLQACLEAKRAASVLKSLPFEVTSMKDIQGLPCITDDVRPVIEEIIEVGESSRVKEILNDERYKAFKQFTSVFGVGVKTSEKWYRMGLRTVEEAKASKSLKLSKMQKAGFLYYEDLASGVSKEEADAVTLIVKETVRTVSPDALVTIAGGFRRGKPMGHDVDLLITIPGRPTDPELLHKVVDLLKKQGLLLYEDIRESTFVPGQLPNPKPDALDNHQKCFAILKLYRPKVDNSAVGTSKKSDMAEVKDWKAVRVDLVVAPDEQFAYALLGWTGSGQFRRDTRRYAEEERDMLLDNHRLYDLKKGIFLSADSEEEIFGHLDLDYLEPWERNA

SEQ ID NO: 5089 - DNA, 1182 bp, synthetic construct
  misc_feature 1..1182: note = Variant of terminal deoxynucleotidyl transferase
  source 1..1182: mol_type = other DNA
atgcatcaccaccatcatcatgggggttctggtcatccggaaggtaataccccggagaaggaggtgccgagcgttatcgcccgtcatgttagtccgtacgcgtgccagcgcaagaccacgctgaataactacaacaaaaagttcaccgacgcgctggagatcatggccgagaactacaagtttaaagagaacctgcaggcgtgcctggaagccaagcgcgccgcgagtgtcctgaaaagcctgccgttcgaggttaccagcatgaaagacatccaaggtctgccgtgcattaccgacgacgtacgtcctgtgatcgaagagatcatcgaagtaggcgagagcagccgtgttaaagaaatcctcaatgacgagcgctacaaggcctttaagcagttcaccagcgtgttcggtgtgggcgtgaaaacctcggaaaagtggtaccgtatgggcctccgtacggttgaagaagcaaaggccagtaagtttctgaagctgagcaagatgcagaaggcgggcttcctgtattacgaggatctggcgagcggtgttagtaaagaagaagccgatgccgttacgctgatcgtgaaggaaacggtgcgcactgttagtccggatgcgctggtgaccatcgccggcggtttccgccgtggcaaacctatgggccacgacgttgacctgctgatcacgattccgggccgtcctactgatgatgagctgctccacaaagtggttgatctgctcaagaagcaaggtctgctgctgtacgaagacatccgtgagagcacgttcgtggaggggcaactgccaaatcctaaacctgacgccctggacaaccatcagaagtgcttcgccattctcaagctgtaccgtccgaaggtggataacagtgcggttgggacgagtctgaaaagtgacatggctgaggttaaggattggaaagcggttcgtgtggatctggtggtcgctccagatgagcagttcgcctatgcgctgctcggttggacgggcagcggccaatttcgtcgcgatactcgtcgctatgcggaggaagagcgcgacatgctgctcgacaaccatcgtctctacgacctgaaaaagggcatctttctgagtgcggacagcgaagaagagattttcggtcatctggacctggattatctggagccgtgggaacgcaacgcg

SEQ ID NO: 5090 - protein, 394 aa, synthetic construct
  REGION 1..394: note = Variant of terminal deoxynucleotidyl transferase
MHHHHHHGGSGHPEGNTPEKEVPSVIARHVSPYACQRKTTLNNYNKKFTDALEIMAENYKFKENLQACLEAKRAASVLKSLPFEVTSMKDIQGLPCITDDVRPVIEEIIEVGESSRVKEILNDERYKAFKQFTSVFGVGVKTSEKWYRMGLRTVEEAKASKFLKLSKMQKAGFLYYEDLASGVSKEEADAVTLIVKETVRTVSPDALVTIAGGFRRGKPMGHDVDLLITIPGRPTDDELLHKVVDLLKKQGLLLYEDIRESTFVEGQLPNPKPDALDNHQKCFAILKLYRPKVDNSAVGTSLKSDMAEVKDWKAVRVDLVVAPDEQFAYALLGWTGSGQFRRDTRRYAEEERDMLLDNHRLYDLKKGIFLSADSEEEIFGHLDLDYLEPWERNA

SEQ ID NO: 5091 - DNA, 1182 bp, synthetic construct
  misc_feature 1..1182: note = Variant of terminal deoxynucleotidyl transferase
  source 1..1182: mol_type = other DNA
atgcatcaccaccatcatcatgggggttctggtcatccggaaggtaataccccggagaaggaggtgccgagcgttatcgcccgtcatgttagtcaatacgcgtgccagcgcaagaccacgctgaataactacaacaaaaagttcaccgacgcgctggagatcatggccgagaactacaagtttaaagagaacctgcaggcgtgcctggaagccaagcgcgccgcgagtgtcctgaaaagcctgccgttcgaggttaccagcatgaaagacatccaaggtctgccgtgcattaccgacgacgtacgtcctgtgatcgaagagatcatcgaagtaggcgagagcagccgtgttaaagaaatcctcaatgacgagcgctacaaggcctttaagcagttcaccagcgtgttcggtgtgggcgtgaaaacctcggaaaagtggtaccgtatgggcctccgtacgcgcgaagaagcaaaggccagtaagagtctgaagctgagcaagatgcagaaggcgggcttcctgtattacgaggatctggcgagcggtgttagtaaagaagaagccgatgccgttacgctcatcgtgaaggaaacggtgcgcactgttagtccggatgcgctggtgaccatcgccggcggtttccgccgtggcaaacctatgggccacgacgttgacctgctgatcacgattccgggccgtcctacggatgacgagctgctccacaaagtggttgatctgctcaagaagcaaggtctgctgctgtacgaagacatccgtgagagcacgttcgtggaggggcaactgccaaatcctaaacctgacgccctggacaaccatcagaagtgcttcgccattctcaagctgtaccgtccgaaggtggataacagtgcggttgggacgagtaagaaaagtgacatggctgaggttaaggattggaaagcggttcgtgtggatctggtggtcgctccagatgagcagttcgcctatgcgctgctcggttggacgggcagcggccaatttcgtcgcgatactcgtcgctatgcggaggaagagcgcgacatgctgctcgacaaccatcgtctctacgacctgaaaaagggcatctttctgagtgcggacagcgaagaagagattttcggtcatctggacctggattatctggaaccgtgggaacgcaacgcg

SEQ ID NO: 5092 - protein, 394 aa, synthetic construct
  REGION 1..394: note = Variant of terminal deoxynucleotidyl transferase
MHHHHHHGGSGHPEGNTPEKEVPSVIARHVSQYACQRKTTLNNYNKKFTDALEIMAENYKFKENLQACLEAKRAASVLKSLPFEVTSMKDIQGLPCITDDVRPVIEEIIEVGESSRVKEILNDERYKAFKQFTSVFGVGVKTSEKWYRMGLRTREEAKASKSLKLSKMQKAGFLYYEDLASGVSKEEADAVTLIVKETVRTVSPDALVTIAGGFRRGKPMGHDVDLLITIPGRPTDDELLHKVVDLLKKQGLLLYEDIRESTFVEGQLPNPKPDALDNHQKCFAILKLYRPKVDNSAVGTSKKSDMAEVKDWKAVRVDLVVAPDEQFAYALLGWTGSGQFRRDTRRYAEEERDMLLDNHRLYDLKKGIFLSADSEEEIFGHLDLDYLEPWERNA

SEQ ID NO: 5093 - DNA, 1182 bp, synthetic construct
  misc_feature 1..1182: note = Variant of terminal deoxynucleotidyl transferase
  source 1..1182: mol_type = other DNA
atgcatcaccaccatcatcatgggggttctggtcatccggaaggtaataccccggagaaggaggtgccgagcgttatcgcccgtcatgttagtccgtacgcgtgccagcgcaagaccacgctgaataactacaacaaaaagttcaccgacgcgctggagatcatggccgagaactacaagtttaaagagaacctgcaggcgtgcctggaagccaagcgcgccgcgagtgtcctgaaaagcctgccgttcgaggttaccagcatgaaagacatccaaggtctgccgtgcattaccgacgacgtacgtcctgtgatcgaagagatcatcgaagtaggcgagagcagccgtgttaaagaaatcctcaatgacgagcgctacaaggcctttaagcagttcaccagcgtgttcggtgtgggcgtgaaaacctcggaaaagtggtaccgtatgggcctccgtacggttgaagaagcaaaggccagtaagtttctgaagctgagcaagatgcagaaggcgggcttcctgtattacgaggatctggcgagcggtgttagtaaagaagaagccgatgccgttacggctatcgtgaaggaaacggtgcgcactgttagtccggatgcgctggtgaccatcgccggcggtttccgccgtggcaaacctatgggccacgacgttgacctgctgatcacgattccgggccgtcctacggatgacgagctgctccacaaagtggttgatctgctcaagaagcaaggtctgctgctgtacgaagacatccgtgagagcacgttcgtggaggggatgctgccaaatcctaaacctgacgccctggacaaccatcagaagtgcttcgccattctcaagctgtaccgtccgaaggtggataacagtgcggttgggacgagtaagaaaagtgacatggctgaggttaaggattggaaagcggttcgtgtggatctggtggtcgctccagatgagcagttcgcctatgcgctgctcggttggacgggcagcggccaatttcgtcgcgatactcgtcgctatgcggaggaagagcgcgacatgctgctcgacaaccatcgtctctacgacctgaaaaagggcatctttctgagtgcggacagcgaagaagagattttcggtcatctggacctggattatctggagccgtgggaacgcaacgcg

SEQ ID NO: 5094 - protein, 394 aa, synthetic construct
  REGION 1..394: note = Variant of terminal deoxynucleotidyl transferase
MHHHHHHGGSGHPEGNTPEKEVPSVIARHVSPYACQRKTTLNNYNKKFTDALEIMAENYKFKENLQACLEAKRAASVLKSLPFEVTSMKDIQGLPCITDDVRPVIEEIIEVGESSRVKEILNDERYKAFKQFTSVFGVGVKTSEKWYRMGLRTVEEAKASKFLKLSKMQKAGFLYYEDLASGVSKEEADAVTAIVKETVRTVSPDALVTIAGGFRRGKPMGHDVDLLITIPGRPTDDELLHKVVDLLKKQGLLLYEDIRESTFVEGMLPNPKPDALDNHQKCFAILKLYRPKVDNSAVGTSKKSDMAEVKDWKAVRVDLVVAPDEQFAYALLGWTGSGQFRRDTRRYAEEERDMLLDNHRLYDLKKGIFLSADSEEEIFGHLDLDYLEPWERNA

SEQ ID NO: 5095 - DNA, 1182 bp, synthetic construct
  misc_feature 1..1182: note = Variant of terminal deoxynucleotidyl transferase
  source 1..1182: mol_type = other DNA
atgcatcaccaccatcatcatgggggttctggtcatccggaaggtaataccccggagaaggaggtgccgagcgttatcgcccgtcatgttagtcaatacgcgtgccagcgcaagaccacgctgaataactacaacaaaaagttcaccgacgcgctggagatcatggccgagaactacaagtttaaagagaacctgcaggcgtgcctggaagccaagcgcgccgcgagtgtcctgaaaagcctgccgttcgaggttaccagcatgaaagacatccaaggtctgccgtgcattaccgacgacgtacgtcctgtgatcgaagagatcatcgaagtaggcgagagcagccgtgttaaagaaatcctcaatgacgagcgctacaaggcctttaagcagttcaccagcgtgttcggtgtgggcgtgaaaacctcggaaaagtggtaccgtatgggcctccgtacggttgaagaagcaaaggccagtaagcgcctgaagctgagcaagatgcagaaggcgggcttcctgtattacgaggatctggcgagcggtgttagtaaagaagaagccgatgccgttacgctcatcgtgaaggaaacggtgcgcactgttagtccggatgcgctggtgaccatcgccggcggtttccgccgtggcaaacctatgggccacgacgttgacctgctgatcacgattccgggccgtcctactgatgatgagctgctccacaaagtggttgatctgctcaagaagcaaggtctgctgctgtacgaagacatccgtgagagcacgttcgtggaggggcagctgccaaatcctaaacctgacgccctggacaaccatcagaagtgcttcgccattctcaagctgtaccgtccgaaggtggataacagtgcggttgggacgagtaagaaaagtgacatggctgaggttaaggattggaaagcggttcgtgtggatctggtggtcgctccagatgagcagttcgcctatgcgctgctcggttggacgggcagcggccaatttcgtcgcgatactcgtcgctatgcggaggaagagcgcgacatgctgctcgacaaccatcgcctctacgacctgaaaaagggcatctttctgagtgcggacagcgaagaagagattttcggtcatctggacctggattatctggagccgtgggaacgcaacgcg

SEQ ID NO: 5096 - protein, 394 aa, synthetic construct
  REGION 1..394: note = Variant of terminal deoxynucleotidyl transferase
MHHHHHHGGSGHPEGNTPEKEVPSVIARHVSQYACQRKTTLNNYNKKFTDALEIMAENYKFKENLQACLEAKRAASVLKSLPFEVTSMKDIQGLPCITDDVRPVIEEIIEVGESSRVKEILNDERYKAFKQFTSVFGVGVKTSEKWYRMGLRTVEEAKASKRLKLSKMQKAGFLYYEDLASGVSKEEADAVTLIVKETVRTVSPDALVTIAGGFRRGKPMGHDVDLLITIPGRPTDDELLHKVVDLLKKQGLLLYEDIRESTFVEGQLPNPKPDALDNHQKCFAILKLYRPKVDNSAVGTSKKSDMAEVKDWKAVRVDLVVAPDEQFAYALLGWTGSGQFRRDTRRYAEEERDMLLDNHRLYDLKKGIFLSADSEEEIFGHLDLDYLEPWERNA

SEQ ID NO: 5097 - DNA, 1182 bp, synthetic construct
  misc_feature 1..1182: note = Variant of terminal deoxynucleotidyl transferase
  source 1..1182: mol_type = other DNA
atgcatcaccaccatcatcatgggggttctggtcatccggaaggtaataccccggagaaggaggtgccgagcgttatcgcccgtcatgttagtcaatacgcgtgccagcgcaagaccacgctgaataactacaacaaaaagttcaccgacgcgctggagatcatggccgagaactacaagtttaaagagaacctgcaggcgtgcctggaagccaagcgcgccgcgagtgtcctgaaaagcctgccgttcgaggttaccagcatgaaagacatccaaggtctgccgtgcattaccgacgacgtacgtcctgtgatcgaagagatcatcgaagtaggcgagagcagccgtgttaaagaaatcctcaatgacgagcgctacaaggcctttaagcagttcaccagcgtgttcggtgtgggcgtgaaaacctcggaaaagtggtaccgtatgggcctccgtacggttgaagaagcaaaggccagtcgctttctgaagctgagcaagatgcagaaggcgggcttcctgtattacgaggatctggcgagcggtgttagtaaagaagaagccgatgccgttacgctcatcgtgaaggaaacggtgcgcactgttagtccggatgcgctggtgaccatcgccggcggtttccgccgtggcaaacctatgggccacgacgttgacctgctgatcacgattccgggccgtcctacggatgacgagctgctccacaaagtggttgatctgctcaagaagcaaggtctgctgctgtacgaagacatccgtgagagcacgttcgtggaggggcagctgccaaatcctaaacctgacgccctggacaaccatcagaagtgcttcgccattctcaagctgtaccgtccgaaggtggataacagtgcggttgggacgagtaagaaaagtgacatggctgaggttaaggattggaaagcggttcgtgtggatctggtggtcgctccagatgagcagttcgcctatgcgctgctcggttggacgggcagcggccaatttcgtcgcgatactcgtcgctatgcggaggaagagcgcgacatgctgctcgacaaccatcgcctctacgacctgaaaaagggcatctttctgagtgcggacagcgaagaagagattttcggtcatctggacctggattatctggagccgtgggaacgcaacgcg

SEQ ID NO: 5098 - protein, 394 aa, synthetic construct
  REGION 1..394: note = Variant of terminal deoxynucleotidyl transferase
MHHHHHHGGSGHPEGNTPEKEVPSVIARHVSQYACQRKTTLNNYNKKFTDALEIMAENYKFKENLQACLEAKRAASVLKSLPFEVTSMKDIQGLPCITDDVRPVIEEIIEVGESSRVKEILNDERYKAFKQFTSVFGVGVKTSEKWYRMGLRTVEEAKASRFLKLSKMQKAGFLYYEDLASGVSKEEADAVTLIVKETVRTVSPDALVTIAGGFRRGKPMGHDVDLLITIPGRPTDDELLHKVVDLLKKQGLLLYEDIRESTFVEGQLPNPKPDALDNHQKCFAILKLYRPKVDNSAVGTSKKSDMAEVKDWKAVRVDLVVAPDEQFAYALLGWTGSGQFRRDTRRYAEEERDMLLDNHRLYDLKKGIFLSADSEEEIFGHLDLDYLEPWERNA

SEQ ID NO: 5099 - DNA, 1182 bp, synthetic construct
  misc_feature 1..1182: note = Variant of terminal deoxynucleotidyl transferase
  source 1..1182: mol_type = other DNA
atgcatcaccaccatcatcatgggggttctggtcatccggaaggtaataccccggagaaggaggtgccgagcgttatcgcccgtcatgttagtcaatacgcgtgccagcgcaagaccacgctgaataactacaacaaaaagttcaccgacgcgctggagatcatggccgagaactacaagtttaaagagaacctgcaggcgtgcctggaagccaagcgcgccgcgagtgtcctgaaaagcctgccgttcgaggttaccagcatgaaagacatccaaggtctgccgtgcattaccgacgacgtacgtcctgtgatcgaagagatcatcgaagtaggcgagagcagccgtgttaaagaaatcctcaatgacgagcgctacaaggcctttaagcagttcaccagcgtgttcggtgtgggcgtgaaaacctcggaaaagtggtaccgtatgggcctccgtacggtagaagaagcaaaggccagtaagagtctgaagctgagcaagatgcagaaggcgggcttcctgtattacgaggatctggcgagcggtgttagtaaagaagaagccgatgccgttacgctcatcgtgaaggaaacggtgcgcactgttagtccggatgcgctggtgaccatcgccggcggtttccgccgtggcaaacctatgggccacgacgttgacctgctgatcacgattccgggccgtcctacggatgacgagctgctccacaaagtggttgatctgctcaagaagcaaggtctgctgctgtacgaagacatccgtgagagcacgttcgtggaggggcaactgccaaatcctaaacctgacgccctggacaaccatcagaagtgcttcgccattctcaagctgtaccgtccgaaggtggataacagtgcggttgggacgagtaagaaaagtgacatggctgaggttaaggattggaaagcggttcgtgtggatctggtggtcgctccagatgagcagttcgcctatgcgctgctcggttggacgggcagcggcatgtttcgtcgcgatactcgtcgctatgcggaggaagagcgcgacatgctgctcgacaaccatcgtctctacgacctgaaaaagggcatctttctgagtgcggacagcgaagaagagattttcggtcatctggacctggattatctggagccgtgggaacgcaacgcg

SEQ ID NO: 5100 - protein, 394 aa, synthetic construct
  REGION 1..394: note = Variant of terminal deoxynucleotidyl transferase
MHHHHHHGGSGHPEGNTPEKEVPSVIARHVSQYACQRKTTLNNYNKKFTDALEIMAENYKFKENLQACLEAKRAASVLKSLPFEVTSMKDIQGLPCITDDVRPVIEEIIEVGESSRVKEILNDERYKAFKQFTSVFGVGVKTSEKWYRMGLRTVEEAKASKSLKLSKMQKAGFLYYEDLASGVSKEEADAVTLIVKETVRTVSPDALVTIAGGFRRGKPMGHDVDLLITIPGRPTDDELLHKVVDLLKKQGLLLYEDIRESTFVEGQLPNPKPDALDNHQKCFAILKLYRPKVDNSAVGTSKKSDMAEVKDWKAVRVDLVVAPDEQFAYALLGWTGSGMFRRDTRRYAEEERDMLLDNHRLYDLKKGIFLSADSEEEIFGHLDLDYLEPWERNA

SEQ ID NO: 5101 - DNA, 1182 bp, synthetic construct
  misc_feature 1..1182: note = Variant of terminal deoxynucleotidyl transferase
  source 1..1182: mol_type = other DNA
atgcatcaccaccatcatcatgggggttctggtcatccggaaggtaataccccggagaaggaggtgccgagcgttatcgcccgtcatgttagtcagtacgcgtgccagcgcaagaccacgctgaataactacaacaaaaagttcaccgacgcgctggagatcatggccgagaactacaagtttaaagagaacctgcaggcgtgcctggaagccaagcgcgccgcgagtgtcctgaaaagcctgccgttcgaggttaccagcatgaaagacatccaaggtctgccgtgcattaccgacgacgtacgtcctgtgatcgaagagatcatcgaagtaggcgagagcagccgtgttaaagaaatcctcaatgacgagcgctacaaggcctttaagcagttcaccagcgtgttcggtgtgggcgtgaaaacctcggaaaagtggtaccgtatgggcctccgtacggttgaagaagcaaaggccagtaagtttctgaagctgagcaagatgcagaaggcgggcttcctgtattacgaggatctggcgagcggtgttagtaaagaagaagccgatgccgttacgctgatcgtgaaggaaacggtgcgcactgttagtccggatgcgctggtgaccatcgccggcggtttccgccgtggcaaacctatgggccacgacgttgacctgctgatcacgattccgggccgtcctacggatgacgagctgctccacaaagtggttgatctgctcaagaagcaaggtctgctgctgtacgaagacatccgtgagagcacgttcgtgccagggcagctgccaaatcctaaacctgacgccctggacaaccatcagaagtgcttcgccattctcaagctgtaccgtccgaaggtggataacagtgcggttgggacgagtaagaaaagtgacatggctgaggttaaggattggaaagcggttcgtgtggatctggtggtcgctccagatgagcagttcgcctatgcgctgctcggttggacgggcagcggccaatttcgtcgcgatactcgtcgctatgcggaggaagagcgcgacatgctgctcgacaaccatcgtctctacgacctgaaaaagggcatctttctgagtgcggacagcgaagaagagattttcggtcatctggacctggattatctggagccgtgggaacgcaacgcg

SEQ ID NO: 5102 - protein, 394 aa, synthetic construct
  REGION 1..394: note = Variant of terminal deoxynucleotidyl transferase
MHHHHHHGGSGHPEGNTPEKEVPSVIARHVSQYACQRKTTLNNYNKKFTDALEIMAENYKFKENLQACLEAKRAASVLKSLPFEVTSMKDIQGLPCITDDVRPVIEEIIEVGESSRVKEILNDERYKAFKQFTSVFGVGVKTSEKWYRMGLRTVEEAKASKFLKLSKMQKAGFLYYEDLASGVSKEEADAVTLIVKETVRTVSPDALVTIAGGFRRGKPMGHDVDLLITIPGRPTDDELLHKVVDLLKKQGLLLYEDIRESTFVPGQLPNPKPDALDNHQKCFAILKLYRPKVDNSAVGTSKKSDMAEVKDWKAVRVDLVVAPDEQFAYALLGWTGSGQFRRDTRRYAEEERDMLLDNHRLYDLKKGIFLSADSEEEIFGHLDLDYLEPWERNA

SEQ ID NO: 5103 - DNA, 1182 bp, synthetic construct
  misc_feature 1..1182: note = Variant of terminal deoxynucleotidyl transferase
  source 1..1182: mol_type = other DNA
atgcatcaccaccatcatcatgggggttctggtcatccggaaggtaataccccggagaaggaggtgccgagcgttatcgcccgtcatgttagtcagtacgcgtgccagcgcaagaccacgctgaataactacaacaaaaagttcaccgacgcgctggagatcatggccgagaactacaagtttaaagagaacctgcaggcgtgcctggaagccaagcgcgccgcgagtgtcctgaaaagcctgccgttcgaggttaccagcatgaaagacatccaaggtctgccgtgcattaccgacgacgtacgtcctgtgatcgaagagatcatcgaagtaggcgagagcagccgtgttaaagaaatcctcaatgacgagcgctacaaggcctttaagcagttcaccagcgtgttcggtgtgggcgtgaaaacctcggaaaagtggtaccgtatgggcctccgtacggttgaagaagcaaaggccagtaagagtctgaagctgagcaagatgcagaaggcgggcttcctgtattacgaggatctggcgagcggtgttagtaaagaagaagccgatgccgttacgctgatcgtgaaggaaacggtgcgcactgttagtccggatgcgctggtgaccatcgccggcggtttccgccgtggcaaacctatgggccacgacgttgacctgctgatcacgattccgggccgtcctactgatccggagctgctccacaaagtggttgatctgctcaagaagcaaggtctgctgctgtacgaagacatccgtgagagcacgttcgtggagcaacagctgccaaatcctaaacctgacgccctggacaaccatcagaagtgcttcgccattctcaagctgtaccgtccgaaggtggataacagtgcggttgggacgagtaagaaaagtgacatggctgaggttaaggattggaaagcggttcgtgtggatctggtggtcgctccagatgagcagttcgcctatgcgctgctcggttggacgggcagcggccaatttcgtcgcgatactcgtcgctatgcggaggaagagcgcgacatgctgctcgacaaccatagcctctacgacctgaaaaagggcatctttctgagtgcggacagcgaagaagagattttcggtcatctggacctggattatctggagccgtgggaacgcaacgcg

SEQ ID NO: 5104 - protein, 394 aa, synthetic construct
  REGION 1..394: note = Variant of terminal deoxynucleotidyl transferase
MHHHHHHGGSGHPEGNTPEKEVPSVIARHVSQYACQRKTTLNNYNKKFTDALEIMAENYKFKENLQACLEAKRAASVLKSLPFEVTSMKDIQGLPCITDDVRPVIEEIIEVGESSRVKEILNDERYKAFKQFTSVFGVGVKTSEKWYRMGLRTVEEAKASKSLKLSKMQKAGFLYYEDLASGVSKEEADAVTLIVKETVRTVSPDALVTIAGGFRRGKPMGHDVDLLITIPGRPTDPELLHKVVDLLKKQGLLLYEDIRESTFVEQQLPNPKPDALDNHQKCFAILKLYRPKVDNSAVGTSKKSDMAEVKDWKAVRVDLVVAPDEQFAYALLGWTGSGQFRRDTRRYAEEERDMLLDNHSLYDLKKGIFLSADSEEEIFGHLDLDYLEPWERNA

SEQ ID NO: 5105 - DNA, 1182 bp, synthetic construct
  misc_feature 1..1182: note = Variant of terminal deoxynucleotidyl transferase
  source 1..1182: mol_type = other DNA
atgcatcaccaccatcatcatgggggttctggtcatccggaaggtaataccccggagaaggaggtgccgagcgttatcgcccgtcatgttagtcaatacgcgtgccagcgcaagaccacgctgaataactacaacaaaaagttcaccgacgcgctgaccatcatggccgagaactacaagtttaaagagaacctgcaggcgtgcctggaagccaagcgcgccgcgagtgtcctgaaaagcctgccgttcgaggttaccagcatgaaagacatccaaggtctgccgtgcattaccgacgacgtacgtcctgtgatcgaagagatcatcgaagtaggcgagagcagccgtgttaaagaaatcctcaatgacgagcgctacaaggcctttaagcagttcaccagcgtgttcggtgtgggcgtgaaaacctcggaaaagtggtaccgtatgggcctccgtacggttgaagaagcaaaggccagtaagagtctgaagctgagcaagatgcagaaggcgggcttcctgtattacgaggatctggcgagcggtgttagtaaagaagaagccgatgccgttacgctcatcgtgaaggaaacggtggcgcgcgttagtccggatgcgctggtgaccatcgccggcggtttccgccgtggcaaacctatgggccacgacgttgacctgctgatcacgattccgggccgtcctacggatgacgagctgctccacaaagtggttgatctgctcaagaagcaaggtctgctgctgtacgaagacatccgtgagagcacgttcgtggaggggcaactgccaaatcctaaacctgacgccctggacaaccatcagaagtgcttcgccattctcaagctgtaccgtccgaaggtggataacagtgcggttgggacgagtaagaaaagtgacatggctgaggttaaggattggaaagcggttcgtgtggatctggtggtcgcgccagatcatcagttcgccttcgcgctgctcggttggacgggcagcggccaatttcgtcgcgatactcgtcgctatgcggaggaagagcgcgacatgctgctcgacaaccatcgtctctacgacctgaaaaagggcatctttctgagtgcggacagcgaagaagagattttcggtcatctggacctggattatctggagccgtgggaacgcaacgcg

SEQ ID NO: 5106 - protein, 394 aa, synthetic construct
  REGION 1..394: note = Variant of terminal deoxynucleotidyl transferase
MHHHHHHGGSGHPEGNTPEKEVPSVIARHVSQYACQRKTTLNNYNKKFTDALTIMAENYKFKENLQACLEAKRAASVLKSLPFEVTSMKDIQGLPCITDDVRPVIEEIIEVGESSRVKEILNDERYKAFKQFTSVFGVGVKTSEKWYRMGLRTVEEAKASKSLKLSKMQKAGFLYYEDLASGVSKEEADAVTLIVKETVARVSPDALVTIAGGFRRGKPMGHDVDLLITIPGRPTDDELLHKVVDLLKKQGLLLYEDIRESTFVEGQLPNPKPDALDNHQKCFAILKLYRPKVDNSAVGTSKKSDMAEVKDWKAVRVDLVVAPDHQFAFALLGWTGSGQFRRDTRRYAEEERDMLLDNHRLYDLKKGIFLSADSEEEIFGHLDLDYLEPWERNA

SEQ ID NO: 5107 - DNA, 1182 bp, synthetic construct
  misc_feature 1..1182: note = Variant of terminal deoxynucleotidyl transferase
  source 1..1182: mol_type = other DNA
atgcatcaccaccatcatcatgggggttctggtcatccggaaggtaataccccggagaaggaggtgccgagcgttatcgcccgtcatgttagtcagtacgcgtgccagcgcaagaccacgctgaataactacaacaaaaagttcaccgacgcgctggagatcatggccgagaactacaagtttaaagagaacctgcaggcgtgcctggaagccaagcgcgccgcgagtgtcctgaaaagcctgccgttcgaggttaccagcatgaaagacatccaaggtctgccgtgcattaccgacgacgtacgtcctgtgatcgaagagatcatcgaagtaggcgagagcagccgtgttaaagaaatcctcaatgacgagcgctacaaggcctttaagcagttcaccagcgtgttcggtgtgggcgtgaaaacctcggaaaagtggtaccgtatgggcctccgtacggttgaagaagcaaaggccagtaagagtctgaagctgagcaagatgcagaaggcgggcttcctgtattacgaggatctggcgagcggtgttagtaaagaagaagccgatgccgttacgctcatcgtgaaggaaacggtgcgcactgttagtccggatgcgctggtgaccatcgccggcggtttccgccgtggcaaacctatgggccacgacgttgacctgctgatcacgattccgggccgtcctactgatccggagctgctccacaaagtggttgatctgctcaagaagcaaggtctgctgctgtacgaagacatccgtgagagcacgttcgtggaggggcaactgccaaatcctaaacctgacgccctggacaaccatcagaagtgcttcgccattctcaagctgtaccgtccgaaggtggataacagtgcggttgggacgagtaagaaaagtgacatggctgaggttaaggattggaaagcggttcgtgtggatctggtggtcgctccagatgagcagttcgcctatgcgctgctcggttggacgggcagcggccaatttcgtcgcgatactcgtcgctatgcggaggaagagcgcgacatgctgctcgacaaccatcgtctctacgacctgaaaaagggcatctttctgagtgcggacagcgaagaagagattttcggtcatctggacctggattatctggagccgtgggaacgcaacgcg

SEQ ID NO: 5108 - protein, 394 aa, synthetic construct
  REGION 1..394: note = Variant of terminal deoxynucleotidyl transferase
MHHHHHHGGSGHPEGNTPEKEVPSVIARHVSQYACQRKTTLNNYNKKFTDALEIMAENYKFKENLQACLEAKRAASVLKSLPFEVTSMKDIQGLPCITDDVRPVIEEIIEVGESSRVKEILNDERYKAFKQFTSVFGVGVKTSEKWYRMGLRTVEEAKASKSLKLSKMQKAGFLYYEDLASGVSKEEADAVTLIVKETVRTVSPDALVTIAGGFRRGKPMGHDVDLLITIPGRPTDPELLHKVVDLLKKQGLLLYEDIRESTFVEGQLPNPKPDALDNHQKCFAILKLYRPKVDNSAVGTSKKSDMAEVKDWKAVRVDLVVAPDEQFAYALLGWTGSGQFRRDTRRYAEEERDMLLDNHRLYDLKKGIFLSADSEEEIFGHLDLDYLEPWERNA

SEQ ID NO: 5109 - DNA, 1182 bp, synthetic construct
  misc_feature 1..1182: note = Variant of terminal deoxynucleotidyl transferase
  source 1..1182: mol_type = other DNA
atgcatcaccaccatcatcatgggggttctggtcatccggaaggtaataccccggagaaggaggtgccgagcgttatcgcccgtcatgttagtcaatacgcgtgccagcgcaagaccacgctgaataactacaacaaaaagttcaccgacgcgctggagatcatggccgagaactacaagtttaaagagaacctgcaggcgtgcctggaagccaagcgcgccgcgagtgtcctgaaaagcctgccgttcgaggttaccagcatgaaagacatccaaggtctgccgtgcattaccgacgacgtacgtcctgtgatcgaagagatcatcgaagtaggcgagagcagccgtgttaaagaaatcctcaatgacgagcgctacaaggcctttaagcagttcaccagcgtgttcggtgtgggcgtgaaaacctcggaaaagtggtaccgtatgggcctccgtacggtagaagtagcaaaggccagtaagagtctgaagctgagcaagatgcagaaggcgggcttcctgtattacgaggatctggcgagcggtgttagtaaagaagaagccgatgccgttacgctcatcgtgaaggaaacggtgcgcactgttagtccggatgcgctggtgaccctggccggcggtttccgccgtggcaaacctatgggccacgacgttgacctgctgatcacgattccgggccgtcctacggatgacgagctgctccacaaagtggttgatctgctcaagaagcaaggtctgctgctgtacgaagacatccgtgagagcacgttcgtggaggggcaactgccaaatcctaaacctgacgccctggacaaccatcagaagtgcttcgccattctcaagctgtaccgtccgaaggtggataacagtgcggttgggacgagtaagaaaagtgacatggctgaggttaaggattggaaagcggttcgtgtggatctggtggtcgctccagatgagcagttcgcctatgcgctgctcggttggacgggcagcggcatgtttcgtcgcgatactcgtcgctatgcggaggaagagcgcgacatgctgctcgacaaccatcgtctctacgacctgaaaaagggcatctttctgagtgcggacagcgaagaagagattttcggtcatctggacctggattatctggaaccgtgggaacgcaacgcg

SEQ ID NO: 5110 - protein, 394 aa, synthetic construct
  REGION 1..394: note = Variant of terminal deoxynucleotidyl transferase
MHHHHHHGGSGHPEGNTPEKEVPSVIARHVSQYACQRKTTLNNYNKKFTDALEIMAENYKFKENLQACLEAKRAASVLKSLPFEVTSMKDIQGLPCITDDVRPVIEEIIEVGESSRVKEILNDERYKAFKQFTSVFGVGVKTSEKWYRMGLRTVEVAKASKSLKLSKMQKAGFLYYEDLASGVSKEEADAVTLIVKETVRTVSPDALVTLAGGFRRGKPMGHDVDLLITIPGRPTDDELLHKVVDLLKKQGLLLYEDIRESTFVEGQLPNPKPDALDNHQKCFAILKLYRPKVDNSAVGTSKKSDMAEVKDWKAVRVDLVVAPDEQFAYALLGWTGSGMFRRDTRRYAEEERDMLLDNHRLYDLKKGIFLSADSEEEIFGHLDLDYLEPWERNA

SEQ ID NO: 5111 - DNA, 1182 bp, synthetic construct
  misc_feature 1..1182: note = Variant of terminal deoxynucleotidyl transferase
  source 1..1182: mol_type = other DNA
atgcatcaccaccatcatcatgggggttctggtcatccggaaggtaataccccggagaaggaggtgccgagcgttatcgcccgtcatgttagtcagtacgcgtgccagcgcaagaccacgctgaataactacaacaaaaagttcaccgacgcgctggagatcatggccgagaactacaagtttaaagagaacctgcaggcgtgcctggaagccaagcgcgccgcgagtgtcctgaaaagcctgccgttcgaggttaccagcatgaaagacatccaaggtctgccgtgcattaccgacgacgtacgtcctgtgatcgaagagatcatcgaagtaggcgagagcagccgtgttaaagaaatcctcaatgacgagcgctacaaggcctttaagcagttcaccagcgtgttcggtgtgggcgtgaaaacctcggaaaagtggtaccgtatgggcctccgtacggttgaagaagcaaaggccagtaagagtctgaagctgagcaagatgcagaaggcgggcttcctgtattacgaggatctggcgagcggtgttagtaaagaagaagccgatgccgttacgctgatcgtgaaggaaacggtgcgcactgttagtccggatgcgctggtgaccatcgccggcggtttccgccgtggcaaacctatgggccacgacgttgacctgctgatcacgattccgggccgtcctactgatccggagctgctccacaaagtggttgatctgctcaagaagcaaggtctgctgctgtacgaagacatccgtgagagcacgttcgtggaggggcaactgccaaatcctaaacctgacgccctggacaaccatcagaagtgcttcgccattctcaagctgtaccgtccgaaggtggataacagtgcggttgggacgagtaagaaaagtgacatggctgaggttaaggattggaaagcggttcgtgtggatctggtggtcgctccagatgagcagttcgcctatgcgctgctcggttggacgggcagcggccaatttcgtcgcgatactcgtcgctatgcggaggaagagcgcgacatgctgctcgacaaccatagcctctacgacctgaaaaagggcatctttctgagtgcggacagcgaagaagagattttcggtcatctggacctggattatctggagccgtgggaacgcaacgcg

SEQ ID NO: 5112 - protein, 394 aa, synthetic construct
  REGION 1..394: note = Variant of terminal deoxynucleotidyl transferase
MHHHHHHGGSGHPEGNTPEKEVPSVIARHVSQYACQRKTTLNNYNKKFTDALEIMAENYKFKENLQACLEAKRAASVLKSLPFEVTSMKDIQGLPCITDDVRPVIEEIIEVGESSRVKEILNDERYKAFKQFTSVFGVGVKTSEKWYRMGLRTVEEAKASKSLKLSKMQKAGFLYYEDLASGVSKEEADAVTLIVKETVRTVSPDALVTIAGGFRRGKPMGHDVDLLITIPGRPTDPELLHKVVDLLKKQGLLLYEDIRESTFVEGQLPNPKPDALDNHQKCFAILKLYRPKVDNSAVGTSKKSDMAEVKDWKAVRVDLVVAPDEQFAYALLGWTGSGQFRRDTRRYAEEERDMLLDNHSLYDLKKGIFLSADSEEEIFGHLDLDYLEPWERNA

SEQ ID NO: 5113 - DNA, 1182 bp, synthetic construct
  misc_feature 1..1182: note = Variant of terminal deoxynucleotidyl transferase
  source 1..1182: mol_type = other DNA
atgcatcaccaccatcatcatgggggttctggtcatccggaaggtaataccccggagaaggaggtgccgagcgttatcgcccgtcatgttagtcaatacgcgtgccagcgcaagaccacgctgaataactacaacaaaaagttcaccgacgcgctggagatcatggccgagaactacaagtttaaagagaacctgcaggcgtgcctggaagccaagcgcgccgcgagtgtcctgaaaagcctgccgttcgaggttaccagcatgaaagacatccaaggtctgccgtgcattaccgacgacgtacgtcctgtgatcgaagagatcatcgaagtaggcgagagcagccgtgttaaagaaatcctcaatgacgagcgctacaaggcctttaagcagttcaccagcgtgttcggtgtgggcgtgaaaacctcggaaaagtggtaccgtatgggcctccgtacggttgaagaagcaaaggccagtggcagcctgaagctgagcaagatgcagaaggcgggcttcctgtattacgaggatctggcgagcggtgttagtaaagaagaagccgatgccgttacgctcatcgtgaaggaaacggtgcgcactgttagtccggatgcgctggtgaccatcgccggcggtttccgccgtggcaaacctatgggccacgacgttgacctgctgatcacgattccgggccgtcctactgatccggagctgctccacaaagtggttgatctgctcaagaagcaaggtctgctgctgtacgaagacatccgtgagagcacgttcgtggaggggcaactgccaaatcctaaacctgacgccctggacaaccatcagaagtgcttcgccattctcaagctgtaccgtccgaaggtggataacagtgcggttgggacgagtaagaaaagtgacatggctgaggttaaggattggaaagcggttcgtgtggatctggtggtcgctccagatgagcagttcgcctatgcgctgctcggttggacgggcagcggccaatttcgtcgcgatactcgtcgctatgcggaggaagagcgcgacatgctgctcgacaaccatcgtctctacgacctgaaaaagggcatctttctgagtgcggacagcgaagaagagattttcggtcatctggacctggattatctggagccgtgggaacgcaacgcg

SEQ ID NO: 5114 - protein, 394 aa, synthetic construct
  REGION 1..394: note = Variant of terminal deoxynucleotidyl transferase
MHHHHHHGGSGHPEGNTPEKEVPSVIARHVSQYACQRKTTLNNYNKKFTDALEIMAENYKFKENLQACLEAKRAASVLKSLPFEVTSMKDIQGLPCITDDVRPVIEEIIEVGESSRVKEILNDERYKAFKQFTSVFGVGVKTSEKWYRMGLRTVEEAKASGSLKLSKMQKAGFLYYEDLASGVSKEEADAVTLIVKETVRTVSPDALVTIAGGFRRGKPMGHDVDLLITIPGRPTDPELLHKVVDLLKKQGLLLYEDIRESTFVEGQLPNPKPDALDNHQKCFAILKLYRPKVDNSAVGTSKKSDMAEVKDWKAVRVDLVVAPDEQFAYALLGWTGSGQFRRDTRRYAEEERDMLLDNHRLYDLKKGIFLSADSEEEIFGHLDLDYLEPWERNA

SEQ ID NO: 5115 - DNA, 1182 bp, synthetic construct
  misc_feature 1..1182: note = Variant of terminal deoxynucleotidyl transferase
  source 1..1182: mol_type = other DNA
atgcatcaccaccatcatcatgggggttctggtcatccggaaggtaataccccggagaaggaggtgccgagcgttatcgcccgtcatgttagtcagtacgcgtgccagcgcaagaccacgctgaataactacaacaaaaagttcaccgacgcgctggagatcatggccgagaactacaagtttaaagagaacctgcaggcgtgcctggaagccaagcgcgccgcgagtgtcctgaaaagcctgccgttcgaggttaccagcatgaaagacatccaaggtctgccgtgcattaccgacgacgtacgtcctgtgatcgaagagatcatcgaagtaggcgagagcagccgtgttaaagaaatcctcaatgacgagcgctacaaggcctttaagcagttcaccagcgtgttcggtgtgggcgtgaaaacctcggaaaagtggtaccgtatgggcctccgtacggttgaagaagcaaaggccagtaagagtctgaagctgagcaagatgcagaaggcgggcttcctgtattacgaggatctggcgagcggtgttagtaaagaagaagccgatgccgttacggctatcgtgaaggaaacggtgcgcactgttagtccggatgcgctggtgaccatcgccggcggtttccgccgtggcaaacctatgggccacgacgttgacctgctgatcacgattccgggccgtcctacggatgacgagctgctccacaaagtggttgatctgctcaagaagcaaggtctgctgctgtacgaagacatccgtgagagcacgttcgtggaggggatgctgccaaatcctaaacctgacgccctggacaaccatcagaagtgcttcgccattctcaagctgtaccgtccgaaggtggataacagtgcggttgggacgagtaagaaaagtgacatggctgaggttaaggattggaaagcggttcgtgtggatctggtggtcgctccagatgagcagttcgcctatgcgctgctcggttggacgggcagcggccaatttcgtcgcgatactcgtcgctatgcggaggaagagcgcgacatgctgctcgacaaccatcgtctctacgacctgaaaaagggcatctttctgagtgcggacagcgaagaagagattttcggtcatctggacctggattatctggagccgtgggaacgcaacgcg

SEQ ID NO: 5116 - protein, 394 aa, synthetic construct
  REGION 1..394: note = Variant of terminal deoxynucleotidyl transferase
MHHHHHHGGSGHPEGNTPEKEVPSVIARHVSQYACQRKTTLNNYNKKFTDALEIMAENYKFKENLQACLEAKRAASVLKSLPFEVTSMKDIQGLPCITDDVRPVIEEIIEVGESSRVKEILNDERYKAFKQFTSVFGVGVKTSEKWYRMGLRTVEEAKASKSLKLSKMQKAGFLYYEDLASGVSKEEADAVTAIVKETVRTVSPDALVTIAGGFRRGKPMGHDVDLLITIPGRPTDDELLHKVVDLLKKQGLLLYEDIRESTFVEGMLPNPKPDALDNHQKCFAILKLYRPKVDNSAVGTSKKSDMAEVKDWKAVRVDLVVAPDEQFAYALLGWTGSGQFRRDTRRYAEEERDMLLDNHRLYDLKKGIFLSADSEEEIFGHLDLDYLEPWERNA

SEQ ID NO: 5117 - DNA, 1182 bp, synthetic construct
  misc_feature 1..1182: note = Variant of terminal deoxynucleotidyl transferase
  source 1..1182: mol_type = other DNA
atgcatcaccaccatcatcatgggggttctggtcatccggaaggtaataccccggagaaggaggtgccgagcgttatcgcccgtcatgttagtcaatacgcgtgccagcgcaagaccacgctgaataactacaacaaaaagttcaccgacgcgctgaccatcatggccgagaactacaagtttaaagagaacctgcaggcgtgcctggaagccaagcgcgccgcgagtgtcctgaaaagcctgccgttcgaggttaccagcatgaaagacatccaaggtctgccgtgcattaccgacgacgtacgtcctgtgatcgaagagatcatcgaagtaggcgagagcagccgtgttaaagaaatcctcaatgacgagcgctacaaggcctttaagcagttcaccagcgtgttcggtgtgggcgtgaaaacctcggaaaagtggtaccgtatgggcctccgtacggttgaagaagcaaaggccagtaagagtctgaagctgagcaagatgcagaaggcgggcttcctgtattacgaggatctggcgagcggtgttagtaaagaagaagccgatgccgttacgctcatcgtgaaggaaacggtgcgccgcgttagtccggatgcgctggtgaccatcgccggcggtttccgccgtggcaaacctatgggccacgacgttgacctgctgatcacgattccgggccgtcctacggatgacgagctgctccacaaagtggttgatctgctcaagaagcaaggtctgctgctgtacgaagacatccgtgagagcacgttcgtggaggggcaactgccaaatcctaaacctgacaaactggacaaccattcgaagtgcttcgccattctcaagctgtaccgtccgaaggtggataacagtgcggttgggacgagtaagaaaagtgacatggctgaggttaaggattggaaagcggttcgtgtggatctggtggtcgctccagatgagcagttcgcctacgcgctgctcggttggacgggcagcggccaatttcgtcgcgatactcgtcgctatgcggaggaagagcgcgacatgctgctcgacaaccatcgtctctacgacctgaaaaagggcatctttctgagtgcggacagcgaagaagagattttcggtcatctggacctggattatctggagccgtgggaacgcaacgcg

SEQ ID NO: 5118 - protein, 394 aa, synthetic construct
  REGION 1..394: note = Variant of terminal deoxynucleotidyl transferase
MHHHHHHGGSGHPEGNTPEKEVPSVIARHVSQYACQRKTTLNNYNKKFTDALTIMAENYKFKENLQACLEAKRAASVLKSLPFEVTSMKDIQGLPCITDDVRPVIEEIIEVGESSRVKEILNDERYKAFKQFTSVFGVGVKTSEKWYRMGLRTVEEAKASKSLKLSKMQKAGFLYYEDLASGVSKEEADAVTLIVKETVRRVSPDALVTIAGGFRRGKPMGHDVDLLITIPGRPTDDELLHKVVDLLKKQGLLLYEDIRESTFVEGQLPNPKPDKLDNHSKCFAILKLYRPKVDNSAVGTSKKSDMAEVKDWKAVRVDLVVAPDEQFAYALLGWTGSGQFRRDTRRYAEEERDMLLDNHRLYDLKKGIFLSADSEEEIFGHLDLDYLEPWERNA

SEQ ID NO: 5119 - DNA, 1182 bp, synthetic construct
  misc_feature 1..1182: note = Variant of terminal deoxynucleotidyl transferase
  source 1..1182: mol_type = other DNA
atgcatcaccaccatcatcatgggggttctggtcatccggaaggtaataccccggagaaggaggtgccgagcgttatcgcccgtcatgttagtcaatacgcgtgccagcgcaagaccacgctgaataactacaacaaaaagttcaccgacgcgctggagatcatggccgagaactacaagtttaaagagaacctgcaggcgtgcctggaagccaagcgcgccgcgagtgtcctgaaaagcctgccgttcgaggttaccagcatgaaagacatccaaggtctgccgtgcattaccgacgacgtacgtcctgtgatcgaagagatcatcgaagtaggcgagagcagccgtgttaaagaaatcctcaatgacgagcgctacaaggcctttaagcagttcaccagcgtgttcggtgtgggcgtgaaaacctcggaaaagtggtaccgtatgggcctccgtacggtagaagaagcaaaggccagtaagagtctgaagctgagccgcatgcagaaggcgggcttcctgtattacgaggatctggcgagcggtgttagtaaagaagaagccgatgccgttacgctcatcgtgaaggaaacggtgcgcactgttagtccggatgcgctggtgaccctggccggcggtttccgccgtggcaaacctatgggccacgacgttgacctgctgatcacgattccgggccgtcctacggatgacgagctgctccacaaagtggttgatctgctcaagaagcaaggtctgctgctgtacgaagacatccgtgagagcacgttcgtggaggggcaactgccaaatcctaaacctgacgccctggacaaccatcagaagtgcttcgccattctcaagctgtaccgtccgaaggtggataacagtgcggttgggacgagtaagaaaagtgacatggctgaggttaaggattggaaagcggttcgtgtggatctggtggtcgctccagatgagcagttcgcctatgcgctgctcggttggacgggcagcggccaatttcgtcgcgatactcgttggtacgcgtcggaagagcgcgacatgctgctcgacaaccatcgtctctacgacctgaaaaagggcatctttctgagtgcggacagcgaagaagagattttcggtcatctggacctggattatctggagccgtgggaacgcaacgcg

SEQ ID NO: 5120 - protein, 394 aa, synthetic construct
  REGION 1..394: note = Variant of terminal deoxynucleotidyl transferase
MHHHHHHGGSGHPEGNTPEKEVPSVIARHVSQYACQRKTTLNNYNKKFTDALEIMAENYKFKENLQACLEAKRAASVLKSLPFEVTSMKDIQGLPCITDDVRPVIEEIIEVGESSRVKEILNDERYKAFKQFTSVFGVGVKTSEKWYRMGLRTVEEAKASKSLKLSRMQKAGFLYYEDLASGVSKEEADAVTLIVKETVRTVSPDALVTLAGGFRRGKPMGHDVDLLITIPGRPTDDELLHKVVDLLKKQGLLLYEDIRESTFVEGQLPNPKPDALDNHQKCFAILKLYRPKVDNSAVGTSKKSDMAEVKDWKAVRVDLVVAPDEQFAYALLGWTGSGQFRRDTRWYASEERDMLLDNHRLYDLKKGIFLSADSEEEIFGHLDLDYLEPWERNA

SEQ ID NO: 5121 - DNA, 1182 bp, synthetic construct
  misc_feature 1..1182: note = Variant of terminal deoxynucleotidyl transferase
  source 1..1182: mol_type = other DNA
atgcatcaccaccatcatcatgggggttctggtcatccggaaggtaataccccggagaaggaggtgccgagcgttatcgcccgtcatgttagtccgtacgcgtgccagcgcaagaccacgctgaataactacaacaaaaagttcaccgacgcgctggagatcatggccgagaactacaagtttaaagagaacctgcaggcgtgcctggaagccaagcgcgccgcgagtgtcctgaaaagcctgccgttcgaggttaccagcatgaaagacatccaaggtctgccgtgcattaccgacgacgtacgtcctgtgatcgaagagatcatcgaagtaggcgagagcagccgtgttaaagaaatcctcaatgacgagcgctacaaggcctttaagcagttcaccagcgtgttcggtgtgggcgtgaaaacctcggaaaagtggtaccgtatgggcctccgtacggttgaagaagcaaaggccagtaagtttctgaagctgagcaagatgcagaaggcgggcttcctgtattacgaggatctggcgagcggtgttagtaaagaagaagccgatgccgttacgctcatcgtgaaggaaacggtgcgcactgttagtccggatgcgctggtgaccatcgccggcggtttccgccgtggcaaacctatgggccacgacgttgacctgctgatcacgattccgggccgtcctactgatgatgagctgctccacaaagtggttgatctgctcaagaagcaaggtctgctgctgtacgaagacatccgtgagagcacgttcgtggaggggcaactgccaaatcctaaacctgacgccctggacaaccatcagaagtgcttcgccattctcaagctgtaccgtccgaaggtggataacagtgcggttgggacgagtaagaaaagtgacatggctgaggttaaggattggaaagcggttcgtgtggatctggtggtcgctccagatgagcagttcgcctatgcgctgctcggttggacgggcagcggccaatttcgtcgcgatactcgtcgctatgcggaggaagagcgcgacatgctgctcgacaaccatcgtctctacgacctgaaaaagggcatctttctgagtgcggacagcgaagaagagattttcggtcatctggacctggattatctggagccgtgggaacgcaacgcg

SEQ ID NO: 5122 - protein, 394 aa, synthetic construct
  REGION 1..394: note = Variant of terminal deoxynucleotidyl transferase
MHHHHHHGGSGHPEGNTPEKEVPSVIARHVSPYACQRKTTLNNYNKKFTDALEIMAENYKFKENLQACLEAKRAASVLKSLPFEVTSMKDIQGLPCITDDVRPVIEEIIEVGESSRVKEILNDERYKAFKQFTSVFGVGVKTSEKWYRMGLRTVEEAKASKFLKLSKMQKAGFLYYEDLASGVSKEEADAVTLIVKETVRTVSPDALVTIAGGFRRGKPMGHDVDLLITIPGRPTDDELLHKVVDLLKKQGLLLYEDIRESTFVEGQLPNPKPDALDNHQKCFAILKLYRPKVDNSAVGTSKKSDMAEVKDWKAVRVDLVVAPDEQFAYALLGWTGSGQFRRDTRRYAEEERDMLLDNHRLYDLKKGIFLSADSEEEIFGHLDLDYLEPWERNA

SEQ ID NO: 5123 - DNA, 1182 bp, synthetic construct; identical to SEQ ID NO: 5053
  misc_feature 1..1182: note = Variant of terminal deoxynucleotidyl transferase
  source 1..1182: mol_type = other DNA

SEQ ID NO: 5124 - protein, 394 aa, synthetic construct; identical to SEQ ID NO: 5054
  REGION 1..394: note = Variant of terminal deoxynucleotidyl transferase

SEQ ID NO: 5125 - DNA, 1182 bp, synthetic construct
  misc_feature 1..1182: note = Variant of terminal deoxynucleotidyl transferase
  source 1..1182: mol_type = other DNA
atgcatcaccaccatcatcatgggggttctggtcatccggaaggtaataccccggagaaggaggtgccgagcgttatcgcccgtcatgttagtcaatacgcgtgccagcgcaagaccacgctgaataactacaacaaaaagttcaccgacgcgctgaccatcatggccgagaactacaagtttaaagagaacctgcaggcgtgcctggaagccaagcgcgccgcgagtgtcctgaaaagcctgccgttcgaggttaccagcatgaaagacatccaaggtctgccgtgcattaccgacgacgtacgtcctgtgatcgaagagatcatcgaagtaggcgagagcagccgtgttaaagaaatcctcaatgacgagcgctacaaggcctttaagcagttcaccagcgtgttcggtgtgggcgtgaaaacctcggaaaagtggtaccgtatgggcctccgtacggttgaagaagcaaaggccagtaagagtctgaagctgagcaagatgcagaaggcgggcttcctgtattacgaggatctggcgagcggtgttagtaaagaagaagccgatgccgttacgctcatcgtgaaggaaacggtgcgccgcgttagtccggatgcgctggtgaccatcgccggcggtttccgccgtggcaaacctatgggccacgacgttgacctgctgatcacgattccgggccgtcctacggatgacgagctgctccacaaagtggttgatctgctcaagaagcaaggtctgctgctgtacgaagacatccgtgagagcacgttcgtggaggggcaactgccaaatcctaaacctgacgccctggacaaccatcagaagtgcttcgccattctcaagctgtaccgtccgaaggtggataacagtgcggttgggacgagtaagaaaagtgacatggctgaggttaaggattggaaagcggttcgtgtggatctggtggtcgctccagatgagcagttcgcctatgcgctgctcggttggacgggcagcggccaatttcgtcgcgatactcgtcgctatgcggaggaagagcgcgacatgctgctcgacaaccatcgtctctacgacctgaaaaagggcatctttctgcgtgcggacagcgaagaagagattttcggtcatctggacctggattatctggagccgtgggaacgcaacgcg

SEQ ID NO: 5126 - protein, 394 aa, synthetic construct
  REGION 1..394: note = Variant of terminal deoxynucleotidyl transferase
MHHHHHHGGSGHPEGNTPEKEVPSVIARHVSQYACQRKTTLNNYNKKFTDALTIMAENYKFKENLQACLEAKRAASVLKSLPFEVTSMKDIQGLPCITDDVRPVIEEIIEVGESSRVKEILNDERYKAFKQFTSVFGVGVKTSEKWYRMGLRTVEEAKASKSLKLSKMQKAGFLYYEDLASGVSKEEADAVTLIVKETVRRVSPDALVTIAGGFRRGKPMGHDVDLLITIPGRPTDDELLHKVVDLLKKQGLLLYEDIRESTFVEGQLPNPKPDALDNHQKCFAILKLYRPKVDNSAVGTSKKSDMAEVKDWKAVRVDLVVAPDEQFAYALLGWTGSGQFRRDTRRYAEEERDMLLDNHRLYDLKKGIFLRADSEEEIFGHLDLDYLEPWERNA

SEQ ID NO: 5127 - DNA, 1182 bp, synthetic construct
  misc_feature 1..1182: note = Variant of terminal deoxynucleotidyl transferase
  source 1..1182: mol_type = other DNA
atgcatcaccaccatcatcatgggggttctggtcatccggaaggtaataccccggagaaggaggtgccgagcgttatcgcccgtcatgttagtcaatacgcgtgccagcgcaagaccacgctgaataactacaacaaaaagttcaccgacgcgctggagatcatggccgagaactacaagtttaaagagaacctgcaggcgtgcctggaagccaagcgcgccgcgagtgtcctgaaaagcctgccgttcgaggttaccagcatgaaagacatccaaggtctgccgtgcattaccgacgacgtacgtcctgtgatcgaagagatcatcgaagtaggcgagagcagccgtgttaaagaaatcctcaatgacgagcgctacaaggcctttaagcagttcaccagcgtgttcggtgtgggcgtgaaaacctcggaaaagtggtaccgtatgggcctccgtacgcgcgaagaagcaaaggccagtaagagtctgaagctgaacaagatgcagaaggcgggcttcctgtattacgaggatctggcgagcggtgttagtaaagaagaagccgatgccgttacgctcatcgtgaaggaaacggtgcgcactgttagtccggatgcgctggtgaccatcgccggcggtttccgccgtggcaaacctatgggccacgacgttgacctgctgatcacgattccgggccgtcctacggatgacgagctgctccacaaagtggttgatctgctcaagaagcaaggtctgctgctgtacgaagacatccgtgagagcacgttcgtggaggggcaactgccaaatcctaaacctgacgccctggacaaccatcagaagtgcttcgccattctcaagctgtaccgtccgaaggtggataacagtgcggttgggacgagtaagaaaagtgacatggctgaggttaaggattggaaagcggttcgtgtggatctggtggtcgctccagatgagcagttcgcctatgcgctgctcggttggacgggcagcggccaatttcgtcgcgatactcgtcgcttcgcggaggaagagcgcgacatgctgctcgacaaccatcgtctctacgacctgaaaaagggcatctttctgagtgcggacagcgaagaagagattttcggtcatctggacctggattatctggaaccgtgggaacgcaacgcg

SEQ ID NO: 5128 - protein, 394 aa, synthetic construct
  REGION 1..394: note = Variant of terminal deoxynucleotidyl transferase
MHHHHHHGGSGHPEGNTPEKEVPSVIARHVSQYACQRKTTLNNYNKKFTDALEIMAENYKFKENLQACLEAKRAASVLKSLPFEVTSMKDIQGLPCITDDVRPVIEEIIEVGESSRVKEILNDERYKAFKQFTSVFGVGVKTSEKWYRMGLRTREEAKASKSLKLNKMQKAGFLYYEDLASGVSKEEADAVTLIVKETVRTVSPDALVTIAGGFRRGKPMGHDVDLLITIPGRPTDDELLHKVVDLLKKQGLLLYEDIRESTFVEGQLPNPKPDALDNHQKCFAILKLYRPKVDNSAVGTSKKSDMAEVKDWKAVRVDLVVAPDEQFAYALLGWTGSGQFRRDTRRFAEEERDMLLDNHRLYDLKKGIFLSADSEEEIFGHLDLDYLEPWERNA

SEQ ID NO: 5129 - DNA, 1182 bp, synthetic construct
  misc_feature 1..1182: note = Variant of terminal deoxynucleotidyl transferase
  source 1..1182: mol_type = other DNA
atgcatcaccaccatcatcatgggggttctggtcatccggaaggtaataccccggagaaggaggtgccgagcgttatcgcccgtcatgttagtccgtacgcgtgccagcgcaagaccacgctgaataactacaacaaaaagttcaccgacgcgctggagatcatggccgagaactacaagtttaaagagaacctgcaggcgtgcctggaagccaagcgcgccgcgagtgtcctgaaaagcctgccgttcgaggttaccagcatgaaagacatccaaggtctgccgtgcattaccgacgacgtacgtcctgtgatcgaagagatcatcgaagtaggcgagagcagccgtgttaaagaaatcctcaatgacgagcgctacaaggcctttaagcagttcaccagcgtgttcggtgtgggcgtgaaaacctcggaaaagtggtaccgtatgggcctccgtacggttgaagaagcaaaggccagtaagagtctgaagctgagcaagatgcagaaggcgggcttcctgtattacgaggatctggcgagcggtgttagtaaagaagaagccgatgccgttacgctcatcgtgaaggaaacggtgcgcactgttagtccggatgcgctggtgaccatcgccggcggtttccgccgtggcaaacctatgggccacgacgttgacctgctgatcacgattccgggccgtcctacggatgacgagctgctccacaaagtggttgatctgctcaagaagcaaggtctgctgctgtacgaagacatccgtgagagcacgttcgtggaggggcaactgccaaatcctaaacctgacgccctggacaaccatcagaagtgcttcgccattctcaagctgtaccgtccgaaggtggataacagtgcggttgggacgagtaagaaaagtgacatggctgaggttaaggattggaaagcggttcgtgtggatctggtggtcgctccagatgagcagttcgcctatgcgctgctcggttggacgggcagcggccaatttcgtcgcgatactcgtcgctatgcggaggaagagcgcgacatgctgctcgacaaccatcgtctctacgacctgaaaaagggcatctttctgagtgcggacagcgaagaagagattttcggtcatctggacctggattatctggagccgtgggaacgcaacgcg

SEQ ID NO: 5130 - protein, 394 aa, synthetic construct; identical to SEQ ID NO: 5080
  REGION 1..394: note = Variant of terminal deoxynucleotidyl transferase

SEQ ID NO: 5131 - DNA, 1182 bp, synthetic construct
  misc_feature 1..1182: note = Variant of terminal deoxynucleotidyl transferase
  source 1..1182: mol_type = other DNA
atgcatcaccaccatcatcatgggggttctggtcatccggaaggtaataccccggagaaggaggtgccgagcgttatcgcccgtcatgttagtcaatacgcgtgccagcgcaagaccacgctgaataactacaacaaaaagttcaccgacgcgctggagatcatggccgagaactacaagtttaaagagaacctgcaggcgtgcctggaagccaagcgcgccgcgagtgtcctgaaaagcctgccgttcgaggttaccagcatgaaagacatccaaggtctgccgtgcattaccgacgacgtacgtcctgtgatcgaagagatcatcgaagtaggcgagagcagccgtgttaaagaaatcctcaatgacgagcgctacaaggcctttaagcagttcaccagcgtgttcggtgtgggcgtgaaaacctcggaaaagtggtaccgtatgggcctccgtacgcgcgaagaagcaaaggccagtaagagtctgaagctgagccgcatgcagaaggcgggcttcctgtattacgaggatctggcgagcggtgttagtaaagaagaagccgatgccgttacgctcatcgtgaaggaaacggtgcgcactgttagtccggatgcgctggtgaccctggccggcggtttccgccgtggcaaacctatgggccacgacgttgacctgctgatcacgattccgggccgtcctacggatgacgagctgctccacaaagtggttgatctgctcaagaagcaaggtctgctgctgtacgaagacatccgtgagagcacgttcgtggaggggcaactgccaaatcctaaacctgacgccctggacaaccatcagaagtgcttcgccattctcaagctgtaccgtccgaaggtggataacagtgcggttgggacgagtaagaaaagtgacatggctgaggttaaggattggaaagcggttcgtgtggatctggtggtcgctccagatgagcagttcgcctatgcgctgctcggttggacgggcagcggccaatttcgtcgcgatactcgtcgcttcgcgtcggaagagcgcgacatgctgctcgacaaccatcgtctctacgacctgaaaaagggcatctttctgagtgcggacagcgaagaagagattttcggtcatctggacctggattatctggagccgtgggaacgcaacgcg

SEQ ID NO: 5132 - protein, 394 aa, synthetic construct
  REGION 1..394: note = Variant of terminal deoxynucleotidyl transferase
MHHHHHHGGSGHPEGNTPEKEVPSVIARHVSQYACQRKTTLNNYNKKFTDALEIMAENYKFKENLQACLEAKRAASVLKSLPFEVTSMKDIQGLPCITDDVRPVIEEIIEVGESSRVKEILNDERYKAFKQFTSVFGVGVKTSEKWYRMGLRTREEAKASKSLKLSRMQKAGFLYYEDLASGVSKEEADAVTLIVKETVRTVSPDALVTLAGGFRRGKPMGHDVDLLITIPGRPTDDELLHKVVDLLKKQGLLLYEDIRESTFVEGQLPNPKPDALDNHQKCFAILKLYRPKVDNSAVGTSKKSDMAEVKDWKAVRVDLVVAPDEQFAYALLGWTGSGQFRRDTRRFASEERDMLLDNHRLYDLKKGIFLSADSEEEIFGHLDLDYLEPWERNA

SEQ ID NO: 5133 - DNA, 1182 bp, synthetic construct
  misc_feature 1..1182: note = Variant of terminal deoxynucleotidyl transferase
  source 1..1182: mol_type = other DNA
atgcatcaccaccatcatcatgggggttctggtcatccggaaggtaataccccggagaaggaggtgccgagcgttatcgcccgtcatgttagtcaatacgcgtgccagcgcaagaccacgctgaataactacaacaaaaagttcaccgacgcgctggaaatcatggccgagaactacaagtttaaagagaacctgcaggcgtgcctggaagccaagcgcgccgcgagtgtcctgaaaagcctgccgttcgaggttaccagcatgaaagacatccaaggtctgccgtgcattaccgacgacgtacgtcctgtgatcgaagagatcatcgaagtaggcgagagcagccgtgttaaagaaatcctcaatgacgagcgctacaaggcctttaagcagttcaccagcgtgttcggtgtgggcgtgaaaacctcggaaaagtggtaccgtatgggcctccgtacggttgaagaagcaaaggccagtaagagtatgaagctgagcaagatgcagaaggcgggcttcctgtattacgaggatctggcgagcggtgttagtaaagaagaagccgatgccgttacgctcatcgtgaaggaaacggtgcgccgcgttagtccggatgcgctggtgaccatcgccggcggtttccgccgtggcaaacctatgggccacgacgttgacctgctgatcacgattccgggccgtcctacggatgacgagctgctccacaaagtggttgatctgctcaagaagcaaggtctgctgctgtacgaagacatccgtgagagcacgttcgtggaggggcaactgccaaatcctaaacctgacgccctggacaaccatcagaagtgcttcgccattctcaagctgtaccgtccgaaggtggataacagtgcggttgggacgagtaagaaaagtgacatggctgaggttaaggattggaaagcggttcgtgtggatctggtggtcgctccagatgagcagttcgcctatgcgctgctcggttggacgggcagcggccaatttcgtcgcgatactcgtcgctatgcggaggaagagcgcgacatgctgctcgacaaccatcgtctctacgacctgaaaaagggcatctttctgagtgcggacagcgaagaagagattttcggtcatctggacctggattatctggagccgtgggaacgcaacgcg

SEQ ID NO: 5134 - protein, 394 aa, synthetic construct
  REGION 1..394: note = Variant of terminal deoxynucleotidyl transferase
MHHHHHHGGSGHPEGNTPEKEVPSVIARHVSQYACQRKTTLNNYNKKFTDALEIMAENYKFKENLQACLEAKRAASVLKSLPFEVTSMKDIQGLPCITDDVRPVIEEIIEVGESSRVKEILNDERYKAFKQFTSVFGVGVKTSEKWYRMGLRTVEEAKASKSMKLSKMQKAGFLYYEDLASGVSKEEADAVTLIVKETVRRVSPDALVTIAGGFRRGKPMGHDVDLLITIPGRPTDDELLHKVVDLLKKQGLLLYEDIRESTFVEGQLPNPKPDALDNHQKCFAILKLYRPKVDNSAVGTSKKSDMAEVKDWKAVRVDLVVAPDEQFAYALLGWTGSGQFRRDTRRYAEEERDMLLDNHRLYDLKKGIFLSADSEEEIFGHLDLDYLEPWERNA

SEQ ID NO: 5135 - DNA, 1182 bp, synthetic construct
  misc_feature 1..1182: note = Variant of terminal deoxynucleotidyl transferase
  source 1..1182: mol_type = other DNA
atgcatcaccaccatcatcatgggggttctggtcatccggaaggtaataccccggagaaggaggtgccgagcgttatcgcccgtcatgttagtcaatacgcgtgccagcgcaagaccacgctgaataactacaacaaaaagttcaccgacgcgctggagatcatggccgagaactacaagtttaaagagaacctgcaggcgtgcctggaagccaagcgcgccgcgagtgtcctgaaaagcctgtcgttcgaggttaccagcatgaaagacatccaaggtctgccgtgcattaccgacgacgtacgtcctgtgatcgaagagatcatcgaagtaggcgagagcagccgtgttaaagaaatcctcaatgacgagcgctacaaggcctttaagcagttcaccagcgtgttcggtgtgggcgtgaaaacctcggaaaagtggtaccgtatgggcctccgtacgcgcgaagaagcaaaggccagtaagagtctgaagctgagcaagatgcagaaggcgggcttcctgtattacgaggatctggcgagcggtgttagtaaagaagaagccgatgccgttacgctcatcgtgaaggaaacggtgcgcactgttagtccggatgcgctggtgaccatcgccggcggtttccgccgtggcaaacctatgggccacgacgttgacctgctgatcacgattccgggccgtcctacggatgacgagctgctccacaaagtggttgatctgctcaagaagcaaggtctgctgctgtacgaagacatccgtgagagcacgttcgtggaggggcaactgccaaatcctaaacctgacgccctggacaaccatcagaagtgcttcgccattctcaagctgtaccgtccgaaggtggataaccgtgcggttgggacgagtaagaaaagtgacatggctgaggttaaggattggaaagcggttcgtgtggatctggtggtcgctccagatgagcagttcgcctatgcgctgctcggttggacgggcagcggccagtttcgtcgcgatactcgtcgctatgcggaggaagagcgcgacatgctgctcgacaaccatcgtctctacgacctgaaaaagggcatctttctgagtgcggacagcgaagaagagattttcggtcatctggacctggattatctggaaccgtgggaacgcaacgcg

SEQ ID NO: 5136 - protein, 394 aa, synthetic construct
  REGION 1..394: note = Variant of terminal deoxynucleotidyl transferase
MHHHHHHGGSGHPEGNTPEKEVPSVIARHVSQYACQRKTTLNNYNKKFTDALEIMAENYKFKENLQACLEAKRAASVLKSLSFEVTSMKDIQGLPCITDDVRPVIEEIIEVGESSRVKEILNDERYKAFKQFTSVFGVGVKTSEKWYRMGLRTREEAKASKSLKLSKMQKAGFLYYEDLASGVSKEEADAVTLIVKETVRTVSPDALVTIAGGFRRGKPMGHDVDLLITIPGRPTDDELLHKVVDLLKKQGLLLYEDIRESTFVEGQLPNPKPDALDNHQKCFAILKLYRPKVDNRAVGTSKKSDMAEVKDWKAVRVDLVVAPDEQFAYALLGWTGSGQFRRDTRRYAEEERDMLLDNHRLYDLKKGIFLSADSEEEIFGHLDLDYLEPWERNA

SEQ ID NO: 5137 - DNA, 1182 bp, synthetic construct
  misc_feature 1..1182: note = Variant of terminal deoxynucleotidyl transferase
  source 1..1182: mol_type = other DNA
atgcatcaccaccatcatcatgggggttctggtcatccggaaggtaataccccggagaaggaggtgccgagcgttatcgcccgtcatgttagtcaatacgcgtgccagcgcaagaccacgctgaataactacaacaaaaagttcaccgacgcgctggagatcatggccgagaactacaagtttaaagagaacctgcaggcgtgcctggaagccaagcgcgccgcgagtgtcctgaaaagcctgccgttcgaggttaccagcatgaaagacatccaaggtctgccgtgcattaccgacgacgtacgtcctgtgatcgaagagatcatcgaagtaggcgagagcagccgtgttaaagaaatcctcaatgacgagcgctacaaggcctttaagcagttcaccagcgtgttcggtgtgggcgtgaaaacctcggaaaagtggtaccgtatgggcctccgtacgcgcgaagaagcaaaggccagtaagagtctgaagctgaacaagatgcagaaggcgggcttcctgtattacgaggatctggcgagcggtgttagtaaagaagaagccgatgccgttacgctcatcgtgaaggaaacggtgcgcactgttagtccggatgcgctggtgaccatcgccggcggtttccgccgtggcaaacctatgggccacgacgttgacctgctgatcacgattccgggccgtcctacggatgacgagctgctccacaaagtggttgatctgctcaagaagcaaggtctgctgctgtacgaagacatccgtgagagcacgttcgtggaggggcaactgccaaatcctaaacctgacgccctggacaaccatcagaagtgcttcgccattctcaagctgtaccgtccgaaggtggataacagtgcggttgggacgagtaagaaaagtgacatggctgaggttaaggattggaaagcggttcgtgtggatctggtggtcgctccagatgagcagttcgcctatgcgctgctcggttggacgggcagcggccagtttcgtcgcgatactcgtagcttcgcggaggaagagcgcgacatgctgctcgacaaccatcgtctctacgacctgaaaaagggcatctttctgagtgcggacagcgaagaagagattttcggtcatctggacctggattatctggaaccgtgggaacgcaacgcg

SEQ ID NO: 5138 - protein, 394 aa, synthetic construct
  REGION 1..394: note = Variant of terminal deoxynucleotidyl transferase
MHHHHHHGGSGHPEGNTPEKEVPSVIARHVSQYACQRKTTLNNYNKKFTDALEIMAENYKFKENLQACLEAKRAASVLKSLPFEVTSMKDIQGLPCITDDVRPVIEEIIEVGESSRVKEILNDERYKAFKQFTSVFGVGVKTSEKWYRMGLRTREEAKASKSLKLNKMQKAGFLYYEDLASGVSKEEADAVTLIVKETVRTVSPDALVTIAGGFRRGKPMGHDVDLLITIPGRPTDDELLHKVVDLLKKQGLLLYEDIRESTFVEGQLPNPKPDALDNHQKCFAILKLYRPKVDNSAVGTSKKSDMAEVKDWKAVRVDLVVAPDEQFAYALLGWTGSGQFRRDTRSFAEEERDMLLDNHRLYDLKKGIFLSADSEEEIFGHLDLDYLEPWERNA

SEQ ID NO: 5139 - DNA, 1182 bp, synthetic construct
  misc_feature 1..1182: note = Variant of terminal deoxynucleotidyl transferase
  source 1..1182: mol_type = other DNA
atgcatcaccaccatcatcatgggggttctggtcatccggaaggtaataccccggagaaggaggtgccgagcgttatcgcccgtcatgttagtcaatacgcgtgccagcgcaagaccacgctgaataactacaacaaaaagttcaccgacgcgctggagatcatggccgagaactacaagtttaaagagaacctgcaggcgtgcctggaagccaagcgcgccgcgagtgtcctgaaaagcctgccgttcgaggttaccagcatgaaagacatccaaggtctgccgtgcattaccgacgacgtacgtcctgtgatcgaagagatcatcgaagtaggcgagagcagccgtgttaaagaaatcctcaatgacgagcgctacaaggcctttaagcagttcaccagcgtgttcggtgtgggcgtgaaaacctcggaaaagtggtaccgtatgggcctccgtacgcgcgaagaagcaaaggccagtaagagtctgaagctgagcaagatgcagaaggcgggcttcctgtattacgaggatctggcgagcggtgttagtaaagaagaagccgatgccgttacgctcatcgtgaaggaaacggtgcgcactgttagtccggatgcgctggtgaccatcgccggcggtttccgccgtggcaaacctatgggccacgacgttgacctgctgatcacgattccgggccgtcctacggatgacgagctgctccacaaagtggttgatctgctcaagaagcaaggtctgctgctgtacgaagacatccgtgagagcacgttcgtggaggggcaactgccaaatcctaaacctgacgccctggacaaccatcagaagtgcttcgccattctcaagctgtaccgtccgaaggtggataacagtgcggttgggacgagtaagaaaagtgacatggctgaggttaaggattggaaagcggttcgtgtggatctggtggtcgctccagatgagcagttcgcctatgcgctgctcggttggacgggcagcggccaatttcgtcgcgatactcgtcgctatgcggaggaagagcgcgacatgctgctcgacaaccatcgtctctacgacctgaaaaagggcatctttctgagtgcggacagcgaagaagagattttcggtcatctggacctggattatctggagccgtgggaacgcaacgcg

SEQ ID NO: 5140 - protein, 394 aa, synthetic construct; identical to SEQ ID NO: 5092
  REGION 1..394: note = Variant of terminal deoxynucleotidyl transferase

SEQ ID NO: 5141 - DNA, 1182 bp, synthetic construct
  misc_feature 1..1182: note = Variant of terminal deoxynucleotidyl transferase
  source 1..1182: mol_type = other DNA
atgcatcaccaccatcatcatgggggttctggtcatccggaaggtaataccccggagaaggaggtgccgagcgttatcgcccgtcatgttagtcaatacgcgtgccagcgcaagaccacgctgaataactacaacaaaaagttcaccgacgcgctggagatcatggccgagaactacaagtttaaagagaacctgcaggcgtgcctggaagccaagcgcgccgcgagtgtcctgaaaagcctgccgttcgaggttaccagcatgaaagacatccaaggtctgccgtgcattaccgacgacgtacgtcctgtgatcgaagagatcatcgaagtaggcgagagcagccgtgttaaagaaatcctcaatgacgagcgctacaaggcctttaagcagttcaccagcgtgttcggtgtgggcgtgaaaacctcggaaaagtggtaccgtatgggcctccgtacgcgcgaagaagcaaaggccagtaagagtctgaagctgagcaagatgcagaaggcgggcttcctgtattacgaggatctggcgagcggtgttagtaaagaagaagccgatgccgttacgctcatcgtgaaggaaacggtgcgcactgttagtccggatgcgctggtgaccatcgccggcggtttccgccgtggcaaacctatgggccacgacgttgacctgctgatcacgattccgggccgtcctacggatgacgagctgctccacaaagtggttgatctgctcaagaagcaaggtctgctgctgtacgaagacatccgtgagagcacgttcgtggaggggcaactgccaaatcctaaacctgacgccctggacaaccatcagaagtgcttcgccattctcaagctgtaccgtccgaaggtggataaccgtgcggttgggacgagtaagaaaagtgacatggctgaggttaaggattggaaagcggttcgtgtggatctggtggtcgctccagatgagcagttcgcctatgcgctgctcggttggacgggcagcggccaatttcgtcgcgatactcgtcgcttcgcggaggaagagcgcgacatgctgctcgacaaccatcgtctctacgacctgaaaaagggcatctttctgagtgcggacagcgaagaagagattttcggtcatctggacctggattatctggagccgtgggaacgcaacgcg

SEQ ID NO: 5142 - protein, 394 aa, synthetic construct
  REGION 1..394: note = Variant of terminal deoxynucleotidyl transferase
MHHHHHHGGSGHPEGNTPEKEVPSVIARHVSQYACQRKTTLNNYNKKFTDALEIMAENYKFKENLQACLEAKRAASVLKSLPFEVTSMKDIQGLPCITDDVRPVIEEIIEVGESSRVKEILNDERYKAFKQFTSVFGVGVKTSEKWYRMGLRTREEAKASKSLKLSKMQKAGFLYYEDLASGVSKEEADAVTLIVKETVRTVSPDALVTIAGGFRRGKPMGHDVDLLITIPGRPTDDELLHKVVDLLKKQGLLLYEDIRESTFVEGQLPNPKPDALDNHQKCFAILKLYRPKVDNRAVGTSKKSDMAEVKDWKAVRVDLVVAPDEQFAYALLGWTGSGQFRRDTRRFAEEERDMLLDNHRLYDLKKGIFLSADSEEEIFGHLDLDYLEPWERNA

SEQ ID NO: 5143 - DNA, 1182 bp, synthetic construct
  misc_feature 1..1182: note = Variant of terminal deoxynucleotidyl transferase
  source 1..1182: mol_type = other DNA
atgcatcaccaccatcatcatgggggttctggtcatccggaaggtaataccccggagaaggaggtgccgagcgttatcgcccgtcatgttagtcaatacgcgtgccagcgcaagaccacgctgaataactacaacaaaaagttcaccgacgcgctggagatcatggccgagaactacaagtttaaagagaacctgcaggcgtgcctggaagccaagcgcgccgcgagtgtcctgaaaagcctgccgttcgaggttaccagcatgaaagacatccaaggtctgccgtgcattaccgacgacgtacgtcctgtgatcgaagagatcatcgaagtaggcgagagcagccgtgttaaagaaatcctcaatgacgagcgctacaaggcctttaagcagttcaccagcgtgttcggtgtgggcgtgaaaacctcggaaaagtggtaccgtatgggcctccgtacggtagaagtagcaaaggccagtaagagtctgaagctgacccgcatgcagaaggcgggcttcctgtattacgaggatctggcgagcggtgttagtaaagaagaagccgatgccgttacgctcatcgtgaaggaaacggtgcgcactgttagtccggatgcgctggtgaccatcgccggcggtttccgccgtggcaaacctatgggccacgacgttgacctgctgatcacgattccgggccgtcctacggatgacgagctgctccacaaagtggttgatctgctcaagaagcaaggtctgctgctgtacgaagacatccgtgagagcacgttcgtggaggggcaactgccaaatcctaaacctgacgccctggacaaccatcagaagtgcttcgccattctcaagctgtaccgtccgaaggtggataacagtgcggttgggacgagtaagaaaagtgacatggctgaggttaaggattggaaagcggttcgtgtggatctggtggtcgctccagatgagcagttcgcctatgcgctgctcggttggacgggcagcggccagtttcgtcgcgatactcgtcgctatgcggaggaagagcgcgacatgctgctcgacaaccatcgtctctacgacctgaaaaagggcatctttctgagtgcggacagcgaagaagagattttcggtcatctggacctggattatctggaaccgtgggaacgcaacgcg

SEQ ID NO: 5144 - protein, 394 aa, synthetic construct
  REGION 1..394: note = Variant of terminal deoxynucleotidyl transferase
MHHHHHHGGSGHPEGNTPEKEVPSVIARHVSQYACQRKTTLNNYNKKFTDALEIMAENYKFKENLQACLEAKRAASVLKSLPFEVTSMKDIQGLPCITDDVRPVIEEIIEVGESSRVKEILNDERYKAFKQFTSVFGVGVKTSEKWYRMGLRTVEVAKASKSLKLTRMQKAGFLYYEDLASGVSKEEADAVTLIVKETVRTVSPDALVTIAGGFRRGKPMGHDVDLLITIPGRPTDDELLHKVVDLLKKQGLLLYEDIRESTFVEGQLPNPKPDALDNHQKCFAILKLYRPKVDNSAVGTSKKSDMAEVKDWKAVRVDLVVAPDEQFAYALLGWTGSGQFRRDTRRYAEEERDMLLDNHRLYDLKKGIFLSADSEEEIFGHLDLDYLEPWERNA

SEQ ID NO: 5145 - DNA, 1182 bp, synthetic construct
  misc_feature 1..1182: note = Variant of terminal deoxynucleotidyl transferase
  source 1..1182: mol_type = other DNA
atgcatcaccaccatcatcatgggggttctggtcatccggaaggtaataccccggagaaggaggtgccgagcgttatcgcccgtcatgttagtcaatacgcgtgccagcgcaagaccacgctgaataactacaacaaaaagttcaccgacgcgctggagatcatggccgagaactacaagtttaaagagaacctgcaggcgtgcctggaagccaagcgcgccgcgagtgtcctgaaaagcctgccgttcgaggttaccagcatgaaagacatccaaggtctgccgtgcattaccgacgacgtacgtcctgtgatcgaagagatcatcgaagtaggcgagagcagccgtgttaaagaaatcctcaatgacgagcgctacaaggcctttaagcagttcaccagcgtgttcggtgtgggcgtgaaaacctcggaaaagtggtaccgtatgggcctccgtacgcgcgaagaagcaaaggccagtaagagtctgaagctgagcaagatgcagaaggcgggcttcctgtattacgaggatctggcgagcggtgttagtaaagaagaagccgatgccgttacgctcatcgtgaaggaaacggtgcgcactgttagtccggatgcgctggtgaccatcgccggcggtttccgccgtggcaaacctatgggccacgacgttgacctgctgatcacgattccgggccgtcctacggatgacgagctgctccacaaagtggttgatctgctcaagaagcaaggtctgctgctgtacgaagacatccgtgagagcacgttcgtggaggggcaactgccaaatcctaaacctgacgccctggacaaccatcagaagtgcttcgccattctcaagctgtaccgtccgaaggtggataacagtgcggttgggacgagtaagaaaagtgacatggctgaggttaaggattggaaagcggttcgtgtggatctggtggtcgctccagatgagcagttcgcctatgcgctgctcggttggacgggcagcggccaatttcgtcgcgatactcgtcgcttcgcggaggaagagcgcgacatgctgctcgacaaccatcgtctctacgacctgaaaaagggcatctttctgagtgcggacagcgaagaagagattttcggtcatctggacctggattatctggagccgtgggaacgcaacgcg

SEQ ID NO: 5146 - protein, 394 aa, synthetic construct
  REGION 1..394: note = Variant of terminal deoxynucleotidyl transferase
MHHHHHHGGSGHPEGNTPEKEVPSVIARHVSQYACQRKTTLNNYNKKFTDALEIMAENYKFKENLQACLEAKRAASVLKSLPFEVTSMKDIQGLPCITDDVRPVIEEIIEVGESSRVKEILNDERYKAFKQFTSVFGVGVKTSEKWYRMGLRTREEAKASKSLKLSKMQKAGFLYYEDLASGVSKEEADAVTLIVKETVRTVSPDALVTIAGGFRRGKPMGHDVDLLITIPGRPTDDELLHKVVDLLKKQGLLLYEDIRESTFVEGQLPNPKPDALDNHQKCFAILKLYRPKVDNSAVGTSKKSDMAEVKDWKAVRVDLVVAPDEQFAYALLGWTGSGQFRRDTRRFAEEERDMLLDNHRLYDLKKGIFLSADSEEEIFGHLDLDYLEPWERNA

SEQ ID NO: 5147 - DNA, 1182 bp, synthetic construct
  misc_feature 1..1182: note = Variant of terminal deoxynucleotidyl transferase
  source 1..1182: mol_type = other DNA
atgcatcaccaccatcatcatgggggttctggtcatccggaaggtaataccccggagaaggaggtgccgagcgttatcgcccgtcatgttagtcaatacgcgtgccagcgcaagaccacgctgaataactacaacaaaaagttcaccgacgcgctggaaatcatggccgagaactacaagtttaaagagaacctgcaggcgtgcctggaagccaagcgcgccgcgagtgtcctgaaaagcctgccgttcgaggttaccagcatgaaagacatccaaggtctgccgtgcattaccgacgacgtacgtcctgtgatcgaagagatcatcgaagtaggcgagagcagccgtgttaaagaaatcctcaatgacgagcgctacaaggcctttaagcagttcaccagcgtgttcggtgtgggcgtgaaaacctcggaaaagtggtaccgtatgggcctccgtacggttgaagaagcaaaggccagtaagagtctgatgctgagcaagatgcagaaggcgggcttcctgtattacgaggatctggcgagcggtgttagtaaagaagaagccgatgccgttacgctcatcgtgaaggaaacggtgcgcactgttagtccggatgcgctggtgaccatcgccggcggtttccgccgtggcaaacctatgggccacgacgttgacctgctgatcacgattccgggccgtcctacggatgacgagctgctccacaaagtggttgatctgctcaagaagcaaggtctgctgctgtacgaagacatccgtgagagcacgttcgtggaggggcaactgccaaatcctaaacctgacaaactggacaaccattcgaagtgcttcgccattctcaagctgtaccgtccgaaggtggataacagtgcggttgggacgagtaagaaaagtgacatggctgaggttaaggattggaaagcggttcgtgtggatctggtggtcgctccagatgagcagttcgcctatgcgctgctcggttggacgggcagcggccaatttcgtcgcgatactcgtcgctatgcggaggaagagcgcgacatgctgctcgacaaccatcgtctctacgacctgaaaaagggcatctttctgagtgcggacagcgaagaagagattttcggtcatctggacctggattatctggagccgtgggaacgcaacgcg

SEQ ID NO: 5148 - protein, 394 aa, synthetic construct
  REGION 1..394: note = Variant of terminal deoxynucleotidyl transferase
MHHHHHHGGSGHPEGNTPEKEVPSVIARHVSQYACQRKTTLNNYNKKFTDALEIMAENYKFKENLQACLEAKRAASVLKSLPFEVTSMKDIQGLPCITDDVRPVIEEIIEVGESSRVKEILNDERYKAFKQFTSVFGVGVKTSEKWYRMGLRTVEEAKASKSLMLSKMQKAGFLYYEDLASGVSKEEADAVTLIVKETVRTVSPDALVTIAGGFRRGKPMGHDVDLLITIPGRPTDDELLHKVVDLLKKQGLLLYEDIRESTFVEGQLPNPKPDKLDNHSKCFAILKLYRPKVDNSAVGTSKKSDMAEVKDWKAVRVDLVVAPDEQFAYALLGWTGSGQFRRDTRRYAEEERDMLLDNHRLYDLKKGIFLSADSEEEIFGHLDLDYLEPWERNA

SEQ ID NO: 5149 - DNA, 1182 bp, synthetic construct
  misc_feature 1..1182: note = Variant of terminal deoxynucleotidyl transferase
  source 1..1182: mol_type = other DNA
atgcatcaccaccatcatcatgggggttctggtcatccggaaggtaataccccggagaaggaggtgccgagcgttatcgcccgtcatgttagtccgtacgcgtgccagcgcaagaccacgctgaataactacaacaaaaagttcaccgacgcgctggagatcatggccgagaactacaagtttaaagagaacctgcaggcgtgcctggaagccaagcgcgccgcgagtgtcctgaaaagcctgccgttcgaggttaccagcatgaaagacatccaaggtctgccgtgcattaccgacgacgtacgtcctgtgatcgaagagatcatcgaagtaggcgagagcagccgtgttaaagaaatcctcaatgacgagcgctacaaggcctttaagcagttcaccagcgtgttcggtgtgggcgtgaaaacctcggaaaagtggtaccgtatgggcctccgtacggttgaagaagcaaaggccagtaagcgcctgaagctgagcaagatgcagaaggcgggcttcctgtattacgaggatctggcgagcggtgttagtaaagaagaagccgatgccgttacggctatcgtgaaggaaacggtgcgcactgttagtccggatgcgctggtgaccatcgccggcggtttccgccgtggcaaacctatgggccacgacgttgacctgctgatcacgattccgggccgtcctacggatgacgagctgctccacaaagtggttgatctgctcaagaagcaaggtctgctgctgtacgaagacatccgtgagagcacgttcgtggaggggcaactgccaaatcctaaacctgacgccctggacaaccatcagaagtgcttcgccattctcaagctgtaccgtccgaaggtggataacagtgcggttgggacgagtaagaaaagtgacatggctgaggttaaggattggaaagcggttcgtgtggatctggtggtcgctccagatgagcagttcgcctatgcgctgctcggttggacgggcagcggccaatttcgtcgcgatactcgtcgctatgcggaggaagagcgcgacatgctgctcgacaaccatcgtctctacgacctgaaaaagggcatctttctgagtgcggacagcgaagaagagattttcggtcatctggacctggattatctggagccgtgggaacgcaacgcg

SEQ ID NO: 5150 - protein, 394 aa, synthetic construct
  REGION 1..394: note = Variant of terminal deoxynucleotidyl transferase
MHHHHHHGGSGHPEGNTPEKEVPSVIARHVSPYACQRKTTLNNYNKKFTDALEIMAENYKFKENLQACLEAKRAASVLKSLPFEVTSMKDIQGLPCITDDVRPVIEEIIEVGESSRVKEILNDERYKAFKQFTSVFGVGVKTSEKWYRMGLRTVEEAKASKRLKLSKMQKAGFLYYEDLASGVSKEEADAVTAIVKETVRTVSPDALVTIAGGFRRGKPMGHDVDLLITIPGRPTDDELLHKVVDLLKKQGLLLYEDIRESTFVEGQLPNPKPDALDNHQKCFAILKLYRPKVDNSAVGTSKKSDMAEVKDWKAVRVDLVVAPDEQFAYALLGWTGSGQFRRDTRRYAEEERDMLLDNHRLYDLKKGIFLSADSEEEIFGHLDLDYLEPWERNA

SEQ ID NO: 5151 - DNA, 1182 bp, synthetic construct
  misc_feature 1..1182: note = Variant of terminal deoxynucleotidyl transferase
  source 1..1182: mol_type = other DNA
atgcatcaccaccatcatcatgggggttctggtcatccggaaggtaataccccggagaaggaggtgccgagcgttatcgcccgtcatgttagtccgtacgcgtgccagcgcaagaccacgctgaataactacaacaaaaagttcaccgacgcgctggagatcatggccgagaactacaagtttaaagagaacctgcaggcgtgcctggaggcccgtcgcgccgcgagtgtcctgaaaagcctgccgttcgaggttaccagcatgaaagacatccaaggtctgccgtgcattaccgacgacgtacgtcctgtgatcgaagagatcatcgaagtaggcgagagcagccgtgttaaagaaatcctcaatgacgagcgctacaaggcctttaagcagttcaccagcgtgttcggtgtgggcgttaaaacctcggaaaagtggtaccgtatgggcctccgtacgcgcgaagaagcaaaggccagtaagagtctgaagctgaacaagatgcagaaggcgggcttcctgtattacgaggatctggcgagcggtgttagtaaagaagaagccgatgccgttacgctcatcgtgaaggaaacggtgcgcactgttagtccggatgcgctggtgaccatcgccggcggtttccgccgtggcaaacctatgggccacgacgttgacctgctgatcacgattccgggccgtcctacggatgacgagctgctccacaaagtggttgatctgctcaagaagcaaggtctgctgctgtacgaagacatccgtgagagcacgttcgtggaggggcaactgccaaatcctaaacctgacgccctggacaaccatcagaagtgcttcgccattctcaagctgtaccgtccgaaggtggataacagtgcggttgggacgagtaagaaaagtgacatggctgaggttaaggattggaaagcggttcgtgtggatctggtggtcgctccagatgagcagttcgcctatgcgctgctcggttggacgggcagcggcatgtttcgtcgcgatactcgtcgctacgcggaggaagagcgcgacatgctgctcgacaaccatggtctctacgacctgaaaaagggcatctttctgagtgcggacagcgaagaagagattttcggtcatctggacctggattatctggagccgtgggaacgcaacgcg

SEQ ID NO: 5152 - protein, 394 aa, synthetic construct
  REGION 1..394: note = Variant of terminal deoxynucleotidyl transferase
MHHHHHHGGSGHPEGNTPEKEVPSVIARHVSPYACQRKTTLNNYNKKFTDALEIMAENYKFKENLQACLEARRAASVLKSLPFEVTSMKDIQGLPCITDDVRPVIEEIIEVGESSRVKEILNDERYKAFKQFTSVFGVGVKTSEKWYRMGLRTREEAKASKSLKLNKMQKAGFLYYEDLASGVSKEEADAVTLIVKETVRTVSPDALVTIAGGFRRGKPMGHDVDLLITIPGRPTDDELLHKVVDLLKKQGLLLYEDIRESTFVEGQLPNPKPDALDNHQKCFAILKLYRPKVDNSAVGTSKKSDMAEVKDWKAVRVDLVVAPDEQFAYALLGWTGSGMFRRDTRRYAEEERDMLLDNHGLYDLKKGIFLSADSEEEIFGHLDLDYLEPWERNA

SEQ ID NO: 5153 - DNA, 1182 bp, synthetic construct
  misc_feature 1..1182: note = Variant of terminal deoxynucleotidyl transferase
  source 1..1182: mol_type = other DNA
atgcatcaccaccatcatcatgggggttctggtcatccggaaggtaataccccggagaaggaggtgccgagcgttatcgcccgtcatgttagtcaatacgcgtgccagcgcaagaccacgctgaataactacaacaaaaagttcaccgacgcgctggagatcatggccgagaactacaagtttaaagagaacctgcaggcgtgcctggaagccaagcgcgccgcgagtgtcctgaaaagcctgccgttcgaggttaccagcatgaaagacatccaaggtctgccgtgcattaccgacgacgtacgtcctgtgatcgaagagatcatcgaagtaggcgagagcagccgtgttaaagaaatcctcaatgacgagcgctacaaggcctttaagcagttcaccagcgtgttcggtgtgggcgtgaaaacctcggaaaagtggtaccgtatgggcctccgtacgcgcgaagaagcaaaggccagtaagagtctgaagctgaacaagatgcagaaggcgggcttcctgtattacgaggatctggcgagcggtgttagtaaagaagaagccgatgccgttacgctcatcgtgaaggaaacggtgcgcactgttagtccggatgcgctggtgaccatcgccggcggtttccgccgtggcaaacctcgtggccacgacgttgacctgctgatcacgattccgggccgtcctacggatgacgagctgctccacaaagtggttgatctgctcaagaagcaaggtctgctgctgtacgaagacatccgtgagagcacgttcgtggaggggcaactgccaaatcctaaacctgacgccctggacaaccatcagaagtgcttcgccattctcaagctgtaccgtccgaaggtggataacagtgcggttgggacgagtaagaaaagtgacatggctgaggttaaggattggaaagcggttcgtgtggatctggtggtcgctccagatgagcagttcgcctatgcgctgctcggttggacgggcagcggcatgtttcgtcgcgatactcgtcgctacgcggaggaagagcgcgacatgctgctcgacaaccatcgtctctacgacctgaaaaagggcatctttctgagtgcggacagcgaagaagagattttcggtcatctggacctggattatctggagccgtgggaacgcaacgcg

SEQ ID NO: 5154 - protein, 394 aa, synthetic construct
  REGION 1..394: note = Variant of terminal deoxynucleotidyl transferase
MHHHHHHGGSGHPEGNTPEKEVPSVIARHVSQYACQRKTTLNNYNKKFTDALEIMAENYKFKENLQACLEAKRAASVLKSLPFEVTSMKDIQGLPCITDDVRPVIEEIIEVGESSRVKEILNDERYKAFKQFTSVFGVGVKTSEKWYRMGLRTREEAKASKSLKLNKMQKAGFLYYEDLASGVSKEEADAVTLIVKETVRTVSPDALVTIAGGFRRGKPRGHDVDLLITIPGRPTDDELLHKVVDLLKKQGLLLYEDIRESTFVEGQLPNPKPDALDNHQKCFAILKLYRPKVDNSAVGTSKKSDMAEVKDWKAVRVDLVVAPDEQFAYALLGWTGSGMFRRDTRRYAEEERDMLLDNHRLYDLKKGIFLSADSEEEIFGHLDLDYLEPWERNA

SEQ ID NO: 5155 - DNA, 1182 bp, synthetic construct
  misc_feature 1..1182: note = Variant of terminal deoxynucleotidyl transferase
  source 1..1182: mol_type = other DNA
atgcatcaccaccatcatcatgggggttctggtcatccggaaggtaataccccggagaaggaggtgccgagcgttatcgcccgtcatgttagtcagtacgcgtgccagcgcaagaccacgctgaataactacaacaaaaagttcaccgacgcgctggagatcatggccgagaactacaagtttaaagagaacctgcaggcgtgcctggaggccaaacgcgccgcgagtgtcctgaaaagcctgccgttcgaggttaccagcatgaaagacatccaaggtctgccgtgcattaccgacgacgtacgtcctgtgatcgaagagatcatcgaagtaggcgagagcagccgtgttaaagaaatcctcaatgacgagcgctacaaggcctttaagcagttcaccagcgtgttcggtgtgggcgtgaaaacctcggaaaagtggtaccgtatgggcctccgtacgcgcgaagaagcaaaggccagtaagagtctgaagctgaacaagatgcagaaggcgggcttcctgtattacgaggatctggcgagcggtgttagtaaagaagaagccgatgccgttacgctcatcgtgaaggaaacggtgcgcactgttagtccggatgcgctggtgaccatcgccggcggtttccgccgtggcaaacctatgggccacgacgttgacctgctgatcacgattccgggccgtcctacggatgacgagctgctccacaaagtggttgatctgctcaagaagcaaggtctgctgctgtacgaagacatccgtgagcgcacgttcgtggaggggcaactgccaaatcctaaacctgacgccctggacaaccatcagaagtgcttcgccattctcaagctgtaccgtccgaaggtggataacagtgcggttgggacgagtaagaaaagtgacatggctgaggttaaggattggaaagcggttcgtgtggatctggtggtcgctccagatgagcagttcgcctatgcgctgctcggttggacgggcagcggccaatttcgtcgcgatactcgtcgctacgcggaggaagagcgcgacatgctgctcgacaaccatcgtctctacgacctgaaaaagggcatctttctgagtgcggacagcgaagaagagattttcggtcatctggacctggattatctggagccgtgggaacgcaacgcg

SEQ ID NO: 5156 - protein, 394 aa, synthetic construct
  REGION 1..394: note = Variant of terminal deoxynucleotidyl transferase
MHHHHHHGGSGHPEGNTPEKEVPSVIARHVSQYACQRKTTLNNYNKKFTDALEIMAENYKFKENLQACLEAKRAASVLKSLPFEVTSMKDIQGLPCITDDVRPVIEEIIEVGESSRVKEILNDERYKAFKQFTSVFGVGVKTSEKWYRMGLRTREEAKASKSLKLNKMQKAGFLYYEDLASGVSKEEADAVTLIVKETVRTVSPDALVTIAGGFRRGKPMGHDVDLLITIPGRPTDDELLHKVVDLLKKQGLLLYEDIRERTFVEGQLPNPKPDALDNHQKCFAILKLYRPKVDNSAVGTSKKSDMAEVKDWKAVRVDLVVAPDEQFAYALLGWTGSGQFRRDTRRYAEEERDMLLDNHRLYDLKKGIFLSADSEEEIFGHLDLDYLEPWERNA

SEQ ID NO: 5157 - DNA, 1182 bp, synthetic construct
  misc_feature 1..1182: note = Variant of terminal deoxynucleotidyl transferase
  source 1..1182: mol_type = other DNA
atgcatcaccaccatcatcatgggggttctggtcatccggaaggtaataccccggagaaggaggtgccgagcgttatcgcccgtcatgttagtcaatacgcgtgccagcgcaagaccacgctgaataactacaacaaaaagttcaccgacgcgctggagatcatggccgagaactacaagtttaaagagaacctgcaggcgtgcctgcgtgccaaacgcgccgcgagtgtcctgaaaagcctgccgttcgaggttaccagcatgaaagacatccaaggtctgccgtgcattaccgacgacgtacgtcctgtgatcgaagagatcatcgaagtaggcgagagcagccgtgttaaagaaatcctcaatgacgagcgctacaaggcctttaagcagttcaccagcgtgttcggtgtgggcgttaaaacctcggaaaagtggtaccgtatgggcctccgtacgcgcgaagaagcaaaggccagtaagagtctgaagctgaacaagatgcagaaggcgggcttcctgtattacgaggatctggcgagcggtgttagtaaagaagaagccgatgccgttacgctcatcgtgaaggaaacggtgcgcactgttagtccggatgcgctggtgaccatcgccggcggtttccgccgtggcaaacctatgggccacgacgttgacctgctgatcacgattccgggccgtcctacggatgacgagctgctccacaaagtggttgatctgctcaagaagcaaggtctgctgctgtacgaagacatccgtgagagcacgttcgtggaggggcaactgccaaatcctaaacctgacgccctggacaaccatcagaagtgcttcgccattctcaagctgtaccgtccgaaggtggataacagtgcggttgggacgagtaagaaaagtgacatggctgaggttaaggattggaaagcggttcgtgtggatctggtggtcgctccagatgagcagttcgcctatgcgctgctcggttggacgggcagcggccagtttcgtcgcgatactcgtcgctacgcggaggaagagcgcgacatgctgctcgacaaccatagtctctacgacctgaaaaagggcatctttctgagtgcggacagcgaagaagagattttcggtcatctggacctggattatctggagccgtgggaacgcaacgcg

SEQ ID NO: 5158 - protein, 394 aa, synthetic construct
  REGION 1..394: note = Variant of terminal deoxynucleotidyl transferase
MHHHHHHGGSGHPEGNTPEKEVPSVIARHVSQYACQRKTTLNNYNKKFTDALEIMAENYKFKENLQACLRAKRAASVLKSLPFEVTSMKDIQGLPCITDDVRPVIEEIIEVGESSRVKEILNDERYKAFKQFTSVFGVGVKTSEKWYRMGLRTREEAKASKSLKLNKMQKAGFLYYEDLASGVSKEEADAVTLIVKETVRTVSPDALVTIAGGFRRGKPMGHDVDLLITIPGRPTDDELLHKVVDLLKKQGLLLYEDIRESTFVEGQLPNPKPDALDNHQKCFAILKLYRPKVDNSAVGTSKKSDMAEVKDWKAVRVDLVVAPDEQFAYALLGWTGSGQFRRDTRRYAEEERDMLLDNHSLYDLKKGIFLSADSEEEIFGHLDLDYLEPWERNA

SEQ ID NO: 5159 - DNA, 1182 bp, synthetic construct
  misc_feature 1..1182: note = Variant of terminal deoxynucleotidyl transferase
  source 1..1182: mol_type = other DNA
atgcatcaccaccatcatcatgggggttctggtcatccggaaggtaataccccggagaaggaggtgccgagcgttatcgcccgtcatgttagtcaatacgcgtgccagcgcaagaccacgctgaataactacaacaaaaagttcaccgacgcgctggagatcatggccgagaactacaagtttaaagagaacctgcaggcgtgcctggaagccaagcgcgccgcgagtgtcctgaaaagcctgccgttcgaggttaccagcatgaaagacatccaaggtctgccgtgcattaccgacgacgtacgtcctgtgatcgaagagatcatcgaagtaggcgagagcagccgtgttaaagaaatcctcaatgacgagcgctacaaggcctttaagcagttcaccagcgtgttcggtgtgggcgtgaaaacctcggaaaagtggtaccgtatgggcctccgtacgcgctatgaagcaaaggccagtaagagtctgaagctgaacaagatgcagaaggcgggcttcctgtattacgaggatctggcgagcggtgttagtaaagaagaagccgatgccgttacgctcatcgtgaaggaaacggtgcgcactgttagtccggatgcgctggtgaccatcgccggcggtttccgccgtggcaaacctcgtggccacgacgttgacctgctgatcacgattccgggccgtcctacggatgacgagctgctccacaaagtggttgatctgctcaagaagcaaggtctgctgctgtacgaagacatccgtgagagcacgttcgtggaggggcaactgccaaatcctaaacctgacgctctggacaaccatcagaagtgcttcgccattctcaagctgtaccgtccgaaggtggataacagtgcggttgggacgagtaagaaaagtgacatggctgaggttaaggattggaaagcggttcgtgtggatctggtggtcgctccagattcgcagttcgcctatgcgctgctcggttggacgggcagcggcatgtttcgtcgcgatactcgtcgctacgcggaggaagagcgcgacatgctgctcgacaaccatcgtctctacgacctgaaaaagggcatctttctgagtgcggacagcgaagaagagattttcggtcatctggacctggattatctggagccgtgggaacgcaacgcg

SEQ ID NO: 5160 - protein, 394 aa, synthetic construct
  REGION 1..394: note = Variant of terminal deoxynucleotidyl transferase
MHHHHHHGGSGHPEGNTPEKEVPSVIARHVSQYACQRKTTLNNYNKKFTDALEIMAENYKFKENLQACLEAKRAASVLKSLPFEVTSMKDIQGLPCITDDVRPVIEEIIEVGESSRVKEILNDERYKAFKQFTSVFGVGVKTSEKWYRMGLRTRYEAKASKSLKLNKMQKAGFLYYEDLASGVSKEEADAVTLIVKETVRTVSPDALVTIAGGFRRGKPRGHDVDLLITIPGRPTDDELLHKVVDLLKKQGLLLYEDIRESTFVEGQLPNPKPDALDNHQKCFAILKLYRPKVDNSAVGTSKKSDMAEVKDWKAVRVDLVVAPDSQFAYALLGWTGSGMFRRDTRRYAEEERDMLLDNHRLYDLKKGIFLSADSEEEIFGHLDLDYLEPWERNA

SEQ ID NO: 5161 - DNA, 1182 bp, synthetic construct
  misc_feature 1..1182: note = Variant of terminal deoxynucleotidyl transferase
  source 1..1182: mol_type = other DNA
atgcatcaccaccatcatcatgggggttctggtcatccggaaggtaataccccggagaaggaggtgccgagcgttatcgcccgtcatgttagtccgtacgcgtgccagcgcaagaccacgctgaataactacaacaaaaagttcaccgacgcgctggagatcatggccgagaactacaagtttaaagagaacctgcaggcgtgcctggaggccaaacgcgccgcgagtgtcctgaaaagcctgccgttcgaggttaccagcatgaaagacatccaaggtctgccgtgcattaccgacgacgtacgtcctgtgatcgaagagatcatcgaagtaggcgagagcagccgtgttaaagaaatcctcaatgacgagcgctacaaggcctttaagcagttcaccagcgtgttcggtgtgggcgtgaaaacctcggaaaagtggtaccgtatgggcctccgtacgcgcgaagaagcaaaggccagtaagagtctgaagctgaacaagatgcagaaggcgggcttcctgtattacgaggatctgcgcagcggtgttagtaaagaagaagccgatgccgttacgctcatcgtgaaggaaacggtgcgcactgttagtccggatgcgctggtgaccatcgccggcggtttccgccgtggcaaacctatgggccacgacgttgacctgctgatcacgattccgggccgtcctacggatgacgagctgctccacaaagtggtggatctgctcaagaagcaaggtctgctgctgtacgaagacatccgtgagcgcacgttcgtggaggggcaactgccaaatcctaaacctgacgccctggacaaccatcagaagtgcttcgccattctcaagctgtaccgtccgaaggtggataacagtgcggttgggacgagtaagaaaagtgacatggctgaggttaaggattggaaagcggttcgtgtggatctggtggtcgctccagatgagcagttcgcctatgcgctgctcggttggacgggcagcggcatgtttcgtcgcgatactcgtcgctacgcggaggaagagcgcgacatgctgctcgacaaccatcgtctctacgacctgaaaaagggcatctttctgagtgcggacagcgaagaagagattttcggtcatctggacctggattatctggagccgtgggaacgcaacgcg

SEQ ID NO: 5162 - protein, 394 aa, synthetic construct
  REGION 1..394: note = Variant of terminal deoxynucleotidyl transferase
MHHHHHHGGSGHPEGNTPEKEVPSVIARHVSPYACQRKTTLNNYNKKFTDALEIMAENYKFKENLQACLEAKRAASVLKSLPFEVTSMKDIQGLPCITDDVRPVIEEIIEVGESSRVKEILNDERYKAFKQFTSVFGVGVKTSEKWYRMGLRTREEAKASKSLKLNKMQKAGFLYYEDLRSGVSKEEADAVTLIVKETVRTVSPDALVTIAGGFRRGKPMGHDVDLLITIPGRPTDDELLHKVVDLLKKQGLLLYEDIRERTFVEGQLPNPKPDALDNHQKCFAILKLYRPKVDNSAVGTSKKSDMAEVKDWKAVRVDLVVAPDEQFAYALLGWTGSGMFRRDTRRYAEEERDMLLDNHRLYDLKKGIFLSADSEEEIFGHLDLDYLEPWERNA

SEQ ID NO: 5163 - DNA, 1182 bp, synthetic construct
  misc_feature 1..1182: note = Variant of terminal deoxynucleotidyl transferase
  source 1..1182: mol_type = other DNA
atgcatcaccaccatcatcatgggggttctggtcatccggaaggtaataccccggagaaggaggtgccgagcgttatcgcccgtcatgttagtcagtacgcgtgccagcgcaagaccacgctgaataactacaacaaaaagttcaccgacgcgctggagatcatggccgagaactacaagtttaaagagaacctgcaggcgtgcctggaggccaaacgcgccgcgagtgtcctgaaaagcctgccgttcgaggttaccagcatgaaagacatccaaggtctgccgtgcattaccgacgacgtacgtcctgtgatcgaagagatcatcgaagtaggcgagagcagccgtgttaaagaaatcctcaatgacgagcgctacaaggcctttaagcagttcaccagcgtgttcggtgtgggcgttcgtacctcggaaaagtggtaccgtatgggcctccgtacgcgcgaagaagcaaaggccagtaagagtctgaagctgaacaagatgcagaaggcgggcttcctgtattacgaggatctggcgagcggtgttagtaaagaagaagccgatgccgttacgctcatcgtgaaggaaacggtgcgcactgttagtccggatgcgctggtgaccatcgccggcggtttccgccgtggcaaacctatgggccacgacgttgacctgctgatcacgattccgggccgtcctacggatgacgagctgctccacaaagtgctggatctgctcaagaagcaaggtctgctgctgtacgaagacatccgtgagagcacgttcgtggaggggcaactgccaaatcctaaacctgacgccctggacaaccatcagaagtgcttcgccattctcaagctgtaccgtccgaaggtggataacagtgcggttgggacgagtaagaaaagtgacatggctgaggttaaggattggaaagcggttcgtgtggatctggtggtcgctccagatgagcagttcgcctatgcgctgctcggttggacgggcagcggccaatttcgtcgcgatactcgtcgctacgcggaggaagagcgcgacatgctgctcgacaaccatagtctctacgacctgaaaaagggcatctttctgagtgcggacagcgaagaagagattttcggtcatctggacctggattatctggagccgtgggaacgcaacgcg

SEQ ID NO: 5164 - protein, 394 aa, synthetic construct
  REGION 1..394: note = Variant of terminal deoxynucleotidyl transferase
MHHHHHHGGSGHPEGNTPEKEVPSVIARHVSQYACQRKTTLNNYNKKFTDALEIMAENYKFKENLQACLEAKRAASVLKSLPFEVTSMKDIQGLPCITDDVRPVIEEIIEVGESSRVKEILNDERYKAFKQFTSVFGVGVRTSEKWYRMGLRTREEAKASKSLKLNKMQKAGFLYYEDLASGVSKEEADAVTLIVKETVRTVSPDALVTIAGGFRRGKPMGHDVDLLITIPGRPTDDELLHKVLDLLKKQGLLLYEDIRESTFVEGQLPNPKPDALDNHQKCFAILKLYRPKVDNSAVGTSKKSDMAEVKDWKAVRVDLVVAPDEQFAYALLGWTGSGQFRRDTRRYAEEERDMLLDNHSLYDLKKGIFLSADSEEEIFGHLDLDYLEPWERNA

SEQ ID NO: 5165 - DNA, 1182 bp, synthetic construct
  misc_feature 1..1182: note = Variant of terminal deoxynucleotidyl transferase
  source 1..1182: mol_type = other DNA
atgcatcaccaccatcatcatgggggttctggtcatccggaaggtaataccccggagaaggaggtgccgagcgttatcgcccgtcatgttagtcaatacgcgtgccagcgcaagaccacgctgaataactacaacaaaaagttcaccgacgcgctggagatcatggccgagaactacaagtttaaagagaacctgcaggcgtgcctggaagccaagcgcgccgcgagtgtcctgaaaagcctgccgttcgaggttaccagcatgaaagacatccaaggtctgccgtgcattaccgacgacgtacgtcctgtgatcgaagagatcatcgaagtaggcgagagcagccgtgttaaagaaatcctcaatgacgagcgctacaaggcctttaagcagttcaccagcgtgttcggtgtgggcgtgaaaacctcggaaaagtggtaccgtatgggcctccgtacgcgcgaagaagcaaaggccagtaagagtctgaagctgaacaagatgcagaaggcgggcttcctgtattacgaggatctggcgagcggtgttagtaaagaagaagccgatgccgttacgctcatcgtgaaggaaacggtgcgcactgttagtccggatgcgctggtgaccatcgccggcggtttccgccgtggcaaacctcgtggccacgacgttgacctgctgatcacgattccgggccgtcctacggatgacgagctgctccacaaagtggttgatctgctcaagaagcaaggtctgctgctgtacgaagacatccgtgagagcacgttcgtggaggggcaactgccaaatcctaaacctgacgccctggacaaccatcagaagtgcttcgccattctcaagctgtaccgtccgaaggtggataacagtgcggttgggacgagtaagaaaagtgacatggctgaggttaaggattggaaagcggttcgtgtggatctggtggtcgctccagatgaacagttcgcctatgcgctgctcggttggacgggcagcggccagtttcgtcgcgatactcgtcgctacgcggaggaagagcgcgacatgctgctcgacaaccatcgtctctacgacctgaaaaagggcatctttctgagtgcggacagcgaagaagagattttcggtcatctggacctggattatctggagccgtgggaacgcaacgcg

SEQ ID NO: 5166 - protein, 394 aa, synthetic construct
  REGION 1..394: note = Variant of terminal deoxynucleotidyl transferase
MHHHHHHGGSGHPEGNTPEKEVPSVIARHVSQYACQRKTTLNNYNKKFTDALEIMAENYKFKENLQACLEAKRAASVLKSLPFEVTSMKDIQGLPCITDDVRPVIEEIIEVGESSRVKEILNDERYKAFKQFTSVFGVGVKTSEKWYRMGLRTREEAKASKSLKLNKMQKAGFLYYEDLASGVSKEEADAVTLIVKETVRTVSPDALVTIAGGFRRGKPRGHDVDLLITIPGRPTDDELLHKVVDLLKKQGLLLYEDIRESTFVEGQLPNPKPDALDNHQKCFAILKLYRPKVDNSAVGTSKKSDMAEVKDWKAVRVDLVVAPDEQFAYALLGWTGSGQFRRDTRRYAEEERDMLLDNHRLYDLKKGIFLSADSEEEIFGHLDLDYLEPWERNA

SEQ ID NO: 5167 - DNA, 1182 bp, synthetic construct
  misc_feature 1..1182: note = Variant of terminal deoxynucleotidyl transferase
  source 1..1182: mol_type = other DNA
atgcatcaccaccatcatcatgggggttctggtcatccggaaggtaataccccggagaaggaggtgccgagcgttatcgcccgtcatgttagtcaatacgcgtgccagcgcaagaccacgctgaataactacaacaaaaagttcaccgacgcgctggagatcatggccgagaactacaagtttaaagagaacctgcaggcgtgcctggaagccaagcgcgccgcgagtgtcctgaaaagcctgccgttcgaggttaccagcatgaaagacatccaaggtctgccgtgcattaccgacgacgtacgtcctgtgatcgaagagatcatcgaagtaggcgagagcagccgtgttaaagaaatcctcaatgacgagcgctacaaggcctttaagcagttcaccagcgtgttcggtgtgggcgtgaaaacctcggaaaagtggtaccgtatgggcctccgtacgcgcgaagaagcaaaggccagtaagagtctgaagctgaacaagatgcagaaggcgggcttcctgtattacgaggatctggcgagcggtgttagtaaagaagaagccgatgccgttacgctcatcgtgaaggaaacggtgcgcactgttagtccggatgcgctggtgaccatcgccggcggtttccgccgtggcaaacctatgggccacgacgttgacctgctgatcacgattccgggccgtcctacggatgacgagctgctccacaaagtggttgatctgctcaagaagcaaggtctgctgctgtaccaagacatccgtgagagcacgttcgtggaggggcaactgccaaatcctaaacctgacgccctggacaaccatcagaagtgcttcgccattctcaagctgtaccgtccgaaggtggataacagtgcggttgggacgagtaagaaaagtgacatggctgaggttaaggattggaaagcggttcgtgtggatctggtggtcgctccagatgagcagttcgcctatgcgctgctcggttggacgggcagcggccagtttcgtcgcgatactcgtcgctacgcggaggaagagcgcgacatgctgctcgacaaccatagtctctacgacctgaaaaagggcatctttctgagtgcggacagcgaagaagagattttcggtcatctggacctggattatctggagccgtgggaacgcaacgcg

SEQ ID NO: 5168 - protein, 394 aa, synthetic construct
  REGION 1..394: note = Variant of terminal deoxynucleotidyl transferase
MHHHHHHGGSGHPEGNTPEKEVPSVIARHVSQYACQRKTTLNNYNKKFTDALEIMAENYKFKENLQACLEAKRAASVLKSLPFEVTSMKDIQGLPCITDDVRPVIEEIIEVGESSRVKEILNDERYKAFKQFTSVFGVGVKTSEKWYRMGLRTREEAKASKSLKLNKMQKAGFLYYEDLASGVSKEEADAVTLIVKETVRTVSPDALVTIAGGFRRGKPMGHDVDLLITIPGRPTDDELLHKVVDLLKKQGLLLYQDIRESTFVEGQLPNPKPDALDNHQKCFAILKLYRPKVDNSAVGTSKKSDMAEVKDWKAVRVDLVVAPDEQFAYALLGWTGSGQFRRDTRRYAEEERDMLLDNHSLYDLKKGIFLSADSEEEIFGHLDLDYLEPWERNA

SEQ ID NO: 5169 - DNA, 1182 bp, synthetic construct
  misc_feature 1..1182: note = Variant of terminal deoxynucleotidyl transferase
  source 1..1182: mol_type = other DNA
atgcatcaccaccatcatcatgggggttctggtcatccggaaggtaataccccggagaaggaggtgccgagcgttatcgcccgtcatgttagtcaatacgcgtgccagcgcaagaccacgctgaataactacaacaaaaagttcaccgacgcgctggagatcatggccgagaactacaagtttaaagagaacctgcaggcgtgcgctgaagccaagcgcgccgcgagtgtcctgaaaagcctgccgttcgaggttaccagcatgaaagacatccaaggtctgccgtgcattaccgacgacgtacgtcctgtgatcgaagagatcatcgaagtaggcgagagcagccgtgttaaagaaatcctcaatgacgagcgctacaaggcctttaagcagttcaccagcgtgttcggtgtgggcgtgaaaacctcggaaaagtggtaccgtatgggcctccgtacgcgcgaagaagcaaaggccagtaagagtctgaagctgaacaagatgcagaaggcgggcttcctgtattacgaggatctggcgagcggtgttagtaaagaagaagccgatgccgttacgctcatcgtgaaggaaacggtgcgcactgttagtccggatgcgctggtgaccatcgccggcggtttccgccgtggcaaacctcgtggccacgacgttgacctgctgatcacgattccgggccgtcctacggatgacgagctgctccacaaagtggttgatctgctcaagaagcaaggtctgctgctgtacgaagacatccgtgagagcacgttcgtggaggggcaactgccaaatcctaaacctgacgccctggacaaccatcagaagtgcttcgccattctcaagctgtaccgtccgaaggtggataacagtgcggttgggacgagtaagaaaagtgacatggctgaggttaaggattggaaagcggttcgtgtggatctggtggtcgctccagatgagcagttcgcctatgcgctgctcggttggacgggcagcggccaatttcgtcgcgatactcgtcgctacgcggaggaagagcgcgacatgctgctcgacaaccatcgtctctacgacctgaaaaagggcatctttctgagtgcggacagcgaagaagagattttcggtcatctggacctggattatctggagccgtgggaacgcaacgcg

SEQ ID NO: 5170 - protein, 394 aa, synthetic construct
  REGION 1..394: note = Variant of terminal deoxynucleotidyl transferase
MHHHHHHGGSGHPEGNTPEKEVPSVIARHVSQYACQRKTTLNNYNKKFTDALEIMAENYKFKENLQACAEAKRAASVLKSLPFEVTSMKDIQGLPCITDDVRPVIEEIIEVGESSRVKEILNDERYKAFKQFTSVFGVGVKTSEKWYRMGLRTREEAKASKSLKLNKMQKAGFLYYEDLASGVSKEEADAVTLIVKETVRTVSPDALVTIAGGFRRGKPRGHDVDLLITIPGRPTDDELLHKVVDLLKKQGLLLYEDIRESTFVEGQLPNPKPDALDNHQKCFAILKLYRPKVDNSAVGTSKKSDMAEVKDWKAVRVDLVVAPDEQFAYALLGWTGSGQFRRDTRRYAEEERDMLLDNHRLYDLKKGIFLSADSEEEIFGHLDLDYLEPWERNA

SEQ ID NO: 5171 - DNA, 1182 bp, synthetic construct
  misc_feature 1..1182: note = Variant of terminal deoxynucleotidyl transferase
  source 1..1182: mol_type = other DNA
atgcatcaccaccatcatcatgggggttctggtcatccggaaggtaataccccggagaaggaggtgccgagcgttatcgcccgtcatgttagtcaatacgcgtgccagcgcaagaccacgctgaataactacaacaaaaagttcaccgacgcgctggagatcatggccgagaactacaagtttaaagagaacctgcaggcgtgcctggaagccaagcgcgccgcgagtgtcctgaaaagcctgccgttcgaggttaccagcatgaaagacatccaaggtctgccgtgcattaccgacgacgtacgtcctgtgatcgaagagatcatcgaagtaggcgagagcagccgtgttaaagaaatcctcaatgacgagcgctacaaggcctttaagcagttcaccagcgtgttcggtgtgggcgttaaaacctcggaaaagtggtaccgtatgggcctccgtacgcgcgaagaagcaaaggccagtaagagtctgaagctgaacaagatgcagaaggcgggcttcctgtattacgaggatctgcgcagcggtgttagtaaagaagaagccgatgccgttacgctcatcgtgaaggaaacggtgcgcactgttagtccggatgcgctggtgaccatcgccggcggtttccgccgtggcaaacctatgggccacgacgttgacctgctgatcacgattccgggccgtcctacggatgacgagctgctccacaaagtggttgatctgctcaagaagcaaggtctgctgctgtacgaagacatccgtgagagcacgttcgtggaggggcaactgccaaatcctaaacctgacgccctggacaaccatcagaagtgcttcgccattctcaagctgtaccgtccgaaggtggataacagtgcggttgggacgagtaagaaaagtgacatggctgaggttaaggattggaaagcggttcgtgtggatctggtggtcgctccagatgagcagttcgcctatgcgctgctcggttggacgggcagcggcatgtttcgtcgcgatactcgtcgctacgcggaggaagagcgcgacatgctgctcgacaaccatcgtctctacgacctgaaaaagggcatctttctgagtgcggacagcgaagaagagattttcggtcatctggacctggattatctggagccgtgggaacgcaacgcg

SEQ ID NO: 5172 - protein, 394 aa, synthetic construct
  REGION 1..394: note = Variant of terminal deoxynucleotidyl transferase
MHHHHHHGGSGHPEGNTPEKEVPSVIARHVSQYACQRKTTLNNYNKKFTDALEIMAENYKFKENLQACLEAKRAASVLKSLPFEVTSMKDIQGLPCITDDVRPVIEEIIEVGESSRVKEILNDERYKAFKQFTSVFGVGVKTSEKWYRMGLRTREEAKASKSLKLNKMQKAGFLYYEDLRSGVSKEEADAVTLIVKETVRTVSPDALVTIAGGFRRGKPMGHDVDLLITIPGRPTDDELLHKVVDLLKKQGLLLYEDIRESTFVEGQLPNPKPDALDNHQKCFAILKLYRPKVDNSAVGTSKKSDMAEVKDWKAVRVDLVVAPDEQFAYALLGWTGSGMFRRDTRRYAEEERDMLLDNHRLYDLKKGIFLSADSEEEIFGHLDLDYLEPWERNA

SEQ ID NO: 5173 - DNA, 1182 bp, synthetic construct
  misc_feature 1..1182: note = Variant of terminal deoxynucleotidyl transferase
  source 1..1182: mol_type = other DNA
atgcatcaccaccatcatcatgggggttctggtcatccggaaggtaataccccggagaaggaggtgccgagcgttatcgcccgtcatgttagtcagtacgcgtgccagcgcaagaccacgctgaataactacaacaaaaagttcaccgacgcgctggagatcatggccgagaactacaagtttaaagagaacctgcaggcgtgcctggaagccaagcgcgccgcgagtgtcctgaaaagcctgccgttcgaggttaccagcatgaaagacatccaaggtctgccgtgcattaccgacgacgtacgtcctgtgatcgaagagatcatcgaagtaggcgagagcagccgtgttaaagaaatcctcaatgacgagcgctacaaggcctttaagcagttcaccagcgtgttcggtgtgggcgttcgtacctcggaaaagtggtaccgtatgggcctccgtacgcgcgaagaagcaaaggccagtaagagtctgaagctgaacaagatgcagaaggcgggcttcctgtattacgaggatctggcgagcggtgttagtaaagaagaagccgatgccgttacgctcatcgtgaaggaaacggtgcgcactgttagtccggatgcgctggtgaccatcgccggcggtttccgccgtggcaaacctatgggccacgacgttgacctgctgatcacgattccgggccgtcctacggatgacgagctgctccacaaagtggttgatctgctcaagaagcaaggtctgctgctgtacgaagacatccgtgagcgcacgttcgtggaggggcaactgccaaatcctaaacctgacgccctggacaaccatcagaagtgcttcgccattctcaagctgtaccgtccgaaggtggataacagtgcggttgggacgagtaagaaaagtgacatggctgaggttaaggattggaaagcggttcgtgtggatctggtggtcgctccagatgagcagttcgcctatgcgctgctcggttggacgggcagcggcatgtttcgtcgcgatactcgtcgctacgcggaggaagagcgcgacatgctgctcgacaaccatcgtctctacgacctgaaaaagggcatctttctgagtgcggacagcgaagaagagattttcggtcatctggacctggattatctggagccgtgggaacgcaacgcg

SEQ ID NO: 5174 - protein, 394 aa, synthetic construct
  REGION 1..394: note = Variant of terminal deoxynucleotidyl transferase
MHHHHHHGGSGHPEGNTPEKEVPSVIARHVSQYACQRKTTLNNYNKKFTDALEIMAENYKFKENLQACLEAKRAASVLKSLPFEVTSMKDIQGLPCITDDVRPVIEEIIEVGESSRVKEILNDERYKAFKQFTSVFGVGVRTSEKWYRMGLRTREEAKASKSLKLNKMQKAGFLYYEDLASGVSKEEADAVTLIVKETVRTVSPDALVTIAGGFRRGKPMGHDVDLLITIPGRPTDDELLHKVVDLLKKQGLLLYEDIRERTFVEGQLPNPKPDALDNHQKCFAILKLYRPKVDNSAVGTSKKSDMAEVKDWKAVRVDLVVAPDEQFAYALLGWTGSGMFRRDTRRYAEEERDMLLDNHRLYDLKKGIFLSADSEEEIFGHLDLDYLEPWERNA

SEQ ID NO: 5175 - DNA, 1182 bp, synthetic construct
  misc_feature 1..1182: note = Variant of terminal deoxynucleotidyl transferase
  source 1..1182: mol_type = other DNA
atgcatcaccaccatcatcatgggggttctggtcatccggaaggtaataccccggagaaggaggtgccgagcgttatcgcccgtcatgttagtcaatacgcgtgccagcgcaagaccacgctgaataactacaacaaaaagttcaccgacgcgctgactatcatggcggagaactacaagtttaaagagaacctgcaggcgtgcctggaagccaagaaagccgtgagtgtcctgaaaagcctgccgttcgaggttaccagcatgaaagacatccaaggtctgccgtgcattaccgacgacgtacgtcctgtgatcgaagagatcatcgaagtaggcgagagcagccgtgttaaagaaatcctcaatgacgagcgctacaaggcctttaagcagttcaccagcgtgttcggtgtgggcgtgaaaacctcggaaaagtggtaccgtatgggcctccgtacgcgcgaagaagcaaaggccagtaagagtctgaagctgaacaagatgcagaaggcgggcttcctgtattacgaggatctggcgagcggtgttagtaaagaagaagccgatgccgttacgctcatcgtgaaggaaacggtgcgcactgttagtccggatgcgctggtgaccatcgccggcggtttccgccgtggcaaacctatgggccacgacgttgacctgctgatcacgattccgggccgtcctacggatccagaggtgctccacaaagtggttgatctgctcaagaagcaaggtctgctgctgtacgaagacatccgtgagagcacgttcgtggaggggcaactgccaaatcctaaacctgacgccctggacaaccatcagaagtgcttcgccattctcaagctgtaccgtccgaaggtggataacagtgcggttgggacgagtaagaaaagtgacatggctgaggttaaggattggaaagcggttcgtgtggatctggtggtcgctccagatgagcagttcgcctatgcgctgctcggttggacgggcagcggccaatttcgtcgcgatactcgtcgctacgcggaggaagagcgcgacatgctgctcgacaaccatcgtctctacgacctgaaaaagggcatctttctgagtgcggacagcgaagaagagattttcggtcatctggacctggattatctggagccgtgggaacgcaacgcg

SEQ ID NO: 5176 - protein, 394 aa, synthetic construct
  REGION 1..394: note = Variant of terminal deoxynucleotidyl transferase
MHHHHHHGGSGHPEGNTPEKEVPSVIARHVSQYACQRKTTLNNYNKKFTDALTIMAENYKFKENLQACLEAKKAVSVLKSLPFEVTSMKDIQGLPCITDDVRPVIEEIIEVGESSRVKEILNDERYKAFKQFTSVFGVGVKTSEKWYRMGLRTREEAKASKSLKLNKMQKAGFLYYEDLASGVSKEEADAVTLIVKETVRTVSPDALVTIAGGFRRGKPMGHDVDLLITIPGRPTDPEVLHKVVDLLKKQGLLLYEDIRESTFVEGQLPNPKPDALDNHQKCFAILKLYRPKVDNSAVGTSKKSDMAEVKDWKAVRVDLVVAPDEQFAYALLGWTGSGQFRRDTRRYAEEERDMLLDNHRLYDLKKGIFLSADSEEEIFGHLDLDYLEPWERNA

SEQ ID NO: 5177 - DNA, 1182 bp, synthetic construct
  misc_feature 1..1182: note = Variant of terminal deoxynucleotidyl transferase
  source 1..1182: mol_type = other DNA
atgcatcaccaccatcatcatgggggttctggtcatccggaaggtaataccccggagaaggaggtgccgagcgttatcgcccgtcatgttagtcagtacgcgtgccagcgcaagaccacgctgaataactacaacaaaaagttcaccgacgcgctggagatcatggccgagaactacaagtttaaagagaacctgcaggcgtgcctgcgtgccaaacgcgccgcgagtgtcctgaaaagcctgccgttcgaggttaccagcatgaaagacatccaaggtctgccgtgcattaccgacgacgtacgtcctgtgatcgaagagatcatcgaagtaggcgagagcagccgtgttaaagaaatcctcaatgacgagcgctacaaggcctttaagcagttcaccagcgtgttcggtgtgggcgttaaaacctcggaaaagtggtaccgtatgggcctccgtacgcgcgaagaagcaaaggccagtaagagtctgaagctgaacaagatgcagaaggcgggcttcctgtattacgaggatctggcgagcggtgttagtaaagaagaagccgatgccgttacgctcatcgtgaaggaaacggtgcgcactgttagtccggatgcgctggtgaccatcgccggcggtttccgccgtggcaaacctatgggccacgacgttgacctgctgatcacgattccgggccgtcctacggatgacgagctgctccacaaagtggttgatctgctcaagaagcaaggtctgctgctgtacgaagacatccgtgagagcacgttcgtggaggggcaactgccaaatcctaaacctgacgccctggacaaccatcagaagtgcttcgccattctcaagctgtaccgtccgaaggtggataacagtgcggttgggacgagtaagaaaagtgacatggctgaggttaaggattggaaagcggttcgtgtggatctggtggtcgctccagatgagcagttcgcctatgcgctgctcggttggacgggcagcggccagtttcgtcgcgatactcgtcgctacgcggaggaagagcgcgacatgctgctcgacaaccatcgtctctacgacctgaaaaagggcatctttctgagtgcggacagcgaagaagagattttcggtcatctggacctggattatctggagccgtgggaacgcaacgcg

SEQ ID NO: 5178 - protein, 394 aa, synthetic construct
  REGION 1..394: note = Variant of terminal deoxynucleotidyl transferase
MHHHHHHGGSGHPEGNTPEKEVPSVIARHVSQYACQRKTTLNNYNKKFTDALEIMAENYKFKENLQACLRAKRAASVLKSLPFEVTSMKDIQGLPCITDDVRPVIEEIIEVGESSRVKEILNDERYKAFKQFTSVFGVGVKTSEKWYRMGLRTREEAKASKSLKLNKMQKAGFLYYEDLASGVSKEEADAVTLIVKETVRTVSPDALVTIAGGFRRGKPMGHDVDLLITIPGRPTDDELLHKVVDLLKKQGLLLYEDIRESTFVEGQLPNPKPDALDNHQKCFAILKLYRPKVDNSAVGTSKKSDMAEVKDWKAVRVDLVVAPDEQFAYALLGWTGSGQFRRDTRRYAEEERDMLLDNHRLYDLKKGIFLSADSEEEIFGHLDLDYLEPWERNA

SEQ ID NO: 5179 - DNA, 1182 bp, synthetic construct
  misc_feature 1..1182: note = Variant of terminal deoxynucleotidyl transferase
  source 1..1182: mol_type = other DNA
atgcatcaccaccatcatcatgggggttctggtcatccggaaggtaataccccggagaaggaggtgccgagcgttatcgcccgtcatgttagtccgtacgcgtgccagcgcaagaccacgctgaataactacaacaaaaagttcaccgacgcgctggagatcatggccgagaactacaagtttaaagagaacctgcaggcgtgcctggaagccaagcgcgccgcgagtgtcctgaaaagcctgccgttcgaggttaccagcatgaaagacatccaaggtctgccgtgcattaccgacgacgtacgtcctgtgatcgaagagatcatcgaagtaggcgagagcagccgtgttaaagaaatcctcaatgacgagcgctacaaggcctttaagcagttcaccagcgtgttcggtgtgggcattaaaacctcggaaaagtggtaccgtatgggcctccgtacgcgcgaagaagcaaaggccagtaagagtctgaagctgaacaagatgcagaaggcgggcttcctgtattacgaggatctggcgagcggtgttagtaaagaagaagccgatgccgttacgctcatcgtgaaggaaacggtgcgcactgttagtccggatgcgctggtgaccatcgccggcggtttccgccgtggcaaacctatgggccacgacgttgacctgctgatcacgattccgggccgtcctacggatgacgagctgctccacaaagtggttgatctgctcaagaagcaaggtctgctgctgtacgaagacatccgtgagagcacgttcgtggaggggcaactgccaaatcctaaacctgacgccctggacaaccatcagaagtgcttcgccattctcaagctgtaccgtccgaaggtggataacagtgcggttgggacgagtaagaaaagtgacatggctgaggttaaggattggaaagcggttcgtgtggatctggtggtcgctccagatgagcagttcgcctatgcgctgctcggttggacgggcagcggcatgtttcgtcgcgatactcgtcgctacgcggaggaagagcgcgacatgctgctcgacaaccatcgtctctacgacctgaaaaagggcatctttctgagtgcggacagcgaagaagagattttcggtcatctggacctggattatctggagccgtgggaacgcaacgcg

SEQ ID NO: 5180 - protein, 394 aa, synthetic construct
  REGION 1..394: note = Variant of terminal deoxynucleotidyl transferase
MHHHHHHGGSGHPEGNTPEKEVPSVIARHVSPYACQRKTTLNNYNKKFTDALEIMAENYKFKENLQACLEAKRAASVLKSLPFEVTSMKDIQGLPCITDDVRPVIEEIIEVGESSRVKEILNDERYKAFKQFTSVFGVGIKTSEKWYRMGLRTREEAKASKSLKLNKMQKAGFLYYEDLASGVSKEEADAVTLIVKETVRTVSPDALVTIAGGFRRGKPMGHDVDLLITIPGRPTDDELLHKVVDLLKKQGLLLYEDIRESTFVEGQLPNPKPDALDNHQKCFAILKLYRPKVDNSAVGTSKKSDMAEVKDWKAVRVDLVVAPDEQFAYALLGWTGSGMFRRDTRRYAEEERDMLLDNHRLYDLKKGIFLSADSEEEIFGHLDLDYLEPWERNA

SEQ ID NO: 5181 - DNA, 1182 bp, synthetic construct
  misc_feature 1..1182: note = Variant of terminal deoxynucleotidyl transferase
  source 1..1182: mol_type = other DNA
atgcatcaccaccatcatcatgggggttctggtcatccggaaggtaataccccggagaaggaggtgccgagcgttatcgcccgtcatgttagtcagtacgcgtgccagcgcaagaccacgctgaataactacaacaaaaagttcaccgacgcgctggagatcatggccgagaactacaagtttaaagagaacctgcaggcgtgcctgcgtgccaaacgcgccgcgagtgtcctgaaaagcctgccgttcgaggttaccagcatgaaagacatccaaggtctgccgtgcattaccgacgacgtacgtcctgtgatcgaagagatcatcgaagtaggcgagagcagccgtgttaaagaaatcctcaatgacgagcgctacaaggcctttaagcagttcaccagcgtgttcggtgtgggcattcgtacctcggaaaagtggtaccgtatgggcctccgtacgcgcgaagaagcaaaggccagtaagagtctgaagctgaacaagatgcagaaggcgggcttcctgtattacgaggatctggcgagcggtgttagtaaagaagaagccgatgccgttacgctcatcgtgaaggaaacggtgcgcactgttagtccggatgcgctggtgaccatcgccggcggtttccgccgtggcaaacctatgggccacgacgttgacctgctgatcacgattccgggccgtcctacggatgacgagctgctccacaaagtggttgatctgctcaagaagcaaggtctgctgctgtacgaagacatccgtgagagcacgttcgtggaggggcaactgccaaatcctaaacctgacgccctggacaaccatcagaagtgcttcgccattctcaagctgtaccgtccgaaggtggataacagtgcggttgggacgagtaagaaaagtgacatggctgaggttaaggattggaaagcggttcgtgtggatctggtggtcgctccagatgagcagttcgcctatgcgctgctcggttggacgggcagcggcatgtttcgtcgcgatactcgtcgctacgcggaggaagagcgcgacatgctgctcgacaaccatcgtctctacgacctgaaaaagggcatctttctgagtgcggacagcgaagaagagattttcggtcatctggacctggattatctggagccgtgggaacgcaacgcg

SEQ ID NO: 5182 - protein, 394 aa, synthetic construct
  REGION 1..394: note = Variant of terminal deoxynucleotidyl transferase
MHHHHHHGGSGHPEGNTPEKEVPSVIARHVSQYACQRKTTLNNYNKKFTDALEIMAENYKFKENLQACLRAKRAASVLKSLPFEVTSMKDIQGLPCITDDVRPVIEEIIEVGESSRVKEILNDERYKAFKQFTSVFGVGIRTSEKWYRMGLRTREEAKASKSLKLNKMQKAGFLYYEDLASGVSKEEADAVTLIVKETVRTVSPDALVTIAGGFRRGKPMGHDVDLLITIPGRPTDDELLHKVVDLLKKQGLLLYEDIRESTFVEGQLPNPKPDALDNHQKCFAILKLYRPKVDNSAVGTSKKSDMAEVKDWKAVRVDLVVAPDEQFAYALLGWTGSGMFRRDTRRYAEEERDMLLDNHRLYDLKKGIFLSADSEEEIFGHLDLDYLEPWERNA

SEQ ID NO: 5183 - DNA, 1182 bp, synthetic construct
  misc_feature 1..1182: note = Variant of terminal deoxynucleotidyl transferase
  source 1..1182: mol_type = other DNA
atgcatcaccaccatcatcatgggggttctggtcatccggaaggtaataccccggagaaggaggtgccgagcgttatcgcccgtcatgttagtcaatacgcgtgccagcgcaagaccacgctgaataactacaacaaaaagttcaccgacgcgctggagatcatggccgagaactacaagtttaaagagaacctgcaggcgtgcctggaggcccgtcgcgccgcgagtgtcctgaaaagcctgccgttcgaggttaccagcatgaaagacatccaaggtctgccgtgcattaccgacgacgtacgtcctgtgatcgaagagatcatcgaagtaggcgagagcagccgtgttaaagaaatcctcaatgacgagcgctacaaggcctttaagcagttcaccagcgtgttcggtgtgggcgttaaaacctcggaaaagtggtaccgtatgggcctccgtacgcgcgaagaagcaaaggccagtaagagtctgaagctgaacaagatgcagaaggcgggcttcctgtattacgaggatctggcgagcggtgttagtaaagaagaagccgatgccgttacgctcatcgtgaaggaaacggtgcgcactgttagtccggatgcgctggtgaccatcgccggcggtttccgccgtggcaaacctatgggccacgacgttgacctgctgatcacgattccgggccgtcctacggatgacgagctgctccacaaagtggttgatctgctcaagaagcaaggtctgctgctgtacgaagacatccgtgagagcacgttcgtggaggggcaactgccaaatcctaaacctgacgccctggacaaccatcagaagtgcttcgccattctcaagctgtaccgtccgaaggtggataacagtgcggttgggacgagtaagaaaagtgacatggctgaggttaaggattggaaagcggttcgtgtggatctggtggtcgctccagatgagcagttcgcctatgcgctgctcggttggacgggcagcggccaatttcgtcgcgatactcgtcgctacgcggaggaagagcgcgacatgctgctcgacaaccatggtctctacgacctgaaaaagggcatctttctgagtgcggacagcgaagaagagattttcggtcatctggacctggattatctggagccgtgggaacgcaacgcg

SEQ ID NO: 5184 - protein, 394 aa, synthetic construct
  REGION 1..394: note = Variant of terminal deoxynucleotidyl transferase
MHHHHHHGGSGHPEGNTPEKEVPSVIARHVSQYACQRKTTLNNYNKKFTDALEIMAENYKFKENLQACLEARRAASVLKSLPFEVTSMKDIQGLPCITDDVRPVIEEIIEVGESSRVKEILNDERYKAFKQFTSVFGVGVKTSEKWYRMGLRTREEAKASKSLKLNKMQKAGFLYYEDLASGVSKEEADAVTLIVKETVRTVSPDALVTIAGGFRRGKPMGHDVDLLITIPGRPTDDELLHKVVDLLKKQGLLLYEDIRESTFVEGQLPNPKPDALDNHQKCFAILKLYRPKVDNSAVGTSKKSDMAEVKDWKAVRVDLVVAPDEQFAYALLGWTGSGQFRRDTRRYAEEERDMLLDNHGLYDLKKGIFLSADSEEEIFGHLDLDYLEPWERNA

SEQ ID NO: 5185 - DNA, 1182 bp, synthetic construct
  misc_feature 1..1182: note = Variant of terminal deoxynucleotidyl transferase
  source 1..1182: mol_type = other DNA
atgcatcaccaccatcatcatgggggttctggtcatccggaaggtaataccccggagaaggaggtgccgagcgttatcgcccgtcatgttagtcaatacgcgtgccagcgcaagaccacgctgaataactacaacaaaaagttcaccgacgcgctggagatcatggccgagaactacaagtttaaagagaacctgcaggcgtgcctggaagccaagcgcgccgcgagtgtcctgaaaagcctgccgttcgaggttaccagcatgaaagacatccaaggtctgccgtgcattaccgacgacgtacgtcctgtgatcgaagagatcatcgaagtaggcgagagcagccgtgttaaagaaatcctcaatgacgagcgctacaaggcctttaagcagttcaccagcgtgttcggtgtgggcgttcgtacctcggaaaagtggtaccgtatgggcctccgtacgcgcgaagaagcaaaggccagtaagagtctgaagctgaacaagatgcagaaggcgggcttcctgtattacgaggatctggcgagcggtgttagtaaagaagaagccgatgccgttacgctcatcgtgaaggaaacggtgcgcactgttagtccggatgcgctggtgaccatcgccggcggtttccgccgtggcaaacctatgggccacgacgttgacctgctgatcacgattccgggccgtcctacggatgacgagctgctccacaaagtggttgatctgctcaagaagcaaggtctgctgctgtacgaagacatccgtgagagcacgttcgtggaggggcaactgccaaatcctaaacctgacgccctggacaaccatcagaagtgcttcgccattctcaagctgtaccgtccgaaggtggataacagtgcggttgggacgagtaagaaaagtgacatggctgaggttaaggattggaaagcggttcgtgtggatctggtggtcgctccagatgagcagttcgcctatgcgctgctcggttggacgggcagcggccaatttcgtcgcgatactcgtcgctacgcggaggaagagcgcgacatgctgctcgacaaccatagtctctacgacctgaaaaagggcatctttctgagtgcggacagcgaagaagagattttcggtcatctggacctggattatctggagccgtgggaacgcaacgcg

SEQ ID NO: 5186 - protein, 394 aa, synthetic construct
  REGION 1..394: note = Variant of terminal deoxynucleotidyl transferase
MHHHHHHGGSGHPEGNTPEKEVPSVIARHVSQYACQRKTTLNNYNKKFTDALEIMAENYKFKENLQACLEAKRAASVLKSLPFEVTSMKDIQGLPCITDDVRPVIEEIIEVGESSRVKEILNDERYKAFKQFTSVFGVGVRTSEKWYRMGLRTREEAKASKSLKLNKMQKAGFLYYEDLASGVSKEEADAVTLIVKETVRTVSPDALVTIAGGFRRGKPMGHDVDLLITIPGRPTDDELLHKVVDLLKKQGLLLYEDIRESTFVEGQLPNPKPDALDNHQKCFAILKLYRPKVDNSAVGTSKKSDMAEVKDWKAVRVDLVVAPDEQFAYALLGWTGSGQFRRDTRRYAEEERDMLLDNHSLYDLKKGIFLSADSEEEIFGHLDLDYLEPWERNA

SEQ ID NO: 5187 - DNA, 1182 bp, synthetic construct
  misc_feature 1..1182: note = Variant of terminal deoxynucleotidyl transferase
  source 1..1182: mol_type = other DNA
atgcatcaccaccatcatcatgggggttctggtcatccggaaggtaataccccggagaaggaggtgccgagcgttatcgcccgtcatgttagtcaatacgcgtgccagcgcaagaccacgctgaataactacaacaaaaagttcaccgacgcgctggagatcatggccgagaactacaagtttaaagagaacctgcaggcgtgcgctgaagccaagcgcgccgcgagtgtcctgaaaagcctgccgttcgaggttaccagcatgaaagacatccaaggtctgccgtgcattaccgacgacgtacgtcctgtgatcgaagagatcatcgaagtaggcgagagcagccgtgttaaagaaatcctcaatgacgagcgctacaaggcctttaagcagttcaccagcgtgttcggtgtgggcgtgaaaacctcggaaaagtggtaccgtatgggcctccgtacgcgcgaagaagcaaaggccagtaagagtctgaagctgaacaagatgcagaaggcgggcttcctgtattacgaggatctggcgagcggtgttagtaaagaagaagccgatgccgttacgctcatcgtgaaggaaacggtgcgcactgttagtccggatgcgctggtgaccatcgccggcggtttccgccgtggcaaacctatgggccacgacgttgacctgctgatcacgattccgggccgtcctacggatgacgagctgctccacaaagtggttgatctgctcaagaagcaaggtctgctgctgtacgaagacatccgtgagagcacgttcgtggaggggcaactgccaaatcctaaacctgacgccctggacaaccatcagaagtgcttcgccattctcaagctgtaccgtccgaaggtggataacagtgcggttgggacgagtaagaaaagtgacatggctgaggttaaggattggaaagcggttcgtgtggatctggtggtcgctccagatgagcagttcgcctatgcgctgctcggttggacgggcagcggcatgtttcgtcgcgatactcgtcgctacgcggaggaagagcgcgacatgctgctcgacaaccatcgtctctacgacctgaaaaagggcatctttctgagtgcggacagcgaagaagagattttcggtcatctggacctggattatctggagccgtgggaacgcaacgcg

SEQ ID NO: 5188 - protein, 394 aa, synthetic construct
  REGION 1..394: note = Variant of terminal deoxynucleotidyl transferase
MHHHHHHGGSGHPEGNTPEKEVPSVIARHVSQYACQRKTTLNNYNKKFTDALEIMAENYKFKENLQACAEAKRAASVLKSLPFEVTSMKDIQGLPCITDDVRPVIEEIIEVGESSRVKEILNDERYKAFKQFTSVFGVGVKTSEKWYRMGLRTREEAKASKSLKLNKMQKAGFLYYEDLASGVSKEEADAVTLIVKETVRTVSPDALVTIAGGFRRGKPMGHDVDLLITIPGRPTDDELLHKVVDLLKKQGLLLYEDIRESTFVEGQLPNPKPDALDNHQKCFAILKLYRPKVDNSAVGTSKKSDMAEVKDWKAVRVDLVVAPDEQFAYALLGWTGSGMFRRDTRRYAEEERDMLLDNHRLYDLKKGIFLSADSEEEIFGHLDLDYLEPWERNA

SEQ ID NO: 5189 - DNA, 1182 bp, synthetic construct
  misc_feature 1..1182: note = Variant of terminal deoxynucleotidyl transferase
  source 1..1182: mol_type = other DNA
atgcatcaccaccatcatcatgggggttctggtcatccggaaggtaataccccggagaaggaggtgccgagcgttatcgcccgtcatgttagtcaatacgcgtgccagcgcaagaccacgctgaataactacaacaaaaagttcaccgacgcgctggagatcatggcggagaactacaagtttaaagagaacctgcaggcgtgcctggaagccaagcgtgccattagtgtcctgaaaagcctgccgttcgaggttaccagcatgaaagacatccaaggtctgccgtgcattaccgacgacgtacgtcctgtgatcgaagagatcatcgaagtaggcgagagcagccgtgttaaagaaatcctcaatgacgagcgctacaaggcctttaagcagttcaccagcgtgttcggtgtgggcgtgaaaacctcggaaaagtggtaccgtatgggcctccgtacgcgcgaagaagcaaaggccagtaagagtctgaagctgaacaagatgcagaaggcgggcttcctgtattacgaggatctggcgagcggtgttagtaaagaagaagccgatgccgttacgctcatcgtgaaggaaacggtgcgcactgttagtccggatgcgctggtgaccatcgccggcggtttccgccgtggcaaacctatgggccacgacgttgacctgctgatcacgattccgggccgtcctacggatccagagctgctccacaaagtggttgatctgctcaagaagcaaggtctgctgctgtacgaagacatccgtgagagcacgttcgtggaggggcaactgccaaatcctaaacctgacgccctggacaaccatcagaagtgcttcgccattctcaagctgtaccgtccgaaggtggataacagtgcggttgggacgagtaagaaaagtgacatggctgaggttaaggattggaaagcggttcgtgtggatctggtggtcgctccagatgagcagttcgcctatgcgctgctcggttggacgggcagcggccaatttcgtcgcgatactcgtcgctacgcggagcgtgagcgcgacatgctgctcgacaaccatcgtctctacgacctgaaaaagggcatctttctgagtgcggacagcgaagaagagattttcggtcatctggacctggattatctggagccgtgggaacgcaacgcg

SEQ ID NO: 5190 - protein, 394 aa, synthetic construct
  REGION 1..394: note = Variant of terminal deoxynucleotidyl transferase
MHHHHHHGGSGHPEGNTPEKEVPSVIARHVSQYACQRKTTLNNYNKKFTDALEIMAENYKFKENLQACLEAKRAISVLKSLPFEVTSMKDIQGLPCITDDVRPVIEEIIEVGESSRVKEILNDERYKAFKQFTSVFGVGVKTSEKWYRMGLRTREEAKASKSLKLNKMQKAGFLYYEDLASGVSKEEADAVTLIVKETVRTVSPDALVTIAGGFRRGKPMGHDVDLLITIPGRPTDPELLHKVVDLLKKQGLLLYEDIRESTFVEGQLPNPKPDALDNHQKCFAILKLYRPKVDNSAVGTSKKSDMAEVKDWKAVRVDLVVAPDEQFAYALLGWTGSGQFRRDTRRYAERERDMLLDNHRLYDLKKGIFLSADSEEEIFGHLDLDYLEPWERNA

SEQ ID NO: 5191 - DNA, 1182 bp, synthetic construct
  misc_feature 1..1182: note = Variant of terminal deoxynucleotidyl transferase
  source 1..1182: mol_type = other DNA
atgcatcaccaccatcatcatgggggttctggtcatccggaaggtaataccccggagaaggaggtgccgagcgttatcgcccgtcatgttagtcagtacgcgtgccagcgcaagaccacgctgaataactacaacaaaaagttcaccgacgcgctggagatcatggccgagaactacaagtttaaagagaacctgcaggcgtgcctggaggccaaacgcgccgcgagtgtcctgaaaagcctgccgttcgaggttaccagcatgaaagacatccaaggtctgccgtgcattaccgacgacgtacgtcctgtgatcgaagagatcatcgaagtaggcgagagcagccgtgttaaagaaatcctcaatgacgagcgctacaaggcctttaagcagttcaccagcgtgttcggtgtgggcattcgtacctcggaaaagtggtaccgtatgggcctccgtacgcgcgaagaagcaaaggccagtaagagtctgaagctgaacaagatgcagaaggcgggcttcctgtattacgaggatctggcgagcggtgttagtaaagaagaagccgatgccgttacgctcatcgtgaaggaaacggtgcgcactgttagtccggatgcgctggtgaccatcgccggcggtttccgccgtggcaaacctatgggccacgacgttgacctgctgatcacgattccgggccgtcctacggatgacgagctgctccacaaagtggttgatctgctcaagaagcaaggtctgctgctgtaccaagacatccgtgagcgcacgttcgtggaggggcaactgccaaatcctaaacctgacgccctggacaaccatcagaagtgcttcgccattctcaagctgtaccgtccgaaggtggataacagtgcggttgggacgagtaagaaaagtgacatggctgaggttaaggattggaaagcggttcgtgtggatctggtggtcgctccagatgagcagttcgcctatgcgctgctcggttggacgggcagcggcatgtttcgtcgcgatactcgtcgctacgcggaggaagagcgcgacatgctgctcgacaaccatcgtctctacgacctgaaaaagggcatctttctgagtgcggacagcgaagaagagattttcggtcatctggacctggattatctggagccgtgggaacgcaacgcg

SEQ ID NO: 5192 - protein, 394 aa, synthetic construct
  REGION 1..394: note = Variant of terminal deoxynucleotidyl transferase
MHHHHHHGGSGHPEGNTPEKEVPSVIARHVSQYACQRKTTLNNYNKKFTDALEIMAENYKFKENLQACLEAKRAASVLKSLPFEVTSMKDIQGLPCITDDVRPVIEEIIEVGESSRVKEILNDERYKAFKQFTSVFGVGIRTSEKWYRMGLRTREEAKASKSLKLNKMQKAGFLYYEDLASGVSKEEADAVTLIVKETVRTVSPDALVTIAGGFRRGKPMGHDVDLLITIPGRPTDDELLHKVVDLLKKQGLLLYQDIRERTFVEGQLPNPKPDALDNHQKCFAILKLYRPKVDNSAVGTSKKSDMAEVKDWKAVRVDLVVAPDEQFAYALLGWTGSGMFRRDTRRYAEEERDMLLDNHRLYDLKKGIFLSADSEEEIFGHLDLDYLEPWERNA

SEQ ID NO: 5193 - DNA, 1182 bp, synthetic construct
  misc_feature 1..1182: note = Variant of terminal deoxynucleotidyl transferase
  source 1..1182: mol_type = other DNA
atgcatcaccaccatcatcatgggggttctggtcatccggaaggtaataccccggagaaggaggtgccgagcgttatcgcccgtcatgttagtccgtacgcgtgccagcgcaagaccacgctgaataactacaacaaaaagttcaccgacgcgctggagatcatggccgagaactacaagtttaaagagaacctgcaggcgtgcctggaagccaagcgcgccgcgagtgtcctgaaaagcctgccgttcgaggttaccagcatgaaagacatccaaggtctgccgtgcattaccgacgacgtacgtcctgtgatcgaagagatcatcgaagtaggcgagagcagccgtgttaaagaaatcctcaatgacgagcgctacaaggcctttaagcagttcaccagcgtgttcggtgtgggcgtgaaaacctcggaaaagtggtaccgtatgggcctccgtacgcgcgaagaagcaaaggccagtaagagtctgaagctgaacaagatgcagaaggcgggcttcctgtattacgaggatctggcgagcggtgttagtaaagaagaagccgatgccgttacgctcatcgtgaaggaaacggtgcgcactgttagtccggatgcgctggtgaccatcgccggcggtttccgccgtggcaaacctatgggccacgacgttgacctgctgatcacgattccgggccgtcctacggatgacgagctgctccacaaagtggttgatctgctcaagaagcaaggtctgctgctgtacgaagacatccgtgagagcacgttcgtggaggggcaactgccaaatcctaaacctgacgccctggacaaccatcagaagtgcttcgccattctcaagctgtaccgtccgaaggtggataacagtgcggttgggacgagtaagaaaagtgacatggctgaggttaaggattggaaagcggttcgtgtggatctggtggtcgctccagatgagcagttcgcctatgcgctgctcggttggacgggcagcggcatgtttcgtcgcgatactcgtcgctacgcggaggaagagcgcgacatgctgctcgacaaccatcgtctctacgacctgaaaaagggcatctttctgagtgcggacagcgaagaagagattttcggtcatctggacctggattatctggagccgtgggaacgcaacgcg

SEQ ID NO: 5194 - protein, 394 aa, synthetic construct
  REGION 1..394: note = Variant of terminal deoxynucleotidyl transferase
MHHHHHHGGSGHPEGNTPEKEVPSVIARHVSPYACQRKTTLNNYNKKFTDALEIMAENYKFKENLQACLEAKRAASVLKSLPFEVTSMKDIQGLPCITDDVRPVIEEIIEVGESSRVKEILNDERYKAFKQFTSVFGVGVKTSEKWYRMGLRTREEAKASKSLKLNKMQKAGFLYYEDLASGVSKEEADAVTLIVKETVRTVSPDALVTIAGGFRRGKPMGHDVDLLITIPGRPTDDELLHKVVDLLKKQGLLLYEDIRESTFVEGQLPNPKPDALDNHQKCFAILKLYRPKVDNSAVGTSKKSDMAEVKDWKAVRVDLVVAPDEQFAYALLGWTGSGMFRRDTRRYAEEERDMLLDNHRLYDLKKGIFLSADSEEEIFGHLDLDYLEPWERNA

SEQ ID NO: 5195 - DNA, 1182 bp, synthetic construct
  misc_feature 1..1182: note = Variant of terminal deoxynucleotidyl transferase
  source 1..1182: mol_type = other DNA
atgcatcaccaccatcatcatgggggttctggtcatccggaaggtaataccccggagaaggaggtgccgagcgttatcgcccgtcatgttagtccgtacgcgtgccagcgcaagaccacgctgaataactacaacaaaaagttcaccgacgcgctggagatcatggccgagaactacaagtttaaagagaacctgcaggcgtgcctggaggccaaacgcgccgcgagtgtcctgaaaagcctgccgttcgaggttaccagcatgaaagacatccaaggtctgccgtgcattaccgacgacgtacgtcctgtgatcgaagagatcatcgaagtaggcgagagcagccgtgttaaagaaatcctcaatgacgagcgctacaaggcctttaagcagttcaccagcgtgttcggtgtgggcattcgtacctcggaaaagtggtaccgtatgggcctccgtacgcgcgaagaagcaaaggccagtaagagtctgaagctgaacaagatgcagaaggcgggcttcctgtattacgaggatctggcgagcggtgttagtaaagaagaagccgatgccgttacgctcatcgtgaaggaaacggtgcgcactgttagtccggatgcgctggtgaccatcgccggcggtttccgccgtggcaaacctatgggccacgacgttgacctgctgatcacgattccgggccgtcctacggatgacgagctgctccacaaagtggtggatctgctcaagaagcaaggtctgctgctgtacgaagacatccgtgagcgcacgttcgtggaggggcaactgccaaatcctaaacctgacgccctggacaaccatcagaagtgcttcgccattctcaagctgtaccgtccgaaggtggataacagtgcggttgggacgagtaagaaaagtgacatggctgaggttaaggattggaaagcggttcgtgtggatctggtggtcgctccagatgagcagttcgcctatgcgctgctcggttggacgggcagcggccaatttcgtcgcgatactcgtcgctacgcggaggaagagcgcgacatgctgctcgacaaccatagtctctacgacctgaaaaagggcatctttctgagtgcggacagcgaagaagagattttcggtcatctggacctggattatctggagccgtgggaacgcaacgcg

SEQ ID NO: 5196 - protein, 394 aa, synthetic construct
  REGION 1..394: note = Variant of terminal deoxynucleotidyl transferase
MHHHHHHGGSGHPEGNTPEKEVPSVIARHVSPYACQRKTTLNNYNKKFTDALEIMAENYKFKENLQACLEAKRAASVLKSLPFEVTSMKDIQGLPCITDDVRPVIEEIIEVGESSRVKEILNDERYKAFKQFTSVFGVGIRTSEKWYRMGLRTREEAKASKSLKLNKMQKAGFLYYEDLASGVSKEEADAVTLIVKETVRTVSPDALVTIAGGFRRGKPMGHDVDLLITIPGRPTDDELLHKVVDLLKKQGLLLYEDIRERTFVEGQLPNPKPDALDNHQKCFAILKLYRPKVDNSAVGTSKKSDMAEVKDWKAVRVDLVVAPDEQFAYALLGWTGSGQFRRDTRRYAEEERDMLLDNHSLYDLKKGIFLSADSEEEIFGHLDLDYLEPWERNA

SEQ ID NO: 5197 - DNA, 1182 bp, synthetic construct
  misc_feature 1..1182: note = Variant of terminal deoxynucleotidyl transferase
  source 1..1182: mol_type = other DNA
atgcatcaccaccatcatcatgggggttctggtcatccggaaggtaataccccggagaaggaggtgccgagcgttatcgcccgtcatgttagtcagtacgcgtgccagcgcaagaccacgctgaataactacaacaaaaagttcaccgacgcgctggagatcatggccgagaactacaagtttaaagagaacctgcaggcgtgcctggaagccaagcgcgccgcgagtgtcctgaaaagcctgccgttcgaggttaccagcatgaaagacatccaaggtctgccgtgcattaccgacgacgtacgtcctgtgatcgaagagatcatcgaagtaggcgagagcagccgtgttaaagaaatcctcaatgacgagcgctacaaggcctttaagcagttcaccagcgtgttcggtgtgggcattaaaacctcggaaaagtggtaccgtatgggcctccgtacgcgcgaagaagcaaaggccagtaagagtctgaagctgaacaagatgcagaaggcgggcttcctgtattacgaggatctgcgcagcggtgttagtaaagaagaagccgatgccgttacgctcatcgtgaaggaaacggtgcgcactgttagtccggatgcgctggtgaccatcgccggcggtttccgccgtggcaaacctatgggccacgacgttgacctgctgatcacgattccgggccgtcctacggatgacgagctgctccacaaagtgctggatctgctcaagaagcaaggtctgctgctgtacgaagacatccgtgagcgcacgttcgtggaggggcaactgccaaatcctaaacctgacgccctggacaaccatcagaagtgcttcgccattctcaagctgtaccgtccgaaggtggataacagtgcggttgggacgagtaagaaaagtgacatggctgaggttaaggattggaaagcggttcgtgtggatctggtggtcgctccagatgagcagttcgcctatgcgctgctcggttggacgggcagcggcatgtttcgtcgcgatactcgtcgctacgcggaggaagagcgcgacatgctgctcgacaaccatggtctctacgacctgaaaaagggcatctttctgagtgcggacagcgaagaagagattttcggtcatctggacctggattatctggagccgtgggaacgcaacgcg

SEQ ID NO: 5198 - protein, 394 aa, synthetic construct
  REGION 1..394: note = Variant of terminal deoxynucleotidyl transferase
MHHHHHHGGSGHPEGNTPEKEVPSVIARHVSQYACQRKTTLNNYNKKFTDALEIMAENYKFKENLQACLEAKRAASVLKSLPFEVTSMKDIQGLPCITDDVRPVIEEIIEVGESSRVKEILNDERYKAFKQFTSVFGVGIKTSEKWYRMGLRTREEAKASKSLKLNKMQKAGFLYYEDLRSGVSKEEADAVTLIVKETVRTVSPDALVTIAGGFRRGKPMGHDVDLLITIPGRPTDDELLHKVLDLLKKQGLLLYEDIRERTFVEGQLPNPKPDALDNHQKCFAILKLYRPKVDNSAVGTSKKSDMAEVKDWKAVRVDLVVAPDEQFAYALLGWTGSGMFRRDTRRYAEEERDMLLDNHGLYDLKKGIFLSADSEEEIFGHLDLDYLEPWERNA

SEQ ID NO: 5199 - DNA, 1182 bp, synthetic construct
  misc_feature 1..1182: note = Variant of terminal deoxynucleotidyl transferase
  source 1..1182: mol_type = other DNA
atgcatcaccaccatcatcatgggggttctggtcatccggaaggtaataccccggagaaggaggtgccgagcgttatcgcccgtcatgttagtccgtacgcgtgccagcgcaagaccacgctgaataactacaacaaaaagttcaccgacgcgctggagatcatggccgagaactacaagtttaaagagaacctgcaggcgtgcctggaggccaaacgcgccgcgagtgtcctgaaaagcctgccgttcgaggttaccagcatgaaagacatccaaggtctgccgtgcattaccgacgacgtacgtcctgtgatcgaagagatcatcgaagtaggcgagagcagccgtgttaaagaaatcctcaatgacgagcgctacaaggcctttaagcagttcaccagcgtgttcggtgtgggcgtgaaaacctcggaaaagtggtaccgtatgggcctccgtacgcgcgaagaagcaaaggccagtaagagtctgaagctgaacaagatgcagaaggcgggcttcctgtattacgaggatctggcgagcggtgttagtaaagaagaagccgatgccgttacgctcatcgtgaaggaaacggtgcgcactgttagtccggatgcgctggtgaccatcgccggcggtttccgccgtggcaaacctatgggccacgacgttgacctgctgatcacgattccgggccgtcctacggatgacgagctgctccacaaagtggttgatctgctcaagaagcaaggtctgctgctgtacgaagacatccgtgagagcacgttcgtggaggggcaactgccaaatcctaaacctgacgccctggacaaccatcagaagtgcttcgccattctcaagctgtaccgtccgaaggtggataacagtgcggttgggacgagtaagaaaagtgacatggctgaggttaaggattggaaagcggttcgtgtggatctggtggtcgctccagatgagcagttcgcctatgcgctgctcggttggacgggcagcggccagtttcgtcgcgatactcgtcgctacgcggaggaagagcgcgacatgctgctcgacaaccatcgtctctacgacctgaaaaagggcatctttctgagtgcggacagcgaagaagagattttcggtcatctggacctggattatctggagccgtgggaacgcaacgcg

SEQ ID NO: 5200 - protein, 394 aa, synthetic construct
  REGION 1..394: note = Variant of terminal deoxynucleotidyl transferase
MHHHHHHGGSGHPEGNTPEKEVPSVIARHVSPYACQRKTTLNNYNKKFTDALEIMAENYKFKENLQACLEAKRAASVLKSLPFEVTSMKDIQGLPCITDDVRPVIEEIIEVGESSRVKEILNDERYKAFKQFTSVFGVGVKTSEKWYRMGLRTREEAKASKSLKLNKMQKAGFLYYEDLASGVSKEEADAVTLIVKETVRTVSPDALVTIAGGFRRGKPMGHDVDLLITIPGRPTDDELLHKVVDLLKKQGLLLYEDIRESTFVEGQLPNPKPDALDNHQKCFAILKLYRPKVDNSAVGTSKKSDMAEVKDWKAVRVDLVVAPDEQFAYALLGWTGSGQFRRDTRRYAEEERDMLLDNHRLYDLKKGIFLSADSEEEIFGHLDLDYLEPWERNA

SEQ ID NO: 5201 - DNA, 1182 bp, synthetic construct
  misc_feature 1..1182: note = Variant of terminal deoxynucleotidyl transferase
  source 1..1182: mol_type = other DNA
atgcatcaccaccatcatcatgggggttctggtcatccggaaggtaataccccggagaaggaggtgccgagcgttatcgcccgtcatgttagtccgtacgcgtgccagcgcaagaccacgctgaataactacaacaaaaagttcaccgacgcgctggagatcatggccgagaactacaagtttaaagagaacctgcaggcgtgcctggaagccaagcgcgccgcgagtgtcctgaaaagcctgccgttcgaggttaccagcatgaaagacatccaaggtctgccgtgcattaccgacgacgtacgtcctgtgatcgaagagatcatcgaagtaggcgagagcagccgtgttaaagaaatcctcaatgacgagcgctacaaggcctttaagcagttcaccagcgtgttcggtgtgggcattaaaacctcggaaaagtggtaccgtatgggcctccgtacgcgcgaagaagcaaaggccagtaagagtctgaagctgaacaagatgcagaaggcgggcttcctgtattacgaggatctggcgagcggtgttagtaaagaagaagccgatgccgttacgctcatcgtgaaggaaacggtgcgcactgttagtccggatgcgctggtgaccatcgccggcggtttccgccgtggcaaacctatgggccacgacgttgacctgctgatcacgattccgggccgtcctacggatgacgagctgctccacaaagtggtggatctgctcaagaagcaaggtctgctgctgtacgaagacatccgtgagagcacgttcgtggaggggcaactgccaaatcctaaacctgacgccctggacaaccatcagaagtgcttcgccattctcaagctgtaccgtccgaaggtggataacagtgcggttgggacgagtaagaaaagtgacatggctgaggttaaggattggaaagcggttcgtgtggatctggtggtcgctccagatgagcagttcgcctatgcgctgctcggttggacgggcagcggccaatttcgtcgcgatactcgtcgctacgcggaggaagagcgcgacatgctgctcgacaaccatggtctctacgacctgaaaaagggcatctttctgagtgcggacagcgaagaagagattttcggtcatctggacctggattatctggagccgtgggaacgcaacgcg

SEQ ID NO: 5202 - protein, 394 aa, synthetic construct
  REGION 1..394: note = Variant of terminal deoxynucleotidyl transferase
MHHHHHHGGSGHPEGNTPEKEVPSVIARHVSPYACQRKTTLNNYNKKFTDALEIMAENYKFKENLQACLEAKRAASVLKSLPFEVTSMKDIQGLPCITDDVRPVIEEIIEVGESSRVKEILNDERYKAFKQFTSVFGVGIKTSEKWYRMGLRTREEAKASKSLKLNKMQKAGFLYYEDLASGVSKEEADAVTLIVKETVRTVSPDALVTIAGGFRRGKPMGHDVDLLITIPGRPTDDELLHKVVDLLKKQGLLLYEDIRESTFVEGQLPNPKPDALDNHQKCFAILKLYRPKVDNSAVGTSKKSDMAEVKDWKAVRVDLVVAPDEQFAYALLGWTGSGQFRRDTRRYAEEERDMLLDNHGLYDLKKGIFLSADSEEEIFGHLDLDYLEPWERNA

SEQ ID NO: 5203 - DNA, 1182 bp, synthetic construct
  misc_feature 1..1182: note = Variant of terminal deoxynucleotidyl transferase
  source 1..1182: mol_type = other DNA
atgcatcaccaccatcatcatgggggttctggtcatccggaaggtaataccccggagaaggaggtgccgagcgttatcgcccgtcatgttagtcaatacgcgtgccagcgcaagaccacgctgaataactacaacaaaaagttcaccgacgcgctggagatcatggccgagaactacaagtttaaagagaacctgcaggcgtgcctgcgtgcccgtcgcgccgcgagtgtcctgaaaagcctgccgttcgaggttaccagcatgaaagacatccaaggtctgccgtgcattaccgacgacgtacgtcctgtgatcgaagagatcatcgaagtaggcgagagcagccgtgttaaagaaatcctcaatgacgagcgctacaaggcctttaagcagttcaccagcgtgttcggtgtgggcgttaaaacctcggaaaagtggtaccgtatgggcctccgtacgcgcgaagaagcaaaggccagtaagagtctgaagctgaacaagatgcagaaggcgggcttcctgtattacgaggatctgcgcagcggtgttagtaaagaagaagccgatgccgttacgctcatcgtgaaggaaacggtgcgcactgttagtccggatgcgctggtgaccatcgccggcggtttccgccgtggcaaacctatgggccacgacgttgacctgctgatcacgattccgggccgtcctacggatgacgagctgctccacaaagtggttgatctgctcaagaagcaaggtctgctgctgtacgaagacatccgtgagagcacgttcgtggaggggcaactgccaaatcctaaacctgacgccctggacaaccatcagaagtgcttcgccattctcaagctgtaccgtccgaaggtggataacagtgcggttgggacgagtaagaaaagtgacatggctgaggttaaggattggaaagcggttcgtgtggatctggtggtcgctccagatgagcagttcgcctatgcgctgctcggttggacgggcagcggccaatttcgtcgcgatactcgtcgctacgcggaggaagagcgcgacatgctgctcgacaaccatggtctctacgacctgaaaaagggcatctttctgagtgcggacagcgaagaagagattttcggtcatctggacctggattatctggagccgtgggaacgcaacgcg

SEQ ID NO: 5204 - protein, 394 aa, synthetic construct
  REGION 1..394: note = Variant of terminal deoxynucleotidyl transferase
MHHHHHHGGSGHPEGNTPEKEVPSVIARHVSQYACQRKTTLNNYNKKFTDALEIMAENYKFKENLQACLRARRAASVLKSLPFEVTSMKDIQGLPCITDDVRPVIEEIIEVGESSRVKEILNDERYKAFKQFTSVFGVGVKTSEKWYRMGLRTREEAKASKSLKLNKMQKAGFLYYEDLRSGVSKEEADAVTLIVKETVRTVSPDALVTIAGGFRRGKPMGHDVDLLITIPGRPTDDELLHKVVDLLKKQGLLLYEDIRESTFVEGQLPNPKPDALDNHQKCFAILKLYRPKVDNSAVGTSKKSDMAEVKDWKAVRVDLVVAPDEQFAYALLGWTGSGQFRRDTRRYAEEERDMLLDNHGLYDLKKGIFLSADSEEEIFGHLDLDYLEPWERNA

SEQ ID NO: 5205 - DNA, 1182 bp, synthetic construct
  misc_feature 1..1182: note = Variant of terminal deoxynucleotidyl transferase
  source 1..1182: mol_type = other DNA
atgcatcaccaccatcatcatgggggttctggtcatccggaaggtaataccccggagaaggaggtgccgagcgttatcgcccgtcatgttagtccgtacgcgtgccagcgcaagaccacgctgaataactacaacaaaaagttcaccgacgcgctggagatcatggccgagaactacaagtttaaagagaacctgcaggcgtgcctggaggccaaacgcgccgcgagtgtcctgaaaagcctgccgttcgaggttaccagcatgaaagacatccaaggtctgccgtgcattaccgacgacgtacgtcctgtgatcgaagagatcatcgaagtaggcgagagcagccgtgttaaagaaatcctcaatgacgagcgctacaaggcctttaagcagttcaccagcgtgttcggtgtgggcgttaaaacctcggaaaagtggtaccgtatgggcctccgtacgcgcgaagaagcaaaggccagtaagagtctgaagctgaacaagatgcagaaggcgggcttcctgtattacgaggatctggcgagcggtgttagtaaagaagaagccgatgccgttacgctcatcgtgaaggaaacggtgcgcactgttagtccggatgcgctggtgaccatcgccggcggtttccgccgtggcaaacctatgggccacgacgttgacctgctgatcacgattccgggccgtcctacggatgacgagctgctccacaaagtgctggatctgctcaagaagcaaggtctgctgctgtacgaagacatccgtgagcgcacgttcgtggaggggcaactgccaaatcctaaacctgacgccctggacaaccatcagaagtgcttcgccattctcaagctgtaccgtccgaaggtggataacagtgcggttgggacgagtaagaaaagtgacatggctgaggttaaggattggaaagcggttcgtgtggatctggtggtcgctccagatgagcagttcgcctatgcgctgctcggttggacgggcagcggccagtttcgtcgcgatactcgtcgctacgcggaggaagagcgcgacatgctgctcgacaaccatcgtctctacgacctgaaaaagggcatctttctgagtgcggacagcgaagaagagattttcggtcatctggacctggattatctggagccgtgggaacgcaacgcg

SEQ ID NO: 5206 - protein, 394 aa, synthetic construct
  REGION 1..394: note = Variant of terminal deoxynucleotidyl transferase
MHHHHHHGGSGHPEGNTPEKEVPSVIARHVSPYACQRKTTLNNYNKKFTDALEIMAENYKFKENLQACLEAKRAASVLKSLPFEVTSMKDIQGLPCITDDVRPVIEEIIEVGESSRVKEILNDERYKAFKQFTSVFGVGVKTSEKWYRMGLRTREEAKASKSLKLNKMQKAGFLYYEDLASGVSKEEADAVTLIVKETVRTVSPDALVTIAGGFRRGKPMGHDVDLLITIPGRPTDDELLHKVLDLLKKQGLLLYEDIRERTFVEGQLPNPKPDALDNHQKCFAILKLYRPKVDNSAVGTSKKSDMAEVKDWKAVRVDLVVAPDEQFAYALLGWTGSGQFRRDTRRYAEEERDMLLDNHRLYDLKKGIFLSADSEEEIFGHLDLDYLEPWERNA

SEQ ID NO: 5207 - DNA, 1182 bp, synthetic construct
  misc_feature 1..1182: note = Variant of terminal deoxynucleotidyl transferase
  source 1..1182: mol_type = other DNA
atgcatcaccaccatcatcatgggggttctggtcatccggaaggtaataccccggagaaggaggtgccgagcgttatcgcccgtcatgttagtccgtacgcgtgccagcgcaagaccacgctgaataactacaacaaaaagttcaccgacgcgctggagatcatggccgagaactacaagtttaaagagaacctgcaggcgtgcctggaggcccgtcgcgccgcgagtgtcctgaaaagcctgccgttcgaggttaccagcatgaaagacatccaaggtctgccgtgcattaccgacgacgtacgtcctgtgatcgaagagatcatcgaagtaggcgagagcagccgtgttaaagaaatcctcaatgacgagcgctacaaggcctttaagcagttcaccagcgtgttcggtgtgggcgtgaaaacctcggaaaagtggtaccgtatgggcctccgtacgcgcgaagaagcaaaggccagtaagagtctgaagctgaacaagatgcagaaggcgggcttcctgtattacgaggatctggcgagcggtgttagtaaagaagaagccgatgccgttacgctcatcgtgaaggaaacggtgcgcactgttagtccggatgcgctggtgaccatcgccggcggtttccgccgtggcaaacctatgggccacgacgttgacctgctgatcacgattccgggccgtcctacggatgacgagctgctccacaaagtggtggatctgctcaagaagcaaggtctgctgctgtacgaagacatccgtgagagcacgttcgtggaggggcaactgccaaatcctaaacctgacgccctggacaaccatcagaagtgcttcgccattctcaagctgtaccgtccgaaggtggataacagtgcggttgggacgagtaagaaaagtgacatggctgaggttaaggattggaaagcggttcgtgtggatctggtggtcgctccagatgagcagttcgcctatgcgctgctcggttggacgggcagcggcatgtttcgtcgcgatactcgtcgctacgcggaggaagagcgcgacatgctgctcgacaaccatcgtctctacgacctgaaaaagggcatctttctgagtgcggacagcgaagaagagattttcggtcatctggacctggattatctggagccgtgggaacgcaacgcg

SEQ ID NO: 5208 - protein, 394 aa, synthetic construct
  REGION 1..394: note = Variant of terminal deoxynucleotidyl transferase
MHHHHHHGGSGHPEGNTPEKEVPSVIARHVSPYACQRKTTLNNYNKKFTDALEIMAENYKFKENLQACLEARRAASVLKSLPFEVTSMKDIQGLPCITDDVRPVIEEIIEVGESSRVKEILNDERYKAFKQFTSVFGVGVKTSEKWYRMGLRTREEAKASKSLKLNKMQKAGFLYYEDLASGVSKEEADAVTLIVKETVRTVSPDALVTIAGGFRRGKPMGHDVDLLITIPGRPTDDELLHKVVDLLKKQGLLLYEDIRESTFVEGQLPNPKPDALDNHQKCFAILKLYRPKVDNSAVGTSKKSDMAEVKDWKAVRVDLVVAPDEQFAYALLGWTGSGMFRRDTRRYAEEERDMLLDNHRLYDLKKGIFLSADSEEEIFGHLDLDYLEPWERNA

SEQ ID NO: 5209 - DNA, 1182 bp, synthetic construct
  misc_feature 1..1182: note = Variant of terminal deoxynucleotidyl transferase
  source 1..1182: mol_type = other DNA
atgcatcaccaccatcatcatgggggttctggtcatccggaaggtaataccccggagaaggaggtgccgagcgttatcgcccgtcatgttagtcagtacgcgtgccagcgcaagaccacgctgaataactacaacaaaaagttcaccgacgcgctggagatcatggccgagaactacaagtttaaagagaacctgcaggcgtgcctggaagccaagcgcgccgcgagtgtcctgaaaagcctgccgttcgaggttaccagcatgaaagacatccaaggtctgccgtgcattaccgacgacgtacgtcctgtgatcgaagagatcatcgaagtaggcgagagcagccgtgttaaagaaatcctcaatgacgagcgctacaaggcctttaagcagttcaccagcgtgttcggtgtgggcgttcgtacctcggaaaagtggtaccgtatgggcctccgtacgcgcgaagaagcaaaggccagtaagagtctgaagctgaacaagatgcagaaggcgggcttcctgtattacgaggatctggcgagcggtgttagtaaagaagaagccgatgccgttacgctcatcgtgaaggaaacggtgcgcactgttagtccggatgcgctggtgaccatcgccggcggtttccgccgtggcaaacctatgggccacgacgttgacctgctgatcacgattccgggccgtcctacggatgacgagctgctccacaaagtggtggatctgctcaagaagcaaggtctgctgctgtaccaagacatccgtgagagcacgttcgtggaggggcaactgccaaatcctaaacctgacgccctggacaaccatcagaagtgcttcgccattctcaagctgtaccgtccgaaggtggataacagtgcggttgggacgagtaagaaaagtgacatggctgaggttaaggattggaaagcggttcgtgtggatctggtggtcgctccagatgagcagttcgcctatgcgctgctcggttggacgggcagcggcatgtttcgtcgcgatactcgtcgctacgcggaggaagagcgcgacatgctgctcgacaaccatggtctctacgacctgaaaaagggcatctttctgagtgcggacagcgaagaagagattttcggtcatctggacctggattatctggagccgtgggaacgcaacgcg

SEQ ID NO: 5210 - protein, 394 aa, synthetic construct
  REGION 1..394: note = Variant of terminal deoxynucleotidyl transferase
MHHHHHHGGSGHPEGNTPEKEVPSVIARHVSQYACQRKTTLNNYNKKFTDALEIMAENYKFKENLQACLEAKRAASVLKSLPFEVTSMKDIQGLPCITDDVRPVIEEIIEVGESSRVKEILNDERYKAFKQFTSVFGVGVRTSEKWYRMGLRTREEAKASKSLKLNKMQKAGFLYYEDLASGVSKEEADAVTLIVKETVRTVSPDALVTIAGGFRRGKPMGHDVDLLITIPGRPTDDELLHKVVDLLKKQGLLLYQDIRESTFVEGQLPNPKPDALDNHQKCFAILKLYRPKVDNSAVGTSKKSDMAEVKDWKAVRVDLVVAPDEQFAYALLGWTGSGMFRRDTRRYAEEERDMLLDNHGLYDLKKGIFLSADSEEEIFGHLDLDYLEPWERNA

SEQ ID NO: 5211 - DNA, 1182 bp, synthetic construct
  misc_feature 1..1182: note = Variant of terminal deoxynucleotidyl transferase
  source 1..1182: mol_type = other DNA
atgcatcaccaccatcatcatgggggttctggtcatccggaaggtaataccccggagaaggaggtgccgagcgttatcgcccgtcatgttagtcagtacgcgtgccagcgcaagaccacgctgaataactacaacaaaaagttcaccgacgcgctggagatcatggccgagaactacaagtttaaagagaacctgcaggcgtgcctggaggcccgtcgcgccgcgagtgtcctgaaaagcctgccgttcgaggttaccagcatgaaagacatccaaggtctgccgtgcattaccgacgacgtacgtcctgtgatcgaagagatcatcgaagtaggcgagagcagccgtgttaaagaaatcctcaatgacgagcgctacaaggcctttaagcagttcaccagcgtgttcggtgtgggcgttaaaacctcggaaaagtggtaccgtatgggcctccgtacgcgcgaagaagcaaaggccagtaagagtctgaagctgaacaagatgcagaaggcgggcttcctgtattacgaggatctggcgagcggtgttagtaaagaagaagccgatgccgttacgctcatcgtgaaggaaacggtgcgcactgttagtccggatgcgctggtgaccatcgccggcggtttccgccgtggcaaacctatgggccacgacgttgacctgctgatcacgattccgggccgtcctacggatgacgagctgctccacaaagtggtggatctgctcaagaagcaaggtctgctgctgtaccaagacatccgtgagagcacgttcgtggaggggcaactgccaaatcctaaacctgacgccctggacaaccatcagaagtgcttcgccattctcaagctgtaccgtccgaaggtggataacagtgcggttgggacgagtaagaaaagtgacatggctgaggttaaggattggaaagcggttcgtgtggatctggtggtcgctccagatgagcagttcgcctatgcgctgctcggttggacgggcagcggccagtttcgtcgcgatactcgtcgctacgcggaggaagagcgcgacatgctgctcgacaaccatagtctctacgacctgaaaaagggcatctttctgagtgcggacagcgaagaagagattttcggtcatctggacctggattatctggagccgtgggaacgcaacgcg

SEQ ID NO: 5212 - protein, 394 aa, synthetic construct
  REGION 1..394: note = Variant of terminal deoxynucleotidyl transferase
MHHHHHHGGSGHPEGNTPEKEVPSVIARHVSQYACQRKTTLNNYNKKFTDALEIMAENYKFKENLQACLEARRAASVLKSLPFEVTSMKDIQGLPCITDDVRPVIEEIIEVGESSRVKEILNDERYKAFKQFTSVFGVGVKTSEKWYRMGLRTREEAKASKSLKLNKMQKAGFLYYEDLASGVSKEEADAVTLIVKETVRTVSPDALVTIAGGFRRGKPMGHDVDLLITIPGRPTDDELLHKVVDLLKKQGLLLYQDIRESTFVEGQLPNPKPDALDNHQKCFAILKLYRPKVDNSAVGTSKKSDMAEVKDWKAVRVDLVVAPDEQFAYALLGWTGSGQFRRDTRRYAEEERDMLLDNHSLYDLKKGIFLSADSEEEIFGHLDLDYLEPWERNA

SEQ ID NO: 5213 - DNA, 1182 bp, synthetic construct
  misc_feature 1..1182: note = Variant of terminal deoxynucleotidyl transferase
  source 1..1182: mol_type = other DNA
atgcatcaccaccatcatcatgggggttctggtcatccggaaggtaataccccggagaaggaggtgccgagcgttatcgcccgtcatgttagtcagtacgcgtgccagcgcaagaccacgctgaataactacaacaaaaagttcaccgacgcgctggagatcatggccgagaactacaagtttaaagagaacctgcaggcgtgcctggaggccaaacgcgccgcgagtgtcctgaaaagcctgccgttcgaggttaccagcatgaaagacatccaaggtctgccgtgcattaccgacgacgtacgtcctgtgatcgaagagatcatcgaagtaggcgagagcagccgtgttaaagaaatcctcaatgacgagcgctacaaggcctttaagcagttcaccagcgtgttcggtgtgggcgttcgtacctcggaaaagtggtaccgtatgggcctccgtacgcgcgaagaagcaaaggccagtaagagtctgaagctgaacaagatgcagaaggcgggcttcctgtattacgaggatctggcgagcggtgttagtaaagaagaagccgatgccgttacgctcatcgtgaaggaaacggtgcgcactgttagtccggatgcgctggtgaccatcgccggcggtttccgccgtggcaaacctatgggccacgacgttgacctgctgatcacgattccgggccgtcctacggatgacgagctgctccacaaagtgctggatctgctcaagaagcaaggtctgctgctgtacgaagacatccgtgagcgcacgttcgtggaggggcaactgccaaatcctaaacctgacgccctggacaaccatcagaagtgcttcgccattctcaagctgtaccgtccgaaggtggataacagtgcggttgggacgagtaagaaaagtgacatggctgaggttaaggattggaaagcggttcgtgtggatctggtggtcgctccagatgagcagttcgcctatgcgctgctcggttggacgggcagcggccagtttcgtcgcgatactcgtcgctacgcggaggaagagcgcgacatgctgctcgacaaccatagtctctacgacctgaaaaagggcatctttctgagtgcggacagcgaagaagagattttcggtcatctggacctggattatctggagccgtgggaacgcaacgcg

SEQ ID NO: 5214 - protein, 394 aa, synthetic construct
  REGION 1..394: note = Variant of terminal deoxynucleotidyl transferase
MHHHHHHGGSGHPEGNTPEKEVPSVIARHVSQYACQRKTTLNNYNKKFTDALEIMAENYKFKENLQACLEAKRAASVLKSLPFEVTSMKDIQGLPCITDDVRPVIEEIIEVGESSRVKEILNDERYKAFKQFTSVFGVGVRTSEKWYRMGLRTREEAKASKSLKLNKMQKAGFLYYEDLASGVSKEEADAVTLIVKETVRTVSPDALVTIAGGFRRGKPMGHDVDLLITIPGRPTDDELLHKVLDLLKKQGLLLYEDIRERTFVEGQLPNPKPDALDNHQKCFAILKLYRPKVDNSAVGTSKKSDMAEVKDWKAVRVDLVVAPDEQFAYALLGWTGSGQFRRDTRRYAEEERDMLLDNHSLYDLKKGIFLSADSEEEIFGHLDLDYLEPWERNA

SEQ ID NO: 5215 - DNA, 1182 bp, synthetic construct
  misc_feature 1..1182: note = Variant of terminal deoxynucleotidyl transferase
  source 1..1182: mol_type = other DNA
atgcatcaccaccatcatcatgggggttctggtcatccggaaggtaataccccggagaaggaggtgccgagcgttatcgcccgtcatgttagtccgtacgcgtgccagcgcaagaccacgctgaataactacaacaaaaagttcaccgacgcgctggagatcatggccgagaactacaagtttaaagagaacctgcaggcgtgcctggaagccaagcgcgccgcgagtgtcctgaaaagcctgccgttcgaggttaccagcatgaaagacatccaaggtctgccgtgcattaccgacgacgtacgtcctgtgatcgaagagatcatcgaagtaggcgagagcagccgtgttaaagaaatcctcaatgacgagcgctacaaggcctttaagcagttcaccagcgtgttcggtgtgggcgttcgtacctcggaaaagtggtaccgtatgggcctccgtacgcgcgaagaagcaaaggccagtaagagtctgaagctgaacaagatgcagaaggcgggcttcctgtattacgaggatctgcgcagcggcgttagtaaagaagaagccgatgccgttacgctcatcgtgaaggaaacggtgcgcactgttagtccggatgcgctggtgaccatcgccggcggtttccgccgtggcaaacctatgggccacgacgttgacctgctgatcacgattccgggccgtcctacggatgacgagctgctccacaaagtgctggatctgctcaagaagcaaggtctgctgctgtacgaagacatccgtgagagcacgttcgtggaggggcaactgccaaatcctaaacctgacgccctggacaaccatcagaagtgcttcgccattctcaagctgtaccgtccgaaggtggataacagtgcggttgggacgagtaagaaaagtgacatggctgaggttaaggattggaaagcggttcgtgtggatctggtggtcgctccagatgagcagttcgcctatgcgctgctcggttggacgggcagcggccaatttcgtcgcgatactcgtcgctacgcggaggaagagcgcgacatgctgctcgacaaccatcgtctctacgacctgaaaaagggcatctttctgagtgcggacagcgaagaagagattttcggtcatctggacctggattatctggagccgtgggaacgcaacgcg

SEQ ID NO: 5216 - protein, 394 aa, synthetic construct
  REGION 1..394: note = Variant of terminal deoxynucleotidyl transferase
MHHHHHHGGSGHPEGNTPEKEVPSVIARHVSPYACQRKTTLNNYNKKFTDALEIMAENYKFKENLQACLEAKRAASVLKSLPFEVTSMKDIQGLPCITDDVRPVIEEIIEVGESSRVKEILNDERYKAFKQFTSVFGVGVRTSEKWYRMGLRTREEAKASKSLKLNKMQKAGFLYYEDLRSGVSKEEADAVTLIVKETVRTVSPDALVTIAGGFRRGKPMGHDVDLLITIPGRPTDDELLHKVLDLLKKQGLLLYEDIRESTFVEGQLPNPKPDALDNHQKCFAILKLYRPKVDNSAVGTSKKSDMAEVKDWKAVRVDLVVAPDEQFAYALLGWTGSGQFRRDTRRYAEEERDMLLDNHRLYDLKKGIFLSADSEEEIFGHLDLDYLEPWERNA

SEQ ID NO: 5217 - DNA, 1182 bp, synthetic construct
  misc_feature 1..1182: note = Variant of terminal deoxynucleotidyl transferase
  source 1..1182: mol_type = other DNA
atgcatcaccaccatcatcatgggggttctggtcatccggaaggtaataccccggagaaggaggtgccgagcgttatcgcccgtcatgttagtcagtacgcgtgccagcgcaagaccacgctgaataactacaacaaaaagttcaccgacgcgctggagatcatggccgagaactacaagtttaaagagaacctgcaggcgtgcctggaggccaaacgcgccgcgagtgtcctgaaaagcctgccgttcgaggttaccagcatgaaagacatccaaggtctgccgtgcattaccgacgacgtacgtcctgtgatcgaagagatcatcgaagtaggcgagagcagccgtgttaaagaaatcctcaatgacgagcgctacaaggcctttaagcagttcaccagcgtgttcggtgtgggcgtgaaaacctcggaaaagtggtaccgtatgggcctccgtacgcgcgaagaagcaaaggccagtaagagtctgaagctgaacaagatgcagaaggcgggcttcctgtattacgaggatctggcgagcggtgttagtaaagaagaagccgatgccgttacgctcatcgtgaaggaaacggtgcgcactgttagtccggatgcgctggtgaccatcgccggcggtttccgccgtggcaaacctatgggccacgacgttgacctgctgatcacgattccgggccgtcctacggatgacgagctgctccacaaagtgctggatctgctcaagaagcaaggtctgctgctgtaccaagacatccgtgagcgcacgttcgtggaggggcaactgccaaatcctaaacctgacgccctggacaaccatcagaagtgcttcgccattctcaagctgtaccgtccgaaggtggataacagtgcggttgggacgagtaagaaaagtgacatggctgaggttaaggattggaaagcggttcgtgtggatctggtggtcgctccagatgagcagttcgcctatgcgctgctcggttggacgggcagcggcatgtttcgtcgcgatactcgtcgctacgcggaggaagagcgcgacatgctgctcgacaaccatagtctctacgacctgaaaaagggcatctttctgagtgcggacagcgaagaagagattttcggtcatctggacctggattatctggagccgtgggaacgcaacgcg

SEQ ID NO: 5218 - protein, 394 aa, synthetic construct
  REGION 1..394: note = Variant of terminal deoxynucleotidyl transferase
MHHHHHHGGSGHPEGNTPEKEVPSVIARHVSQYACQRKTTLNNYNKKFTDALEIMAENYKFKENLQACLEAKRAASVLKSLPFEVTSMKDIQGLPCITDDVRPVIEEIIEVGESSRVKEILNDERYKAFKQFTSVFGVGVKTSEKWYRMGLRTREEAKASKSLKLNKMQKAGFLYYEDLASGVSKEEADAVTLIVKETVRTVSPDALVTIAGGFRRGKPMGHDVDLLITIPGRPTDDELLHKVLDLLKKQGLLLYQDIRERTFVEGQLPNPKPDALDNHQKCFAILKLYRPKVDNSAVGTSKKSDMAEVKDWKAVRVDLVVAPDEQFAYALLGWTGSGMFRRDTRRYAEEERDMLLDNHSLYDLKKGIFLSADSEEEIFGHLDLDYLEPWERNA

SEQ ID NO: 5219 - DNA, 1182 bp, synthetic construct
  misc_feature 1..1182: note = Variant of terminal deoxynucleotidyl transferase
  source 1..1182: mol_type = other DNA
atgcatcaccaccatcatcatgggggttctggtcatccggaaggtaataccccggagaaggaggtgccgagcgttatcgcccgtcatgttagtcaatacgcgtgccagcgcaagaccacgctgaataactacaacaaaaagttcaccgacgcgctggagatcatggccgagaactacaagtttaaagagaacctgcaggcgtgcctggaagccaagcgcgccgcgagtgtcctgaaaagcctgccgttcgaggttaccagcatgaaagacatccaaggtctgccgtgcattaccgacgacgtacgtcctgtgatcgaagagatcatcgaagtaggcgagagcagccgtgttaaagaaatcctcaatgacgagcgctacaaggcctttaagcagttcaccagcgtgttcggtgtgggcgtgaaaacctcggaaaagtggtaccgtatgggcctccgtacgcgcgaagaagcaaaggccagtaagagtctgaagctgaacaagatgcagaaggcgggcttcctgtattacgaggatctggcgagcggtgttagtaaagaagaagccgatgccgttacgctcatcgtgaaggaaacggtgcgcactgttagtccggatgcgctggtgaccatcgccggcggtttccgccgtggcaaacctatgggccacgacgttgacctgctgatcacgattccgggccgtcctacggatgacgagctgctccacaaagtggttgatctgctcaagaagcaaggtctgctgctgtacgaagacatccgtgagagcacgttcgtggaggggcaactgccaaatcctaaacctgacgccctggacaaccatcagaagtgcttcgccattctcaagctgtaccgtccgaaggtggataacagtgcggttgggacgagtaagaaaagtgacatggctgaggttaaggattggaaagcggttcgtgtggatctggtggtcgctccagattcgcagttcgcctatgcgctgctcggttggacgggcagcggcatgtttcgtcgcgatactcgtcgctacgcggaggaagagcgcgacatgctgctcgacaaccatcgtctctacgacctgaaaaagggcatctttctgagtgcggacagcgaagaagagattttcggtcatctggacctggattatctggagccgtgggaacgcaacgcg

SEQ ID NO: 5220 - protein, 394 aa, synthetic construct
  REGION 1..394: note = Variant of terminal deoxynucleotidyl transferase
MHHHHHHGGSGHPEGNTPEKEVPSVIARHVSQYACQRKTTLNNYNKKFTDALEIMAENYKFKENLQACLEAKRAASVLKSLPFEVTSMKDIQGLPCITDDVRPVIEEIIEVGESSRVKEILNDERYKAFKQFTSVFGVGVKTSEKWYRMGLRTREEAKASKSLKLNKMQKAGFLYYEDLASGVSKEEADAVTLIVKETVRTVSPDALVTIAGGFRRGKPMGHDVDLLITIPGRPTDDELLHKVVDLLKKQGLLLYEDIRESTFVEGQLPNPKPDALDNHQKCFAILKLYRPKVDNSAVGTSKKSDMAEVKDWKAVRVDLVVAPDSQFAYALLGWTGSGMFRRDTRRYAEEERDMLLDNHRLYDLKKGIFLSADSEEEIFGHLDLDYLEPWERNA

SEQ ID NO: 5221 - DNA, 1182 bp, synthetic construct; identical to SEQ ID NO: 5193
  misc_feature 1..1182: note = Variant of terminal deoxynucleotidyl transferase
  source 1..1182: mol_type = other DNA

SEQ ID NO: 5222 - protein, 394 aa, synthetic construct; identical to SEQ ID NO: 5194
  REGION 1..394: note = Variant of terminal deoxynucleotidyl transferase

SEQ ID NO: 5223 - DNA, 1182 bp, synthetic construct
  misc_feature 1..1182: note = Variant of terminal deoxynucleotidyl transferase
  source 1..1182: mol_type = other DNA
atgcatcaccaccatcatcatgggggttctggtcatccggaaggtaataccccggagaaggaggtgccgagcgttatcgcccgtcatgttagtcaatacgcgtgccagcgcaagaccacgctgaataactacaacaaaaagttcaccgacgcgctggagatcatggccgagaactacaagtttaaagagaacctgcaggcgtgcctggaggccaaacgcgccgcgagtgtcctgaaaagcctgccgttcgaggttaccagcatgaaagacatccaaggtctgccgtgcattaccgacgacgtacgtcctgtgatcgaagagatcatcgaagtaggcgagagcagccgtgttaaagaaatcctcaatgacgagcgctacaaggcctttaagcagttcaccagcgtgttcggtgtgggcgtgaaaacctcggaaaagtggtaccgtatgggcctccgtacgcgcgaagaagcaaaggccagtaagagtctgaagctgaacaagatgcagaaggcgggcttcctgtattacgaggatctggcgagcggtgttagtaaagaagaagccgatgccgttacgctcatcgtgaaggaaacggtgcgcactgttagtccggatgcgctggtgaccatcgccggcggtttccgccgtggcaaacctatgggccacgacgttgacctgctgatcacgattccgggccgtcctacggatgacgagctgctccacaaagtggttgatctgctcaagaagcaaggtctgctgctgtacgaagacatccgtgagagcacgttcgtggaggggcaactgccaaatcctaaacctgacgccctggacaaccatcagaagtgcttcgccattctcaagctgtaccgtccgaaggtggataacagtgcggttgggacgagtaagaaaagtgacatggctgaggttaaggattggaaagcggttcgtgtggatctggtggtcgctccagatgagcagttcgcctatgcgctgctcggttggacgggcagcggcatgtttcgtcgcgatactcgtcgctacgcggaggaagagcgcgacatgctgctcgacaaccatcgtctctacgacctgaaaaagggcatctttctgagtgcggacagcgaagaagagattttcggtcatctggacctggattatctggagccgtgggaacgcaacgcg

SEQ ID NO: 5224 - protein, 394 aa, synthetic construct
  REGION 1..394: note = Variant of terminal deoxynucleotidyl transferase
MHHHHHHGGSGHPEGNTPEKEVPSVIARHVSQYACQRKTTLNNYNKKFTDALEIMAENYKFKENLQACLEAKRAASVLKSLPFEVTSMKDIQGLPCITDDVRPVIEEIIEVGESSRVKEILNDERYKAFKQFTSVFGVGVKTSEKWYRMGLRTREEAKASKSLKLNKMQKAGFLYYEDLASGVSKEEADAVTLIVKETVRTVSPDALVTIAGGFRRGKPMGHDVDLLITIPGRPTDDELLHKVVDLLKKQGLLLYEDIRESTFVEGQLPNPKPDALDNHQKCFAILKLYRPKVDNSAVGTSKKSDMAEVKDWKAVRVDLVVAPDEQFAYALLGWTGSGMFRRDTRRYAEEERDMLLDNHRLYDLKKGIFLSADSEEEIFGHLDLDYLEPWERNA

SEQ ID NO: 5225 - DNA, 1182 bp, synthetic construct
  misc_feature 1..1182: note = Variant of terminal deoxynucleotidyl transferase
  source 1..1182: mol_type = other DNA
atgcatcaccaccatcatcatgggggttctggtcatccggaaggtaataccccggagaaggaggtgccgagcgttatcgcccgtcatgttagtcaatacgcgtgccagcgcaagaccacgctgaataactacaacaaaaagttcaccgacgcgctggagatcatggccgagaactacaagtttaaagagaacctgcaggcgtgcctggaagccaagcgcgccgcgagtgtcctgaaaagcctgccgttcgaggttaccagcatgaaagacatccaaggtctgccgtgcattaccgacgacgtacgtcctgtgatcgaagagatcatcgaagtaggcgagagcagccgtgttaaagaaatcctcaatgacgagcgctacaaggcctttaagcagttcaccagcgtgttcggtgtgggcgtgaaaacctcggaaaagtggtaccgtatgggcctccgtacgcgcgaagaagcaaaggccagtaagagtctgaagctgaacaagatgcagaaggcgggcttcctgtattacgaggatctggcgagcggtgttagtaaagaagaagccgatgccgttacgctcatcgtgaaggaaacggtgcgcactgttagtccggatgcgctggtgaccatcgccggcggtttccgccgtggcaaacctatgggccacgacgttgacctgctgatcacgattccgggccgtcctacggatgacgagctgctccacaaagtggttgatctgctcaagaagcaaggtctgctgctgtacgaagacatccgtgagagcacgttcgtggaggggcaactgccaaatcctaaacctgacgccctggacaaccatcagaagtgcttcgccattctcaagctgtaccgtccgaaggtggataacagtgcggttgggacgagtaagaaaagtgacatggctgaggttaaggattggaaagcggttcgtgtggatctggtggtcgctccagattcgcagttcgcctatgcgctgctcggttggacgggcagcggccagtttcgtcgcgatactcgtcgctacgcggaggaagagcgcgacatgctgctcgacaaccatcgtctctacgacctgaaaaagggcatctttctgagtgcggacagcgaagaagagattttcggtcatctggacctggattatctggagccgtgggaacgcaacgcg

SEQ ID NO: 5226 - protein, 394 aa, synthetic construct
  REGION 1..394: note = Variant of terminal deoxynucleotidyl transferase
MHHHHHHGGSGHPEGNTPEKEVPSVIARHVSQYACQRKTTLNNYNKKFTDALEIMAENYKFKENLQACLEAKRAASVLKSLPFEVTSMKDIQGLPCITDDVRPVIEEIIEVGESSRVKEILNDERYKAFKQFTSVFGVGVKTSEKWYRMGLRTREEAKASKSLKLNKMQKAGFLYYEDLASGVSKEEADAVTLIVKETVRTVSPDALVTIAGGFRRGKPMGHDVDLLITIPGRPTDDELLHKVVDLLKKQGLLLYEDIRESTFVEGQLPNPKPDALDNHQKCFAILKLYRPKVDNSAVGTSKKSDMAEVKDWKAVRVDLVVAPDSQFAYALLGWTGSGQFRRDTRRYAEEERDMLLDNHRLYDLKKGIFLSADSEEEIFGHLDLDYLEPWERNA

SEQ ID NO: 5227 - DNA, 1182 bp, synthetic construct
  misc_feature 1..1182: note = Variant of terminal deoxynucleotidyl transferase
  source 1..1182: mol_type = other DNA
atgcatcaccaccatcatcatgggggttctggtcatccggaaggtaataccccggagaaggaggtgccgagcgttatcgcccgtcatgttagtcagtacgcgtgccagcgcaagaccacgctgaataactacaacaaaaagttcaccgacgcgctggagatcatggccgagaactacaagtttaaagagaacctgcaggcgtgcctgcgtgccaaacgcgccgcgagtgtcctgaaaagcctgccgttcgaggttaccagcatgaaagacatccaaggtctgccgtgcattaccgacgacgtacgtcctgtgatcgaagagatcatcgaagtaggcgagagcagccgtgttaaagaaatcctcaatgacgagcgctacaaggcctttaagcagttcaccagcgtgttcggtgtgggcgttaaaacctcggaaaagtggtaccgtatgggcctccgtacgcgcgaagaagcaaaggccagtaagagtctgaagctgaacaagatgcagaaggcgggcttcctgtattacgaggatctggcgagcggtgttagtaaagaagaagccgatgccgttacgctcatcgtgaaggaaacggtgcgcactgttagtccggatgcgctggtgaccatcgccggcggtttccgccgtggcaaacctatgggccacgacgttgacctgctgatcacgattccgggccgtcctacggatgacgagctgctccacaaagtggtggatctgctcaagaagcaaggtctgctgctgtacgaagacatccgtgagcgcacgttcgtggaggggcaactgccaaatcctaaacctgacgccctggacaaccatcagaagtgcttcgccattctcaagctgtaccgtccgaaggtggataacagtgcggttgggacgagtaagaaaagtgacatggctgaggttaaggattggaaagcggttcgtgtggatctggtggtcgctccagatgagcagttcgcctatgcgctgctcggttggacgggcagcggcatgtttcgtcgcgatactcgtcgctacgcggaggaagagcgcgacatgctgctcgacaaccatagtctctacgacctgaaaaagggcatctttctgagtgcggacagcgaagaagagattttcggtcatctggacctggattatctggagccgtgggaacgcaacgcg

SEQ ID NO: 5228 - protein, 394 aa, synthetic construct
  REGION 1..394: note = Variant of terminal deoxynucleotidyl transferase
MHHHHHHGGSGHPEGNTPEKEVPSVIARHVSQYACQRKTTLNNYNKKFTDALEIMAENYKFKENLQACLRAKRAASVLKSLPFEVTSMKDIQGLPCITDDVRPVIEEIIEVGESSRVKEILNDERYKAFKQFTSVFGVGVKTSEKWYRMGLRTREEAKASKSLKLNKMQKAGFLYYEDLASGVSKEEADAVTLIVKETVRTVSPDALVTIAGGFRRGKPMGHDVDLLITIPGRPTDDELLHKVVDLLKKQGLLLYEDIRERTFVEGQLPNPKPDALDNHQKCFAILKLYRPKVDNSAVGTSKKSDMAEVKDWKAVRVDLVVAPDEQFAYALLGWTGSGMFRRDTRRYAEEERDMLLDNHSLYDLKKGIFLSADSEEEIFGHLDLDYLEPWERNA

SEQ ID NO: 5229 - DNA, 1182 bp, synthetic construct
  misc_feature 1..1182: note = Variant of terminal deoxynucleotidyl transferase
  source 1..1182: mol_type = other DNA
atgcatcaccaccatcatcatgggggttctggtcatccggaaggtaataccccggagaaggaggtgccgagcgttatcgcccgtcatgttagtcaatacgcgtgccagcgcaagaccacgctgaataactacaacaaaaagttcaccgacgcgctggagatcatggccgagaactacaagtttaaagagaaccgccaggcgtgcctggaagccaagcgcgccgcgagtgtcctgaaaagcctgccgttcgaggttaccagcatgaaagacatccaaggtctgccgtgcattaccgacgacgtacgtcctgttatcgaagagatcatcgaagtaggcgagagcagccgtgttaaagaaatcctcaatgacgagcgctacaaggcctttaagcagttcaccagcgtgttcggtgtgggcgtgaaaacctcggaaaagtggtaccgtatgggcctccgtacgcgcgaagaagcaaaggccagtaagagtctgaagctgaacaagatgcagaaggcgggcttcctgtattacgaggatctggcgagcggtgttagtaaagaagaagccgatgccgttacgctcatcgtgaaggaaacggtgcgcactgttagtccggatgcgctggtgaccatcgccggcggtttccgccgtggcaaacctcagggccacgacgttgacctgctgatcacgattccgggccgtcctacggatgacgagctgctccacaaagtggttgatctgctcaagaagcaaggtctgctgctgtacgaagacatccgtgagagcacgttcgtggaggggcaactgccaaatcctaaacctgacgccctggacaaccatcagaagtgcttcgccattctcaagctgtaccgtccgaaggtggataacagtgcggttgggacgagtaagaaaagtgacatggctgaggttaaggattggaaagcggttcgtgtggatctggtggtcgctccagatgagcagttcgcctatgcgctgctcggttggacgggcagcggcatgtttcgtcgcgatactcgtcgctacgcggaggaagagcgcgacatgctgctcgacaaccatcgtctctacgacctgaaaaagggcatctttctgagtgcggacagcgaagaagagattttcggtcatctggacctggattatctggagccgtgggaacgcaacgcg

SEQ ID NO: 5230 - protein, 394 aa, synthetic construct
  REGION 1..394: note = Variant of terminal deoxynucleotidyl transferase
MHHHHHHGGSGHPEGNTPEKEVPSVIARHVSQYACQRKTTLNNYNKKFTDALEIMAENYKFKENRQACLEAKRAASVLKSLPFEVTSMKDIQGLPCITDDVRPVIEEIIEVGESSRVKEILNDERYKAFKQFTSVFGVGVKTSEKWYRMGLRTREEAKASKSLKLNKMQKAGFLYYEDLASGVSKEEADAVTLIVKETVRTVSPDALVTIAGGFRRGKPQGHDVDLLITIPGRPTDDELLHKVVDLLKKQGLLLYEDIRESTFVEGQLPNPKPDALDNHQKCFAILKLYRPKVDNSAVGTSKKSDMAEVKDWKAVRVDLVVAPDEQFAYALLGWTGSGMFRRDTRRYAEEERDMLLDNHRLYDLKKGIFLSADSEEEIFGHLDLDYLEPWERNA

SEQ ID NO: 5231 - DNA, 1182 bp, synthetic construct
  misc_feature 1..1182: note = Variant of terminal deoxynucleotidyl transferase
  source 1..1182: mol_type = other DNA
atgcatcaccaccatcatcatgggggttctggtcatccggaaggtaataccccggagaaggaggtgccgagcgttatcgcccgtcatgttagtcaatacgcgtgccagcgcaagaccacgctgaataactacaacaaaaagttcaccgacgcgctggagatcatggtggagaactacaagtttaaagagaacctgcaggcgtgcctggaagccaagcgtgccgtgagtgtcctgaaaagcctgccgttcgaggttaccagcatgaaagacatccaaggtctgccgtgcattaccgacgacgtacgtcctgtgatcgaagagatcatcgaagtaggcgagagcagccgtgttaaagaaatcctcaatgacgagcgctacaaggcctttaagcagttcaccagcgtgttcggtgtgggcgtgaaaacctcggaaaagtggtaccgtatgggcctccgtacgcgcgaagaagcaaaggccagtaagagtctgaagctgaacaagatgcagaaggcgggcttcctgtattacgaggatctggcgagcggtgttagtaaagaagaagccgatgccgttctgctcatcgtgaaggaaacggtgcgcactgttagtccggatgcgctggtgaccatcgccggcggtttccgccgtggcaaacctatgggccacgacgttgacctgctgatcacgattccgggccgtcctacggatgatgaggtgctccacaaagtggttgatctgctcaagaagcaaggtctgctgctgtacgaagacatccgtgagagcacgttcgtggaggggcaactgccaaatcctaaacctgacgccctggacaaccatcaaaagtgtttcgccattctcaagctgtaccgtccgaaggtggataacagtgcggttgggacgagtaagaaaagtgacatggctgaggttaaggattggaaagcggttcgtgtggatctggtggtcgctccagatgagcagttcgcctatgcgctgctcggttggacgggcagcggccaatttcgtcgcgatactcgtcgctacgcggaggaggagcgcgacatgctgctcgacaaccatcgtctctacgacctgaaaaagggcatctttctgagtgcggacagcgaagaagagattttcggtcatctggacctggattatctggagccgtgggaacgcaacgcg

SEQ ID NO: 5232 - protein, 394 aa, synthetic construct
  REGION 1..394: note = Variant of terminal deoxynucleotidyl transferase
MHHHHHHGGSGHPEGNTPEKEVPSVIARHVSQYACQRKTTLNNYNKKFTDALEIMVENYKFKENLQACLEAKRAVSVLKSLPFEVTSMKDIQGLPCITDDVRPVIEEIIEVGESSRVKEILNDERYKAFKQFTSVFGVGVKTSEKWYRMGLRTREEAKASKSLKLNKMQKAGFLYYEDLASGVSKEEADAVLLIVKETVRTVSPDALVTIAGGFRRGKPMGHDVDLLITIPGRPTDDEVLHKVVDLLKKQGLLLYEDIRESTFVEGQLPNPKPDALDNHQKCFAILKLYRPKVDNSAVGTSKKSDMAEVKDWKAVRVDLVVAPDEQFAYALLGWTGSGQFRRDTRRYAEEERDMLLDNHRLYDLKKGIFLSADSEEEIFGHLDLDYLEPWERNA

SEQ ID NO: 5233 - DNA, 1182 bp, synthetic construct
  misc_feature 1..1182: note = Variant of terminal deoxynucleotidyl transferase
  source 1..1182: mol_type = other DNA
atgcatcaccaccatcatcatgggggttctggtcatccggaaggtaataccccggagaaggaggtgccgagcgttatcgcccgtcatgttagtcaatacgcgtgccagcgcaagaccacgctgaataactacaacaaaaagttcaccgacgcgctggagatcatggccgagaactacaagtttaaagagaacctgcaggcgtgcctgcgtgcccgtcgcgccgcgagtgtcctgaaaagcctgccgttcgaggttaccagcatgaaagacatccaaggtctgccgtgcattaccgacgacgtacgtcctgtgatcgaagagatcatcgaagtaggcgagagcagccgtgttaaagaaatcctcaatgacgagcgctacaaggcctttaagcagttcaccagcgtgttcggtgtgggcgtgaaaacctcggaaaagtggtaccgtatgggcctccgtacgcgcgaagaagcaaaggccagtaagagtctgaagctgaacaagatgcagaaggcgggcttcctgtattacgaggatctggcgagcggtgttagtaaagaagaagccgatgccgttacgctcatcgtgaaggaaacggtgcgcactgttagtccggatgcgctggtgaccatcgccggcggtttccgccgtggcaaacctatgggccacgacgttgacctgctgatcacgattccgggccgtcctacggatgacgagctgctccacaaagtggttgatctgctcaagaagcaaggtctgctgctgtacgaagacatccgtgagagcacgttcgtggaggggcaactgccaaatcctaaacctgacgccctggacaaccatcagaagtgcttcgccattctcaagctgtaccgtccgaaggtggataacagtgcggttgggacgagtaagaaaagtgacatggctgaggttaaggattggaaagcggttcgtgtggatctggtggtcgctccagatgagcagttcgcctatgcgctgctcggttggacgggcagcggccagtttcgtcgcgatactcgtcgctacgcggaggaagagcgcgacatgctgctcgacaaccatcgtctctacgacctgaaaaagggcatctttctgagtgcggacagcgaagaagagattttcggtcatctggacctggattatctggagccgtgggaacgcaacgcg

SEQ ID NO: 5234 - protein, 394 aa, synthetic construct
  REGION 1..394: note = Variant of terminal deoxynucleotidyl transferase
MHHHHHHGGSGHPEGNTPEKEVPSVIARHVSQYACQRKTTLNNYNKKFTDALEIMAENYKFKENLQACLRARRAASVLKSLPFEVTSMKDIQGLPCITDDVRPVIEEIIEVGESSRVKEILNDERYKAFKQFTSVFGVGVKTSEKWYRMGLRTREEAKASKSLKLNKMQKAGFLYYEDLASGVSKEEADAVTLIVKETVRTVSPDALVTIAGGFRRGKPMGHDVDLLITIPGRPTDDELLHKVVDLLKKQGLLLYEDIRESTFVEGQLPNPKPDALDNHQKCFAILKLYRPKVDNSAVGTSKKSDMAEVKDWKAVRVDLVVAPDEQFAYALLGWTGSGQFRRDTRRYAEEERDMLLDNHRLYDLKKGIFLSADSEEEIFGHLDLDYLEPWERNA

SEQ ID NO: 5235 - DNA, 1182 bp, synthetic construct
  misc_feature 1..1182: note = Variant of terminal deoxynucleotidyl transferase
  source 1..1182: mol_type = other DNA
atgcatcaccaccatcatcatgggggttctggtcatccggaaggtaataccccggagaaggaggtgccgagcgttatcgcccgtcatgttagtcaatacgcgtgccagcgcaagaccacgctgaataactacaacaaaaagttcaccgacgcgctggagatcatggccgagaactacaagtttaaagagaacctgcaggcgtgcctggaggccaaacgcgccgcgagtgtcctgaaaagcctgccgttcgaggttaccagcatgaaagacatccaaggtctgccgtgcattaccgacgacgtacgtcctgtgatcgaagagatcatcgaagtaggcgagagcagccgtgttaaagaaatcctcaatgacgagcgctacaaggcctttaagcagttcaccagcgtgttcggtgtgggcgttaaaacctcggaaaagtggtaccgtatggacctccgtacgcgcgaagaagcaaaggccagtaagagtctgaagctgaacaagatgcagaaggcgggcttcctgtattacgaggatctggcgagcggtgttagtaaagaagaagccgatgccgttacgctcatcgtgaaggaaacggtgcgcactgttagtccggatgcgctggtgaccatcgccggcggtttccgccgtggcaaacctatgggccacgacgttgacctgctgatcacgattccgggccgtcctacggatgacgagctgctccacaaagtgctggatctgctcaagaagcaaggtctgctgctgtacgaagacatccgtgagcgcacgttcgtggaggggcaactgccaaatcctaaacctgacgccctggacaaccatcagaagtgcttcgccattctcaagctgtaccgtccgaaggtggataacagtgcggttgggacgagtaagaaaagtgacatggctgaggttaaggattggaaagcggttcgtgtggatctggtggtcgctccagatgagcagttcgcctatgcgctgctcggttggacgggcagcggccagtttcgtcgcgatactcgtcgctacgcggaggaagagcgcgacatgctgctcgacaaccatagtctctacgacctgaaaaagggcatctttctgagtgcggacagcgaagaagagattttcggtcatctggacctggattatctggagccgtgggaacgcaacgcg

SEQ ID NO: 5236 - protein, 394 aa, synthetic construct
  REGION 1..394: note = Variant of terminal deoxynucleotidyl transferase
MHHHHHHGGSGHPEGNTPEKEVPSVIARHVSQYACQRKTTLNNYNKKFTDALEIMAENYKFKENLQACLEAKRAASVLKSLPFEVTSMKDIQGLPCITDDVRPVIEEIIEVGESSRVKEILNDERYKAFKQFTSVFGVGVKTSEKWYRMDLRTREEAKASKSLKLNKMQKAGFLYYEDLASGVSKEEADAVTLIVKETVRTVSPDALVTIAGGFRRGKPMGHDVDLLITIPGRPTDDELLHKVLDLLKKQGLLLYEDIRERTFVEGQLPNPKPDALDNHQKCFAILKLYRPKVDNSAVGTSKKSDMAEVKDWKAVRVDLVVAPDEQFAYALLGWTGSGQFRRDTRRYAEEERDMLLDNHSLYDLKKGIFLSADSEEEIFGHLDLDYLEPWERNA

SEQ ID NO: 5237 - DNA, 1182 bp, synthetic construct
  misc_feature 1..1182: note = Variant of terminal deoxynucleotidyl transferase
  source 1..1182: mol_type = other DNA
atgcatcaccaccatcatcatgggggttctggtcatccggaaggtaataccccggagaaggaggtgccgagcgttatcgcccgtcatgttagtcagtacgcgtgccagcgcaagaccacgctgaataactacaacaaaaagttcaccgacgcgctggagatcatggccgagaactacaagtttaaagagaacctgcaggcgtgcctgcgtgcccgtcgcgccgcgagtgtcctgaaaagcctgccgttcgaggttaccagcatgaaagacatccaaggtctgccgtgcattaccgacgacgtacgtcctgtgatcgaagagatcatcgaagtaggcgagagcagccgtgttaaagaaatcctcaatgacgagcgctacaaggcctttaagcagttcaccagcgtgttcggtgtgggcattaaaacctcggaaaagtggtaccgtatgggcctccgtacgcgcgaagaagcaaaggccagtaagagtctgaagctgaacaagatgcagaaggcgggcttcctgtattacgaggatctggcgagcggtgttagtaaagaagaagccgatgccgttacgctcatcgtgaaggaaacggtgcgcactgttagtccggatgcgctggtgaccatcgccggcggtttccgccgtggcaaacctatgggccacgacgttgacctgctgatcacgattccgggccgtcctacggatgacgagctgctccacaaagtgctggatctgctcaagaagcaaggtctgctgctgtacgaagacatccgtgagcgcacgttcgtggaggggcaactgccaaatcctaaacctgacgccctggacaaccatcagaagtgcttcgccattctcaagctgtaccgtccgaaggtggataacagtgcggttgggacgagtaagaaaagtgacatggctgaggttaaggattggaaagcggttcgtgtggatctggtggtcgctccagatgagcagttcgcctatgcgctgctcggttggacgggcagcggcatgtttcgtcgcgatactcgtcgctacgcggaggaagagcgcgacatgctgctcgacaaccatcgtctctacgacctgaaaaagggcatctttctgagtgcggacagcgaagaagagattttcggtcatctggacctggattatctggagccgtgggaacgcaacgcg

SEQ ID NO: 5238 - protein, 394 aa, synthetic construct
  REGION 1..394: note = Variant of terminal deoxynucleotidyl transferase
MHHHHHHGGSGHPEGNTPEKEVPSVIARHVSQYACQRKTTLNNYNKKFTDALEIMAENYKFKENLQACLRARRAASVLKSLPFEVTSMKDIQGLPCITDDVRPVIEEIIEVGESSRVKEILNDERYKAFKQFTSVFGVGIKTSEKWYRMGLRTREEAKASKSLKLNKMQKAGFLYYEDLASGVSKEEADAVTLIVKETVRTVSPDALVTIAGGFRRGKPMGHDVDLLITIPGRPTDDELLHKVLDLLKKQGLLLYEDIRERTFVEGQLPNPKPDALDNHQKCFAILKLYRPKVDNSAVGTSKKSDMAEVKDWKAVRVDLVVAPDEQFAYALLGWTGSGMFRRDTRRYAEEERDMLLDNHRLYDLKKGIFLSADSEEEIFGHLDLDYLEPWERNA

SEQ ID NO: 5239 - DNA, 1182 bp, synthetic construct
  misc_feature 1..1182: note = Variant of terminal deoxynucleotidyl transferase
  source 1..1182: mol_type = other DNA
atgcatcaccaccatcatcatgggggttctggtcatccggaaggtaataccccggagaaggaggtgccgagcgttatcgcccgtcatgttagtcaatacgcgtgccagcgcaagaccacgctgaataactacaacaaaaagttcaccgacgcgctggagatcatggtggagaactacaagtttaaagagaacctgcaggcgtgcctggaagccaagcgtgccattagtgtcctgaaaagcctgccgttcgaggttaccagcatgaaagacatccaaggtctgccgtgcattaccgacgacgtacgtcctgtgatcgaagagatcatcgaagtaggcgagagcagccgtgttaaagaaatcctcaatgacgagcgctacaaggcctttaagcagttcaccagcgtgttcggtgtgggcgtgaaaacctcggaaaagtggtaccgtatgggcctccgtacggtagaagtagcaaaggccagtaagagtctgaagctgaacaagatgcagaaggcgggcttcctgtattacgaggatctggcgagcggtgttagtaaagaagaagccgatgccgttctgctcatcgtgaaggaaacggtgcgcactgttagtccggatgcgctggtgaccatcgccggcggtttccgccgtggcaaacctatgggccacgacgttgacctgctgatcacgattccgggccgtcctacggatgatgaggtgctccacaaagtggttgatctgctcaagaagcaaggtctgctgctgtacgaagacatccgtgagagcacgttcgtggaggggcaactgccaaatcctaaacctgacgccctggacaaccatgggaagatgttcgccattctcaagctgtaccgtccgaaggtggataacagtgcggttgggacgagtaagaaaagtgacatggctgaggttaaggattggaaagcggttcgtgtggatctggtggtcgctccagatgagcagttcgcctatgcgctgctcggttggacgggcagcggccaatttcgtcgcgatactcgtcgctacgcggaggaagagcgcgacatgctgctcgacaaccatcgtctctacgacctgaaaaagggcatctttctgagtgcggacagcgaagaagagattttcggtcatctggacctggattatctggagccgtgggaacgcaacgcg

SEQ ID NO: 5240 - protein, 394 aa, synthetic construct
  REGION 1..394: note = Variant of terminal deoxynucleotidyl transferase
MHHHHHHGGSGHPEGNTPEKEVPSVIARHVSQYACQRKTTLNNYNKKFTDALEIMVENYKFKENLQACLEAKRAISVLKSLPFEVTSMKDIQGLPCITDDVRPVIEEIIEVGESSRVKEILNDERYKAFKQFTSVFGVGVKTSEKWYRMGLRTVEVAKASKSLKLNKMQKAGFLYYEDLASGVSKEEADAVLLIVKETVRTVSPDALVTIAGGFRRGKPMGHDVDLLITIPGRPTDDEVLHKVVDLLKKQGLLLYEDIRESTFVEGQLPNPKPDALDNHGKMFAILKLYRPKVDNSAVGTSKKSDMAEVKDWKAVRVDLVVAPDEQFAYALLGWTGSGQFRRDTRRYAEEERDMLLDNHRLYDLKKGIFLSADSEEEIFGHLDLDYLEPWERNA

SEQ ID NO: 5241 - DNA, 1182 bp, synthetic construct
  misc_feature 1..1182: note = Variant of terminal deoxynucleotidyl transferase
  source 1..1182: mol_type = other DNA
atgcatcaccaccatcatcatgggggttctggtcatccggaaggtaataccccggagaaggaggtgccgagcgttatcgcccgtcatgttagtcaatacgcgtgccagcgcaagaccacgctgaataactacaacaaaaagttcaccgacgcgctggagattatggtggagaactacaagtttaaagagaacctgcaggcgtgcctggaagccaagcgtgccgcgagtgtcctgaaaagcctgccgttcgaggttaccagcatgaaagacatccaaggtctgccgtgcattaccgacgacgtacgtcctgtgatcgaagagatcatcgaagtaggcgagagcagccgtgttaaagaaatcctcaatgacgagcgctacaaggcctttaagcagttcaccagcgtgttcggtgtgggcgtgaaaacctcggaaaagtggtaccgtatgggcctccgtacgcgcgaagaagcaaaggccagtaagagtctgaagctgaacaagatgcagaaggcgggcttcctgtattacgaggatctggcgagcggtgttagtaaagaagaagccgatgccgttcagctcatcgtgaaggaaacggtgcgcactgttagtccggatgcgctggtgaccatcgccggcggtttccgccgtggcaaacctatgggccacgacgttgacctgctgatcacgattccgggccgtcctacggatgatgagctgctccacaaagtggttgatctgctcaagaagcaaggtctgctgctgtacgaagacatccgtgagagcacgttcgtggaggggcaactgccaaatcctaaacctgacgccctggacaaccatcaaaagatgttcgccattctcaagctgtaccgtccgaaggtggataacagtgcggttgggacgagtaagaaaagtgacatggctgaggttaaggattggaaagcggttcgtgtggatctggtggtcgctccagatgagcagttcgcctatgcgctgctcggttggacgggcagcggccaatttcgtcgcgatactcgtcgctacgcggagattgagcgcgacatgctgctcgacaaccatcgtctctacgacctgaaaaagggcatctttctgagtgcggacagcgaagaagagattttcggtcatctggacctggattatctggagccgtgggaacgcaacgcg

SEQ ID NO: 5242 - protein, 394 aa, synthetic construct
  REGION 1..394: note = Variant of terminal deoxynucleotidyl transferase
MHHHHHHGGSGHPEGNTPEKEVPSVIARHVSQYACQRKTTLNNYNKKFTDALEIMVENYKFKENLQACLEAKRAASVLKSLPFEVTSMKDIQGLPCITDDVRPVIEEIIEVGESSRVKEILNDERYKAFKQFTSVFGVGVKTSEKWYRMGLRTREEAKASKSLKLNKMQKAGFLYYEDLASGVSKEEADAVQLIVKETVRTVSPDALVTIAGGFRRGKPMGHDVDLLITIPGRPTDDELLHKVVDLLKKQGLLLYEDIRESTFVEGQLPNPKPDALDNHQKMFAILKLYRPKVDNSAVGTSKKSDMAEVKDWKAVRVDLVVAPDEQFAYALLGWTGSGQFRRDTRRYAEIERDMLLDNHRLYDLKKGIFLSADSEEEIFGHLDLDYLEPWERNA

SEQ ID NO: 5243 - DNA, 1182 bp, synthetic construct
  misc_feature 1..1182: note = Variant of terminal deoxynucleotidyl transferase
  source 1..1182: mol_type = other DNA
atgcatcaccaccatcatcatgggggttctggtcatccggaaggtaataccccggagaaggaggtgccgagcgttatcgcccgtcatgttagtcagtacgcgtgccagcgcaagaccacgctgaataactacaacaaaaagttcaccgacgcgctggagatcatggccgagaactacaagtttaaagagaacctgcaggcgtgcctggaggccaaacgcgccgcgagtgtcctgaaaagcctgccgttcgaggttaccagcatgaaagacatccaaggtctgccgtgcattaccgacgacgtacgtcctgtgatcgaagagatcatcgaagtaggcgagagcagccgtgttaaagaaatcctcaatgacgagcgctacaaggcctttaagcagttcaccagcgtgttcggtgtgggcgtgaaaacctcggaaaagtggtaccgtatgggcctccgtacgcgcgaagaagcaaaggccagtaagagtctgaagctgaacaagatgcagaaggcgggcttcctgtattacgaggatctgcgcagcggtgttagtaaagaagaagccgatgccgttacgctcatcgtgaaggaaacggtgcgcactgttagtccggatgcgctggtgaccatcgccggcggtttccgccgtggcaaacctatgggccacgacgttgacctgctgatcacgattccgggccgtcctacggatgacgagctgctccacaaagtggttgatctgctcaagaagcaaggtctgctgctgtacgaagacatccgtgagagcacgttcgtggaggggcaactgccaaatcctaaacctgacgccctggacaaccatcagaagtgcttcgccattctcaagctgtaccgtccgaaggtggataacagtgcggttgggacgagtaagaaaagtgacatggctgaggttaaggattggaaagcggttcgtgtggatctggtggtcgctccagatgagcagttcgcctatgcgctgctcggttggacgggcagcggcatgtttcgtcgcgatactcgtcgctacgcggaggaagagcgcgacatgctgctcgacaaccatcgtctctacgacctgaaaaagggcatctttctgagtgcggacagcgaagaagagattttcggtcatctggacctggattatctggagccgtgggaacgcaacgcg

SEQ ID NO: 5244 - protein, 394 aa, synthetic construct; identical to SEQ ID NO: 5172
  REGION 1..394: note = Variant of terminal deoxynucleotidyl transferase

SEQ ID NO: 5245 - DNA, 1182 bp, synthetic construct
  misc_feature 1..1182: note = Variant of terminal deoxynucleotidyl transferase
  source 1..1182: mol_type = other DNA
atgcatcaccaccatcatcatgggggttctggtcatccggaaggtaataccccggagaaggaggtgccgagcgttatcgcccgtcatgttagtcaatacgcgtgccagcgcaagaccacgctgaataactacaacaaaaagttcaccgacgcgctggagatcatggcggagaactacaagtttaaagagaacctgcaggcgtgcctggaagccaagcgcgccgcgagtgtcctgaaaagcctgccgttcgaggttaccagcatgaaagacatccaaggtctgccgtgcattaccgacgacgtacgtcctgtgatcgaagagatcatcgaagtaggcgagagcagccgtgttaaagaaatcctcaatgacgagcgctacaaggcctttaagcagttcaccagcgtgttcggtgtgggcgtgaaaacctcggaaaagtggtaccgtatgggcctccgtacggtagaagtagcaaaggccagtaagagtctgaagctgaacaagatgcagaaggcgggcttcctgtattacgaggatctggcgagcggtgttagtaaagaagaagccgatgccgttacgctcatcgtgaaggaaacggtgcgcactgttagtccggatgcgctggtgaccatcgccggcggtttccgccgtggcaaacctatgggccacgacgttgacctgctgatcacgattccgggccgtcctacggatgacgagctgctccacaaagtggttgatctgctcaagaagcaaggtctgctgctgtacgaagacatccgtgagagcacgttcgtggaggggcaactgccaaatcctaaacctgacgccctggacaaccatcaaaagatgttcgccattctcaagctgtaccgtccgaaggtggataacagtgcggttgggacgagtaagaaaagtgacatggctgaggttaaggattggaaagcggttcgtgtggatctggtggtcgctccagatgagcagttcgcctatgcgctgctcggttggacgggcagcggccaatttcgtcgcgatactcgtcgctacgcggagattgagcgcgacatgctgctcgacaaccatcgtctctacgacctgaaaaagggcatctttctgagtgcggacagcgaagaagagattttcggtcatctggacctggattatctggagccgtgggaacgcaacgcg

SEQ ID NO: 5246 - protein, 394 aa, synthetic construct
  REGION 1..394: note = Variant of terminal deoxynucleotidyl transferase
MHHHHHHGGSGHPEGNTPEKEVPSVIARHVSQYACQRKTTLNNYNKKFTDALEIMAENYKFKENLQACLEAKRAASVLKSLPFEVTSMKDIQGLPCITDDVRPVIEEIIEVGESSRVKEILNDERYKAFKQFTSVFGVGVKTSEKWYRMGLRTVEVAKASKSLKLNKMQKAGFLYYEDLASGVSKEEADAVTLIVKETVRTVSPDALVTIAGGFRRGKPMGHDVDLLITIPGRPTDDELLHKVVDLLKKQGLLLYEDIRESTFVEGQLPNPKPDALDNHQKMFAILKLYRPKVDNSAVGTSKKSDMAEVKDWKAVRVDLVVAPDEQFAYALLGWTGSGQFRRDTRRYAEIERDMLLDNHRLYDLKKGIFLSADSEEEIFGHLDLDYLEPWERNA

SEQ ID NO: 5247 - DNA, 1182 bp, synthetic construct
  misc_feature 1..1182: note = Variant of terminal deoxynucleotidyl transferase
  source 1..1182: mol_type = other DNA
atgcatcaccaccatcatcatgggggttctggtcatccggaaggtaataccccggagaaggaggtgccgagcgttatcgcccgtcatgttagtcaatacgcgtgccagcgcaagaccacgctgaataactacaacaaaaagttcaccgacgcgctggagatcatggccgagaactacaagtttaaagagaacctgcaggcgtgcctgcgtgcccgtcgcgccgcgagtgtcctgaaaagcctgccgttcgaggttaccagcatgaaagacatccaaggtctgccgtgcattaccgacgacgtacgtcctgtgatcgaagagatcatcgaagtaggcgagagcagccgtgttaaagaaatcctcaatgacgagcgctacaaggcctttaagcagttcaccagcgtgttcggtgtgggcgttcgtacctcggaaaagtggtaccgtatgggcctccgtacgcgcgaagaagcaaaggccagtaagagtctgaagctgaacaagatgcagaaggcgggcttcctgtattacgaggatctggcgagcggtgttagtaaagaagaagccgatgccgttacgctcatcgtgaaggaaacggtgcgcactgttagtccggatgcgctggtgaccatcgccggcggtttccgccgtggcaaacctatgggccacgacgttgacctgctgatcacgattccgggccgtcctacggatgacgagctgctccacaaagtgctggatctgctcaagaagcaaggtctgctgctgtacgaagacatccgtgagagcacgttcgtggaggggcaactgccaaatcctaaacctgacgccctggacaaccatcagaagtgcttcgccattctcaagctgtaccgtccgaaggtggataacagtgcggttgggacgagtaagaaaagtgacatggctgaggttaaggattggaaagcggttcgtgtggatctggtggtcgctccagatgagcagttcgcctatgcgctgctcggttggacgggcagcggccaatttcgtcgcgatactcgtcgctacgcggaggaagagcgcgacatgctgctcgacaaccatcgtctctacgacctgaaaaagggcatctttctgagtgcggacagcgaagaagagattttcggtcatctggacctggattatctggagccgtgggaacgcaacgcg

SEQ ID NO: 5248 - protein, 394 aa, synthetic construct
  REGION 1..394: note = Variant of terminal deoxynucleotidyl transferase
MHHHHHHGGSGHPEGNTPEKEVPSVIARHVSQYACQRKTTLNNYNKKFTDALEIMAENYKFKENLQACLRARRAASVLKSLPFEVTSMKDIQGLPCITDDVRPVIEEIIEVGESSRVKEILNDERYKAFKQFTSVFGVGVRTSEKWYRMGLRTREEAKASKSLKLNKMQKAGFLYYEDLASGVSKEEADAVTLIVKETVRTVSPDALVTIAGGFRRGKPMGHDVDLLITIPGRPTDDELLHKVLDLLKKQGLLLYEDIRESTFVEGQLPNPKPDALDNHQKCFAILKLYRPKVDNSAVGTSKKSDMAEVKDWKAVRVDLVVAPDEQFAYALLGWTGSGQFRRDTRRYAEEERDMLLDNHRLYDLKKGIFLSADSEEEIFGHLDLDYLEPWERNA

SEQ ID NO: 5249 - DNA, 1182 bp, synthetic construct
  misc_feature 1..1182: note = Variant of terminal deoxynucleotidyl transferase
  source 1..1182: mol_type = other DNA
atgcatcaccaccatcatcatgggggttctggtcatccggaaggtaataccccggagaaggaggtgccgagcgttatcgcccgtcatgttagtcagtacgcgtgccagcgcaagaccacgctgaataactacaacaaaaagttcaccgacgcgctggagatcatggccgagaactacaagtttaaagagaacctgcaggcgtgcctggaggcccgtcgcgccgcgagtgtcctgaaaagcctgccgttcgaggttaccagcatgaaagacatccaaggtctgccgtgcattaccgacgacgtacgtcctgtgatcgaagagatcatcgaagtaggcgagagcagccgtgttaaagaaatcctcaatgacgagcgctacaaggcctttaagcagttcaccagcgtgttcggtgtgggcgttaaaacctcggaaaagtggtaccgtatgggcctccgtacgcgcgaagaagcaaaggccagtaagagtctgaagctgaacaagatgcagaaggcgggcttcctgtattacgaggatctgcgcagcggtgttagtaaagaagaagccgatgccgttacgctcatcgtgaaggaaacggtgcgcactgttagtccggatgcgctggtgaccatcgccggcggtttccgccgtggcaaacctatgggccacgacgttgacctgctgatcacgattccgggccgtcctacggatgacgagctgctccacaaagtgctggatctgctcaagaagcaaggtctgctgctgtacgaagacatccgtgagagcacgttcgtggaggggcaactgccaaatcctaaacctgacgccctggacaaccatcagaagtgcttcgccattctcaagctgtaccgtccgaaggtggataacagtgcggttgggacgagtaagaaaagtgacatggctgaggttaaggattggaaagcggttcgtgtggatctggtggtcgctccagatgagcagttcgcctatgcgctgctcggttggacgggcagcggcatgtttcgtcgcgatactcgtcgctacgcggaggaagagcgcgacatgctgctcgacaaccatcgtctctacgacctgaaaaagggcatctttctgagtgcggacagcgaagaagagattttcggtcatctggacctggattatctggagccgtgggaacgcaacgcg

SEQ ID NO: 5250 - protein, 394 aa, synthetic construct
  REGION 1..394: note = Variant of terminal deoxynucleotidyl transferase
MHHHHHHGGSGHPEGNTPEKEVPSVIARHVSQYACQRKTTLNNYNKKFTDALEIMAENYKFKENLQACLEARRAASVLKSLPFEVTSMKDIQGLPCITDDVRPVIEEIIEVGESSRVKEILNDERYKAFKQFTSVFGVGVKTSEKWYRMGLRTREEAKASKSLKLNKMQKAGFLYYEDLRSGVSKEEADAVTLIVKETVRTVSPDALVTIAGGFRRGKPMGHDVDLLITIPGRPTDDELLHKVLDLLKKQGLLLYEDIRESTFVEGQLPNPKPDALDNHQKCFAILKLYRPKVDNSAVGTSKKSDMAEVKDWKAVRVDLVVAPDEQFAYALLGWTGSGMFRRDTRRYAEEERDMLLDNHRLYDLKKGIFLSADSEEEIFGHLDLDYLEPWERNA

SEQ ID NO: 5251 - DNA, 1182 bp, synthetic construct
  misc_feature 1..1182: note = Variant of terminal deoxynucleotidyl transferase
  source 1..1182: mol_type = other DNA
atgcatcaccaccatcatcatgggggttctggtcatccggaaggtaataccccggagaaggaggtgccgagcgttatcgcccgtcatgttagtccgtacgcgtgccagcgcaagaccacgctgaataactacaacaaaaagttcaccgacgcgctggagatcatggccgagaactacaagtttaaagagaacctgcaggcgtgcctggaggcccgtcgcgccgcgagtgtcctgaaaagcctgccgttcgaggttaccagcatgaaagacatccaaggtctgccgtgcattaccgacgacgtacgtcctgtgatcgaagagatcatcgaagtaggcgagagcagccgtgttaaagaaatcctcaatgacgagcgctacaaggcctttaagcagttcaccagcgtgttcggtgtgggcgtcaagacctcggaaaagtggtaccgtatgggcctccgtacgcgcgaagaagcaaaggccagtaagagtctgaagctgaacaagatgcagaaggcgggcttcctgtattacgaggatctggcgagcggtgttagtaaagaagaagccgatgccgttctggatatcgtgaaggaaacggtgcgcactgttagtccggatgcgctggtgaccatcgccggcggtttccgccgtggcaaacctatgggccacgacgttgacctgctgatcacgattccgggccgtcctacggatgacgagctgctccacaaagtggttgatctgctcaagaagcaaggtctgctgctgtacgaagacatccgtgagagcacgttcgtggaggggcaactgccaaatcctaaacctgacgccctggacaaccatcagaagtgcttcgccattctcaagctgtaccgtccgaaggtggataacagtgcggttgggacgagtaagaaaagtgacatggctgaggttaaggattggaaagcggttcgtgtggatctggtggtcgctccagatgagcagttcgcctatgcgctgctcggttggacgggcagcggcatgtttcgtcgcgatactcgtcgctacgcggaggaagagcgcgacatgctgctcgacaaccatggtctctacgacctgaaaaagggcatctttctgagtgcggacagcgaagaagagattttcggtcatctggacctggattatctggagccgtgggaacgcaacgcg

SEQ ID NO: 5252 - protein, 394 aa, synthetic construct
  REGION 1..394: note = Variant of terminal deoxynucleotidyl transferase
MHHHHHHGGSGHPEGNTPEKEVPSVIARHVSPYACQRKTTLNNYNKKFTDALEIMAENYKFKENLQACLEARRAASVLKSLPFEVTSMKDIQGLPCITDDVRPVIEEIIEVGESSRVKEILNDERYKAFKQFTSVFGVGVKTSEKWYRMGLRTREEAKASKSLKLNKMQKAGFLYYEDLASGVSKEEADAVLDIVKETVRTVSPDALVTIAGGFRRGKPMGHDVDLLITIPGRPTDDELLHKVVDLLKKQGLLLYEDIRESTFVEGQLPNPKPDALDNHQKCFAILKLYRPKVDNSAVGTSKKSDMAEVKDWKAVRVDLVVAPDEQFAYALLGWTGSGMFRRDTRRYAEEERDMLLDNHGLYDLKKGIFLSADSEEEIFGHLDLDYLEPWERNA

SEQ ID NO: 5253 - DNA, 1182 bp, synthetic construct
  misc_feature 1..1182: note = Variant of terminal deoxynucleotidyl transferase
  source 1..1182: mol_type = other DNA
atgcatcaccaccatcatcatgggggttctggtcatccggaaggtaataccccggagaaggaggtgccgagcgttatcgcccgtcatgttagtccgtacgcgtgccagcgcaagaccacgctgaataactacaacaaaaagttcaccgacgcgctgaccatcatggccgagaactacaagtttaaagagaacctgcaggcgtgcctggaggcccgtcgcgccgcgagtgtcctgaaaagcctgccgttcgaggttaccagcatgaaagacatccaaggtctgccgtgcattaccgacgacgtacgtcctgtgatcgaagagatcatcgaagtaggcgagagcagccgtgttaaagaaatcctcaatgacgagcgctacaaggcctttaagcagttcaccagcgtgttcggtgtgggcgttaaaacctcggaaaagtggtaccgtatgggcctccgtacgcgcgaagaagcaaaggccagtaagagtctgaagctgaacaagatgcagaaggcgggcttcctgtattacgaggatctggcgagcggtgttagtaaagaagaagccgatgccgttacgctcatcgtgaaggaaacggtgcgcactgttagtccggatgcgctggtgaccatcgccggcggtttccgccgtggcaaacctatgggccacgacgttgacctgctgatcacgattccgggccgtcctacggatccggagctgctccacaaagtggtggatctgctcaagaagcaaggtctgctgctgtacgaagacatccgtgagagcacgttcgtggaggggcaactgccaaatcctaaacctgacgccctggacaaccatcagaagtgcttcgccattctcaagctgtaccgtccgaaggtggataacagtgcggttgggacgagtaagaaaagtgacatggctgaggttaaggattggaaagcggttcgtgtggatctggtggtcgctccagatgagcagttcgcctatgcgctgctcggttggacgggcagcggcatgtttcgtcgcgatactcgtcgctacgcggaggaagagcgcgacatgctgctcgacaaccatggtctctacgacctgaaaaagggcatctttctgagtgcggacagcgaagaagagattttcggtcatctggacctggattatctggagccgtgggaacgcaacgcg

SEQ ID NO: 5254 - protein, 394 aa, synthetic construct
  REGION 1..394: note = Variant of terminal deoxynucleotidyl transferase
MHHHHHHGGSGHPEGNTPEKEVPSVIARHVSPYACQRKTTLNNYNKKFTDALTIMAENYKFKENLQACLEARRAASVLKSLPFEVTSMKDIQGLPCITDDVRPVIEEIIEVGESSRVKEILNDERYKAFKQFTSVFGVGVKTSEKWYRMGLRTREEAKASKSLKLNKMQKAGFLYYEDLASGVSKEEADAVTLIVKETVRTVSPDALVTIAGGFRRGKPMGHDVDLLITIPGRPTDPELLHKVVDLLKKQGLLLYEDIRESTFVEGQLPNPKPDALDNHQKCFAILKLYRPKVDNSAVGTSKKSDMAEVKDWKAVRVDLVVAPDEQFAYALLGWTGSGMFRRDTRRYAEEERDMLLDNHGLYDLKKGIFLSADSEEEIFGHLDLDYLEPWERNA

SEQ ID NO: 5255 - DNA, 1182 bp, synthetic construct
  misc_feature 1..1182: note = Variant of terminal deoxynucleotidyl transferase
  source 1..1182: mol_type = other DNA
atgcatcaccaccatcatcatgggggttctggtcatccggaaggtaataccccggagaaggaggtgccgagcgttatcgcccgtcatgttagtccgtacgcgtgccagcgcaagaccacgctgaataactacaacaaaaagttcaccgacgcgctggagatcatggccgagaactacaagtttaaagagaaccgtcaggcgtgcctggaggcccgtcgcgccgcgagtgtcctgaaaagcctgccgttcgaggttaccagcatgaaagacatccaaggtctgccgtgcattaccgacgacgtacgtcctgtgatcgaagagatcatcgaagtaggcgagagcagccgtgttaaagaaatcctcaatgacgagcgctacaaggcctttaagcagttcaccagcgtgttcggtgtgggcatcaagacctcggaaaagtggtaccgtatgggcctccgtacgcgcgaagaagcaaaggccagtaagagtctgaagctgaacaagatgcagaaggcgggcttcctgtattacgaggatctggcgagcggtgttagtaaagaagaagccgatgccgttctggatatcgtgaaggaaacggtgcgcactgttagtccggatgcgctggtgaccatcgccggcggtttccgccgtggcaaacctatgggccacgacgttgacctgctgatcacgattccgggccgtcctacggatgacgagctgctccacaaagtggttgatctgctcaagaagcaaggtctgctgctgtacgaagacatccgtgagagcacgttcgtggaggggcaactgccaaatcctaaacctgacgccctggacaaccatcaaaagtgtttcgccattctcaagctgtaccgtccgaaggtggataacagtgcggttgggacgagtctgaaaagtgacatggctgaggttaaggattggaaagcggttcgtgtggatctggtggtcgctccagatgagcagttcgcctatgcgctgctcggttggacgggcagcggcatgtttcgtcgcgatactcgtcgctacgcggaggaagagcgcgacatgctgctcgacaaccatggtctctacgacctgaaaaagggcatctttctgagtgcggacagcgaagaagagattttcggtcatctggacctggattatctggagccgtgggaacgcaacgcg

SEQ ID NO: 5256 - protein, 394 aa, synthetic construct
  REGION 1..394: note = Variant of terminal deoxynucleotidyl transferase
MHHHHHHGGSGHPEGNTPEKEVPSVIARHVSPYACQRKTTLNNYNKKFTDALEIMAENYKFKENRQACLEARRAASVLKSLPFEVTSMKDIQGLPCITDDVRPVIEEIIEVGESSRVKEILNDERYKAFKQFTSVFGVGIKTSEKWYRMGLRTREEAKASKSLKLNKMQKAGFLYYEDLASGVSKEEADAVLDIVKETVRTVSPDALVTIAGGFRRGKPMGHDVDLLITIPGRPTDDELLHKVVDLLKKQGLLLYEDIRESTFVEGQLPNPKPDALDNHQKCFAILKLYRPKVDNSAVGTSLKSDMAEVKDWKAVRVDLVVAPDEQFAYALLGWTGSGMFRRDTRRYAEEERDMLLDNHGLYDLKKGIFLSADSEEEIFGHLDLDYLEPWERNA

SEQ ID NO: 5257 - DNA, 1182 bp, synthetic construct
  misc_feature 1..1182: note = Variant of terminal deoxynucleotidyl transferase
  source 1..1182: mol_type = other DNA
atgcatcaccaccatcatcatgggggttctggtcatccggaaggtaataccccggagaaggaggtgccgagcgttatcgcccgtcatgttagtccgtacgcgtgccagcgcaagaccacgctgaataactacaacaaaaagttcaccgacgcgctggagatcatggccgagaactacaagtttaaagagaacctgcaggcgtgcctggaggcccgtcgcgccgcgagtgtcctgaaaagcctgccgttcgaggttaccagcatgaaagacatccaaggtctgccgtgcattaccgacgacgtacgtcctgtgatcgaagagatcatcgaagtaggcgagagcagccgtgttaaagaaatcctcaatgacgagcgctacaaggcctttaagcagttcaccagcgtgttcggtgtgggcgttaaaacctcggaaaagtggtaccgtatgggcctccgtacgcgcgaagaagcaaaggccagtaagagtctgaagctgaacaagatgcagaaggcgggcttcctgtattacgaggatctggcgagcggtgttagtaaagaagaagccgatgccgttaccctgatcgtgaaggaaacggtgcgcactgttagtccggatgcgctggtgaccatcgccggcggtttccgccgtggcaaacctatgggccacgacgttgacctgctgatcacgattccgggccgtcctacggatgacgagctgctccacaaagtggttgatctgctcaagaagcaaggtctgctgctgtacgaagacatccgtgagagcacgttcgtggaggggcaactgccaaatcctaaacctgacgccctggacaaccatcaaaagtgtttcgccattctcaagctgtaccgtccgaaggtggataacagtgcggttgggacgagtctgaaaagtgacatggctgaggttaaggattggaaagcggttcgtgtggatctggtggtcgctccagatgagcagttcgcctatgcgctgctcggttggacgggcagcggcatgtttcgtcgcgatactcgtcgctacgcggaggaagagcgcgacatgctgctcgacaaccatggtctctacgacctgaaaaagggcatctttctgagtgcggacagcgaagaagagattttcggtcatctggacctggattatctggagccgtgggaacgcaacgcg

SEQ ID NO: 5258 - protein, 394 aa, synthetic construct
  REGION 1..394: note = Variant of terminal deoxynucleotidyl transferase
MHHHHHHGGSGHPEGNTPEKEVPSVIARHVSPYACQRKTTLNNYNKKFTDALEIMAENYKFKENLQACLEARRAASVLKSLPFEVTSMKDIQGLPCITDDVRPVIEEIIEVGESSRVKEILNDERYKAFKQFTSVFGVGVKTSEKWYRMGLRTREEAKASKSLKLNKMQKAGFLYYEDLASGVSKEEADAVTLIVKETVRTVSPDALVTIAGGFRRGKPMGHDVDLLITIPGRPTDDELLHKVVDLLKKQGLLLYEDIRESTFVEGQLPNPKPDALDNHQKCFAILKLYRPKVDNSAVGTSLKSDMAEVKDWKAVRVDLVVAPDEQFAYALLGWTGSGMFRRDTRRYAEEERDMLLDNHGLYDLKKGIFLSADSEEEIFGHLDLDYLEPWERNA

SEQ ID NO: 5259 - DNA, 1182 bp, synthetic construct
  misc_feature 1..1182: note = Variant of terminal deoxynucleotidyl transferase
  source 1..1182: mol_type = other DNA
atgcatcaccaccatcatcatgggggttctggtcatccggaaggtaataccccggagaaggaggtgccgagcgttatcgcccgtcatgttagtccgtacgcgtgccagcgcaagaccacgctgaataactacaacaaaaagttcaccgacgcgctggagatcatggccgagaactacaagtttaaagagaacctgcaggcgtgcctggaggcccgtcgcgccgcgagtgtcctgaaaagcctgccgttcgaggttaccagcatgaaagacatccaaggtctgccgtgcattaccgacgacgtacgtcctgtgatcgaagagatcatcgaagtaggcgagagcagccgtgttaaagaaatcctcaatgacgagcgctacaaggcctttaagcagttcaccagcgtgttcggtgtgggcgttaaaacctcggaaaagtggtaccgtatgggcctccgtacgcgcgaagaagcaaaggccagtaagagtctgaagctgaacaagatgcagaaggcgggcttcctgtattacgaggatctggttagcggtgttagtaaagaagaagccgatgccgttacgctcatcgtgaaggaaacggtgcgcactgttagtccggatgcgctggtgaccatcgccggcggtttccgccgtggcaaacctatgggccacgacgttgacctgctgatcacgattccgggccgtcctacggatgacgagctgctccacaaagtggttgatctgctcaagaagcaaggtctgctgctgtacgaagacatccgtgagagcacgttcgtggaggggcaactgccaaatcctaaacctgacgccctggacaaccatcagaagtgcttcgccattctcaagctgtaccgtccgaaggtggataacagtgcggttgggacgagtaagaaaagtgacatggctgaggttaaggattggaaagcggttcgtgtggatctggtggtcgctccagatgagcagttcgcctatgcgctgctcggttggacgggcagcggcatgtttcgtcgcgatactcgtcgctacgcggaggaagagcgcgacatgctgctcgacaaccatggtctctacgacctgaaaaagggcatctttctgagtgcggacagcgaagaagagattttcggtcatctggacctggattatctggagccgtgggaacgcaacgcg

SEQ ID NO: 5260 - protein, 394 aa, synthetic construct
  REGION 1..394: note = Variant of terminal deoxynucleotidyl transferase
MHHHHHHGGSGHPEGNTPEKEVPSVIARHVSPYACQRKTTLNNYNKKFTDALEIMAENYKFKENLQACLEARRAASVLKSLPFEVTSMKDIQGLPCITDDVRPVIEEIIEVGESSRVKEILNDERYKAFKQFTSVFGVGVKTSEKWYRMGLRTREEAKASKSLKLNKMQKAGFLYYEDLVSGVSKEEADAVTLIVKETVRTVSPDALVTIAGGFRRGKPMGHDVDLLITIPGRPTDDELLHKVVDLLKKQGLLLYEDIRESTFVEGQLPNPKPDALDNHQKCFAILKLYRPKVDNSAVGTSKKSDMAEVKDWKAVRVDLVVAPDEQFAYALLGWTGSGMFRRDTRRYAEEERDMLLDNHGLYDLKKGIFLSADSEEEIFGHLDLDYLEPWERNA

SEQ ID NO: 5261 - DNA, 1182 bp, synthetic construct
  misc_feature 1..1182: note = Variant of terminal deoxynucleotidyl transferase
  source 1..1182: mol_type = other DNA
atgcatcaccaccatcatcatgggggttctggtcatccggaaggtaataccccggagaaggaggtgccgagcgttatcgcccgtcatgttagtccgtacgcgtgccagcgcaagaccacgctgaataactacaacaaaaagttcaccgacgcgctggagatcatggccgagaactacaagtttaaagagaacctgcaggcgtgcctggaggcccgtcgcgccgcgagtgtcctgaaaagcctgccgttcgaggttaccagcatgaaagacatccaaggtctgccgtgcattaccgacgacgtacgtcctgtgatcgaagagatcatcgaagtaggcgagagcagccgtgttaaagaaatcctcaatgacgagcgctacaaggcctttaagcagttcaccagcgtgttcggtgtgggcgttaaaacctcggaaaagtggtaccgtatgggcctccgtacgcgcgaagaagcaaaggccagtaagagtctgaagctgaacaagatgcagaaggcgggcttcctgtattacgaggatctggctagcggtgttagtaaagaagaagccgatgccgttacgctcatcgtgaaggaaacggtgcgcactgttagtccggatgcgctggtgaccatcgccggcggtttccgccgtggcaaacctatgggccacgacgttgacctgctgatcacgattccgggccgtcctacggatgatgaggtgctccacaaagtggttgatctgctcaagaagcaaggtctgctgctgtacgaagacatccgtgagagcacgttcgtggaggggcaactgccaaatcctaaacctgacgccctggacaaccatcagaagtgcttcgccattctcaagctgtaccgtccgaaggtggataacagtgcggttgggacgagtaagaaaagtgacatggctgaggttaaggattggaaagcggttcgtgtggatctggtggtcgctccagatgagcagttcgcctatgcgctgctcggttggacgggcagcggcatgtttcgtcgcgatactcgtcgctacgcggaggaagagcgcgacatgctgctcgacaaccatggtctctacgacctgaaaaagggcatctttctgagtgcggacagcgaagaagagattttcggtcatctggacctggattatctggagccgtgggaacgcaacgcg

SEQ ID NO: 5262 - protein, 394 aa, synthetic construct
  REGION 1..394: note = Variant of terminal deoxynucleotidyl transferase
MHHHHHHGGSGHPEGNTPEKEVPSVIARHVSPYACQRKTTLNNYNKKFTDALEIMAENYKFKENLQACLEARRAASVLKSLPFEVTSMKDIQGLPCITDDVRPVIEEIIEVGESSRVKEILNDERYKAFKQFTSVFGVGVKTSEKWYRMGLRTREEAKASKSLKLNKMQKAGFLYYEDLASGVSKEEADAVTLIVKETVRTVSPDALVTIAGGFRRGKPMGHDVDLLITIPGRPTDDEVLHKVVDLLKKQGLLLYEDIRESTFVEGQLPNPKPDALDNHQKCFAILKLYRPKVDNSAVGTSKKSDMAEVKDWKAVRVDLVVAPDEQFAYALLGWTGSGMFRRDTRRYAEEERDMLLDNHGLYDLKKGIFLSADSEEEIFGHLDLDYLEPWERNA

SEQ ID NO: 5263 - DNA, 1182 bp, synthetic construct
  misc_feature 1..1182: note = Variant of terminal deoxynucleotidyl transferase
  source 1..1182: mol_type = other DNA
atgcatcaccaccatcatcatgggggttctggtcatccggaaggtaataccccggagaaggaggtgccgagcgttatcgcccgtcatgttagtccgtacgcgtgccagcgcaagaccacgctgaataactacaacaaaaagttcaccgacgcgctggagatcatggccgagaactacaagtttaaagagaacctgcaggcgtgcctggaggcccgtcgcgccgcgagtgtcctgaaaagcctgccgttcgaggttaccagcatgaaagacatccaaggtctgccgtgcattaccgacgacgtacgtcctgtgatcgaagagatcatcgaagtaggcgagagcagccgtgttaaagaaatcctcaatgacgagcgctacaaggcctttaagcagttcaccagcgtgttcggtgtgggcatcaagacctcggaaaagtggtaccgtatgggcctccgtacgcgcgaagaagcaaaggccagtaagagtctgaagctgaacaagatgcagaaggcgggcttcctgtattacgaggatctggcgagcggtgttagtaaagaagaagccgatgccgttctggatatcgtgaaggaaacggtgcgcactgttagtccggatgcgctggtgaccatcgccggcggtttccgccgtggcaaacctatgggccacgacgttgacctgctgatcacgattccgggccgtcctacggatgacgagctgctccacaaagtggttgatctgctcaagaagcaaggtctgctgctgtacgaagacatccgtgagagcacgttcgtggaggggcaactgccaaatcctaaacctgacgccctggacaaccatcagaagtgcttcgccattctcaagctgtaccgtccgaaggtggataacagtgcggttgggacgagtctgaaaagtgacatggctgaggttaaggattggaaagcggttcgtgtggatctggtggtcgctccagatgagcagttcgcctatgcgctgctcggttggacgggcagcggcatgtttcgtcgcgatactcgtcgctacgcggaggaagagcgcgacatgctgctcgacaaccatggtctctacgacctgaaaaagggcatctttctgagtgcggacagcgaagaagagattttcggtcatctggacctggattatctggagccgtgggaacgcaacgcg

SEQ ID NO: 5264 - protein, 394 aa, synthetic construct
  REGION 1..394: note = Variant of terminal deoxynucleotidyl transferase
MHHHHHHGGSGHPEGNTPEKEVPSVIARHVSPYACQRKTTLNNYNKKFTDALEIMAENYKFKENLQACLEARRAASVLKSLPFEVTSMKDIQGLPCITDDVRPVIEEIIEVGESSRVKEILNDERYKAFKQFTSVFGVGIKTSEKWYRMGLRTREEAKASKSLKLNKMQKAGFLYYEDLASGVSKEEADAVLDIVKETVRTVSPDALVTIAGGFRRGKPMGHDVDLLITIPGRPTDDELLHKVVDLLKKQGLLLYEDIRESTFVEGQLPNPKPDALDNHQKCFAILKLYRPKVDNSAVGTSLKSDMAEVKDWKAVRVDLVVAPDEQFAYALLGWTGSGMFRRDTRRYAEEERDMLLDNHGLYDLKKGIFLSADSEEEIFGHLDLDYLEPWERNA

SEQ ID NO: 5265 - DNA, 1182 bp, synthetic construct
  misc_feature 1..1182: note = Variant of terminal deoxynucleotidyl transferase
  source 1..1182: mol_type = other DNA
atgcatcaccaccatcatcatgggggttctggtcatccggaaggtaataccccggagaaggaggtgccgagcgttatcgcccgtcatgttagtccgtacgcgtgccagcgcaagaccacgctgaataactacaacaaaaagttcaccgacgcgctggagatcatggccgagaactacaagtttaaagagaacctgcaggcgtgcctggaggcccgtcgcgccgcgagtgtcctgaaaagcctgccgttcgaggttaccagcatgaaagacatccaaggtctgccgtgcattaccgacgacgtacgtcctgtgatcgaagagatcatcgaagtaggcgagagcagccgtgttaaagaaatcctcaatgacgagcgctacaaggcctttaagcagttcaccagcgtgttcggtgtgggcatcaagacctcggaaaagtggtaccgtatgggcctccgtacgcgcgaagaagcaaaggccagtaagagtctgaagctgaacaagatgcagaaggcgggcttcctgtattacgaggatctggcgagcggtgttagtaaagaagaagccgatgccgttaccgatatcgtgaaggaaacggtgcgcactgttagtccggatgcgctggtgaccatcgccggcggtttccgccgtggcaaacctatgggccacgacgttgacctgctgatcacgattccgggccgtcctacggatgacgagctgctccacaaagtggttgatctgctcaagaagcaaggtctgctgctgtacgaagacatccgtgagagcacgttcgtggaggggcaactgccaaatcctaaacctgacgccctggacaaccatcagaagtgcttcgccattctcaagctgtaccgtccgaaggtggataacagtgcggttgggacgagtctgaaaagtgacatggctgaggttaaggattggaaagcggttcgtgtggatctggtggtcgctccagatgagcagttcgcctatgcgctgctcggttggacgggcagcggcatgtttcgtcgcgatactcgtcgctacgcggaggaagagcgcgacatgctgctcgacaaccatggtctctacgacctgaaaaagggcatctttctgagtgcggacagcgaagaagagattttcggtcatctggacctggattatctggagccgtgggaacgcaacgcg

SEQ ID NO: 5266 - protein, 394 aa, synthetic construct
  REGION 1..394: note = Variant of terminal deoxynucleotidyl transferase
MHHHHHHGGSGHPEGNTPEKEVPSVIARHVSPYACQRKTTLNNYNKKFTDALEIMAENYKFKENLQACLEARRAASVLKSLPFEVTSMKDIQGLPCITDDVRPVIEEIIEVGESSRVKEILNDERYKAFKQFTSVFGVGIKTSEKWYRMGLRTREEAKASKSLKLNKMQKAGFLYYEDLASGVSKEEADAVTDIVKETVRTVSPDALVTIAGGFRRGKPMGHDVDLLITIPGRPTDDELLHKVVDLLKKQGLLLYEDIRESTFVEGQLPNPKPDALDNHQKCFAILKLYRPKVDNSAVGTSLKSDMAEVKDWKAVRVDLVVAPDEQFAYALLGWTGSGMFRRDTRRYAEEERDMLLDNHGLYDLKKGIFLSADSEEEIFGHLDLDYLEPWERNA

SEQ ID NO: 5267 - DNA, 1182 bp, synthetic construct
  misc_feature 1..1182: note = Variant of terminal deoxynucleotidyl transferase
  source 1..1182: mol_type = other DNA
atgcatcaccaccatcatcatgggggttctggtcatccggaaggtaataccccggagaaggaggtgccgagcgttatcgcccgtcatgttagtccgtacgcgtgccagcgcaagaccacgctgaataactacaacaaaaagttcaccgacgcgctgaccatcatggccgagaactacaagtttaaagagaacctgcaggcgtgcctggaggcccgtcgcgccgcgagtgtcctgaaaagcctgccgttcgaggttaccagcatgaaagacatccaaggtctgccgtgcattaccgacgacgtacgtcctgtgatcgaagagatcatcgaagtaggcgagagcagccgtgttaaagaaatcctcaatgacgagcgctacaaggcctttaagcagttcaccagcgtgttcggtgtgggcgttaaaacctcggaaaagtggtaccgtatgggcctccgtacgcgcgaagaagcaaaggccagtaagagtctgaagctgaacaagatgcagaaggcgggcttcctgtattacgaggatctggcgagcggtgttagtaaagaagaagccgatgccgttacgctcatcgtgaaggaaacggtgcgcactgttagtccggatgcgctggtgaccatcgccggcggtttccgccgtggcaaacctatgggccacgacgttgacctgctgatcacgattccgggccgtcctacggatgacgagctgctccacaaagtggtggatctgctcaagaagcaaggtctgctgctgtacgaagacatccgtgagagcacgttcgtggaggggcaactgccaaatcctaaacctgacgccctggacaaccatcagaagtgcttcgccattctcaagctgtaccgtccgaaggtggataacagtgcggttgggacgagtaagaaaagtgacatggctgaggttaaggattggaaagcggttcgtgtggatctggtggtcgctccagatgagcagttcgcctatgcgctgctcggttggacgggcagcggcatgtttcgtcgcgatactcgtcgctacgcggaggaagagcgcgacatgctgctcgacaaccatggtctctacgacctgaaaaagggcatctttctgagtgcggacagcgaagaagagattttcggtcatctggacctggattatctggagccgtgggaacgcaacgcg

SEQ ID NO: 5268 - protein, 394 aa, synthetic construct
  REGION 1..394: note = Variant of terminal deoxynucleotidyl transferase
MHHHHHHGGSGHPEGNTPEKEVPSVIARHVSPYACQRKTTLNNYNKKFTDALTIMAENYKFKENLQACLEARRAASVLKSLPFEVTSMKDIQGLPCITDDVRPVIEEIIEVGESSRVKEILNDERYKAFKQFTSVFGVGVKTSEKWYRMGLRTREEAKASKSLKLNKMQKAGFLYYEDLASGVSKEEADAVTLIVKETVRTVSPDALVTIAGGFRRGKPMGHDVDLLITIPGRPTDDELLHKVVDLLKKQGLLLYEDIRESTFVEGQLPNPKPDALDNHQKCFAILKLYRPKVDNSAVGTSKKSDMAEVKDWKAVRVDLVVAPDEQFAYALLGWTGSGMFRRDTRRYAEEERDMLLDNHGLYDLKKGIFLSADSEEEIFGHLDLDYLEPWERNA

SEQ ID NO: 5269 - DNA, 1182 bp, synthetic construct
  misc_feature 1..1182: note = Variant of terminal deoxynucleotidyl transferase
  source 1..1182: mol_type = other DNA
atgcatcaccaccatcatcatgggggttctggtcatccggaaggtaataccccggagaaggaggtgccgagcgttatcgcccgtcatgttagtccgtacgcgtgccagcgcaagaccacgctgaataactacaacaaaaagttcaccgacgcgctggagatcatggccgagaactacaagtttaaagagaaccgtcaggcgtgcctggaggcccgtcgcgccgcgagtgtcctgaaaagcctgccgttcgaggttaccagcatgaaagacatccaaggtctgccgtgcattaccgacgacgtacgtcctgtgatcgaagagatcatcgaagtaggcgagagcagccgtgttaaagaaatcctcaatgacgagcgctacaaggcctttaagcagttcaccagcgtgttcggtgtgggcatcaagacctcggaaaagtggtaccgtatgggcctccgtacgcgcgaagaagcaaaggccagtaagagtctgaagctgaacaagatgcagaaggcgggcttcctgtattacgaggatctggcgagcggtgttagtaaagaagaagccgatgccgttctggatatcgtgaaggaaacggtgcgcactgttagtccggatgcgctggtgaccatcgccggcggtttccgccgtggcaaacctatgggccacgacgttgacctgctgatcacgattccgggccgtcctacggatgacgagctgctccacaaagtggttgatctgctcaagaagcaaggtctgctgctgtacgaagacatccgtgagagcacgttcgtggaggggcaactgccaaatcctaaacctgacgccctggacaaccatcaaaagtgtttcgccattctcaagctgtaccgtccgaaggtggataacagtgcggttgggacgagtaagaaaagtgacatggctgaggttaaggattggaaagcggttcgtgtggatctggtggtcgctccagatgagcagttcgcctatgcgctgctcggttggacgggcagcggcatgtttcgtcgcgatactcgtcgctacgcggaggaagagcgcgacatgctgctcgacaaccatggtctctacgacctgaaaaagggcatctttctgagtgcggacagcgaagaagagattttcggtcatctggacctggattatctggagccgtgggaacgcaacgcg

SEQ ID NO: 5270 - protein, 394 aa, synthetic construct
  REGION 1..394: note = Variant of terminal deoxynucleotidyl transferase
MHHHHHHGGSGHPEGNTPEKEVPSVIARHVSPYACQRKTTLNNYNKKFTDALEIMAENYKFKENRQACLEARRAASVLKSLPFEVTSMKDIQGLPCITDDVRPVIEEIIEVGESSRVKEILNDERYKAFKQFTSVFGVGIKTSEKWYRMGLRTREEAKASKSLKLNKMQKAGFLYYEDLASGVSKEEADAVLDIVKETVRTVSPDALVTIAGGFRRGKPMGHDVDLLITIPGRPTDDELLHKVVDLLKKQGLLLYEDIRESTFVEGQLPNPKPDALDNHQKCFAILKLYRPKVDNSAVGTSKKSDMAEVKDWKAVRVDLVVAPDEQFAYALLGWTGSGMFRRDTRRYAEEERDMLLDNHGLYDLKKGIFLSADSEEEIFGHLDLDYLEPWERNA

SEQ ID NO: 5271 - DNA, 1182 bp, synthetic construct
  misc_feature 1..1182: note = Variant of terminal deoxynucleotidyl transferase
  source 1..1182: mol_type = other DNA
atgcatcaccaccatcatcatgggggttctggtcatccggaaggtaataccccggagaaggaggtgccgagcgttatcgcccgtcatgttagtccgtacgcgtgccagcgcaagaccacgctgaataactacaacaaaaagttcaccgacgcgctggagatcatggccgagaactacaagtttaaagagaaccgtcaggcgtgcctggaggcccgtcgcgccgcgagtgtcctgaaaagcctgccgttcgaggttaccagcatgaaagacatccaaggtctgccgtgcattaccgacgacgtacgtcctgtgatcgaagagatcatcgaagtaggcgagagcagccgtgttaaagaaatcctcaatgacgagcgctacaaggcctttaagcagttcaccagcgtgttcggtgtgggcatcaagacctcggaaaagtggtaccgtatgggcctccgtacgcgcgaagaagcaaaggccagtaagagtctgaagctgaacaagatgcagaaggcgggcttcctgtattacgaggatctggcgagcggtgttagtaaagaagaagccgatgccgttacgctcatcgtgaaggaaacggtgcgcactgttagtccggatgcgctggtgaccatcgccggcggtttccgccgtggcaaacctatgggccacgacgttgacctgctgatcacgattccgggccgtcctacggatgacgagctgctccacaaagtggttgatctgctcaagaagcaaggtctgctgctgtacgaagacatccgtgagagcacgttcgtggaggggcaactgccaaatcctaaacctgacgccctggacaaccatcaaaagtgtttcgccattctcaagctgtaccgtccgaaggtggataacagtgcggttgggacgagtaagaaaagtgacatggctgaggttaaggattggaaagcggttcgtgtggatctggtggtcgctccagatgagcagttcgcctatgcgctgctcggttggacgggcagcggcatgtttcgtcgcgatactcgtcgctacgcggaggaagagcgcgacatgctgctcgacaaccatggtctctacgacctgaaaaagggcatctttctgagtgcggacagcgaagaagagattttcggtcatctggacctggattatctggagccgtgggaacgcaacgcg

SEQ ID NO: 5272 - protein, 394 aa, synthetic construct
  REGION 1..394: note = Variant of terminal deoxynucleotidyl transferase
MHHHHHHGGSGHPEGNTPEKEVPSVIARHVSPYACQRKTTLNNYNKKFTDALEIMAENYKFKENRQACLEARRAASVLKSLPFEVTSMKDIQGLPCITDDVRPVIEEIIEVGESSRVKEILNDERYKAFKQFTSVFGVGIKTSEKWYRMGLRTREEAKASKSLKLNKMQKAGFLYYEDLASGVSKEEADAVTLIVKETVRTVSPDALVTIAGGFRRGKPMGHDVDLLITIPGRPTDDELLHKVVDLLKKQGLLLYEDIRESTFVEGQLPNPKPDALDNHQKCFAILKLYRPKVDNSAVGTSKKSDMAEVKDWKAVRVDLVVAPDEQFAYALLGWTGSGMFRRDTRRYAEEERDMLLDNHGLYDLKKGIFLSADSEEEIFGHLDLDYLEPWERNA

SEQ ID NO: 5273 - DNA, 1182 bp, synthetic construct
  misc_feature 1..1182: note = Variant of terminal deoxynucleotidyl transferase
  source 1..1182: mol_type = other DNA
atgcatcaccaccatcatcatgggggttctggtcatccggaaggtaataccccggagaaggaggtgccgagcgttatcgcccgtcatgttagtccgtacgcgtgccagcgcaagaccacgctgaataactacaacaaaaagttcaccgacgcgctggagatcatggccgagaactacaagtttaaagagaaccgtcaggcgtgcctggaggcccgtcgcgccgcgagtgtcctgaaaagcctgccgttcgaggttaccagcatgaaagacatccaaggtctgccgtgcattaccgacgacgtacgtcctgtgatcgaagagatcatcgaagtaggcgagagcagccgtgttaaagaaatcctcaatgacgagcgctacaaggcctttaagcagttcaccagcgtgttcggtgtgggcgtcaagacctcggaaaagtggtaccgtatgggcctccgtacgcgcgaagaagcaaaggccagtaagagtctgaagctgaacaagatgcagaaggcgggcttcctgtattacgaggatctggcgagcggtgttagtaaagaagaagccgatgccgttaccgatatcgtgaaggaaacggtgcgcactgttagtccggatgcgctggtgaccatcgccggcggtttccgccgtggcaaacctatgggccacgacgttgacctgctgatcacgattccgggccgtcctacggatgacgagctgctccacaaagtggttgatctgctcaagaagcaaggtctgctgctgtacgaagacatccgtgagagcacgttcgtggaggggcaactgccaaatcctaaacctgacgccctggacaaccatcaaaagtgtttcgccattctcaagctgtaccgtccgaaggtggataacagtgcggttgggacgagtaagaaaagtgacatggctgaggttaaggattggaaagcggttcgtgtggatctggtggtcgctccagatgagcagttcgcctatgcgctgctcggttggacgggcagcggcatgtttcgtcgcgatactcgtcgctacgcggaggaagagcgcgacatgctgctcgacaaccatggtctctacgacctgaaaaagggcatctttctgagtgcggacagcgaagaagagattttcggtcatctggacctggattatctggagccgtgggaacgcaacgcg

SEQ ID NO: 5274 - protein, 394 aa, synthetic construct
  REGION 1..394: note = Variant of terminal deoxynucleotidyl transferase
MHHHHHHGGSGHPEGNTPEKEVPSVIARHVSPYACQRKTTLNNYNKKFTDALEIMAENYKFKENRQACLEARRAASVLKSLPFEVTSMKDIQGLPCITDDVRPVIEEIIEVGESSRVKEILNDERYKAFKQFTSVFGVGVKTSEKWYRMGLRTREEAKASKSLKLNKMQKAGFLYYEDLASGVSKEEADAVTDIVKETVRTVSPDALVTIAGGFRRGKPMGHDVDLLITIPGRPTDDELLHKVVDLLKKQGLLLYEDIRESTFVEGQLPNPKPDALDNHQKCFAILKLYRPKVDNSAVGTSKKSDMAEVKDWKAVRVDLVVAPDEQFAYALLGWTGSGMFRRDTRRYAEEERDMLLDNHGLYDLKKGIFLSADSEEEIFGHLDLDYLEPWERNA

SEQ ID NO: 5275 - DNA, 1182 bp, synthetic construct
  misc_feature 1..1182: note = Variant of terminal deoxynucleotidyl transferase
  source 1..1182: mol_type = other DNA
atgcatcaccaccatcatcatgggggttctggtcatccggaaggtaataccccggagaaggaggtgccgagcgttatcgcccgtcatgttagtccgtacgcgtgccagcgcaagaccacgctgaataactacaacaaaaagttcaccgacgcgctggagatcatggccgagaactacaagtttaaagagaacctgcaggcgtgcctggaggcccgtcgcgccgcgagtgtcctgaaaagcctgccgttcgaggttaccagcatgaaagacatccaaggtctgccgtgcattaccgacgacgtacgtcctgtgatcgaagagatcatcgaagtaggcgagagcagccgtgttaaagaaatcctcaatgacgagcgctacaaggcctttaagcagttcaccagcgtgttcggtgtgggcgtcaagacctcggaaaagtggtaccgtatgggcctccgtacgcgcgaagaagcaaaggccagtaagagtctgaagctgaacaagatgcagaaggcgggcttcctgtattacgaggatctggcgagcggtgttagtaaagaagaagccgatgccgttctggatatcgtgaaggaaacggtgcgcactgttagtccggatgcgctggtgaccatcgccggcggtttccgccgtggcaaacctatgggccacgacgttgacctgctgatcacgattccgggccgtcctacggatgacgagctgctccacaaagtggtggatctgctcaagaagcaaggtctgctgctgtacgaggacatccgtgagcgtacgttcgtggaggggcaactgccaaatcctaaacctgacgccctggacaaccatcagaagtgcttcgccattctcaagctgtaccgtccgaaggtggataacagtgcggttgggacgagtaagaaaagtgacatggctgaggttaaggattggaaagcggttcgtgtggatctggtggtcgctccagatgagcagttcgcctatgcgctgctcggttggacgggcagcggcatgtttcgtcgcgatactcgtcgctacgcggaggaagagcgcgacatgctgctcgacaaccatggtctctacgacctgaaaaagggcatctttctgagtgcggacagcgaagaagagattttcggtcatctggacctggattatctggagccgtgggaacgcaacgcg

SEQ ID NO: 5276 - protein, 394 aa, synthetic construct
  REGION 1..394: note = Variant of terminal deoxynucleotidyl transferase
MHHHHHHGGSGHPEGNTPEKEVPSVIARHVSPYACQRKTTLNNYNKKFTDALEIMAENYKFKENLQACLEARRAASVLKSLPFEVTSMKDIQGLPCITDDVRPVIEEIIEVGESSRVKEILNDERYKAFKQFTSVFGVGVKTSEKWYRMGLRTREEAKASKSLKLNKMQKAGFLYYEDLASGVSKEEADAVLDIVKETVRTVSPDALVTIAGGFRRGKPMGHDVDLLITIPGRPTDDELLHKVVDLLKKQGLLLYEDIRERTFVEGQLPNPKPDALDNHQKCFAILKLYRPKVDNSAVGTSKKSDMAEVKDWKAVRVDLVVAPDEQFAYALLGWTGSGMFRRDTRRYAEEERDMLLDNHGLYDLKKGIFLSADSEEEIFGHLDLDYLEPWERNA

SEQ ID NO: 5277 - DNA, 1182 bp, synthetic construct
  misc_feature 1..1182: note = Variant of terminal deoxynucleotidyl transferase
  source 1..1182: mol_type = other DNA
atgcatcaccaccatcatcatgggggttctggtcatccggaaggtaataccccggagaaggaggtgccgagcgttatcgcccgtcatgttagtccgtacgcgtgccagcgcaagaccacgctgaataactacaacaaaaagttcaccgacgcgctggagatcatggccgagaactacaagtttaaagagaacctgcaggcgtgcctggaggcccgtcgcgccgcgagtgtcctgaaaagcctgccgttcgaggttaccagcatgaaagacatccaaggtctgccgtgcattaccgacgacgtacgtcctgtgatcgaagagatcatcgaagtaggcgagagcagccgtgttaaagaaatcctcaatgacgagcgctacaaggcctttaagcagttcaccagcgtgttcggtgtgggcgtcaagacctcggaaaagtggtaccgtatgggcctccgtacgcgcgaagaagcaaaggccagtaagtttctgaagctgaacaagatgcagaaggcgggcttcctgtattacgaggatctggcgagcggtgttagtaaagaagaagccgatgccgttctggatatcgtgaaggaaacggtgcgcactgttagtccggatgcgctggtgaccatcgccggcggtttccgccgtggcaaacctatgggccacgacgttgacctgctgatcacgattccgggccgtcctacggatgacgagctgctccacaaagtggttgatctgctcaagaagcaaggtctgctgctgtacgaagacatccgtgagagcacgttcgtggaggggcaactgccaaatcctaaacctgacgccctggacaaccatcagaagtgcttcgccattctcaagctgtaccgtccgaaggtggataacagtgcggttgggacgagtaagaaaagtgacatggctgaggttaaggattggaaagcggttcgtgtggatctggtggtcgctccagatgagcagttcgcctatgcgctgctcggttggacgggcagcggcatgtttcgtcgcgatactcgtcgctacgcggaggaagagcgcgacatgctgctcgacaaccatggtctctacgacctgaaaaagggcatctttctgagtgcggacagcgaagaagagattttcggtcatctggacctggattatctggagccgtgggaacgcaacgcg

SEQ ID NO: 5278 - protein, 394 aa, synthetic construct
  REGION 1..394: note = Variant of terminal deoxynucleotidyl transferase
MHHHHHHGGSGHPEGNTPEKEVPSVIARHVSPYACQRKTTLNNYNKKFTDALEIMAENYKFKENLQACLEARRAASVLKSLPFEVTSMKDIQGLPCITDDVRPVIEEIIEVGESSRVKEILNDERYKAFKQFTSVFGVGVKTSEKWYRMGLRTREEAKASKFLKLNKMQKAGFLYYEDLASGVSKEEADAVLDIVKETVRTVSPDALVTIAGGFRRGKPMGHDVDLLITIPGRPTDDELLHKVVDLLKKQGLLLYEDIRESTFVEGQLPNPKPDALDNHQKCFAILKLYRPKVDNSAVGTSKKSDMAEVKDWKAVRVDLVVAPDEQFAYALLGWTGSGMFRRDTRRYAEEERDMLLDNHGLYDLKKGIFLSADSEEEIFGHLDLDYLEPWERNA

SEQ ID NO: 5279 - DNA, 1182 bp, synthetic construct
  misc_feature 1..1182: note = Variant of terminal deoxynucleotidyl transferase
  source 1..1182: mol_type = other DNA
atgcatcaccaccatcatcatgggggttctggtcatccggaaggtaataccccggagaaggaggtgccgagcgttatcgcccgtcatgttagtccgtacgcgtgccagcgcaagaccacgctgaataactacaacaaaaagatcaccgacgcgctggagatcatggccgagaactacaagtttaaagagaacctgcaggcgtgcctggaggcccgtcgcgccgcgagtgtcctgaaaagcctgccgttcgaggttaccagcatgaaagacatccaaggtctgccgtgcattaccgacgacgtacgtcctgtgatcgaagagatcatcgaagtaggcgagagcagccgtgttaaagaaatcctcaatgacgagcgctacaaggcctttaagcagttcaccagcgtgttcggtgtgggcgtcaagacctcggaaaagtggtaccgtatgggcctccgtacgcgcgaagaagcaaaggccagtaagagtctgaagctgaacaagatgcagaaggcgggcttcctgtattacgaggatctggcgagcggtgttagtaaagaagaagccgatgccgttctggatatcgtgaaggaaacggtgcgcactgttagtccggatgcgctggtgaccatcgccggcggtttccgccgtggcaaacctatgggccacgacgttgacctgctgatcacgattccgggccgtcctacggatgacgagctgctccacaaagtggttgatctgctcaagaagcaaggtctgctgctgtacggggacatccgtgagcgtacgttcgtggaggggcaactgccaaatcctaaacctgacgccctggacaaccatcagaagtgcttcgccattctcaagctgtaccgtccgaaggtggataacagtgcggttgggacgagtaagaaaagtgacatggctgaggttaaggattggaaagcggttcgtgtggatctggtggtcgctccagatgagcagttcgcctatgcgctgctcggttggacgggcagcggcatgtttcgtcgcgatactcgtcgctacgcggaggaagagcgcgacatgctgctcgacaaccatggtctctacgacctgaaaaagggcatctttctgagtgcggacagcgaagaagagattttcggtcatctggacctggattatctggagccgtgggaacgcaacgcg

SEQ ID NO: 5280 - protein, 394 aa, synthetic construct
  REGION 1..394: note = Variant of terminal deoxynucleotidyl transferase
MHHHHHHGGSGHPEGNTPEKEVPSVIARHVSPYACQRKTTLNNYNKKITDALEIMAENYKFKENLQACLEARRAASVLKSLPFEVTSMKDIQGLPCITDDVRPVIEEIIEVGESSRVKEILNDERYKAFKQFTSVFGVGVKTSEKWYRMGLRTREEAKASKSLKLNKMQKAGFLYYEDLASGVSKEEADAVLDIVKETVRTVSPDALVTIAGGFRRGKPMGHDVDLLITIPGRPTDDELLHKVVDLLKKQGLLLYGDIRERTFVEGQLPNPKPDALDNHQKCFAILKLYRPKVDNSAVGTSKKSDMAEVKDWKAVRVDLVVAPDEQFAYALLGWTGSGMFRRDTRRYAEEERDMLLDNHGLYDLKKGIFLSADSEEEIFGHLDLDYLEPWERNA

SEQ ID NO: 5281 - DNA, 1182 bp, synthetic construct
  misc_feature 1..1182: note = Variant of terminal deoxynucleotidyl transferase
  source 1..1182: mol_type = other DNA
atgcatcaccaccatcatcatgggggttctggtcatccggaaggtaataccccggagaaggaggtgccgagcgttatcgcccgtcatgttagtccgtacgcgtgccagcgcaagaccacgctgaataactacaacaaaaagttcaccgacgcgctggagatcatggccgagaactacaagtttaaagagaacctgcaggcgtgcctggaggcccgtcgcgccgcgagtgtcctgaaaagcctgccgttcgaggttaccagcatgaaagacatccaaggtctgccgtgcattaccgacgacgtacgtcctgtgatcgaagagatcatcgaagtaggcgagagcagccgtgttaaagaaatcctcaatgacgagcgctacaaggcctttaagcagttcaccagcgtgttcggtgtgggcgtccgtacctcggaaaagtggtaccgtatgggcctccgtacgcgcgaagaagcaaaggccagtaagagtctgaagctgaacaagatgcagaaggcgggcttcctgtattacgaggatctggcgagcggtgttagtaaagaagaagccgatgccgttctggatatcgtgaaggaaacggtgcgcactgttagtccggatgcgctggtgaccatcgccggcggtttccgccgtggcaaacctatgggccacgacgttgacctgctgatcacgattccgggccgtcctacggatgacgagctgctccacaaagtggttgatctgctcaagaagcaaggtctgctgctgtacgaggacatccgtgagcgtacgttcgtggaggggcaactgccaaatcctaaacctgacgccctggacaaccatcaaaagtgtttcgccattctcaagctgtaccgtccgaaggtggataacagtgcggttgggacgagtaagaaaagtgacatggctgaggttaaggattggaaagcggttcgtgtggatctggtggtcgctccagatgagcagttcgcctatgcgctgctcggttggacgggcagcggcatgtttcgtcgcgatactcgtcgctacgcggaggaagagcgcgacatgctgctcgacaaccatggtctctacgacctgaaaaagggcatctttctgagtgcggacagcgaagaagagattttcggtcatctggacctggattatctggagccgtgggaacgcaacgcg

SEQ ID NO: 5282 - protein, 394 aa, synthetic construct
  REGION 1..394: note = Variant of terminal deoxynucleotidyl transferase
MHHHHHHGGSGHPEGNTPEKEVPSVIARHVSPYACQRKTTLNNYNKKFTDALEIMAENYKFKENLQACLEARRAASVLKSLPFEVTSMKDIQGLPCITDDVRPVIEEIIEVGESSRVKEILNDERYKAFKQFTSVFGVGVRTSEKWYRMGLRTREEAKASKSLKLNKMQKAGFLYYEDLASGVSKEEADAVLDIVKETVRTVSPDALVTIAGGFRRGKPMGHDVDLLITIPGRPTDDELLHKVVDLLKKQGLLLYEDIRERTFVEGQLPNPKPDALDNHQKCFAILKLYRPKVDNSAVGTSKKSDMAEVKDWKAVRVDLVVAPDEQFAYALLGWTGSGMFRRDTRRYAEEERDMLLDNHGLYDLKKGIFLSADSEEEIFGHLDLDYLEPWERNA

SEQ ID NO: 5283 - DNA, 1182 bp, synthetic construct
  misc_feature 1..1182: note = Variant of terminal deoxynucleotidyl transferase
  source 1..1182: mol_type = other DNA
atgcatcaccaccatcatcatgggggttctggtcatccggaaggtaataccccggagaaggaggtgccgagcgttatcgcccgtcatgttagtccgtacgcgtgccagcgcaagaccacgctgaataactacaacaaaaagttcaccgacgcgctggagatcatggccgagaactacaagtttaaagagaacctgcaggcgtgcctggaggcccgtcgcgccgcgagtgtcctgaaaagcctgccgttcgaggttaccagcatgaaagacatccaaggtctgccgtgcattaccgacgacgtacgtcctgtgatcgaagagatcatcgaagtaggcgagagcagccgtgttaaagaaatcctcaatgacgagcgctacaaggcctttaagcagttcaccagcgtgttcggtgtgggcgtcaagacctcggaaaagtggtaccgtatgggcctccgtacgcgcgaagaagcaaaggccagtaagagtctgaagctgaacaagatgcagaaggcgggcttcctgtattacgaggatctggcgagcggtgttagtaaagaagaagccgatgccgttctggatatcgtgaaggaaacggtgcgcactgttagtccggatgcgctggtgaccatcgccggcggtttccgccgtggcaaacctatgggccacgacgttgacctgctgatcacgattccgggccgtcctacggatgacgagctgctccacaaagtggttgatctgctcaagaagcaaggtctgctgctgtacgaagacatccgtgagagcacgttcgtggaggggcaactgccaaatcctaaacctgacgccctggacaaccatcagaagtgcttcgccattctcaagctgtaccgtccgaaggtggataacagtgcggttgggacgagtctgaaaagtgacatggctgaggttaaggattggaaagcggttcgtgtggatctggtggtcgctccagatgagcagttcgcctatgcgctgctcggttggacgggcagcggcatgtttcgtcgcgatactcgtcgctacgcggaggaagagcgcgacatgctgctcgacaaccatggtctctacgacctgaaaaagggcatctttctgagtgcggacagcgaagaagagattttcggtcatctggacctggattatctggagccgtgggaacgcaacgcg

SEQ ID NO: 5284 - protein, 394 aa, synthetic construct
  REGION 1..394: note = Variant of terminal deoxynucleotidyl transferase
MHHHHHHGGSGHPEGNTPEKEVPSVIARHVSPYACQRKTTLNNYNKKFTDALEIMAENYKFKENLQACLEARRAASVLKSLPFEVTSMKDIQGLPCITDDVRPVIEEIIEVGESSRVKEILNDERYKAFKQFTSVFGVGVKTSEKWYRMGLRTREEAKASKSLKLNKMQKAGFLYYEDLASGVSKEEADAVLDIVKETVRTVSPDALVTIAGGFRRGKPMGHDVDLLITIPGRPTDDELLHKVVDLLKKQGLLLYEDIRESTFVEGQLPNPKPDALDNHQKCFAILKLYRPKVDNSAVGTSLKSDMAEVKDWKAVRVDLVVAPDEQFAYALLGWTGSGMFRRDTRRYAEEERDMLLDNHGLYDLKKGIFLSADSEEEIFGHLDLDYLEPWERNA

SEQ ID NO: 5285 - DNA, 1182 bp, synthetic construct
  misc_feature 1..1182: note = Variant of terminal deoxynucleotidyl transferase
  source 1..1182: mol_type = other DNA
atgcatcaccaccatcatcatgggggttctggtcatccggaaggtaataccccggagaaggaggtgccgagcgttatcgcccgtcatgttagtccgtacgcgtgccagcgcaagaccacgctgaataactacaacaaaaagttcaccgacgcgctggagatcatggccgagaactacaagtttaaagagaacctgcaggcgtgcctggaggcccgtcgcgccgcgagtgtcctgaaaagcctgccgttcgaggttaccagcatgaaagacatccaaggtctgccgtgcattaccgacgacgtacgtcctgtgatcgaagagatcatcgaagtaggcgagagcagccgtgttaaagaaatcctcaatgacgagcgctacaaggcctttaagcagttcaccagcgtgttcggtgtgggcgtcaagacctcggaaaagtggtaccgtatgggcctccgtacgcgcgaagaagcaaaggccagtaagagtctgaagctgaacaagatgcagaaggcgggcttcctgtattacgaggatctggcgagcggtgttagtaaagaagaagccgatgccgttctggatatcgtgaaggaaacggtgcgcactgttagtccggatgcgctggtgaccatcgccggcggtttccgccgtggcaaacctcaaggccacgacgttgacctgctgatcacgattccgggccgtcctacggatgacgagctgctccacaaagtggttgatctgctcaagaagcaaggtctgctgctgtacgaagacatccgtgagagcacgttcgtggaggggcaactgccaaatcctaaacctgacgccctggacaaccatcagaagtgcttcgccattctcaagctgtaccgtccgaaggtggataacagtgcggttgggacgagtaagaaaagtgacatggctgaggttaaggattggaaagcggttcgtgtggatctggtggtcgctccagatgagcagttcgcctatgcgctgctcggttggacgggcagcggcatgtttcgtcgcgatactcgtcgctacgcggaggaagagcgcgacatgctgctcgacaaccatggtctctacgacctgaaaaagggcatctttctgagtgcggacagcgaagaagagattttcggtcatctggacctggattatctggagccgtgggaacgcaacgcg

SEQ ID NO: 5286 - protein, 394 aa, synthetic construct
  REGION 1..394: note = Variant of terminal deoxynucleotidyl transferase
MHHHHHHGGSGHPEGNTPEKEVPSVIARHVSPYACQRKTTLNNYNKKFTDALEIMAENYKFKENLQACLEARRAASVLKSLPFEVTSMKDIQGLPCITDDVRPVIEEIIEVGESSRVKEILNDERYKAFKQFTSVFGVGVKTSEKWYRMGLRTREEAKASKSLKLNKMQKAGFLYYEDLASGVSKEEADAVLDIVKETVRTVSPDALVTIAGGFRRGKPQGHDVDLLITIPGRPTDDELLHKVVDLLKKQGLLLYEDIRESTFVEGQLPNPKPDALDNHQKCFAILKLYRPKVDNSAVGTSKKSDMAEVKDWKAVRVDLVVAPDEQFAYALLGWTGSGMFRRDTRRYAEEERDMLLDNHGLYDLKKGIFLSADSEEEIFGHLDLDYLEPWERNA

SEQ ID NO: 5287 - DNA, 1182 bp, synthetic construct
  misc_feature 1..1182: note = Variant of terminal deoxynucleotidyl transferase
  source 1..1182: mol_type = other DNA
atgcatcaccaccatcatcatgggggttctggtcatccggaaggtaataccccggagaaggaggtgccgagcgttatcgcccgtcatgttagtccgtacgcgtgccagcgcaagaccacgctgaataactacaacaaaaagttcaccgacgcgctggagatcatggccgagaactacaagtttaaagagaacctgcaggcgtgcctggaggcccgtcgcgccgcgagtgtcctgaaaagcctgccgttcgaggttaccagcatgaaagacatccaaggtctgccgtgcattaccgacgacgtacgtcctgtgatcgaagagatcatcgaagtaggcgagagcagccgtgttaaagaaatcctcaatgacgagcgctacaaggcctttaagcagttcaccagcgtgttcggtgtgggcatcaagacctcggaaaagtggtaccgtatgggcctccgtacgcgcgaagaagcaaaggccagtaagagtctgaagctgaacaagatgcagaaggcgggcttcctgtattacgaggatctggcgagcggtgttagtaaagaagaagccgatgccgttctggatatcgtgaaggaaacggtgcgcactgttagtccggatgcgctggtgaccatcgccggcggtttccgccgtggcaaacctatgggccacgacgttgacctgctgatcacgattccgggccgtcctacggatgacgagctgctccacaaagtggttgatctgctcaagaagcaaggtctgctgctgtacgaagacatccgtgagagcacgttcgtggaggggcaactgccaaatcctaaacctgacgccctggacaaccatcagaagtgcttcgccattctcaagctgtaccgtccgaaggtggataacagtgcggttgggacgagtaagaaaagtgacatggctgaggttaaggattggaaagcggttcgtgtggatctggtggtcgctccagatgagcagttcgcctatgcgctgctcggttggacgggcagcggcatgtttcgtcgcgatactcgtcgctacgcggaggaagagcgcgacatgctgctcgacaaccatggtctctacgacctgaaaaagggcatctttctgagtgcggacagcgaagaagagattttcggtcatctggacctggattatctggagccgtgggaacgcaacgcg

SEQ ID NO: 5288 - protein, 394 aa, synthetic construct
  REGION 1..394: note = Variant of terminal deoxynucleotidyl transferase
MHHHHHHGGSGHPEGNTPEKEVPSVIARHVSPYACQRKTTLNNYNKKFTDALEIMAENYKFKENLQACLEARRAASVLKSLPFEVTSMKDIQGLPCITDDVRPVIEEIIEVGESSRVKEILNDERYKAFKQFTSVFGVGIKTSEKWYRMGLRTREEAKASKSLKLNKMQKAGFLYYEDLASGVSKEEADAVLDIVKETVRTVSPDALVTIAGGFRRGKPMGHDVDLLITIPGRPTDDELLHKVVDLLKKQGLLLYEDIRESTFVEGQLPNPKPDALDNHQKCFAILKLYRPKVDNSAVGTSKKSDMAEVKDWKAVRVDLVVAPDEQFAYALLGWTGSGMFRRDTRRYAEEERDMLLDNHGLYDLKKGIFLSADSEEEIFGHLDLDYLEPWERNA

SEQ ID NO: 5289 - DNA, 1182 bp, synthetic construct
  misc_feature 1..1182: note = Variant of terminal deoxynucleotidyl transferase
  source 1..1182: mol_type = other DNA
atgcatcaccaccatcatcatgggggttctggtcatccggaaggtaataccccggagaaggaggtgccgagcgttatcgcccgtcatgttagtccgtacgcgtgccagcgcaagaccacgctgaataactacaacaaaaagttcaccgacgcgctggagatcatggccgagaactacaagtttaaagagaacctgcaggcgtgcctggaggcccgtcgcgccgcgagtgtcctgaaaagcctgccgttcgaggttaccagcatgaaagacatccaaggtctgccgtgcattaccgacgacgtacgtcctgtgatcgaagagatcatcgaagtaggcgagagcagccgtgttaaagaaatcctcaatgacgagcgctacaaggcctttaagcagttcaccagcgtgttcggtgtgggcgtcaagacctcggaaaagtggtaccgtatgggcctccgtacgcgcgaagaagcaaaggccagtaagagtctgaagctgaacaagatgcagaaggcgggcttcctgtattacgaggatctggctagcggtgttagtaaagaagaagccgatgccgttctggatatcgtgaaggaaacggtgcgcactgttagtccggatgcgctggtgaccatcgccggcggtttccgccgtggcaaacctcaaggccacgacgttgacctgctgatcacgattccgggccgtcctacggatgacgagctgctccacaaagtggttgatctgctcaagaagcaaggtctgctgctgtacgaagacatccgtgagagcacgttcgtggaggggcaactgccaaatcctaaacctgacgccctggacaaccatcagaagtgcttcgccattctcaagctgtaccgtccgaaggtggataacagtgcggttgggacgagtaaaaaaagtgacatggctgaggttaaggattggaaagcggttcgtgtggatctggtggtcgctccagatgagcagttcgcctatgcgctgctcggttggacgggcagcggcatgtttcgtcgcgatactcgtcgctacgcggtggaggagcgcgacatgctgctcgacaaccatggtctctacgacctgaaaaagggcatctttctgagtgcggacagcgaagaagagattttcggtcatctggacctggattatctggagccgtgggaacgcaacgcg

SEQ ID NO: 5290 - protein, 394 aa, synthetic construct
  REGION 1..394: note = Variant of terminal deoxynucleotidyl transferase
MHHHHHHGGSGHPEGNTPEKEVPSVIARHVSPYACQRKTTLNNYNKKFTDALEIMAENYKFKENLQACLEARRAASVLKSLPFEVTSMKDIQGLPCITDDVRPVIEEIIEVGESSRVKEILNDERYKAFKQFTSVFGVGVKTSEKWYRMGLRTREEAKASKSLKLNKMQKAGFLYYEDLASGVSKEEADAVLDIVKETVRTVSPDALVTIAGGFRRGKPQGHDVDLLITIPGRPTDDELLHKVVDLLKKQGLLLYEDIRESTFVEGQLPNPKPDALDNHQKCFAILKLYRPKVDNSAVGTSKKSDMAEVKDWKAVRVDLVVAPDEQFAYALLGWTGSGMFRRDTRRYAVEERDMLLDNHGLYDLKKGIFLSADSEEEIFGHLDLDYLEPWERNA

SEQ ID NO: 5291 - DNA, 1182 bp, synthetic construct
  misc_feature 1..1182: note = Variant of terminal deoxynucleotidyl transferase
  source 1..1182: mol_type = other DNA
atgcatcaccaccatcatcatgggggttctggtcatccggaaggtaataccccggagaaggaggtgccgagcgttatcgcccgtcatgttagtccgtacgcgtgccagcgcaagaccacgctgaataactacaacaaaaagttcaccgacgcgctggagatcatggccgagaactacaagtttaaagagaacctgcaggcgtgcctggaggcccgtcgcgccgcgagtgtcctgaaaagcctgccgttcgaggttaccagcatgaaagacatccaaggtctgccgtgcattaccgacgacgtacgtcctgtgatcgaagagatcatcgaagtaggcgagagcagccgtgttaaagaaatcctcaatgacgagcgctacaaggcctttaagcagttcaccagcgtgttcggtgtgggcgtcaagacctcggaaaagtggtaccgtatgggcctccgtacgcgcgaagaagcaaaggccagtaagagtctgaagctgaacaagatgcagaaggcgggcttcctgtattacgaggatctggcgagcggtgttagtaaagaagaagccgatgccgttctggatatcgtgaaggaaacggtgcgcactgttagtccggatgcgctggtgaccatcgccggcggtttccgccgtggcaaacctatgggccacgacgttgacctgctgatcacgattccgggccgtcctacggatgacgagctgctccacaaagtggttgatctgctcaagaagcaaggtctgctgctgtacgaagacatccgtgagagcacgttcgtggaggggcaactgccaaatcctaaacctgacgccctggacaaccatcagaagtgcttcgccattctcaagctgtaccgtccgaaggtggataacagtgcggttgggacgagtaagaaaagtgacatggctgaggttaaggattggaaagcggttcgtgtggatctggtggtcgctccagatgagcagttcgcctatgcgctgctcggttggacgggcagcggcatgtttcgtcgcgatactcgtcgctacgcggagtatgagcgcgacatgctgctcgacaaccatggtctctacgacctgaaaaagggcatctttctgagtgcggacagcgaagaagagattttcggtcatctggacctggattatctggagccgtgggaacgcaacgcg

SEQ ID NO: 5292 - protein, 394 aa, synthetic construct
  REGION 1..394: note = Variant of terminal deoxynucleotidyl transferase
MHHHHHHGGSGHPEGNTPEKEVPSVIARHVSPYACQRKTTLNNYNKKFTDALEIMAENYKFKENLQACLEARRAASVLKSLPFEVTSMKDIQGLPCITDDVRPVIEEIIEVGESSRVKEILNDERYKAFKQFTSVFGVGVKTSEKWYRMGLRTREEAKASKSLKLNKMQKAGFLYYEDLASGVSKEEADAVLDIVKETVRTVSPDALVTIAGGFRRGKPMGHDVDLLITIPGRPTDDELLHKVVDLLKKQGLLLYEDIRESTFVEGQLPNPKPDALDNHQKCFAILKLYRPKVDNSAVGTSKKSDMAEVKDWKAVRVDLVVAPDEQFAYALLGWTGSGMFRRDTRRYAEYERDMLLDNHGLYDLKKGIFLSADSEEEIFGHLDLDYLEPWERNA

SEQ ID NO: 5293 - DNA, 1182 bp, synthetic construct
  misc_feature 1..1182: note = Variant of terminal deoxynucleotidyl transferase
  source 1..1182: mol_type = other DNA
atgcatcaccaccatcatcatgggggttctggtcatccggaaggtaataccccggagaaggaggtgccgagcgttatcgcccgtcatgttagtccgtacgcgtgccagcgcaagaccacgctgaataactacaacaaaaagatcaccgacgcgctgaccatcatggccgagaactacaagtttaaagagaacctgcaggcgtgcctggaggcccgtcgcgccgcgagtgtcctgaaaagcctgccgttcgaggttaccagcatgaaagacatccaaggtctgccgtgcattaccgacgacgtacgtcctgtgatcgaagagatcatcgaagtaggcgagagcagccgtgttaaagaaatcctcaatgacgagcgctacaaggcctttaagcagttcaccagcgtgttcggtgtgggcgtcaagacctcggaaaagtggtaccgtatgggcctccgtacgcgcgaagaagcaaaggccagtaagagtctgaagctgaacaagatgcagaaggcgggcttcctgtattacgaggatctggcgagcggtgttagtaaagaagaagccgatgccgttctggatatcgtgaaggaaacggtgcgcactgttagtccggatgcgctggtgaccatcgccggcggtttccgccgtggcaaacctatgggccacgacgttgacctgctgatcacgattccgggccgtcctacggatccggaggtgctccacaaagtggtggatctgctcaagaagcaaggtctgctgctgtacgaggacatccgtgagtcgacgttcgtggaggggcaactgccaaatcctaaacctgacgccctggacaaccatcaaaagtgtttcgccattctcaagctgtaccgtccgaaggtggataacagtgcggttgggacgagtaagaaaagtgacatggctgaggttaaggattggaaagcggttcgtgtggatctggtggtcgctccagatgagcagttcgcctatgcgctgctcggttggacgggcagcggcatgtttcgtcgcgatactcgtcgctacgcggaggaagagcgcgacatgctgctcgacaaccatggtctctacgacctgaaaaagggcatctttctgagtgcggacagcgaagaagagattttcggtcatctggacctggattatctggagccgtgggaacgcaacgcg

SEQ ID NO: 5294 - protein, 394 aa, synthetic construct
  REGION 1..394: note = Variant of terminal deoxynucleotidyl transferase
MHHHHHHGGSGHPEGNTPEKEVPSVIARHVSPYACQRKTTLNNYNKKITDALTIMAENYKFKENLQACLEARRAASVLKSLPFEVTSMKDIQGLPCITDDVRPVIEEIIEVGESSRVKEILNDERYKAFKQFTSVFGVGVKTSEKWYRMGLRTREEAKASKSLKLNKMQKAGFLYYEDLASGVSKEEADAVLDIVKETVRTVSPDALVTIAGGFRRGKPMGHDVDLLITIPGRPTDPEVLHKVVDLLKKQGLLLYEDIRESTFVEGQLPNPKPDALDNHQKCFAILKLYRPKVDNSAVGTSKKSDMAEVKDWKAVRVDLVVAPDEQFAYALLGWTGSGMFRRDTRRYAEEERDMLLDNHGLYDLKKGIFLSADSEEEIFGHLDLDYLEPWERNA

SEQ ID NO: 5295 - DNA, 1182 bp, synthetic construct; identical to SEQ ID NO: 5279
  misc_feature 1..1182: note = Variant of terminal deoxynucleotidyl transferase
  source 1..1182: mol_type = other DNA

SEQ ID NO: 5296 - protein, 394 aa, synthetic construct; identical to SEQ ID NO: 5280
  REGION 1..394: note = Variant of terminal deoxynucleotidyl transferase

SEQ ID NO: 5297 - DNA, 1182 bp, synthetic construct
  misc_feature 1..1182: note = Variant of terminal deoxynucleotidyl transferase
  source 1..1182: mol_type = other DNA
atgcatcaccaccatcatcatgggggttctggtcatccggaaggtaataccccggagaaggaggtgccgagcgttatcgcccgtcatgttagtccgtacgcgtgccagcgcaagaccacgctgaataactacaacaaaaagatcaccgacgcgctggagatcatggccgagaactacaagtttaaagagaacctgcaggcgtgcctggaagcccgtcgcgccgcgagtgtcctgaaaagcctgccgttcgaggttaccagcatgaaagacatccaaggtctgccgtgcattaccgacgacgtacgtcctgtgatcgaagagatcatcgaagtaggcgagagcagccgtgttaaagaaatcctcaatgacgagcgctacaaggcctttaagcagttcaccagcgtgttcggtgtgggcgtcaagacctcggaaaagtggtaccgtatgggcctccgtacgctggaagaagcaaaggccagtaagagtctgaagctgaacaagatgcagaaggcgggcttcctgtattacgaggatctggcgagcggtgttagtaaagaagaagccgatgccgttctggatatcgtgaaggaaacggtgcgcactgttagtccggatgcgctggtgaccatcgccggcggtttccgccgtggcaaacctatgggccacgacgttgacctgctgatcacgattccgggccgtcctacggatgacgagctgctccacaaagtggttgatctgctcaagaagcaaggtctgctgctgtacggggacatccgtgagcgtacgttcgtggaggggcaactgccaaatcctaaacctgacgccctggacaaccatcagaagtgcttcgccattctcaagctgtaccgtccgaaggtggataacagtgcggttgggacgagtaagaaaagtgacatggctgaggttaaggattggaaagcggttcgtgtggatctggtggtcgctccagatgagcagttcgcctatgcgctgctcggttggacgggcagcggcatgtttcgtcgcgatactcgtcgctacgcggagattgagcgcgacatgctgctcgacaaccatggtctctacgacctgaaaaagggcatctttctgagtgcggacagcgaagaagagattttcggtcatctggacctggattatctggagccgtgggaacgcaacgcg

SEQ ID NO: 5298 - protein, 394 aa, synthetic construct
  REGION 1..394: note = Variant of terminal deoxynucleotidyl transferase
MHHHHHHGGSGHPEGNTPEKEVPSVIARHVSPYACQRKTTLNNYNKKITDALEIMAENYKFKENLQACLEARRAASVLKSLPFEVTSMKDIQGLPCITDDVRPVIEEIIEVGESSRVKEILNDERYKAFKQFTSVFGVGVKTSEKWYRMGLRTLEEAKASKSLKLNKMQKAGFLYYEDLASGVSKEEADAVLDIVKETVRTVSPDALVTIAGGFRRGKPMGHDVDLLITIPGRPTDDELLHKVVDLLKKQGLLLYGDIRERTFVEGQLPNPKPDALDNHQKCFAILKLYRPKVDNSAVGTSKKSDMAEVKDWKAVRVDLVVAPDEQFAYALLGWTGSGMFRRDTRRYAEIERDMLLDNHGLYDLKKGIFLSADSEEEIFGHLDLDYLEPWERNA

SEQ ID NO: 5299 - DNA, 1182 bp, synthetic construct
  misc_feature 1..1182: note = Variant of terminal deoxynucleotidyl transferase
  source 1..1182: mol_type = other DNA
atgcatcaccaccatcatcatgggggttctggtcatccggaaggtaataccccggagaaggaggtgccgagcgttatcgcccgtcatgttagtccgtacgcgtgccagcgcaagaccacgctgaataactacaacaaaaagatcaccgacgcgctggagatcatggccgagaactacaagtttaaagagaacctgcaggcgtgcctggaagcccgtcgcgccgcgagtgtcctgaaaagcctgccgttcgaggttaccagcatgaaagacatccaaggtctgccgtgcattaccgacgacgtacgtcctgtgatcgaagagatcatcgaagtaggcgagagcagccgtgttaaagaaatcctcaatgacgagcgctacaaggcctttaagcagttcaccagcgtgttcggtgtgggcgtcaagacctcggaaaagtggtaccgtatgggcctccgtacgctggaagaagcaaaggccagtaagagtctgaagctgaacaagatgcagaaggcgggcttcctgtattacgaggatctggcgagcggtgtttcgaaagaagacgccgatgccgttctggatatcgtgaaggaaacggtgcgcactgttagtccggatgcgctggtgaccatcgccggcggtttccgccgtggcaaacctcaaggccacgacgttgacctgctgatcacgattccgggccgtcctacggatgacgagctgctccacaaagtggttgatctgctcaagaagcaaggtctgctgctgtacggggacatccgtgagcgtacgttcgtggaggggcaactgccaaatcctaaacctgacgccctggacaaccatcagaagtgcttcgccattctcaagctgtaccgtccgaaggtagataacagtgcggttgggacgagtaagaaaagtgacatggctgaggttaaggattggaaagcggttcgtgtggatctggtggtcgctccagatgagcagttcgcctatgcgctgctcggttggacgggcagcggcatgtttcgtcgcgatactcgtcgctacgcggagattgagcgcgacatgctgctcgacaaccatggtctctacgacctgaaaaagggcatctttctgagtgcggacagcgaagaagagattttcggtcatctggacctggatttcctggagccgtgggaacgcaacgcg

SEQ ID NO: 5300 - protein, 394 aa, synthetic construct
  REGION 1..394: note = Variant of terminal deoxynucleotidyl transferase
MHHHHHHGGSGHPEGNTPEKEVPSVIARHVSPYACQRKTTLNNYNKKITDALEIMAENYKFKENLQACLEARRAASVLKSLPFEVTSMKDIQGLPCITDDVRPVIEEIIEVGESSRVKEILNDERYKAFKQFTSVFGVGVKTSEKWYRMGLRTLEEAKASKSLKLNKMQKAGFLYYEDLASGVSKEDADAVLDIVKETVRTVSPDALVTIAGGFRRGKPQGHDVDLLITIPGRPTDDELLHKVVDLLKKQGLLLYGDIRERTFVEGQLPNPKPDALDNHQKCFAILKLYRPKVDNSAVGTSKKSDMAEVKDWKAVRVDLVVAPDEQFAYALLGWTGSGMFRRDTRRYAEIERDMLLDNHGLYDLKKGIFLSADSEEEIFGHLDLDFLEPWERNA

SEQ ID NO: 5301 - DNA, 1182 bp, synthetic construct
  misc_feature 1..1182: note = Variant of terminal deoxynucleotidyl transferase
  source 1..1182: mol_type = other DNA
atgcatcaccaccatcatcatgggggttctggtcatccggaaggtaataccccggagaaggaggtgccgagcgttatcgcccgtcatgttagtccgtacgcgtgccagcgcaagaccacgctgaataactacaacaaaaagatcaccgacgcgctggagatcatggccgagaactacaagtttaaagagaacctgcaggcgtgcctggaagcccgtcgcgccgcgagtgtcctgaaaagcctgccgttcgaggttaccagcatgaaagacatccaaggtctgccgtgcattaccgacgacgtacgtcctgtgatcgaagagatcatcgaagtaggcgagagcagccgtgttaaagaaatcctcaatgacgagcgctacaaggcctttaagcagttcaccagcgtgttcggtgtgggcgtcaagacctcggaaaagtggtaccgtatgggcctccgtacgcgcgaagaagcaaaggccagtaagagtctgaagctgaacaagatgcagaaggcgggcttcctgtattacgaggatctggcgagcggtgtttcgaaagaagacgccgatgccgttctggatatcgtgaaggaaacggtgcgcactgttagtccggatgcgctggtgaccatcgccggcggtttccgccgtggcaaacctcaaggccacgacgttgacctgctgatcacgattccgggccgtcctacggatgacgagctgctccacaaagtggttgatctgctcaagaagcaaggtctgctgctgtacggggacatccgtgagcgtacgttcgtggaggggcaactgccaaatcctaaacctgacgccctggacaaccatcagaagtgcttcgccattctcaagctgtaccgtccgaaggtagataacagtgcggttgggacgagtaagaaaagtgacatggctgaggttaaggattggaaagcggttcgtgtggatctggtggtcgctccagatgagcagttcgcctatgcgctgctcggttggacgggcagcggcatgtttcgtcgcgatactcgtcgctacgcggagcgcgagcgcgacatgctgctcgacaaccatggtctctacgacctgaaaaagggcatctttctgagtgcggacagcgaagaagagattttcggtcatctggacctggattatctggagccgtgggaacgcaacgcg

SEQ ID NO: 5302 - protein, 394 aa, synthetic construct
  REGION 1..394: note = Variant of terminal deoxynucleotidyl transferase
MHHHHHHGGSGHPEGNTPEKEVPSVIARHVSPYACQRKTTLNNYNKKITDALEIMAENYKFKENLQACLEARRAASVLKSLPFEVTSMKDIQGLPCITDDVRPVIEEIIEVGESSRVKEILNDERYKAFKQFTSVFGVGVKTSEKWYRMGLRTREEAKASKSLKLNKMQKAGFLYYEDLASGVSKEDADAVLDIVKETVRTVSPDALVTIAGGFRRGKPQGHDVDLLITIPGRPTDDELLHKVVDLLKKQGLLLYGDIRERTFVEGQLPNPKPDALDNHQKCFAILKLYRPKVDNSAVGTSKKSDMAEVKDWKAVRVDLVVAPDEQFAYALLGWTGSGMFRRDTRRYAERERDMLLDNHGLYDLKKGIFLSADSEEEIFGHLDLDYLEPWERNA

SEQ ID NO: 5303 - DNA, 1182 bp, synthetic construct
  misc_feature 1..1182: note = Variant of terminal deoxynucleotidyl transferase
  source 1..1182: mol_type = other DNA
atgcatcaccaccatcatcatgggggttctggtcatccggaaggtaataccccggagaaggaggtgccgagcgttatcgcccgtcatgttagtccgtacgcgtgccagcgcaagaccacgctgaataactacaacaaaaagatcaccgacgcgctggagatcatggccgagaactacaagtttaaagagaaccgtcaggcgtgcctggaagcccgtcgcgccgcgagtgtcctgaaaagcctgccgttcgaggttaccagcatgaaagacatccaaggtctgccgtgcattaccgacgacgtacgtcctgtgatcgaagagatcatcgaagtaggcgagagcagccgtgttaaagaaatcctcaatgacgagcgctacaaggcctttaagcagttcaccagcgtgttcggtgtgggcgtcaagacctcggaaaagtggtaccgtatgggcctccgtacgcgcgaagaagcaaaggccagtaagagtctgaagctgaacaagatgcagaaggcgggcttcctgtattacgaggatctggcgagcggtgttacgaaagaagacgccgatgccgttctggatatcgtgaaggaaacggtgcgcactgttagtccggatgcgctggtgaccatcgccggcggtttccgccgtggcaaacctatgggccacgacgttgacctgctgatcacgattccgggccgtcctacggatgacgagctgctccacaaagtggttgatctgctcaagaagcaaggtctgctgctgtacggggacatccgtgagcgtacgttcgtggaggggcaactgccaaatcctaaacctgacgccctggacaaccatcagaagtgcttcgccattctcaagctgtaccgtccgaaggtagataacagtgcggttgggacgagtaagaaaagtgacatggctgaggttaaggattggaaagcggttcgtgtggatctggtggtcgctccagatgagcagttcgcctatgcgctgctcggttggacgggcagcggcatgtttcgtcgcgatactcgtcgctacgcggaggaggagcgcgacatgctgctcgacaaccatggtctctacgacctgaaaaagggcatctttctgagtgcggacagcgaagaagagattttcggtcatctggacctggattatctggagccgtgggaacgcaacgcg

SEQ ID NO: 5304 - protein, 394 aa, synthetic construct
  REGION 1..394: note = Variant of terminal deoxynucleotidyl transferase
MHHHHHHGGSGHPEGNTPEKEVPSVIARHVSPYACQRKTTLNNYNKKITDALEIMAENYKFKENRQACLEARRAASVLKSLPFEVTSMKDIQGLPCITDDVRPVIEEIIEVGESSRVKEILNDERYKAFKQFTSVFGVGVKTSEKWYRMGLRTREEAKASKSLKLNKMQKAGFLYYEDLASGVTKEDADAVLDIVKETVRTVSPDALVTIAGGFRRGKPMGHDVDLLITIPGRPTDDELLHKVVDLLKKQGLLLYGDIRERTFVEGQLPNPKPDALDNHQKCFAILKLYRPKVDNSAVGTSKKSDMAEVKDWKAVRVDLVVAPDEQFAYALLGWTGSGMFRRDTRRYAEEERDMLLDNHGLYDLKKGIFLSADSEEEIFGHLDLDYLEPWERNA

SEQ ID NO: 5305 - DNA, 1182 bp, synthetic construct
  misc_feature 1..1182: note = Variant of terminal deoxynucleotidyl transferase
  source 1..1182: mol_type = other DNA
atgcatcaccaccatcatcatgggggttctggtcatccggaaggtaataccccggagaaggaggtgccgagcgttatcgcccgtcatgttagtccgtacgcgtgccagcgcaagaccacgctgaataactacaacaaaaagatcaccgacgcgctggagatcatggccgagaactacaagtttaaagagaacctgcaggcgtgcctggaggcccgtcgcgccgcgagtgtcctgaaaagcctgccgttcgaggttaccagcatgaaagacatccaaggtctgccgtgcattaccgacgacgtacgtcctgtgatcgaagagatcatcgaagtaggcgagagcagccgtgttaaagaaatcctcaatgacgagcgctacaaggcctttaagcagttcaccagcgtgttcggtgtgggcgtcaagacctcggaaaagtggtaccgtatgggcctccgtacgcgcgaagaagcaaaggccagtaagagtctgaagctgaacaagatgcagaaggcgggcttcctgtattacgaggatctggcgagcggtgttagtaaagaagaagccgatgccgttctggatatcgtgaaggaaacggtgcgcactgttagtccggatgcgctggtgaccatcgccggcggtttccgccgtggcaaacctatgggccacgacgttgacctgctgatcacgattccgggccgtcctacggatgacgagctgctccacaaagtggttgatctgctcaagaagcaaggtctgctgctgtacggggacatccgtgagcgtacgttcgtggaggggcaactgccaaatcctaaacctgacgccctggacaaccatcagaagtgcttcgccattctcaagctgtaccgtccgaaggtagataacagtgcggttgggacgagtaagaaaagtgacatggctgaggttaaggattggaaagcggttcgtgtggatctggtggtcgctccagatgagcagttcgcctatgcgctgctcggttggacgggcagcggcatgtttcgtcgcgatactcgtcgctacgcggagcgcgagcgcgacatgctgctcgacaaccatggtctctacgacctgaaaaagggcatctttctgagtgcggacagcgaagaagagattttcggtcatctggacctggattatctggagccgtgggaacgcaacgcg

SEQ ID NO: 5306 - protein, 394 aa, synthetic construct
  REGION 1..394: note = Variant of terminal deoxynucleotidyl transferase
MHHHHHHGGSGHPEGNTPEKEVPSVIARHVSPYACQRKTTLNNYNKKITDALEIMAENYKFKENLQACLEARRAASVLKSLPFEVTSMKDIQGLPCITDDVRPVIEEIIEVGESSRVKEILNDERYKAFKQFTSVFGVGVKTSEKWYRMGLRTREEAKASKSLKLNKMQKAGFLYYEDLASGVSKEEADAVLDIVKETVRTVSPDALVTIAGGFRRGKPMGHDVDLLITIPGRPTDDELLHKVVDLLKKQGLLLYGDIRERTFVEGQLPNPKPDALDNHQKCFAILKLYRPKVDNSAVGTSKKSDMAEVKDWKAVRVDLVVAPDEQFAYALLGWTGSGMFRRDTRRYAERERDMLLDNHGLYDLKKGIFLSADSEEEIFGHLDLDYLEPWERNA

SEQ ID NO: 5307 - DNA, 1182 bp, synthetic construct
  misc_feature 1..1182: note = Variant of terminal deoxynucleotidyl transferase
  source 1..1182: mol_type = other DNA
atgcatcaccaccatcatcatgggggttctggtcatccggaaggtaataccccggagaaggaggtgccgagcgttatcgcccgtcatgttagtccgtacgcgtgccagcgcaagaccacgctgaataactacaacaaaaagatcaccgacgcgctggagatcatggccgagaactacaagtttaaagagaaccgtcaggcgtgcctggaagcccgtcgcgccgcgagtgtcctgaaaagcctgccgttcgaggttaccagcatgaaagacatccaaggtctgccgtgcattaccgacgacgtacgtcctgtgatcgaagagatcatcgaagtaggcgagagcagccgtgttaaagaaatcctcaatgacgagcgctacaaggcctttaagcagttcaccagcgtgttcggtgtgggcgtcaagacctcggaaaagtggtaccgtatgggcctccgtacgcgcgaagaagcaaaggccagtaagagtctgaagctgaacaagatgcagaaggcgggcttcctgtattacgaggatctggcgagcggtgtttcgaaagaagaagccgatgccgttctggatatcgtgaaggaaacggtgcgcactgttagtccggatgcgctggtgaccatcgccggcggtttccgccgtggcaaacctatgggccacgacgttgacctgctgatcacgattccgggccgtcctacggatgacgagctgctccacaaagtggttgatctgctcaagaagcaaggtctgctgctgtacggggacatccgtgagcgtacgttcgtggaggggcaactgccaaatcctaaacctgacgccctggacaaccatcagaagtgcttcgccattctcaagctgtaccgtccgaaggtagataacagtgcggttgggacgagtaagaaaagtgacatggctgaggttaaggattggaaagcggttcgtgtggatctggtggtcgctccagatgagcagttcgcctatgcgctgctcggttggacgggcagcggcatgtttcgtcgcgatactcgtcgctacgcggaggaagagcgcgacatgctgctcgacaaccatggtctctacgacctgaaaaagggcatctttctgagtgcggacagcgaagaagagattttcggtcatctggacctggattatctggagccgtgggaacgcaacgcg

SEQ ID NO: 5308 - protein, 394 aa, synthetic construct
  REGION 1..394: note = Variant of terminal deoxynucleotidyl transferase
MHHHHHHGGSGHPEGNTPEKEVPSVIARHVSPYACQRKTTLNNYNKKITDALEIMAENYKFKENRQACLEARRAASVLKSLPFEVTSMKDIQGLPCITDDVRPVIEEIIEVGESSRVKEILNDERYKAFKQFTSVFGVGVKTSEKWYRMGLRTREEAKASKSLKLNKMQKAGFLYYEDLASGVSKEEADAVLDIVKETVRTVSPDALVTIAGGFRRGKPMGHDVDLLITIPGRPTDDELLHKVVDLLKKQGLLLYGDIRERTFVEGQLPNPKPDALDNHQKCFAILKLYRPKVDNSAVGTSKKSDMAEVKDWKAVRVDLVVAPDEQFAYALLGWTGSGMFRRDTRRYAEEERDMLLDNHGLYDLKKGIFLSADSEEEIFGHLDLDYLEPWERNA

SEQ ID NO: 5309 - DNA, 1182 bp, synthetic construct
  misc_feature 1..1182: note = Variant of terminal deoxynucleotidyl transferase
  source 1..1182: mol_type = other DNA
atgcatcaccaccatcatcatgggggttctggtcatccggaaggtaataccccggagaaggaggtgccgagcgttatcgcccgtcatgttagtccgtacgcgtgccagcgcaagaccacgctgaataactacaacaaaaagatcaccgacgcgctggagatcatggccgagaactacaagtttaaagagaacctgcaggcgtgcctggaagcccgtcgcgccgcgagtgtcctgaaaagcctgccgttcgaggttaccagcatgaaagacatccaaggtctgccgtgcattaccgacgacgtacgtcctgtgatcgaagagatcatcgaagtaggcgagagcagccgtgttaaagaaatcctcaatgacgagcgctacaaggcctttaagcagttcaccagcgtgttcggtgtgggcgtcaagacctcggaaaagtggtaccgtatgggcctccgtacgctggaagaagcaaaggccagtaagagtctgaagctgaacaagatgcagaaggcgggcttcctgtattacgaggatctggcgagcggtgttacgaaagaagaagccgatgccgttctggatatcgtgaaggaaacggtgcgcactgttagtccggatgcgctggtgaccatcgccggcggtttccgccgtggcaaacctatgggccacgacgttgacctgctgatcacgattccgggccgtcctacggatgacgagctgctccacaaagtggttgatctgctcaagaagcaaggtctgctgctgtacggggacatccgtgagcgtacgttcgtggaggggcaactgccaaatcctaaacctgacgccctggacaaccatcagaagtgcttcgccattctcaagctgtaccgtccgaaggtagataacagtgcggttgggacgagtaagaaaagtgacatggctgaggttaaggattggaaagcggttcgtgtggatctggtggtcgctccagatgagcagttcgcctatgcgctgctcggttggacgggcagcggcatgtttcgtcgcgatactcgtcgctacgcggaggaagagcgcgacatgctgctcgacaaccatggtctctacgacctgaaaaagggcatctttctgagtgcggacagcgaagaagagattttcggtcatctggacctggattatctggagccgtgggaacgcaacgcg

SEQ ID NO: 5310 - protein, 394 aa, synthetic construct
  REGION 1..394: note = Variant of terminal deoxynucleotidyl transferase
MHHHHHHGGSGHPEGNTPEKEVPSVIARHVSPYACQRKTTLNNYNKKITDALEIMAENYKFKENLQACLEARRAASVLKSLPFEVTSMKDIQGLPCITDDVRPVIEEIIEVGESSRVKEILNDERYKAFKQFTSVFGVGVKTSEKWYRMGLRTLEEAKASKSLKLNKMQKAGFLYYEDLASGVTKEEADAVLDIVKETVRTVSPDALVTIAGGFRRGKPMGHDVDLLITIPGRPTDDELLHKVVDLLKKQGLLLYGDIRERTFVEGQLPNPKPDALDNHQKCFAILKLYRPKVDNSAVGTSKKSDMAEVKDWKAVRVDLVVAPDEQFAYALLGWTGSGMFRRDTRRYAEEERDMLLDNHGLYDLKKGIFLSADSEEEIFGHLDLDYLEPWERNA

SEQ ID NO: 5311 - DNA, 1182 bp, synthetic construct
  misc_feature 1..1182: note = Variant of terminal deoxynucleotidyl transferase
  source 1..1182: mol_type = other DNA
atgcatcaccaccatcatcatgggggttctggtcatccggaaggtaataccccggagaaggaggtgccgagcgttatcgcccgtcatgttagtccgtacgcgtgccagcgcaagaccacgctgaataactacaacaaaaagatcaccgacgcgctggagatcatggccgagaactacaagtttaaagagaacctgcaggcgtgcctggaggcccgtcgcgccgcgagtgtcctgaaaagcctgccgttcgaggttaccagcatgaaagacatccaaggtctgccgtgcattaccgacgacgtacgtcctgtgatcgaagagatcatcgaagtaggcgagagcagccgtgttaaagaaatcctcaatgacgagcgctacaaggcctttaagcagttcaccagcgtgttcggtgtgggcgtcaagacctcggaaaagtggtaccgtatgggcctccgtacgctggaagaagcaaaggccagtaagagtctgaagctgaacaagatgcagaaggcgggcttcctgtattacgaggatctggcgagcggtgttagtaaagaagaagccgatgccgttctggatatcgtgaaggaaacggtgcgcactgttagtccggatgcgctggtgaccatcgccggcggtttccgccgtggcaaacctatgggccacgacgttgacctgctgatcacgattccgggccgtcctacggatgacgagctgctccacaaagtggttgatctgctcaagaagcaaggtctgctgctgtacggggacatccgtgagcgtacgttcgtggaggggcaactgccaaatcctaaacctgacgccctggacaaccatcagaagtgcttcgccattctcaagctgtaccgtccgaaggtagataacagtgcggttgggacgagtaagaaaagtgacatggctgaggttaaggattggaaagcggttcgtgtggatctggtggtcgctccagatgagcagttcgcctatgcgctgctcggttggacgggcagcggcatgtttcgtcgcgatactcgtcgctacgcggaggaggagcgcgacatgctgctcgacaaccatggtctctacgacctgaaaaagggcatctttctgagtgcggacagcgaagaagagattttcggtcatctggacctggattatctggagccgtgggaacgcaacgcg

SEQ ID NO: 5312 - protein, 394 aa, synthetic construct
  REGION 1..394: note = Variant of terminal deoxynucleotidyl transferase
MHHHHHHGGSGHPEGNTPEKEVPSVIARHVSPYACQRKTTLNNYNKKITDALEIMAENYKFKENLQACLEARRAASVLKSLPFEVTSMKDIQGLPCITDDVRPVIEEIIEVGESSRVKEILNDERYKAFKQFTSVFGVGVKTSEKWYRMGLRTLEEAKASKSLKLNKMQKAGFLYYEDLASGVSKEEADAVLDIVKETVRTVSPDALVTIAGGFRRGKPMGHDVDLLITIPGRPTDDELLHKVVDLLKKQGLLLYGDIRERTFVEGQLPNPKPDALDNHQKCFAILKLYRPKVDNSAVGTSKKSDMAEVKDWKAVRVDLVVAPDEQFAYALLGWTGSGMFRRDTRRYAEEERDMLLDNHGLYDLKKGIFLSADSEEEIFGHLDLDYLEPWERNA

SEQ ID NO: 5313 - DNA, 1182 bp, synthetic construct
  misc_feature 1..1182: note = Variant of terminal deoxynucleotidyl transferase
  source 1..1182: mol_type = other DNA
atgcatcaccaccatcatcatgggggttctggtcatccggaaggtaataccccggagaaggaggtgccgagcgttatcgcccgtcatgttagtccgtacgcgtgccagcgcaagaccacgctgaataactacaacaaaaagatcaccgacgcgctggagatcatggccgagaactacaagtttaaagagaacctgcaggcgtgcctggaagcccgtcgcgccgcgagtgtcctgaaaagcctgccgttcgaggttaccagcatgaaagacatccaaggtctgccgtgcattaccgacgacgtacgtcctgtgatcgaagagatcatcgaagtaggcgagagcagccgtgttaaagaaatcctcaatgacgagcgctacaaggcctttaagcagttcaccagcgtgttcggtgtgggcgtcaagacctcggaaaagtggtaccgtatgggcctccgtacgcgcgaagaagcaaaggccagtaagagtctgaagctgaacaagatgcagaaggcgggcttcctgtattacgaggatctggcgagcggtgttagtaaagaagaagccgatgccgttctggatatcgtgaaggaaacggtgcgcactgttagtccggatgcgctggtgaccatcgccggcggtttccgccgtggcaaacctatgggccacgacgttgacctgctgatcacgattccgggccgtcctacggatgacgagctgctccacaaagtggttgatctgctcaagaagcaaggtctgctgctgtacggggacatccgtgagcgtacgttcgtggaggggcaactgccaaatcctaaacctgacgccctggacaaccatcagaagtgcttcgccattctcaagctgtaccgtccgaagaccgataacagtgcggttgggacgagtaagaaaagtgacatggctgaggttaaggattggaaagcggttcgtgtggatctggtggtcgctccagatgagcagttcgcctatgcgctgctcggttggacgggcagcggcatgtttcgtcgcgatactcgtcgctacgcggagcgcgagcgcgacatgctgctcgacaaccatggtctctacgacctgaaaaagggcatctttctgagtgcggacagcgaagaagagattttcggtcatctggacctggatttcctggagccgtgggaacgcaacgcg

SEQ ID NO: 5314 - protein, 394 aa, synthetic construct
  REGION 1..394: note = Variant of terminal deoxynucleotidyl transferase
MHHHHHHGGSGHPEGNTPEKEVPSVIARHVSPYACQRKTTLNNYNKKITDALEIMAENYKFKENLQACLEARRAASVLKSLPFEVTSMKDIQGLPCITDDVRPVIEEIIEVGESSRVKEILNDERYKAFKQFTSVFGVGVKTSEKWYRMGLRTREEAKASKSLKLNKMQKAGFLYYEDLASGVSKEEADAVLDIVKETVRTVSPDALVTIAGGFRRGKPMGHDVDLLITIPGRPTDDELLHKVVDLLKKQGLLLYGDIRERTFVEGQLPNPKPDALDNHQKCFAILKLYRPKTDNSAVGTSKKSDMAEVKDWKAVRVDLVVAPDEQFAYALLGWTGSGMFRRDTRRYAERERDMLLDNHGLYDLKKGIFLSADSEEEIFGHLDLDFLEPWERNA

SEQ ID NO: 5315 - DNA, 1182 bp, synthetic construct
  misc_feature 1..1182: note = Variant of terminal deoxynucleotidyl transferase
  source 1..1182: mol_type = other DNA
atgcatcaccaccatcatcatgggggttctggtcatccggaaggtaataccccggagaaggaggtgccgagcgttatcgcccgtcatgttagtccgtacgcgtgccagcgcaagaccacgctgaataactacaacaaaaagatcaccgacgcgctggagatcatggccgagaactacaagtttaaagagaacctgcaggcgtgcctggaggcccgtcgcgccgcgagtgtcctgaaaagcctgccgttcgaggttaccagcatgaaagacatccaaggtctgccgtgcattaccgacgacgtacgtcctgtgatcgaagagatcatcgaagtaggcgagagcagccgtgttaaagaaatcctcaatgacgagcgctacaaggcctttaagcagttcaccagcgtgttcggtgtgggcgtcaagacctcggaaaagtggtaccgtatgggcctccgtacgctggaagaagcaaaggccagtaagagtctgaagctgaacaagatgcagaaggcgggcttcctgtattacgaggatctggcgagcggtgtttcgaaagaagaagccgatgccgttctggatatcgtgaaggaaacggtgcgcactgttagtccggatgcgctggtgaccatcgccggcggtttccgccgtggcaaacctatgggccacgacgttgacctgctgatcacgattccgggccgtcctacggatgacgagctgctccacaaagtggttgatctgctcaagaagcaaggtctgctgctgtacggggacatccgtgagcgtacgttcgtggaggggcaactgccaaatcctaaacctgacgccctggacaaccatcagaagtgcttcgccattctcaagctgtaccgtccgaagaccgataacagtgcggttgggacgagtaagaaaagtgacatggctgaggttaaggattggaaagcggttcgtgtggatctggtggtcgctccagatgagcagttcgcctatgcgctgctcggttggacgggcagcggcatgtttcgtcgcgatactcgtcgctacgcggaggaagagcgcgacatgctgctcgacaaccatggtctctacgacctgaaaaagggcatctttctgagtgcggacagcgaagaagagattttcggtcatctggacctggattacctggagccgtgggaacgcaacgcg

SEQ ID NO: 5316 - protein, 394 aa, synthetic construct
  REGION 1..394: note = Variant of terminal deoxynucleotidyl transferase
MHHHHHHGGSGHPEGNTPEKEVPSVIARHVSPYACQRKTTLNNYNKKITDALEIMAENYKFKENLQACLEARRAASVLKSLPFEVTSMKDIQGLPCITDDVRPVIEEIIEVGESSRVKEILNDERYKAFKQFTSVFGVGVKTSEKWYRMGLRTLEEAKASKSLKLNKMQKAGFLYYEDLASGVSKEEADAVLDIVKETVRTVSPDALVTIAGGFRRGKPMGHDVDLLITIPGRPTDDELLHKVVDLLKKQGLLLYGDIRERTFVEGQLPNPKPDALDNHQKCFAILKLYRPKTDNSAVGTSKKSDMAEVKDWKAVRVDLVVAPDEQFAYALLGWTGSGMFRRDTRRYAEEERDMLLDNHGLYDLKKGIFLSADSEEEIFGHLDLDYLEPWERNA

SEQ ID NO: 5317 - DNA, 1182 bp, synthetic construct
  misc_feature 1..1182: note = Variant of terminal deoxynucleotidyl transferase
  source 1..1182: mol_type = other DNA
atgcatcaccaccatcatcatgggggttctggtcatccggaaggtaataccccggagaaggaggtgccgagcgttatcgcccgtcatgttagtccgtacgcgtgccagcgcaagaccacgctgaataactacaacaaaaagatcaccgacgcgctggagatcatggccgagaactacaagtttaaagagaacctgcaggcgtgcctggaagcccgtcgcgccgcgagtgtcctgaaaagcctgtcgttcgaggttaccagcatgaaagacatccaaggtctgccgtgcattaccgacgacgtacgtcctgtgatcgaagagatcatcgaagtaggcgagagcagccgtgttaaagaaatcctcaatgacgagcgctacaaggcctttaagcagttcaccagcgtgttcggtgtgggcgtcaagacctcggaaaagtggtaccgtatgggcctccgtacgcgcgaagaagcaaaggccagtaagagtctgaagctgaacaagatgcagaaggcgggcttcctgtattacgaggatctggcgagcggtgttacgaaagaagaagccgatgccgttctggatatcgtgaaggaaacggtgcgcactgttagtccggatgcgctggtgaccatcgccggcggtttccgccgtggcaaacctcaaggccacgacgttgacctgctgatcacgattccgggccgtcctacggatgacgagctgctccacaaagtggttgatctgctcaagaagcaaggtctgctgctgtacggggacatccgtgagcgtacgttcgtggaggggcaactgccaaatcctaaacctgacgccctggacaaccatcagaagtgcttcgccattctcaagctgtaccgtccgaaggtagataacagtgcggttgggacgagtaagaaaagtgacatggctgaggttaaggattggaaagcggttcgtgtggatctggtggtcgctccagatgagcagttcgcctatgcgctgctcggttggacgggcagcggcatgtttcgtcgcgatactcgtcgctacgcggaggaggagcgcgacatgctgctcgacaaccatggtctctacgacctgaaaaagggcatctttctgagtgcggacagcgaagaagagattttcggtcatctggacctggatttcctggagccgtgggaacgcaacgcg

SEQ ID NO: 5318 - protein, 394 aa, synthetic construct
  REGION 1..394: note = Variant of terminal deoxynucleotidyl transferase
MHHHHHHGGSGHPEGNTPEKEVPSVIARHVSPYACQRKTTLNNYNKKITDALEIMAENYKFKENLQACLEARRAASVLKSLSFEVTSMKDIQGLPCITDDVRPVIEEIIEVGESSRVKEILNDERYKAFKQFTSVFGVGVKTSEKWYRMGLRTREEAKASKSLKLNKMQKAGFLYYEDLASGVTKEEADAVLDIVKETVRTVSPDALVTIAGGFRRGKPQGHDVDLLITIPGRPTDDELLHKVVDLLKKQGLLLYGDIRERTFVEGQLPNPKPDALDNHQKCFAILKLYRPKVDNSAVGTSKKSDMAEVKDWKAVRVDLVVAPDEQFAYALLGWTGSGMFRRDTRRYAEEERDMLLDNHGLYDLKKGIFLSADSEEEIFGHLDLDFLEPWERNA

SEQ ID NO: 5319 - DNA, 1182 bp, synthetic construct
  misc_feature 1..1182: note = Variant of terminal deoxynucleotidyl transferase
  source 1..1182: mol_type = other DNA
atgcatcaccaccatcatcatgggggttctggtcatccggaaggtaataccccggagaaggaggtgccgagcgttatcgcccgtcatgttagtccgtacgcgtgccagcgcaagaccacgctgaataactacaacaaaaagatcaccgacgcgctggagatcatggccgagaactacaagtttaaagagaacctgcaggcgtgcctggaagcccgtcgcgccgcgagtgtcctgaaaagcctgccgttcgaggttaccagcatgaaagacatccaaggtctgccgtgcattaccgacgacgtacgtcctgtgatcgaagagatcatcgaagtaggcgagagcagccgtgttaaagaaatcctcaatgacgagcgctacaaggcctttaagcagttcaccagcgtgttcggtgtgggcgtcaagacctcggaaaagtggtaccgtatgggcctccgtacgcgcgaagaagcaaaggccagtaagagtctgaagctgaacaagatgcagaaggcgggcttcctgtattacgaggatctggcgagcggtgttagtaaagaagaagccgatgccgttctggatatcgtgaaggaaacggtgcgcactgttagtccggatgcgctggtgaccatcgccggcggtttccgccgtggcaaacctcaaggccacgacgttgacctgctgatcacgattccgggccgtcctacggatgacgagctgctccacaaagtggttgatctgctcaagaagcaaggtctgctgctgtacggggacatccgtgagcgtacgttcgtggaggggcaactgccaaatcctaaacctgacgccctggacaaccatcagaagtgcttcgccattctcaagctgtaccgtccgaagaccgataacagtgcggttgggacgagtaagaaaagtgacatggctgaggttaaggattggaaagcggttcgtgtggatctggtggtcgctccagatgagcagttcgcctatgcgctgctcggttggacgggcagcggcatgtttcgtcgcgatactcgtcgctacgcggaggaggagcgcgacatgctgctcgacaaccatggtctctacgacctgaaaaagggcatctttctgagtgcggacagcgaagaagagattttcggtcatctggacctggattacctggagccgtgggaacgcaacgcg

SEQ ID NO: 5320 - protein, 394 aa, synthetic construct
  REGION 1..394: note = Variant of terminal deoxynucleotidyl transferase
MHHHHHHGGSGHPEGNTPEKEVPSVIARHVSPYACQRKTTLNNYNKKITDALEIMAENYKFKENLQACLEARRAASVLKSLPFEVTSMKDIQGLPCITDDVRPVIEEIIEVGESSRVKEILNDERYKAFKQFTSVFGVGVKTSEKWYRMGLRTREEAKASKSLKLNKMQKAGFLYYEDLASGVSKEEADAVLDIVKETVRTVSPDALVTIAGGFRRGKPQGHDVDLLITIPGRPTDDELLHKVVDLLKKQGLLLYGDIRERTFVEGQLPNPKPDALDNHQKCFAILKLYRPKTDNSAVGTSKKSDMAEVKDWKAVRVDLVVAPDEQFAYALLGWTGSGMFRRDTRRYAEEERDMLLDNHGLYDLKKGIFLSADSEEEIFGHLDLDYLEPWERNA

SEQ ID NO: 5321 - DNA, 1182 bp, synthetic construct
  misc_feature 1..1182: note = Variant of terminal deoxynucleotidyl transferase
  source 1..1182: mol_type = other DNA
atgcatcaccaccatcatcatgggggttctggtcatccggaaggtaataccccggagaaggaggtgccgagcgttatcgcccgtcatgttagtccgtacgcgtgccagcgcaagaccacgctgaataactacaacaaaaagatcaccgacgcgctggagatcatggccgagaactacaagtttaaagagaacctgcaggcgtgcctggaggcccgtcgcgccgcgagtgtcctgaaaagcctgccgttcgaggttaccagcatgaaagacatccaaggtctgccgtgcattaccgacgacgtacgtcctgtgatcgaagagatcatcgaagtaggcgagagcagccgtgttaaagaaatcctcaatgacgagcgctacaaggcctttaagcagttcaccagcgtgttcggtgtgggcgtcaagacctcggaaaagtggtaccgtatgggcctccgtacgcgcgaagaagcaaaggccagtaagagtctgaagctgaacaagatgcagaaggcgggcttcctgtattacgaggatctggcgagcggtgttacgaaagaagacgccgatgccgttctggatatcgtgaaggaaacggtgcgcactgttagtccggatgcgctggtgaccatcgccggcggtttccgccgtggcaaacctatgggccacgacgttgacctgctgatcacgattccgggccgtcctacggatgacgagctgctccacaaagtggttgatctgctcaagaagcaaggtctgctgctgtacggggacatccgtgagcgtacgttcgtggaggggcaactgccaaatcctaaacctgacgccctggacaaccatcagaagtgcttcgccattctcaagctgtaccgtccgaaggtggataacagtgcggttgggacgagtaagaaaagtgacatggctgaggttaaggattggaaagcggttcgtgtggatctggtggtcgctccagatgagcagttcgcctatgcgctgctcggttggacgggcagcggcatgtttcgtcgcgatactcgtcgctacgcggaggaggagcgcgacatgctgctcgacaaccatggtctctacgacctgaaaaagggcatctttctgagtgcggacagcgaagaagagattttcggtcatctggacctggattatctggagccgtgggaacgcaacgcg

SEQ ID NO: 5322 - protein, 394 aa, synthetic construct
  REGION 1..394: note = Variant of terminal deoxynucleotidyl transferase
MHHHHHHGGSGHPEGNTPEKEVPSVIARHVSPYACQRKTTLNNYNKKITDALEIMAENYKFKENLQACLEARRAASVLKSLPFEVTSMKDIQGLPCITDDVRPVIEEIIEVGESSRVKEILNDERYKAFKQFTSVFGVGVKTSEKWYRMGLRTREEAKASKSLKLNKMQKAGFLYYEDLASGVTKEDADAVLDIVKETVRTVSPDALVTIAGGFRRGKPMGHDVDLLITIPGRPTDDELLHKVVDLLKKQGLLLYGDIRERTFVEGQLPNPKPDALDNHQKCFAILKLYRPKVDNSAVGTSKKSDMAEVKDWKAVRVDLVVAPDEQFAYALLGWTGSGMFRRDTRRYAEEERDMLLDNHGLYDLKKGIFLSADSEEEIFGHLDLDYLEPWERNA

SEQ ID NO: 5323 - DNA, 1182 bp, synthetic construct
  misc_feature 1..1182: note = Variant of terminal deoxynucleotidyl transferase
  source 1..1182: mol_type = other DNA
atgcatcaccaccatcatcatgggggttctggtcatccggaaggtaataccccggagaaggaggtgccgagcgttatcgcccgtcatgttagtccgtacgcgtgccagcgcaagaccacgctgaataactacaacaaaaagatcaccgacgcgctggagatcatggccgagaactacaagtttaaagagaacctgcaggcgtgcctggaagcccgtcgcgccgcgagtgtcctgaaaagcctgccgttcgaggttaccagcatgaaagacatccaaggtctgccgtgcattaccgacgacgtacgtcctgtgatcgaagagatcatcgaagtaggcgagagcagccgtgttaaagaaatcctcaatgacgagcgctacaaggcctttaagcagttcaccagcgtgttcggtgtgggcgtcaagacctcggaaaagtggtaccgtatgggcctccgtacgcgcgaagaagcaaaggccagtaagagtctgaagctgaacaagatgcagaaggcgggcttcctgtattacgaggatctggcgagcggtgttagtaaagaagaagccgatgccgttctggatatcgtgaaggaaacggtgcgcactgttagtccggatgcgctggtgaccatcgccggcggtttccgccgtggcaaacctatgggccacgacgttgacctgctgatcacgattccgggccgtcctacggatgacgagctgctccacaaagtggttgatctgctcaagaagcaaggtctgctgctgtacggggacatccgtgagcgtacgttcgtggaggggcaactgccaaatcctaaacctgacgccctggacaaccatcagaagtgcttcgccattctcaagctgtaccgtccgaagaccgataacagtgcggttgggacgagtaagaaaagtgacatggctgaggttaaggattggaaagcggttcgtgtggatctggtggtcgctccagatgagcagttcgcctatgcgctgctcggttggacgggcagcggcatgtttcgtcgcgatactcgtcgctacgcggaggaggagcgcgacatgctgctcgacaaccatggtctctacgacctgaaaaagggcatctttctgagtgcggacagcgaagaagagattttcggtcatctggacctggattatctggagccgtgggaacgcaacgcg

SEQ ID NO: 5324 - protein, 394 aa, synthetic construct
  REGION 1..394: note = Variant of terminal deoxynucleotidyl transferase
MHHHHHHGGSGHPEGNTPEKEVPSVIARHVSPYACQRKTTLNNYNKKITDALEIMAENYKFKENLQACLEARRAASVLKSLPFEVTSMKDIQGLPCITDDVRPVIEEIIEVGESSRVKEILNDERYKAFKQFTSVFGVGVKTSEKWYRMGLRTREEAKASKSLKLNKMQKAGFLYYEDLASGVSKEEADAVLDIVKETVRTVSPDALVTIAGGFRRGKPMGHDVDLLITIPGRPTDDELLHKVVDLLKKQGLLLYGDIRERTFVEGQLPNPKPDALDNHQKCFAILKLYRPKTDNSAVGTSKKSDMAEVKDWKAVRVDLVVAPDEQFAYALLGWTGSGMFRRDTRRYAEEERDMLLDNHGLYDLKKGIFLSADSEEEIFGHLDLDYLEPWERNA

SEQ ID NO: 5325 - DNA, 1182 bp, synthetic construct
  misc_feature 1..1182: note = Variant of terminal deoxynucleotidyl transferase
  source 1..1182: mol_type = other DNA
atgcatcaccaccatcatcatgggggttctggtcatccggaaggtaataccccggagaaggaggtgccgagcgttatcgcccgtcatgttagtccgtacgcgtgccagcgcaagaccacgctgaataactacaacaaaaagatcaccgacgcgctggagatcatggccgagaactacaagtttaaagagaacctgcaggcgtgcctggaagcccgtcgcgccgcgagtgtcctgaaaagcctgccgttcgaggttaccagcatgaaagacatccaaggtctgccgtgcattaccgacgacgtacgtcctgtgatcgaagagatcatcgaagtaggcgagagcagccgtgttaaagaaatcctcaatgacgagcgctacaaggcctttaagcagttcaccagcgtgttcggtgtgggcgtcaagacctcggaaaagtggtaccgtatgggcctccgtacgcgcgaagaagcaaaggccagtaagagtctgaagctgaacaagatgcagaaggcgggcttcctgtattacgaggatctggcgagcggtgttagtaaagaagaagccgatgccgttctggatatcgtgaaggaaacggtgcgcactgttagtccggatgcgctggtgaccatcgccggcggtttccgccgtggcaaacctcaaggccacgacgttgacctgctgatcacgattccgggccgtcctacggatgacgagctgctccacaaagtggttgatctgctcaagaagcaaggtctgctgctgtacggggacatccgtgagcgtacgttcgtggaggggcaactgccaaatcctaaacctgacgccctggacaaccatcagaagtgcttcgccattctcaagctgtaccgtccgaaggtagataacagtgcggttgggacgagtaagaaaagtgacatggctgaggttaaggattggaaagcggttcgtgtggatctggtggtcgctccagatgagcagttcgcctatgcgctgctcggttggacgggcagcggcatgtttcgtcgcgatactcgtcgctacgcggaggaggagcgcgacatgctgctcgacaaccatggtctctacgacctgaaaaagggcatctttctgagtgcggacagcgaagaagagattttcggtcatctggacctggattatctggagccgtgggaacgcaacgcg

SEQ ID NO: 5326 - protein, 394 aa, synthetic construct
  REGION 1..394: note = Variant of terminal deoxynucleotidyl transferase
MHHHHHHGGSGHPEGNTPEKEVPSVIARHVSPYACQRKTTLNNYNKKITDALEIMAENYKFKENLQACLEARRAASVLKSLPFEVTSMKDIQGLPCITDDVRPVIEEIIEVGESSRVKEILNDERYKAFKQFTSVFGVGVKTSEKWYRMGLRTREEAKASKSLKLNKMQKAGFLYYEDLASGVSKEEADAVLDIVKETVRTVSPDALVTIAGGFRRGKPQGHDVDLLITIPGRPTDDELLHKVVDLLKKQGLLLYGDIRERTFVEGQLPNPKPDALDNHQKCFAILKLYRPKVDNSAVGTSKKSDMAEVKDWKAVRVDLVVAPDEQFAYALLGWTGSGMFRRDTRRYAEEERDMLLDNHGLYDLKKGIFLSADSEEEIFGHLDLDYLEPWERNA

SEQ ID NO: 5327 - DNA, 1182 bp, synthetic construct
  misc_feature 1..1182: note = Variant of terminal deoxynucleotidyl transferase
  source 1..1182: mol_type = other DNA
atgcatcaccaccatcatcatgggggttctggtcatccggaaggtaataccccggagaaggaggtgccgagcgttatcgcccgtcatgttagtccgtacgcgtgccagcgcaagaccacgctgaataactacaacaaaaagatcaccgacgcgctggagatcatggccgagaactacaagtttaaagagaacctgcaggcgtgcctggaggcccgtcgcgccgcgagtgtcctgaaaagcctgccgttcgaggttaccagcatgaaagacatccaaggtctgccgtgcattaccgacgacgtacgtcctgtgatcgaagagatcatcgaagtaggcgagagcagccgtgttaaagaaatcctcaatgacgagcgctacaaggcctttaagcagttcaccagcgtgttcggtgtgggcgtcaagacctcggaaaagtggtaccgtatgggcctccgtacgcgcgaagaagcaaaggccagtaagagtctgaagctgaacaagatgcagaaggcgggcttcctgtattacgaggatctggcgagcggtgtttcgaaagaagacgccgatgccgttctggatatcgtgaaggaaacggtgcgcactgttagtccggatgcgctggtgaccatcgccggcggtttccgccgtggcaaacctatgggccacgacgttgacctgctgatcacgattccgggccgtcctacggatgacgagctgctccacaaagtggttgatctgctcaagaagcaaggtctgctgctgtacggggacatccgtgagcgtacgttcgtggaggggcaactgccaaatcctaaacctgacgccctggacaaccatcagaagtgcttcgccattctcaagctgtaccgtccgaagaccgataacagtgcggttgggacgagtaagaaaagtgacatggctgaggttaaggattggaaagcggttcgtgtggatctggtggtcgctccagatgagcagttcgcctatgcgctgctcggttggacgggcagcggcatgtttcgtcgcgatactcgtcgctacgcggaggaggagcgcgacatgctgctcgacaaccatggtctctacgacctgaaaaagggcatctttctgagtgcggacagcgaagaagagattttcggtcatctggacctggattacctggagccgtgggaacgcaacgcg

SEQ ID NO: 5328 - protein, 394 aa, synthetic construct
  REGION 1..394: note = Variant of terminal deoxynucleotidyl transferase
MHHHHHHGGSGHPEGNTPEKEVPSVIARHVSPYACQRKTTLNNYNKKITDALEIMAENYKFKENLQACLEARRAASVLKSLPFEVTSMKDIQGLPCITDDVRPVIEEIIEVGESSRVKEILNDERYKAFKQFTSVFGVGVKTSEKWYRMGLRTREEAKASKSLKLNKMQKAGFLYYEDLASGVSKEDADAVLDIVKETVRTVSPDALVTIAGGFRRGKPMGHDVDLLITIPGRPTDDELLHKVVDLLKKQGLLLYGDIRERTFVEGQLPNPKPDALDNHQKCFAILKLYRPKTDNSAVGTSKKSDMAEVKDWKAVRVDLVVAPDEQFAYALLGWTGSGMFRRDTRRYAEEERDMLLDNHGLYDLKKGIFLSADSEEEIFGHLDLDYLEPWERNA

SEQ ID NO: 5329 - DNA, 1182 bp, synthetic construct
  misc_feature 1..1182: note = Variant of terminal deoxynucleotidyl transferase
  source 1..1182: mol_type = other DNA
atgcatcaccaccatcatcatgggggttctggtcatccggaaggtaataccccggagaaggaggtgccgagcgttatcgcccgtcatgttagtccgtacgcgtgccagcgcaagaccacgctgaataactacaacaaaaagatcaccgacgcgctggagatcatggccgagaactacaagtttaaagagaacctgcaggcgtgcctggaagcccgtcgcgccgcgagtgtcctgaaaagcctgccgttcgaggttaccagcatgaaagacatccaaggtctgccgtgcattaccgacgacgtacgtcctgtgatcgaagagatcatcgaagtaggcgagagcagccgtgttaaagaaatcctcaatgacgagcgctacaaggcctttaagcagttcaccagcgtgttcggtgtgggcgtcaagacctcggaaaagtggtaccgtatgggcctccgtacgcgcgaagaagcaaaggccagtaagagtctgaagctgaacaagatgcagaaggcgggcttcctgtattacgaggatctggcgagcggtgttagtaaagaagaagccgatgccgttctggatatcgtgaaggaaacggtgcgcactgttagtccggatgcgctggtgaccatcgccggcggtttccgccgtggcaaacctatgggccacgacgttgacctgctgatcacgattccgggccgtcctacggatgacgagctgctccacaaagtggttgatctgctcaagaagcaaggtctgctgctgtacggggacatccgtgagcgtacgttcgtggaggggcaactgccaaatcctaaacctgacgccctggacaaccatcagaagtgcttcgccattctcaagctgtaccgtccgaagaccgataacagtgcggttgggacgagtaagaaaagtgacatggctgaggttaaggattggaaagcggttcgtgtggatctggtggtcgctccagatgagcagttcgcctatgcgctgctcggttggacgggcagcggcatgtttcgtcgcgatactcgtcgctacgcggagcgcgagcgcgacatgctgctcgacaaccatggtctctacgacctgaaaaagggcatctttctgagtgcggacagcgaagaagagattttcggtcatctggacctggattatctggagccgtgggaacgcaacgcg

SEQ ID NO: 5330 - protein, 394 aa, synthetic construct
  REGION 1..394: note = Variant of terminal deoxynucleotidyl transferase
MHHHHHHGGSGHPEGNTPEKEVPSVIARHVSPYACQRKTTLNNYNKKITDALEIMAENYKFKENLQACLEARRAASVLKSLPFEVTSMKDIQGLPCITDDVRPVIEEIIEVGESSRVKEILNDERYKAFKQFTSVFGVGVKTSEKWYRMGLRTREEAKASKSLKLNKMQKAGFLYYEDLASGVSKEEADAVLDIVKETVRTVSPDALVTIAGGFRRGKPMGHDVDLLITIPGRPTDDELLHKVVDLLKKQGLLLYGDIRERTFVEGQLPNPKPDALDNHQKCFAILKLYRPKTDNSAVGTSKKSDMAEVKDWKAVRVDLVVAPDEQFAYALLGWTGSGMFRRDTRRYAERERDMLLDNHGLYDLKKGIFLSADSEEEIFGHLDLDYLEPWERNA

SEQ ID NO: 5331 - DNA, 1182 bp, synthetic construct
  misc_feature 1..1182: note = Variant of terminal deoxynucleotidyl transferase
  source 1..1182: mol_type = other DNA
atgcatcaccaccatcatcatgggggttctggtcatccggaaggtaataccccggagaaggaggtgccgagcgttatcgcccgtcatgttagtccgtacgcgtgccagcgcaagaccacgctgaataactacaacaaaaagatcaccgacgcgctggagatcatggccgagaactacaagtttaaagagaacctgcaggcgtgcctggaggcccgtcgcgccgcgagtgtcctgaaaagcctgccgttcgaggttaccagcatgaaagacatccaaggtctgccgtgcattaccgacgacgtacgtcctgtgatcgaagagatcatcgaagtaggcgagagcagccgtgttaaagaaatcctcaatgacgagcgctacaaggcctttaagcagttcaccagcgtgttcggtgtgggcgtcaagacctcggaaaagtggtaccgtatgggcctccgtacgcgcgaagaagcaaaggccagtaagagtctgaagctgaacaagatgcagaaggcgggcttcctgtattacgaggatctggcgagcggtgttacgaaagaagaagccgatgccgttctggatatcgtgaaggaaacggtgcgcactgttagtccggatgcgctggtgaccatcgccggcggtttccgccgtggcaaacctatgggccacgacgttgacctgctgatcacgattccgggccgtcctacggatgacgagctgctccacaaagtggttgatctgctcaagaagcaaggtctgctgctgtacggggacatccgtgagcgtacgttcgtggaggggcaactgccaaatcctaaacctgacgccctggacaaccatcagaagtgcttcgccattctcaagctgtaccgtccgaagaccgataacagtgcggttgggacgagtaagaaaagtgacatggctgaggttaaggattggaaagcggttcgtgtggatctggtggtcgctccagatgagcagttcgcctatgcgctgctcggttggacgggcagcggcatgtttcgtcgcgatactcgtcgctacgcggaggaagagcgcgacatgctgctcgacaaccatggtctctacgacctgaaaaagggcatctttctgagtgcggacagcgaagaagagattttcggtcatctggacctggattatctggagccgtgggaacgcaacgcg

SEQ ID NO: 5332 - protein, 394 aa, synthetic construct
  REGION 1..394: note = Variant of terminal deoxynucleotidyl transferase
MHHHHHHGGSGHPEGNTPEKEVPSVIARHVSPYACQRKTTLNNYNKKITDALEIMAENYKFKENLQACLEARRAASVLKSLPFEVTSMKDIQGLPCITDDVRPVIEEIIEVGESSRVKEILNDERYKAFKQFTSVFGVGVKTSEKWYRMGLRTREEAKASKSLKLNKMQKAGFLYYEDLASGVTKEEADAVLDIVKETVRTVSPDALVTIAGGFRRGKPMGHDVDLLITIPGRPTDDELLHKVVDLLKKQGLLLYGDIRERTFVEGQLPNPKPDALDNHQKCFAILKLYRPKTDNSAVGTSKKSDMAEVKDWKAVRVDLVVAPDEQFAYALLGWTGSGMFRRDTRRYAEEERDMLLDNHGLYDLKKGIFLSADSEEEIFGHLDLDYLEPWERNA

SEQ ID NO: 5333 - DNA, 1182 bp, synthetic construct
  misc_feature 1..1182: note = Variant of terminal deoxynucleotidyl transferase
  source 1..1182: mol_type = other DNA
atgcatcaccaccatcatcatgggggttctggtcatccggaaggtaataccccggagaaggaggtgccgagcgttatcgcccgtcatgttagtccgtacgcgtgccagcgcaagaccacgctgaataactacaacaaaaagatcaccgacgcgctggagatcatggccgagaactacaagtttaaagagaacctgcaggcgtgcctggaagcccgtcgcgccgcgagtgtcctgaaaagcctgccgttcgaggttaccagcatgaaagacatccaaggtctgccgtgcattaccgacgacgtacgtcctgtgatcgaagagatcatcgaagtaggcgagagcagccgtgttaaagaaatcctcaatgacgagcgctacaaggcctttaagcagttcaccagcgtgttcggtgtgggcgtcaagacctcggaaaagtggtaccgtatgggcctccgtacgcgcgaagaagcaaaggccagtaagagtctgaagctgaacaagatgcagaaggcgggcttcctgtattacgaggatctggcgagcggtgttagtaaagaagaagccgatgccgttctggatatcgtgaaggaaacggtgcgcactgttagtccggatgcgctggtgaccatcgccggcggtttccgccgtggcaaacctatgggccacgacgttgacctgctgatcacgattccgggccgtcctacggatgacgagctgctccacaaagtggttgatctgctcaagaagcaaggtctgctgctgtacggggacatccgtgagcgtacgttcgtggaggggcaactgccaaatcctaaacctgacgccctggacaaccatcagaagtgcttcgccattctcaagctgtaccgtccgaaggtggataacagtgcggttgggacgagtaagaaaagtgacatggctgaggttaaggattggaaagcggttcgtgtggatctggtggtcgctccagatgagcagttcgcctatgcgctgctcggttggacgggcagcggcatgtttcgtcgcgatactcgtcgctacgcggaggaggagcgcgacatgctgctcgacaaccatggtctctacgacctgaaaaagggcatctttctgagtgcggacagcgaagaagagattttcggtcatctggacctggatttcctggagccgtgggaacgcaacgcg

SEQ ID NO: 5334 - protein, 394 aa, synthetic construct
  REGION 1..394: note = Variant of terminal deoxynucleotidyl transferase
MHHHHHHGGSGHPEGNTPEKEVPSVIARHVSPYACQRKTTLNNYNKKITDALEIMAENYKFKENLQACLEARRAASVLKSLPFEVTSMKDIQGLPCITDDVRPVIEEIIEVGESSRVKEILNDERYKAFKQFTSVFGVGVKTSEKWYRMGLRTREEAKASKSLKLNKMQKAGFLYYEDLASGVSKEEADAVLDIVKETVRTVSPDALVTIAGGFRRGKPMGHDVDLLITIPGRPTDDELLHKVVDLLKKQGLLLYGDIRERTFVEGQLPNPKPDALDNHQKCFAILKLYRPKVDNSAVGTSKKSDMAEVKDWKAVRVDLVVAPDEQFAYALLGWTGSGMFRRDTRRYAEEERDMLLDNHGLYDLKKGIFLSADSEEEIFGHLDLDFLEPWERNA

SEQ ID NO: 5335 - DNA, 1182 bp, synthetic construct
  misc_feature 1..1182: note = Variant of terminal deoxynucleotidyl transferase
  source 1..1182: mol_type = other DNA
atgcatcaccaccatcatcatgggggttctggtcatccggaaggtaataccccggagaaggaggtgccgagcgttatcgcccgtcatgttagtccgtacgcgtgccagcgcaagaccacgctgaataactacaacaaaaagatcaccgacgcgctggagatcatggccgagaactacaagtttaaagagaacctgcaggcgtgcctggaagcccgtcgcgccgcgagtgtcctgaaaagcctgccgttcgaggttaccagcatgaaagacatccaaggtctgccgtgcattaccgacgacgtacgtcctgtgatcgaagagatcatcgaagtaggcgagagcagccgtgttaaagaaatcctcaatgacgagcgctacaaggcctttaagcagttcaccagcgtgttcggtgtgggcgtcaagacctcggaaaagtggtaccgtatgggcctccgtacgctggaagaagcaaaggccagtaagagtctgaagctgaacaagatgcagaaggcgggcttcctgtattacgaggatctggcgagcggtgttagtaaagaagaagccgatgccgttctggatatcgtgaaggaaacggtgcgcactgttagtccggatgcgctggtgaccatcgccggcggtttccgccgtggcaaacctatgggccacgacgttgacctgctgatcacgattccgggccgtcctacggatgacgagctgctccacaaagtggttgatctgctcaagaagcaaggtctgctgctgtacggggacatccgtgagcgtacgttcgtggaggggcaactgccaaatcctaaacctgacgccctggacaaccatcagaagtgcttcgccattctcaagctgtaccgtccgaaggtagataacagtgcggttgggacgagtaagaaaagtgacatggctgaggttaaggattggaaagcggttcgtgtggatctggtggtcgctccagatgagcagttcgcctatgcgctgctcggttggacgggcagcggcatgtttcgtcgcgatactcgtcgctacgcggaggaagagcgcgacatgctgctcgacaaccatggtctctacgacctgaaaaagggcatctttctgagtgcggacagcgaagaagagattttcggtcatctggacctggatttcctggagccgtgggaacgcaacgcg

SEQ ID NO: 5336 - protein, 394 aa, synthetic construct
  REGION 1..394: note = Variant of terminal deoxynucleotidyl transferase
MHHHHHHGGSGHPEGNTPEKEVPSVIARHVSPYACQRKTTLNNYNKKITDALEIMAENYKFKENLQACLEARRAASVLKSLPFEVTSMKDIQGLPCITDDVRPVIEEIIEVGESSRVKEILNDERYKAFKQFTSVFGVGVKTSEKWYRMGLRTLEEAKASKSLKLNKMQKAGFLYYEDLASGVSKEEADAVLDIVKETVRTVSPDALVTIAGGFRRGKPMGHDVDLLITIPGRPTDDELLHKVVDLLKKQGLLLYGDIRERTFVEGQLPNPKPDALDNHQKCFAILKLYRPKVDNSAVGTSKKSDMAEVKDWKAVRVDLVVAPDEQFAYALLGWTGSGMFRRDTRRYAEEERDMLLDNHGLYDLKKGIFLSADSEEEIFGHLDLDFLEPWERNA

SEQ ID NO: 5337 - DNA, 1182 bp, synthetic construct
  misc_feature 1..1182: note = Variant of terminal deoxynucleotidyl transferase
  source 1..1182: mol_type = other DNA
atgcatcaccaccatcatcatgggggttctggtcatccggaaggtaataccccggagaaggaggtgccgagcgttatcgcccgtcatgttagtccgtacgcgtgccagcgcaagaccacgctgaataactacaacaaaaagatcaccgacgcgctggagatcatggccgagaactacaagtttaaagagaacctgcaggcgtgcctggaggcccgtcgcgccgcgagtgtcctgaaaagcctgccgttcgaggttaccagcatgaaagacatccaaggtctgccgtgcattaccgacgacgtacgtcctgtgatcgaagagatcatcgaagtaggcgagagcagccgtgttaaagaaatcctcaatgacgagcgctacaaggcctttaagcagttcaccagcgtgttcggtgtgggcgtcaagacctcggaaaagtggtaccgtatgggcctccgtacgcgcgaagaagcaaaggccagtaagagtctgaagctgaacaagatgcagaaggcgggcttcctgtattacgaggatctggcgagcggtgttagtaaagaagaagccgatgccgttctggatatcgtgaaggaaacggtgcgcactgttagtccggatgcgctggtgaccatcgccggcggtttccgccgtggcaaacctatgggccacgacgttgacctgctgatcacgattccgggccgtcctacggatgacgagctgctccacaaagtggttgatctgctcaagaagcaaggtctgctgctgtacggggacatccgtgagcgtacgttcgtggaggggcaactgccaaatcctaaacctgacgccctggacaaccatcagaagtgcttcgccattctcaagctgtaccgtccgaaggtggataacagtgcggttgggacgagtaagaaaagtgacatggctgaggttaaggattggaaagcggttcgtgtggatctggtggtcgctccagatgagcagttcgcctatgcgaagctcggttggacgggcagcggcatgtttcgtcgcgatactcgtcgctacgcggaggaagagcgcgacatgctgctcgacaaccatggtctctacgacctgaaaaagggcatctttctgagtgcggacagcgaagaagagattttcggtcatctggacctggattatctggagccgtgggaacgcaacgcg

SEQ ID NO: 5338 - protein, 394 aa, synthetic construct
  REGION 1..394: note = Variant of terminal deoxynucleotidyl transferase
MHHHHHHGGSGHPEGNTPEKEVPSVIARHVSPYACQRKTTLNNYNKKITDALEIMAENYKFKENLQACLEARRAASVLKSLPFEVTSMKDIQGLPCITDDVRPVIEEIIEVGESSRVKEILNDERYKAFKQFTSVFGVGVKTSEKWYRMGLRTREEAKASKSLKLNKMQKAGFLYYEDLASGVSKEEADAVLDIVKETVRTVSPDALVTIAGGFRRGKPMGHDVDLLITIPGRPTDDELLHKVVDLLKKQGLLLYGDIRERTFVEGQLPNPKPDALDNHQKCFAILKLYRPKVDNSAVGTSKKSDMAEVKDWKAVRVDLVVAPDEQFAYAKLGWTGSGMFRRDTRRYAEEERDMLLDNHGLYDLKKGIFLSADSEEEIFGHLDLDYLEPWERNA

SEQ ID NO: 5339 - DNA, 1182 bp, synthetic construct
  misc_feature 1..1182: note = Variant of terminal deoxynucleotidyl transferase
  source 1..1182: mol_type = other DNA
atgcatcaccaccatcatcatgggggttctggtcatccggaaggtaataccccggagaaggaggtgccgagcgttatcgcccgtcatgttagtccgtacgcgtgccagcgcaagaccacgctgaataactacaacaaaaagatcaccgacgcgctggagatcatggccgagaactacaagtttaaagagaacctgcaggcgtgcctggaggcccgtcgcgccgcgagtgtcctgaaaagcctgccgttcgaggttaccagcatgaaagacatccaaggtctgccgtgcattaccgacgacgtacgtcctgtgatcgaagagatcatcgaagtaggcgagagcagccgtgttaaagaaatcctcaatgacgagcgctacaaggcctttaagcagttcaccagcgtgttcggtgtgggcgtcaagacctcggaaaagtggtaccgtatgggcctccgtacgcgcgaagaagcaaaggccagtaagagtctgaagctgaacaagatgcagaaggcgggcttcctgtattacgaggatctggcgagcggtgttagtaaagaagaagccgatgccgttctggatatcgtgaaggaaacggtgcgcactgttagtccggatgcgctggtgaccatcgccggcggtttccgccgtggcaaacctatgggccacgacgttgacctgctgatcacgattccgggccgtcctacggatgacgagctgctcagtaaagtggttgatctgctcaagaagcaaggtctgctgctgtacggggacatccgtgagcgtacgttcgtggaggggcaactgccaaatcctaaacctgacgccctggacaaccatcagaagtgcttcgccattctcaagctgtaccgtccgaaggtggataacagtgcggttgggacgagtaagaaaagtgacatggctgaggttaaggattggaaagcggttcgtgtggatctggtggtcgctccagatgagcagttcgcctatgcgctgctcggttggacgggcagcggcatgtttcgtcgcgatactcgtcgctacgcggaggaagagcgcgacatgctgctcgacaaccatggtctctacgacctgaaaaagggcatctttctgagtgcggacagcgaagaagagattttcggtcatctggacctggattatctggagccgtgggaacgcaacgcg

SEQ ID NO: 5340 - protein, 394 aa, synthetic construct
  REGION 1..394: note = Variant of terminal deoxynucleotidyl transferase
MHHHHHHGGSGHPEGNTPEKEVPSVIARHVSPYACQRKTTLNNYNKKITDALEIMAENYKFKENLQACLEARRAASVLKSLPFEVTSMKDIQGLPCITDDVRPVIEEIIEVGESSRVKEILNDERYKAFKQFTSVFGVGVKTSEKWYRMGLRTREEAKASKSLKLNKMQKAGFLYYEDLASGVSKEEADAVLDIVKETVRTVSPDALVTIAGGFRRGKPMGHDVDLLITIPGRPTDDELLSKVVDLLKKQGLLLYGDIRERTFVEGQLPNPKPDALDNHQKCFAILKLYRPKVDNSAVGTSKKSDMAEVKDWKAVRVDLVVAPDEQFAYALLGWTGSGMFRRDTRRYAEEERDMLLDNHGLYDLKKGIFLSADSEEEIFGHLDLDYLEPWERNA

SEQ ID NO: 5341 - DNA, 1182 bp, synthetic construct
  misc_feature 1..1182: note = Variant of terminal deoxynucleotidyl transferase
  source 1..1182: mol_type = other DNA
atgcatcaccaccatcatcatgggggttctggtcatccggaaggtaataccccggagaaggaggtgccgagcgttatcgcccgtcatgttagtccgtacgcgtgccagcgcaagaccacgctgaataactacaacaaaaagatcaccgacgcgctggagatcatggccgagaactacaagtttaaagagaacctgcaggcgtgcctggaggcccgtcgcgccgcgagtgtcctgaaaagcctgccgttcgaggttaccagcatgaaagacatccaaggtctgccgtgcattaccgacgacgtacgtcctgtgatcgaagagatcatcgaagtaggcgagagcagccgtgttaaagaaatcctcaatgacgagcgctacaaggcctttaagcagttcaccagcgtgttcggtgtgggcgtcaagacctcggaaaagtggtaccgtatgggcctccgtacgcgcgaagaagcaaaggccagtaagagtctgaagctgaacaagatgcagaaggcgggcttcctgtattacgaggatctggcgagcggtgttagtaaagaagaagccgatgccgttctggatatcgtgaaggaaacggtgcgcactgttagtccggatgcgctggtgaccatcgccggcggtttccgccgtggcaaacctatgggccacgacgttgacctgctgatcacgattccgggccgtcctacggatgacgagctgctccggaaagtggttgatctgctcaagaagcaaggtctgctgctgtacggggacatccgtgagcgtacgttcgtggaggggcaactgccaaatcctaaacctgacgccctggacaaccatcagaagtgcttcgccattctcaagctgtaccgtccgaaggtggataacagtgcggttgggacgagtaagaaaagtgacatggctgaggttaaggattggaaagcggttcgtgtggatctggtggtcgctccagatgagcagttcgcctatgcgctgctcggttggacgggcagcggcatgtttcgtcgcgatactcgtcgctacgcggaggaagagcgcgacatgctgctcgacaaccatggtctctacgacctgaaaaagggcatctttctgagtgcggacagcgaagaagagattttcggtcatctggacctggattatctggagccgtgggaacgcaacgcg

SEQ ID NO: 5342 - protein, 394 aa, synthetic construct
  REGION 1..394: note = Variant of terminal deoxynucleotidyl transferase
MHHHHHHGGSGHPEGNTPEKEVPSVIARHVSPYACQRKTTLNNYNKKITDALEIMAENYKFKENLQACLEARRAASVLKSLPFEVTSMKDIQGLPCITDDVRPVIEEIIEVGESSRVKEILNDERYKAFKQFTSVFGVGVKTSEKWYRMGLRTREEAKASKSLKLNKMQKAGFLYYEDLASGVSKEEADAVLDIVKETVRTVSPDALVTIAGGFRRGKPMGHDVDLLITIPGRPTDDELLRKVVDLLKKQGLLLYGDIRERTFVEGQLPNPKPDALDNHQKCFAILKLYRPKVDNSAVGTSKKSDMAEVKDWKAVRVDLVVAPDEQFAYALLGWTGSGMFRRDTRRYAEEERDMLLDNHGLYDLKKGIFLSADSEEEIFGHLDLDYLEPWERNA

SEQ ID NO: 5343 - DNA, 1182 bp, synthetic construct
  misc_feature 1..1182: note = Variant of terminal deoxynucleotidyl transferase
  source 1..1182: mol_type = other DNA
atgcatcaccaccatcatcatgggggttctggtcatccggaaggtaataccccggagaaggaggtgccgagcgttatcgcccgtcatgttagtccgtacgcgtgccagcgcaagaccacgctgaataactacaacaaaaagatcaccgacgcgctggagatcatggccgagaactacaagtttaaagagaacctgcaggcgtgcctggaggcccgtcgcgccgcgagtgtcctgaaaagcctgccgttcgaggttaccagcatgaaagacatccaaggtctgccgtgcattaccgacgacgtacgtcctgtgatcgaagagatcatcgaagtaggcgagagcagccgtgttaaagaaatcctcaatgacgagcgctacaaggcctttaagcagttcaccagcgtgttcggtgtgggcgtcaagacctcggaaaagtggtaccgtatgggcctccgtacgcgcgaagaagcaaaggccgttaagagtctgaagctgaacaagatgcagaaggcgggcttcctgtattacgaggatctggcgagcggtgttagtaaagaagaagccgatgccgttctggatatcgtgaaggaaacggtgcgcactgttagtccggatgcgctggtgaccatcgccggcggtttccgccgtggcaaacctatgggccacgacgttgacctgctgatcacgattccgggccgtcctacggatgacgagctgctccacaaagtggttgatctgctcaagaagcaaggtctgctgctgtacggggacatccgtgagcgtacgttcgtggaggggcaactgccaaatcctaaacctgacgccctggacaaccatcagaagtgcttcgccattctcaagctgtaccgtccgaaggtggataacagtgcggttgggacgagtaagaaaagtgacatggctgaggttaaggattggaaagcggttcgtgtggatctggtggtcgctccagatgagcagttcgcctatgcgctgctcggttggacgggcagcggcatgtttcgtcgcgatactcgtcgctacgcggaggaagagcgcgacatgctgctcgacaaccatggtctctacgacctgaaaaagggcatctttctgagtgcggacagcgaagaagagattttcggtcatctggacctggattatctggagccgtgggaacgcaacgcg

SEQ ID NO: 5344 - protein, 394 aa, synthetic construct
  REGION 1..394: note = Variant of terminal deoxynucleotidyl transferase
MHHHHHHGGSGHPEGNTPEKEVPSVIARHVSPYACQRKTTLNNYNKKITDALEIMAENYKFKENLQACLEARRAASVLKSLPFEVTSMKDIQGLPCITDDVRPVIEEIIEVGESSRVKEILNDERYKAFKQFTSVFGVGVKTSEKWYRMGLRTREEAKAVKSLKLNKMQKAGFLYYEDLASGVSKEEADAVLDIVKETVRTVSPDALVTIAGGFRRGKPMGHDVDLLITIPGRPTDDELLHKVVDLLKKQGLLLYGDIRERTFVEGQLPNPKPDALDNHQKCFAILKLYRPKVDNSAVGTSKKSDMAEVKDWKAVRVDLVVAPDEQFAYALLGWTGSGMFRRDTRRYAEEERDMLLDNHGLYDLKKGIFLSADSEEEIFGHLDLDYLEPWERNA

SEQ ID NO: 5345 - DNA, 1182 bp, synthetic construct
  misc_feature 1..1182: note = Variant of terminal deoxynucleotidyl transferase
  source 1..1182: mol_type = other DNA
atgcatcaccaccatcatcatgggggttctggtcatccggaaggtaataccccggagaaggaggtgccgagcgttatcgcccgtcatgttagtccgtacgcgtgccagcgcaagaccacgctgaataactacaacaaaaagatcaccgacgcgctggagatcatggccgagaactacaagtttaaagagaacctgcaggcgtgcctggaggcccgtcgcgccgcgagtgtcctgaaaagcctgccgttcgaggttaccagcatgaaagacatccaaggtctgccgtgcattaccgacgacgtacgtcctgtgatcgaagagatcatcgaagtaggcgagagcagccgtgttaaagaaatcctcaatgacgagcgctacaaggcctttaagcagttcaccagcgtgttcggtgtgggcgtcaagacctcggaaaagtggtaccgtatgggcctccgtacgcgcgaagaagcaaaggccagtaagagtctgaagctgaacaagatgcagaaggcgggcttcctgtattacgaggatctggcgagcggtgttagtaaagaagaagccgatgccgttctggatatcgtgaaggaaacggtgcgcactgttagtccggatgcgctggtgaccatcgccggcggtttccgccgtggcaaacctatgggccacgacgttgacctgctgatcacgattccgggccgtcctacggatgacgagctgctccacaaagtggttgatctgctcaagaagcaaggtctgctgctgtacggggacatccgtgagcgtacgttcgtggaggggcaactgccaaatcctaaacctgacgccctggacaaccatcagaagtgcttcgccattctcaagctgtaccgtccgaaggtggataacagtgcggttgggacgagtaagaaaagtgacatggctgaggttaaggattggaaagcggttcgtgtggatctggtggtcgctccagatgagcagttcgcctatgcgctgctcggttggacgggcagcggcatgtttcgtcgcgatactcgtcgctacgcggaggaagagcgcgacatgctgctcgacaaccatggtctctacgacctgaaaaagggccagtttctgagtgcggacagcgaagaagagattttcggtcatctggacctggattatctggagccgtgggaacgcaacgcg

SEQ ID NO: 5346 - protein, 394 aa, synthetic construct
  REGION 1..394: note = Variant of terminal deoxynucleotidyl transferase
MHHHHHHGGSGHPEGNTPEKEVPSVIARHVSPYACQRKTTLNNYNKKITDALEIMAENYKFKENLQACLEARRAASVLKSLPFEVTSMKDIQGLPCITDDVRPVIEEIIEVGESSRVKEILNDERYKAFKQFTSVFGVGVKTSEKWYRMGLRTREEAKASKSLKLNKMQKAGFLYYEDLASGVSKEEADAVLDIVKETVRTVSPDALVTIAGGFRRGKPMGHDVDLLITIPGRPTDDELLHKVVDLLKKQGLLLYGDIRERTFVEGQLPNPKPDALDNHQKCFAILKLYRPKVDNSAVGTSKKSDMAEVKDWKAVRVDLVVAPDEQFAYALLGWTGSGMFRRDTRRYAEEERDMLLDNHGLYDLKKGQFLSADSEEEIFGHLDLDYLEPWERNA

SEQ ID NO: 5347 - DNA, 1182 bp, synthetic construct
  misc_feature 1..1182: note = Variant of terminal deoxynucleotidyl transferase
  source 1..1182: mol_type = other DNA
atgcatcaccaccatcatcatgggggttctggtcatccggaaggtaataccccggagaaggaggtgccgagcgttatcgcccgtcatgttagtccgtacgcgtgccagcgcaagaccacgctgaataactacaacaaaaagatcaccgacgcgctggagatcatggccgagaactacaagtttaaagagaacctgcaggcgtgcctggaggcccgtcgcgccgcgagtgtcctgaaaagcctgccgttcgaggttaccagcatgaaagacatccaaggtctgccgtgcattaccgacgacgtacgtcctgtgatcgaagagatcatcgaagtaggcgagagcagccgtgttaaagaaatcctcaatgacgagcgctacaaggcctttaagcagttcaccagcgtgttcggtgtgggcgtcaagacctcggaaaagtggtaccgtatgggcctccgtacgcgcgaagaagcaaaggccagtaagagtctgaagctgaacaagatgcagaaggcgggcttcctgtattacgaggatctggcgagcggtgttagtaaagaagaagccgatgccgttctggatatcgtgaaggaaacggtgcgcactgttagtccggatgcgctggtgaccatcgccggcggtttccgccgtggcaaacctatgggccacgacgttgacctgctgatcacgattccgggccgtcctacggatgacgagctgctccacaaagtggttgatctgctcaagaagcaaggtctggtgctgtacggggacatccgtgagcgtacgttcgtggaggggcaactgccaaatcctaaacctgacgccctggacaaccatcagaagtgcttcgccattctcaagctgtaccgtccgaaggtggataacagtgcggttgggacgagtaagaaaagtgacatggctgaggttaaggattggaaagcggttcgtgtggatctggtggtcgctccagatgagcagttcgcctatgcgctgctcggttggacgggcagcggcatgtttcgtcgcgatactcgtcgctacgcggaggaagagcgcgacatgctgctcgacaaccatggtctctacgacctgaaaaagggcatctttctgagtgcggacagcgaagaagagattttcggtcatctggacctggattatctggagccgtgggaacgcaacgcg

SEQ ID NO: 5348 - protein, 394 aa, synthetic construct
  REGION 1..394: note = Variant of terminal deoxynucleotidyl transferase
MHHHHHHGGSGHPEGNTPEKEVPSVIARHVSPYACQRKTTLNNYNKKITDALEIMAENYKFKENLQACLEARRAASVLKSLPFEVTSMKDIQGLPCITDDVRPVIEEIIEVGESSRVKEILNDERYKAFKQFTSVFGVGVKTSEKWYRMGLRTREEAKASKSLKLNKMQKAGFLYYEDLASGVSKEEADAVLDIVKETVRTVSPDALVTIAGGFRRGKPMGHDVDLLITIPGRPTDDELLHKVVDLLKKQGLVLYGDIRERTFVEGQLPNPKPDALDNHQKCFAILKLYRPKVDNSAVGTSKKSDMAEVKDWKAVRVDLVVAPDEQFAYALLGWTGSGMFRRDTRRYAEEERDMLLDNHGLYDLKKGIFLSADSEEEIFGHLDLDYLEPWERNA

SEQ ID NO: 5349 - DNA, 1182 bp, synthetic construct
  misc_feature 1..1182: note = Variant of terminal deoxynucleotidyl transferase
  source 1..1182: mol_type = other DNA
atgcatcaccaccatcatcatgggggttctggtcatccggaaggtaataccccggagaaggaggtgccgagcgttatcgcccgtcatgttagtccgtacgcgtgccagcgcaagaccacgctgaataactacaacaaaaagatcaccgacgcgctggagatcatggccgagaactacaagtttaaagagaacctgcaggcgtgcctggaggcccgtcgcgccgcgagtgtcctgaaaagcctgccgttcgaggttaccagcatgaaagacatccaaggtctgccgtgcattaccgacgacgtacgtcctgtgatcgaagagatcatcgaagtaggcgagagcagccgtgttaaagaaatcctcaatgacgagcgctacaaggcctttaagcagttcaccagcgtgttcggtgtgggcgtcaagacctcggaaaagtggtaccgtatgggcctccgtacgcgcgaagaagcaaaggccagtaagagtctgaagctgaacaagatgcagaaggcgggcttcctgtattacgaggatctggcgagcggtgttagtaaagaagaagccgatgccgttctggatatcgtgaaggaaacggtgcgcactgttagtccggatgcgctggtgacctgtgccggcggtttccgccgtggcaaacctatgggccacgacgttgacctgctgatcacgattccgggccgtcctacggatgacgagctgctccacaaagtggttgatctgctcaagaagcaaggtctgctgctgtacggggacatccgtgagcgtacgttcgtggaggggcaactgccaaatcctaaacctgacgccctggacaaccatcagaagtgcttcgccattctcaagctgtaccgtccgaaggtggataacagtgcggttgggacgagtaagaaaagtgacatggctgaggttaaggattggaaagcggttcgtgtggatctggtggtcgctccagatgagcagttcgcctatgcgctgctcggttggacgggcagcggcatgtttcgtcgcgatactcgtcgctacgcggaggaagagcgcgacatgctgctcgacaaccatggtctctacgacctgaaaaagggcatctttctgagtgcggacagcgaagaagagattttcggtcatctggacctggattatctggagccgtgggaacgcaacgcg

SEQ ID NO: 5350 - protein, 394 aa, synthetic construct
  REGION 1..394: note = Variant of terminal deoxynucleotidyl transferase
MHHHHHHGGSGHPEGNTPEKEVPSVIARHVSPYACQRKTTLNNYNKKITDALEIMAENYKFKENLQACLEARRAASVLKSLPFEVTSMKDIQGLPCITDDVRPVIEEIIEVGESSRVKEILNDERYKAFKQFTSVFGVGVKTSEKWYRMGLRTREEAKASKSLKLNKMQKAGFLYYEDLASGVSKEEADAVLDIVKETVRTVSPDALVTCAGGFRRGKPMGHDVDLLITIPGRPTDDELLHKVVDLLKKQGLLLYGDIRERTFVEGQLPNPKPDALDNHQKCFAILKLYRPKVDNSAVGTSKKSDMAEVKDWKAVRVDLVVAPDEQFAYALLGWTGSGMFRRDTRRYAEEERDMLLDNHGLYDLKKGIFLSADSEEEIFGHLDLDYLEPWERNA

SEQ ID NO: 5351 - DNA, 1182 bp, synthetic construct
  misc_feature 1..1182: note = Variant of terminal deoxynucleotidyl transferase
  source 1..1182: mol_type = other DNA
atgcatcaccaccatcatcatgggggttctggtcatccggaaggtaataccccggagaaggaggtgccgagcgttatcgcccgtcatgttagtccgtacgcgtgccagcgcaagaccacgctgaataactacaacaaaaagatcaccgacgcgctggagatcatggccgagaactacaagtttaaagagaacctgcaggcgtgcctggaggcccgtcgcgccgcgagtgtcctgaaaagcctgccgttcgaggttaccagcatgaaagacatccaaggtctgccgtgcattaccgacgacgtacgtcctgtgatcgaagagatcatcgaagtaggcgagagcagccgtgttaaagaaatcctcaatgacgagcgctacaaggcctttaagcagttcaccagcgtgttcggtgtgggcgtcaagacctcggaaaagtggtaccgtatgggcctccgtacgcgcgaagaagcaaaggccagtaagagtctgaagctgaacaagatgcagaaggcgggcttcctgtattacgaggatctggcgagcggtgttagtaaagaagaagccgatgccgttctggatatcgtgaaggaaacggtgacgactgttagtccggatgcgctggtgaccatcgccggcggtttccgccgtggcaaacctatgggccacgacgttgacctgctgatcacgattccgggccgtcctacggatgacgagctgctccacaaagtggttgatctgctcaagaagcaaggtctgctgctgtacggggacatccgtgagcgtacgttcgtggaggggcaactgccaaatcctaaacctgacgccctggacaaccatcagaagtgcttcgccattctcaagctgtaccgtccgaaggtggataacagtgcggttgggacgagtaagaaaagtgacatggctgaggttaaggattggaaagcggttcgtgtggatctggtggtcgctccagatgagcagttcgcctatgcgctgctcggttggacgggcagcggcatgtttcgtcgcgatactcgtcgctacgcggaggaagagcgcgacatgctgctcgacaaccatggtctctacgacctgaaaaagggcatctttctgagtgcggacagcgaagaagagattttcggtcatctggacctggattatctggagccgtgggaacgcaacgcg

SEQ ID NO: 5352 - protein, 394 aa, synthetic construct
  REGION 1..394: note = Variant of terminal deoxynucleotidyl transferase
MHHHHHHGGSGHPEGNTPEKEVPSVIARHVSPYACQRKTTLNNYNKKITDALEIMAENYKFKENLQACLEARRAASVLKSLPFEVTSMKDIQGLPCITDDVRPVIEEIIEVGESSRVKEILNDERYKAFKQFTSVFGVGVKTSEKWYRMGLRTREEAKASKSLKLNKMQKAGFLYYEDLASGVSKEEADAVLDIVKETVTTVSPDALVTIAGGFRRGKPMGHDVDLLITIPGRPTDDELLHKVVDLLKKQGLLLYGDIRERTFVEGQLPNPKPDALDNHQKCFAILKLYRPKVDNSAVGTSKKSDMAEVKDWKAVRVDLVVAPDEQFAYALLGWTGSGMFRRDTRRYAEEERDMLLDNHGLYDLKKGIFLSADSEEEIFGHLDLDYLEPWERNA

SEQ ID NO: 5353 - DNA, 1182 bp, synthetic construct
  misc_feature 1..1182: note = Variant of terminal deoxynucleotidyl transferase
  source 1..1182: mol_type = other DNA
atgcatcaccaccatcatcatgggggttctggtcatccggaaggtaataccccggagaaggaggtgccgagcgttatcgcccgtcatgttagtccgtacgcgtgccagcgcaagaccacgctgaataactacaacaaaaagatcaccgacgcgctggagatcatggccgagaactacaagtttaaagagaacctgcaggcgtgcctggaggcccgtcgcgccgcgagtgtcctgaaaagcctgccgttcgaggttaccagcatgaaagacatccaaggtctgccgtgcattaccgacgacgtacgtcctgtgatcgaagagatcatcgaagtaggcgagagcagccgtgttaaagaaatcctcaatgacgagcgctacaaggcctttaagcagttcaccagcgtgttcggtgtgggcgtcaagacctcggaaaagtggtaccgtatgggcctccgtacgcgcgaagaagcaaaggccagtaagagtctgaagctgaacaagatgcagaaggcgggcttcctgtattacgaggatctggcgagcggtgttagtaaagttgaagccgatgccgttctggatatcgtgaaggaaacggtgcgcactgttagtccggatgcgctggtgaccatcgccggcggtttccgccgtggcaaacctatgggccacgacgttgacctgctgatcacgattccgggccgtcctacggatgacgagctgctccacaaagtggttgatctgctcaagaagcaaggtctgctgctgtacggggacatccgtgagcgtacgttcgtggaggggcaactgccaaatcctaaacctgacgccctggacaaccatcagaagtgcttcgccattctcaagctgtaccgtccgaaggtggataacagtgcggttgggacgagtaagaaaagtgacatggctgaggttaaggattggaaagcggttcgtgtggatctggtggtcgctccagatgagcagttcgcctatgcgctgctcggttggacgggcagcggcatgtttcgtcgcgatactcgtcgctacgcggaggaagagcgcgacatgctgctcgacaaccatggtctctacgacctgaaaaagggcatctttctgagtgcggacagcgaagaagagattttcggtcatctggacctggattatctggagccgtgggaacgcaacgcg

SEQ ID NO: 5354 - protein, 394 aa, synthetic construct
  REGION 1..394: note = Variant of terminal deoxynucleotidyl transferase
MHHHHHHGGSGHPEGNTPEKEVPSVIARHVSPYACQRKTTLNNYNKKITDALEIMAENYKFKENLQACLEARRAASVLKSLPFEVTSMKDIQGLPCITDDVRPVIEEIIEVGESSRVKEILNDERYKAFKQFTSVFGVGVKTSEKWYRMGLRTREEAKASKSLKLNKMQKAGFLYYEDLASGVSKVEADAVLDIVKETVRTVSPDALVTIAGGFRRGKPMGHDVDLLITIPGRPTDDELLHKVVDLLKKQGLLLYGDIRERTFVEGQLPNPKPDALDNHQKCFAILKLYRPKVDNSAVGTSKKSDMAEVKDWKAVRVDLVVAPDEQFAYALLGWTGSGMFRRDTRRYAEEERDMLLDNHGLYDLKKGIFLSADSEEEIFGHLDLDYLEPWERNA

SEQ ID NO: 5355 - DNA, 1182 bp, synthetic construct
  misc_feature 1..1182: note = Variant of terminal deoxynucleotidyl transferase
  source 1..1182: mol_type = other DNA
atgcatcaccaccatcatcatgggggttctggtcatccggaaggtaataccccggagaaggaggtgccgagcgttatcgcccgtcatgttagtccgtacgcgtgccagcgcaagaccacgctgaataactacaacaaaaagatcaccgacgcgctggagatcatggccgagaactacaagtttaaagagaacctgcaggcgtgcctggaggcccgtcgcgccgcgagtgtcctgaaaagcctgccgttcgaggttaccagcatgaaagacatccaaggtctgccgtgcattaccgacgacgtacgtcctgtgatcgaagagatcatcgaagtaggcgagagcagccgtgttaaagaaatcctcaatgacgagcgctacaaggcctttaagcagttcaccagcgtgttcggtgtgggcgtcaagacctcggaaaagtggtaccgtatgggcctccgtacgcgcgaagaagcaaaggccagtaagagtctgaagctgaacaagatgcagaaggcgggcttcctgtattacgaggatctggcgagcggtgttagtaaagaagaagccgatgccgttctggatatcgtgaaggaaacggtgtggactgttagtccggatgcgctggtgaccatcgccggcggtttccgccgtggcaaacctatgggccacgacgttgacctgctgatcacgattccgggccgtcctacggatgacgagctgctccacaaagtggttgatctgctcaagaagcaaggtctgctgctgtacggggacatccgtgagcgtacgttcgtggaggggcaactgccaaatcctaaacctgacgccctggacaaccatcagaagtgcttcgccattctcaagctgtaccgtccgaaggtggataacagtgcggttgggacgagtaagaaaagtgacatggctgaggttaaggattggaaagcggttcgtgtggatctggtggtcgctccagatgagcagttcgcctatgcgctgctcggttggacgggcagcggcatgtttcgtcgcgatactcgtcgctacgcggaggaagagcgcgacatgctgctcgacaaccatggtctctacgacctgaaaaagggcatctttctgagtgcggacagcgaagaagagattttcggtcatctggacctggattatctggagccgtgggaacgcaacgcg

SEQ ID NO: 5356 - protein, 394 aa, synthetic construct
  REGION 1..394: note = Variant of terminal deoxynucleotidyl transferase
MHHHHHHGGSGHPEGNTPEKEVPSVIARHVSPYACQRKTTLNNYNKKITDALEIMAENYKFKENLQACLEARRAASVLKSLPFEVTSMKDIQGLPCITDDVRPVIEEIIEVGESSRVKEILNDERYKAFKQFTSVFGVGVKTSEKWYRMGLRTREEAKASKSLKLNKMQKAGFLYYEDLASGVSKEEADAVLDIVKETVWTVSPDALVTIAGGFRRGKPMGHDVDLLITIPGRPTDDELLHKVVDLLKKQGLLLYGDIRERTFVEGQLPNPKPDALDNHQKCFAILKLYRPKVDNSAVGTSKKSDMAEVKDWKAVRVDLVVAPDEQFAYALLGWTGSGMFRRDTRRYAEEERDMLLDNHGLYDLKKGIFLSADSEEEIFGHLDLDYLEPWERNA

SEQ ID NO: 5357 - DNA, 1182 bp, synthetic construct
  misc_feature 1..1182: note = Variant of terminal deoxynucleotidyl transferase
  source 1..1182: mol_type = other DNA
atgcatcaccaccatcatcatgggggttctggtcatccggaaggtaataccccggagaaggaggtgccgagcgttatcgcccgtcatgttagtccgtacgcgtgccagcgcaagaccacgctgaataactacaacaaaaagatcaccgacgcgctggagatcatggccgagaactacaagtttaaagagaacctgcaggcgtgcctggaggcccgtcgcgccgcgagtgtcctgaaaagcctgccgttcgaggttaccagcatgaaagacatccaaggtctgccgtgcattaccgacgacgtacgtcctgtgatcgaagagatcatcgaagtaggcgagagcagccgtgttaaagaaatcctcaatgacgagcgctacaaggcctttaagcagttcaccagcgtgttcggtgtgggcgtcaagacctcggaaaagtggtaccgtatgggcctccgtacgcgcgaagaagcaaaggccagtaagagtctgaagctgaacaagatgcagaaggcgggcttcctgtattacgaggatctggcgagcggtgttagtaaagaagaagccgatgccgttctggatatcgtgaaggaaacggtgcgcactgttagtccggatgcgctggtgaccatcgccggcggtttccgccgtggcaaacctatgggccacgacgttgacctgctgatcacgattccgggccgtcctacggatgacgagctgctccacaaagtggttgatctgctcaagaagcaaggtctgctgctgtacggggacatccgtgagcgtacgttcgtggaggggcaactgccaaatcctaaacctgacgccctggacaaccatcagaagtgcttcgccattctcaagctgtaccgtccgaaggtggataacagtgcggtttctacgagtaagaaaagtgacatggctgaggttaaggattggaaagcggttcgtgtggatctggtggtcgctccagatgagcagttcgcctatgcgctgctcggttggacgggcagcggcatgtttcgtcgcgatactcgtcgctacgcggaggaagagcgcgacatgctgctcgacaaccatggtctctacgacctgaaaaagggcatctttctgagtgcggacagcgaagaagagattttcggtcatctggacctggattatctggagccgtgggaacgcaacgcg

SEQ ID NO: 5358 - protein, 394 aa, synthetic construct
  REGION 1..394: note = Variant of terminal deoxynucleotidyl transferase
MHHHHHHGGSGHPEGNTPEKEVPSVIARHVSPYACQRKTTLNNYNKKITDALEIMAENYKFKENLQACLEARRAASVLKSLPFEVTSMKDIQGLPCITDDVRPVIEEIIEVGESSRVKEILNDERYKAFKQFTSVFGVGVKTSEKWYRMGLRTREEAKASKSLKLNKMQKAGFLYYEDLASGVSKEEADAVLDIVKETVRTVSPDALVTIAGGFRRGKPMGHDVDLLITIPGRPTDDELLHKVVDLLKKQGLLLYGDIRERTFVEGQLPNPKPDALDNHQKCFAILKLYRPKVDNSAVSTSKKSDMAEVKDWKAVRVDLVVAPDEQFAYALLGWTGSGMFRRDTRRYAEEERDMLLDNHGLYDLKKGIFLSADSEEEIFGHLDLDYLEPWERNA

SEQ ID NO: 5359 - DNA, 1182 bp, synthetic construct
  misc_feature 1..1182: note = Variant of terminal deoxynucleotidyl transferase
  source 1..1182: mol_type = other DNA
atgcatcaccaccatcatcatgggggttctggtcatccggaaggtaataccccggagaaggaggtgccgagcgttatcgcccgtcatgttagtccgtacgcgtgccagcgcaagaccacgctgaataactacaacaaaaagatcaccgacgcgctggagatcatggccgagaactacaagtttaaagagaacctgcaggcgtgcctggaggcccgtcgcgccgcgagtgtcctgaaaagcctgccgttcgaggttaccagcatgaaagacatccaaggtctgccgtgcattaccgacgacgtacgtcctgtgatcgaagagatcatcgaagtaggcgagagcagccgtgttaaagaaatcctcaatgacgagcgctacaaggcctttaagcagttcaccagcgtgttcggtgtgggcgtcaagacctcggaaaagtggtaccgtatgggcctccgtacgcgcgaagaagcaaaggccagtaagagtctgaagctgaacaagatgcagaaggcgggcttcctgtattacgaggatctggcgagcggtgttagtaaagaagaaaaggatgccgttctggatatcgtgaaggaaacggtgcgcactgttagtccggatgcgctggtgaccatcgccggcggtttccgccgtggcaaacctatgggccacgacgttgacctgctgatcacgattccgggccgtcctacggatgacgagctgctccacaaagtggttgatctgctcaagaagcaaggtctgctgctgtacggggacatccgtgagcgtacgttcgtggaggggcaactgccaaatcctaaacctgacgccctggacaaccatcagaagtgcttcgccattctcaagctgtaccgtccgaaggtggataacagtgcggttgggacgagtaagaaaagtgacatggctgaggttaaggattggaaagcggttcgtgtggatctggtggtcgctccagatgagcagttcgcctatgcgctgctcggttggacgggcagcggcatgtttcgtcgcgatactcgtcgctacgcggaggaagagcgcgacatgctgctcgacaaccatggtctctacgacctgaaaaagggcatctttctgagtgcggacagcgaagaagagattttcggtcatctggacctggattatctggagccgtgggaacgcaacgcg

SEQ ID NO: 5360 - protein, 394 aa, synthetic construct
  REGION 1..394: note = Variant of terminal deoxynucleotidyl transferase
MHHHHHHGGSGHPEGNTPEKEVPSVIARHVSPYACQRKTTLNNYNKKITDALEIMAENYKFKENLQACLEARRAASVLKSLPFEVTSMKDIQGLPCITDDVRPVIEEIIEVGESSRVKEILNDERYKAFKQFTSVFGVGVKTSEKWYRMGLRTREEAKASKSLKLNKMQKAGFLYYEDLASGVSKEEKDAVLDIVKETVRTVSPDALVTIAGGFRRGKPMGHDVDLLITIPGRPTDDELLHKVVDLLKKQGLLLYGDIRERTFVEGQLPNPKPDALDNHQKCFAILKLYRPKVDNSAVGTSKKSDMAEVKDWKAVRVDLVVAPDEQFAYALLGWTGSGMFRRDTRRYAEEERDMLLDNHGLYDLKKGIFLSADSEEEIFGHLDLDYLEPWERNA

SEQ ID NO: 5361 - DNA, 1182 bp, synthetic construct
  misc_feature 1..1182: note = Variant of terminal deoxynucleotidyl transferase
  source 1..1182: mol_type = other DNA
atgcatcaccaccatcatcatgggggttctggtcatccggaaggtaataccccggagaaggaggtgccgagcgttatcgcccgtcatgttagtccgtacgcgtgccagcgcaagaccacgctgaataactacaacaaaaagatcaccgacgcgctggagatcatggccgagaactacaagtttaaagagaacctgcaggcgtgcctggaggcccgtcgcgccgcgagtgtcctgaaaagcctgccgttcgaggttaccagcatgaaagacatccaaggtctgccgtgcattaccgacgacgtacgtcctgtgatcgaagagatcatcgaagtaggcgagagcagccgtgttaaagaaatcctcaatgacgagcgctacaaggcctttaagcagttcaccagcgtgttcggtgtgggcgtcaagacctcggaaaagtggtaccgtatgggcctccgtacgcgcgaagaagcaaaggccagtaagagtctgaagctgaacaagatgcagaaggcgggcttcctgtattacgaggatctggcgagcggtgttagtaaagaagaagccgatgccgttctggatatcgtgaaggaaacggtgcgcactgttagtccggatgcgctggtgaccatcgccggcggtttccgccgtggcaaacctatgggccacgacgttgacctgctgatcacgattccgggccgtcctacggatgacgagctgctccacaaagtggttgatctgctcaagaagcaaggtctgctgctgtacggggacatccgtgagcgtacgttcgtggaggggcaactgccaaatcctaaacctgacgccctggacaaccatcagaagtgcttcgccattctcaagctgtaccgtccgaaggtggataacagtgtggttgggacgagtaagaaaagtgacatggctgaggttaaggattggaaagcggttcgtgtggatctggtggtcgctccagatgagcagttcgcctatgcgctgctcggttggacgggcagcggcatgtttcgtcgcgatactcgtcgctacgcggaggaagagcgcgacatgctgctcgacaaccatggtctctacgacctgaaaaagggcatctttctgagtgcggacagcgaagaagagattttcggtcatctggacctggattatctggagccgtgggaacgcaacgcg

SEQ ID NO: 5362 - protein, 394 aa, synthetic construct
  REGION 1..394: note = Variant of terminal deoxynucleotidyl transferase
MHHHHHHGGSGHPEGNTPEKEVPSVIARHVSPYACQRKTTLNNYNKKITDALEIMAENYKFKENLQACLEARRAASVLKSLPFEVTSMKDIQGLPCITDDVRPVIEEIIEVGESSRVKEILNDERYKAFKQFTSVFGVGVKTSEKWYRMGLRTREEAKASKSLKLNKMQKAGFLYYEDLASGVSKEEADAVLDIVKETVRTVSPDALVTIAGGFRRGKPMGHDVDLLITIPGRPTDDELLHKVVDLLKKQGLLLYGDIRERTFVEGQLPNPKPDALDNHQKCFAILKLYRPKVDNSVVGTSKKSDMAEVKDWKAVRVDLVVAPDEQFAYALLGWTGSGMFRRDTRRYAEEERDMLLDNHGLYDLKKGIFLSADSEEEIFGHLDLDYLEPWERNA

SEQ ID NO: 5363 - DNA, 1182 bp, synthetic construct
  misc_feature 1..1182: note = Variant of terminal deoxynucleotidyl transferase
  source 1..1182: mol_type = other DNA
atgcatcaccaccatcatcatgggggttctggtcatccggaaggtaataccccggagaaggaggtgccgagcgttatcgcccgtcatgttagtccgtacgcgtgccagcgcaagaccacgctgaataactacaacaaaaagatcaccgacgcgctggagatcatggccgagaactacaagtttaaagagaacctgcaggcgtgcctggaggcccgtcgcgccgcgagtgtcctgaaaagcctgccgttcgaggttaccagcatgaaagacatccaaggtctgccgtgcattaccgacgacgtacgtcctgtgatcgaagagatcatcgaagtaggcgagagcagccgtgttaaagaaatcctcaatgacgagcgctacaaggcctttaagcagttcaccagcgtgttcggtgtgggcgtcaagacctcggaaaagtggtaccgtatgggcctccgtacgcgcgaagaagcaaaggccagtaagagtctgaagctgaacaagatgcagaaggcgggcttcctgtattacgaggatctggcgagcggtgttagtaaagaagaagccgatgccgttctggattttgtgaaggaaacggtgcgcactgttagtccggatgcgctggtgaccatcgccggcggtttccgccgtggcaaacctatgggccacgacgttgacctgctgatcacgattccgggccgtcctacggatgacgagctgctccacaaagtggttgatctgctcaagaagcaaggtctgctgctgtacggggacatccgtgagcgtacgttcgtggaggggcaactgccaaatcctaaacctgacgccctggacaaccatcagaagtgcttcgccattctcaagctgtaccgtccgaaggtggataacagtgcggttgggacgagtaagaaaagtgacatggctgaggttaaggattggaaagcggttcgtgtggatctggtggtcgctccagatgagcagttcgcctatgcgctgctcggttggacgggcagcggcatgtttcgtcgcgatactcgtcgctacgcggaggaagagcgcgacatgctgctcgacaaccatggtctctacgacctgaaaaagggcatctttctgagtgcggacagcgaagaagagattttcggtcatctggacctggattatctggagccgtgggaacgcaacgcg

SEQ ID NO: 5364 - protein, 394 aa, synthetic construct
  REGION 1..394: note = Variant of terminal deoxynucleotidyl transferase
MHHHHHHGGSGHPEGNTPEKEVPSVIARHVSPYACQRKTTLNNYNKKITDALEIMAENYKFKENLQACLEARRAASVLKSLPFEVTSMKDIQGLPCITDDVRPVIEEIIEVGESSRVKEILNDERYKAFKQFTSVFGVGVKTSEKWYRMGLRTREEAKASKSLKLNKMQKAGFLYYEDLASGVSKEEADAVLDFVKETVRTVSPDALVTIAGGFRRGKPMGHDVDLLITIPGRPTDDELLHKVVDLLKKQGLLLYGDIRERTFVEGQLPNPKPDALDNHQKCFAILKLYRPKVDNSAVGTSKKSDMAEVKDWKAVRVDLVVAPDEQFAYALLGWTGSGMFRRDTRRYAEEERDMLLDNHGLYDLKKGIFLSADSEEEIFGHLDLDYLEPWERNA

SEQ ID NO: 5365 - DNA, 1182 bp, synthetic construct
  misc_feature 1..1182: note = Variant of terminal deoxynucleotidyl transferase
  source 1..1182: mol_type = other DNA
atgcatcaccaccatcatcatgggggttctggtcatccggaaggtaataccccggagaaggaggtgccgagcgttatcgcccgtcatgttagtccgtacgcgtgccagcgcaagaccacgctgaataactacaacaaaaagatcaccgacgcgctggagatcatggccgagaactacaagtttaaagagaacctgcaggcgtgcctggaggcccgtcgcgccgcgagtgtcctgaaaagcctgccgttcgaggttaccagcatgaaagacatccaaggtctgccgtgcattaccgacgacgtacgtcctgtgatcgaagagatcatcgaagtaggcgagagcagccgtgttaaagaaatcctcaatgacgagcgctacaaggcctttaagcagttcaccagcgtgttcggtgtgggcgtcaagacctcggaaaagtggtaccgtatgggcctccgtacgcgcgaagaagcaaaggccagtaagagtctgaagctgaacaagatgcagaaggcgggcttcctgtattacgaggatctggcgagcggtgttagtaaagaagaagccgatgccgttctggatatcgtgaaggaaacggtgcgcactgttagtccggatgcgctggtgaccatcgccggcggtttccgccgtggcaaacctatgggccacgacgttgacctgctgatcacgattccgggccgtcctacggatgacgagctgctccacaaagtggttgatctgctcaagaagcaaggtctgctgctgtacggggacatccgtgagcgtacgttcgtggaggggcaactgccaaatcctaaacctgacgccctggacaaccatcagaagtgcttcgccattctcaagctgtaccgtccgaaggtggataacagtgcggttgggacgagtaagaaaagtgacatggctgaggttaaggattggaaagcggttcgtgtggatctggtggtcgctccagatgagcagcatgcctatgcgctgctcggttggacgggcagcggcatgtttcgtcgcgatactcgtcgctacgcggaggaagagcgcgacatgctgctcgacaaccatggtctctacgacctgaaaaagggcatctttctgagtgcggacagcgaagaagagattttcggtcatctggacctggattatctggagccgtgggaacgcaacgcg

SEQ ID NO: 5366 - protein, 394 aa, synthetic construct
  REGION 1..394: note = Variant of terminal deoxynucleotidyl transferase
MHHHHHHGGSGHPEGNTPEKEVPSVIARHVSPYACQRKTTLNNYNKKITDALEIMAENYKFKENLQACLEARRAASVLKSLPFEVTSMKDIQGLPCITDDVRPVIEEIIEVGESSRVKEILNDERYKAFKQFTSVFGVGVKTSEKWYRMGLRTREEAKASKSLKLNKMQKAGFLYYEDLASGVSKEEADAVLDIVKETVRTVSPDALVTIAGGFRRGKPMGHDVDLLITIPGRPTDDELLHKVVDLLKKQGLLLYGDIRERTFVEGQLPNPKPDALDNHQKCFAILKLYRPKVDNSAVGTSKKSDMAEVKDWKAVRVDLVVAPDEQHAYALLGWTGSGMFRRDTRRYAEEERDMLLDNHGLYDLKKGIFLSADSEEEIFGHLDLDYLEPWERNA

SEQ ID NO: 5367 - DNA, 1182 bp, synthetic construct
  misc_feature 1..1182: note = Variant of terminal deoxynucleotidyl transferase
  source 1..1182: mol_type = other DNA
atgcatcaccaccatcatcatgggggttctggtcatccggaaggtaataccccggagaaggaggtgccgagcgttatcgcccgtcatgttagtccgtacgcgtgccagcgcaagaccacgctgaataactacaacaaaaagatcaccgacgcgctggagatcatggccgagaactacaagtttaaagagaacctgcaggcgtgcctggaggcccgtcgcgccgcgagtgtcctgaaaagcctgccgttcgaggttaccagcatgaaagacatccaaggtctgccgtgcattaccgacgacgtacgtcctgtgatcgaagagatcatcgaagtaggcgagagcagccgtgttaaagaaatcctcaatgacgagcgctacaaggcctttaagcagttcaccagcgtgttcggtgtgggcgtcaagacctcggaaaagtggtaccgtatgggcctccgtacgcgcgaagaagcaaaggccagtaagagtctgaagctgaacaagatgcagaaggcgggcttcctgtattacgaggatctggcgagcggtgttagtaaagaagaagccgatgccgttctggatatcgtgaaggaaacggtgcgcactgttagtccggatgcgctggtgaccatcgccggcggtttccgccgtggcaaacctatgggccacgacgttgacctgctgatcacgattccgggccgtcctacggatgacgagctgctccacaaagtggttgatctgctcaagaagcaaggtctgctgctgtacggggacatccgtgagcgtacgttcgtggaggggcaactgccaaatcctaaacctgacgccctggacaaccatcagaagtgcttcgccattctcaagctgtaccgtccgaaggtggataacagtgcggtttatacgagtaagaaaagtgacatggctgaggttaaggattggaaagcggttcgtgtggatctggtggtcgctccagatgagcagttcgcctatgcgctgctcggttggacgggcagcggcatgtttcgtcgcgatactcgtcgctacgcggaggaagagcgcgacatgctgctcgacaaccatggtctctacgacctgaaaaagggcatctttctgagtgcggacagcgaagaagagattttcggtcatctggacctggattatctggagccgtgggaacgcaacgcg

SEQ ID NO: 5368 - protein, 394 aa, synthetic construct
  REGION 1..394: note = Variant of terminal deoxynucleotidyl transferase
MHHHHHHGGSGHPEGNTPEKEVPSVIARHVSPYACQRKTTLNNYNKKITDALEIMAENYKFKENLQACLEARRAASVLKSLPFEVTSMKDIQGLPCITDDVRPVIEEIIEVGESSRVKEILNDERYKAFKQFTSVFGVGVKTSEKWYRMGLRTREEAKASKSLKLNKMQKAGFLYYEDLASGVSKEEADAVLDIVKETVRTVSPDALVTIAGGFRRGKPMGHDVDLLITIPGRPTDDELLHKVVDLLKKQGLLLYGDIRERTFVEGQLPNPKPDALDNHQKCFAILKLYRPKVDNSAVYTSKKSDMAEVKDWKAVRVDLVVAPDEQFAYALLGWTGSGMFRRDTRRYAEEERDMLLDNHGLYDLKKGIFLSADSEEEIFGHLDLDYLEPWERNA

SEQ ID NO: 5369 - DNA, 1182 bp, synthetic construct
  misc_feature 1..1182: note = Variant of terminal deoxynucleotidyl transferase
  source 1..1182: mol_type = other DNA
atgcatcaccaccatcatcatgggggttctggtcatccggaaggtaataccccggagaaggaggtgccgagcgttatcgcccgtcatgttagtccgtacgcgtgccagcgcaagaccacgctgaataactacaacaaaaagatcaccgacgcgctggagatcatggccgagaactacaagtttaaagagaacctgcaggcgtgcctggaggcccgtcgcgccgcgagtgtcctgaaaagcctgccgttcgaggttaccagcatgaaagacatccaaggtctgccgtgcattaccgacgacgtacgtcctgtgatcgaagagatcatcgaagtaggcgagagcagccgtgttaaagaaatcctcaatgacgagcgctacaaggcctttaagcagttcaccagcgtgttcggtgtgggcgtcaagacctcggaaaagtggtaccgtatgggcctccgtacgcgcgaagaagcaaaggccagtaagagtctgaagctgaacaagatgcagaaggcgggcttcctgtattacgaggatctggcgagcggtgttagtaaagaagaagccgatgccatgctggatatcgtgaaggaaacggtgcgcactgttagtccggatgcgctggtgaccatcgccggcggtttccgccgtggcaaacctatgggccacgacgttgacctgctgatcacgattccgggccgtcctacggatgacgagctgctccacaaagtggttgatctgctcaagaagcaaggtctgctgctgtacggggacatccgtgagcgtacgttcgtggaggggcaactgccaaatcctaaacctgacgccctggacaaccatcagaagtgcttcgccattctcaagctgtaccgtccgaaggtggataacagtgcggttgggacgagtaagaaaagtgacatggctgaggttaaggattggaaagcggttcgtgtggatctggtggtcgctccagatgagcagttcgcctatgcgctgctcggttggacgggcagcggcatgtttcgtcgcgatactcgtcgctacgcggaggaagagcgcgacatgctgctcgacaaccatggtctctacgacctgaaaaagggcatctttctgagtgcggacagcgaagaagagattttcggtcatctggacctggattatctggagccgtgggaacgcaacgcg

SEQ ID NO: 5370 - protein, 394 aa, synthetic construct
  REGION 1..394: note = Variant of terminal deoxynucleotidyl transferase
MHHHHHHGGSGHPEGNTPEKEVPSVIARHVSPYACQRKTTLNNYNKKITDALEIMAENYKFKENLQACLEARRAASVLKSLPFEVTSMKDIQGLPCITDDVRPVIEEIIEVGESSRVKEILNDERYKAFKQFTSVFGVGVKTSEKWYRMGLRTREEAKASKSLKLNKMQKAGFLYYEDLASGVSKEEADAMLDIVKETVRTVSPDALVTIAGGFRRGKPMGHDVDLLITIPGRPTDDELLHKVVDLLKKQGLLLYGDIRERTFVEGQLPNPKPDALDNHQKCFAILKLYRPKVDNSAVGTSKKSDMAEVKDWKAVRVDLVVAPDEQFAYALLGWTGSGMFRRDTRRYAEEERDMLLDNHGLYDLKKGIFLSADSEEEIFGHLDLDYLEPWERNA

SEQ ID NO: 5371 - DNA, 1182 bp, synthetic construct
  misc_feature 1..1182: note = Variant of terminal deoxynucleotidyl transferase
  source 1..1182: mol_type = other DNA
atgcatcaccaccatcatcatgggggttctggtcatccggaaggtaataccccggagaaggaggtgccgagcgttatcgcccgtcatgttagtccgtacgcgtgccagcgcaagaccacgctgaataactacaacaaaaagatcaccgacgcgctggagatcatggccgagaactacaagtttaaagagaacctgcaggcgtgcctggaggcccgtcgcgccgcgagtgtcctgaaaagcctgccgttcgaggttaccagcatgaaagacatccaaggtctgccgtgcattaccgacgacgtacgtcctgtgatcgaagagatcatcgaagtaggcgagagcagccgtgttaaagaaatcctcaatgacgagcgctacaaggcctttaagcagttcaccagcgtgttcggtgtgggcgtcaagacctcggaaaagtggtaccgtatgggcctccgtacgcgcgaagaagcaaaggccagtaagagtctgaagctgaacaagatgcagaaggcgggcttcctgtattacgaggatctggcgagcggtgttagtaaagaagaagccgatgccgttctggatatcgtgaaggaaacggtgcgcactgttagtccggatgcgctggtgaccatcgccggcggtttccgccgtggcaaacctatgggccacgacgttgacctgctgatcacgattccgggccgtcctacggatgacgagctgctccacaaagtggttgatctgctcaagaagcaaggtctgctgctgtacggggacatccgtgagcgtacgttcgtggaggggcaactgccaaatcctaaacctgacgccctggacaaccatcagaagtgcttcgccattctcaagctgtaccgtccgaaggtggataacagtgcggttcggacgagtaagaaaagtgacatggctgaggttaaggattggaaagcggttcgtgtggatctggtggtcgctccagatgagcagttcgcctatgcgctgctcggttggacgggcagcggcatgtttcgtcgcgatactcgtcgctacgcggaggaagagcgcgacatgctgctcgacaaccatggtctctacgacctgaaaaagggcatctttctgagtgcggacagcgaagaagagattttcggtcatctggacctggattatctggagccgtgggaacgcaacgcg

SEQ ID NO: 5372 - protein, 394 aa, synthetic construct
  REGION 1..394: note = Variant of terminal deoxynucleotidyl transferase
MHHHHHHGGSGHPEGNTPEKEVPSVIARHVSPYACQRKTTLNNYNKKITDALEIMAENYKFKENLQACLEARRAASVLKSLPFEVTSMKDIQGLPCITDDVRPVIEEIIEVGESSRVKEILNDERYKAFKQFTSVFGVGVKTSEKWYRMGLRTREEAKASKSLKLNKMQKAGFLYYEDLASGVSKEEADAVLDIVKETVRTVSPDALVTIAGGFRRGKPMGHDVDLLITIPGRPTDDELLHKVVDLLKKQGLLLYGDIRERTFVEGQLPNPKPDALDNHQKCFAILKLYRPKVDNSAVRTSKKSDMAEVKDWKAVRVDLVVAPDEQFAYALLGWTGSGMFRRDTRRYAEEERDMLLDNHGLYDLKKGIFLSADSEEEIFGHLDLDYLEPWERNA

SEQ ID NO: 5373 - DNA, 1182 bp, synthetic construct
  misc_feature 1..1182: note = Variant of terminal deoxynucleotidyl transferase
  source 1..1182: mol_type = other DNA
atgcatcaccaccatcatcatgggggttctggtcatccggaaggtaataccccggagaaggaggtgccgagcgttatcgcccgtcatgttagtccgtacgcgtgccagcgcaagaccacgctgaataactacaacaaaaagatcaccgacgcgctggagatcatggccgagaactacaagtttaaagagaacctgcaggcgtgcctggaggcccgtcgcgccgcgagtgtcctgaaaagcctgccgttcgaggttaccagcatgaaagacatccaaggtctgccgtgcattaccgacgacgtacgtcctgtgatcgaagagatcatcgaagtaggcgagagcagccgtgttaaagaaatcctcaatgacgagcgctacaaggcctttaagcagttcaccagcgtgttcggtgtgggcgtcaagacctcggaaaagtggtaccgtatgggcctccgtacgcgcgaagaagcaaaggccagtaagagtctgaagctgaacaagatgcagaaggcgggcttcctgtattacgaggatctggcgagcggtgttagtaaagaagaagccgatgccgttctggatatcgtgaaggaaacggtgcgcactgttagtccggatgcgctggtgaccatcgccggcggtttccgccgtggcaaacctatgggccacgacgttgacctgctgatcacgattccgggccgtcctacggatgacgagctgctccacaaagtggttgatctgctcaagaagcaaggtctgctgctgtacggggacatccgtgagcgtacgttcgtggaggggcaactgccaaatcctaaacctgacgccctggacaaccatcagaagtgcttcgccattctcaagctgtaccgtccgaaggtggataacagtgcgacggggacgagtaagaaaagtgacatggctgaggttaaggattggaaagcggttcgtgtggatctggtggtcgctccagatgagcagttcgcctatgcgctgctcggttggacgggcagcggcatgtttcgtcgcgatactcgtcgctacgcggaggaagagcgcgacatgctgctcgacaaccatggtctctacgacctgaaaaagggcatctttctgagtgcggacagcgaagaagagattttcggtcatctggacctggattatctggagccgtgggaacgcaacgcg

SEQ ID NO: 5374 - protein, 394 aa, synthetic construct
  REGION 1..394: note = Variant of terminal deoxynucleotidyl transferase
MHHHHHHGGSGHPEGNTPEKEVPSVIARHVSPYACQRKTTLNNYNKKITDALEIMAENYKFKENLQACLEARRAASVLKSLPFEVTSMKDIQGLPCITDDVRPVIEEIIEVGESSRVKEILNDERYKAFKQFTSVFGVGVKTSEKWYRMGLRTREEAKASKSLKLNKMQKAGFLYYEDLASGVSKEEADAVLDIVKETVRTVSPDALVTIAGGFRRGKPMGHDVDLLITIPGRPTDDELLHKVVDLLKKQGLLLYGDIRERTFVEGQLPNPKPDALDNHQKCFAILKLYRPKVDNSATGTSKKSDMAEVKDWKAVRVDLVVAPDEQFAYALLGWTGSGMFRRDTRRYAEEERDMLLDNHGLYDLKKGIFLSADSEEEIFGHLDLDYLEPWERNA

SEQ ID NO: 5375 - DNA, 1182 bp, synthetic construct
  misc_feature 1..1182: note = Variant of terminal deoxynucleotidyl transferase
  source 1..1182: mol_type = other DNA
atgcatcaccaccatcatcatgggggttctggtcatccggaaggtaataccccggagaaggaggtgccgagcgttatcgcccgtcatgttagtccgtacgcgtgccagcgcaagaccacgctgaataactacaacaaaaagatcaccgacgcgctggagatcatggccgagaactacaagtttaaagagaacctgcaggcgtgcctggaggcccgtcgcgccgcgagtgtcctgaaaagcctgccgttcgaggttaccagcatgaaagacatccaaggtctgccgtgcattaccgacgacgtacgtcctgtgatcgaagagatcatcgaagtaggcgagagcagccgtgttaaagaaatcctcaatgacgagcgctacaaggcctttaagcagttcaccagcgtgttcggtgtgggcgtcaagacctcggaaaagtggtaccgtatgggcctccgtacgcgcgaagaagcaaaggccagtaagagtctgaagctgaacaagatgcagaaggcgggcttcctgtattacgaggatctggcgagcggtgttagtaaagcggaagccgatgccgttctggatatcgtgaaggaaacggtgcgcactgttagtccggatgcgctggtgaccatcgccggcggtttccgccgtggcaaacctatgggccacgacgttgacctgctgatcacgattccgggccgtcctacggatgacgagctgctccacaaagtggttgatctgctcaagaagcaaggtctgctgctgtacggggacatccgtgagcgtacgttcgtggaggggcaactgccaaatcctaaacctgacgccctggacaaccatcagaagtgcttcgccattctcaagctgtaccgtccgaaggtggataacagtgcggttgggacgagtaagaaaagtgacatggctgaggttaaggattggaaagcggttcgtgtggatctggtggtcgctccagatgagcagttcgcctatgcgctgctcggttggacgggcagcggcatgtttcgtcgcgatactcgtcgctacgcggaggaagagcgcgacatgctgctcgacaaccatggtctctacgacctgaaaaagggcatctttctgagtgcggacagcgaagaagagattttcggtcatctggacctggattatctggagccgtgggaacgcaacgcg

SEQ ID NO: 5376 - protein, 394 aa, synthetic construct
  REGION 1..394: note = Variant of terminal deoxynucleotidyl transferase
MHHHHHHGGSGHPEGNTPEKEVPSVIARHVSPYACQRKTTLNNYNKKITDALEIMAENYKFKENLQACLEARRAASVLKSLPFEVTSMKDIQGLPCITDDVRPVIEEIIEVGESSRVKEILNDERYKAFKQFTSVFGVGVKTSEKWYRMGLRTREEAKASKSLKLNKMQKAGFLYYEDLASGVSKAEADAVLDIVKETVRTVSPDALVTIAGGFRRGKPMGHDVDLLITIPGRPTDDELLHKVVDLLKKQGLLLYGDIRERTFVEGQLPNPKPDALDNHQKCFAILKLYRPKVDNSAVGTSKKSDMAEVKDWKAVRVDLVVAPDEQFAYALLGWTGSGMFRRDTRRYAEEERDMLLDNHGLYDLKKGIFLSADSEEEIFGHLDLDYLEPWERNA

SEQ ID NO: 5377 - DNA, 1182 bp, synthetic construct
  misc_feature 1..1182: note = Variant of terminal deoxynucleotidyl transferase
  source 1..1182: mol_type = other DNA
atgcatcaccaccatcatcatgggggttctggtcatccggaaggtaataccccggagaaggaggtgccgagcgttatcgcccgtcatgttagtccgtacgcgtgccagcgcaagaccacgctgaataactacaacaaaaagatcaccgacgcgctggagatcatggccgagaactacaagtttaaagagaacctgcaggcgtgcctggaggcccgtcgcgccgcgagtgtcctgaaaagcctgccgttcgaggttaccagcatgaaagacatccaaggtctgccgtgcattaccgacgacgtacgtcctgtgatcgaagagatcatcgaagtaggcgagagcagccgtgttaaagaaatcctcaatgacgagcgctacaaggcctttaagcagttcaccagcgtgttcggtgtgggcgtcaagacctcggaaaagtggtaccgtatgggcctccgtacgcgcgaagaagcaaaggccagtaagagtctgaagctgaacaagatgcagaaggcgggcttcctgtattacgaggatctggcgagcggtgttagtaaagaagaagccgatgccgttctggatatcgtgaaggaaacggtgcgcactgttagtccggatgcgctggtgaccacggccggcggtttccgccgtggcaaacctatgggccacgacgttgacctgctgatcacgattccgggccgtcctacggatgacgagctgctccacaaagtggttgatctgctcaagaagcaaggtctgctgctgtacggggacatccgtgagcgtacgttcgtggaggggcaactgccaaatcctaaacctgacgccctggacaaccatcagaagtgcttcgccattctcaagctgtaccgtccgaaggtggataacagtgcggttgggacgagtaagaaaagtgacatggctgaggttaaggattggaaagcggttcgtgtggatctggtggtcgctccagatgagcagttcgcctatgcgctgctcggttggacgggcagcggcatgtttcgtcgcgatactcgtcgctacgcggaggaagagcgcgacatgctgctcgacaaccatggtctctacgacctgaaaaagggcatctttctgagtgcggacagcgaagaagagattttcggtcatctggacctggattatctggagccgtgggaacgcaacgcg

SEQ ID NO: 5378 - protein, 394 aa, synthetic construct
  REGION 1..394: note = Variant of terminal deoxynucleotidyl transferase
MHHHHHHGGSGHPEGNTPEKEVPSVIARHVSPYACQRKTTLNNYNKKITDALEIMAENYKFKENLQACLEARRAASVLKSLPFEVTSMKDIQGLPCITDDVRPVIEEIIEVGESSRVKEILNDERYKAFKQFTSVFGVGVKTSEKWYRMGLRTREEAKASKSLKLNKMQKAGFLYYEDLASGVSKEEADAVLDIVKETVRTVSPDALVTTAGGFRRGKPMGHDVDLLITIPGRPTDDELLHKVVDLLKKQGLLLYGDIRERTFVEGQLPNPKPDALDNHQKCFAILKLYRPKVDNSAVGTSKKSDMAEVKDWKAVRVDLVVAPDEQFAYALLGWTGSGMFRRDTRRYAEEERDMLLDNHGLYDLKKGIFLSADSEEEIFGHLDLDYLEPWERNA

SEQ ID NO: 5379 - DNA, 1182 bp, synthetic construct
  misc_feature 1..1182: note = Variant of terminal deoxynucleotidyl transferase
  source 1..1182: mol_type = other DNA
atgcatcaccaccatcatcatgggggttctggtcatccggaaggtaataccccggagaaggaggtgccgagcgttatcgcccgtcatgttagtccgtacgcgtgccagcgcaagaccacgctgaataactacaacaaaaagatcaccgacgcgctggagatcatggccgagaactacaagtttaaagagaacctgcaggcgtgcctggaggcccgtcgcgccgcgagtgtcctgaaaagcctgccgttcgaggttaccagcatgaaagacatccaaggtctgccgtgcattaccgacgacgtacgtcctgtgatcgaagagatcatcgaagtaggcgagagcagccgtgttaaagaaatcctcaatgacgagcgctacaaggcctttaagcagttcaccagcgtgttcggtgtgggcgtcaagacctcggaaaagtggtaccgtatgggcctccgtacgcgcgaagaagcaaaggccagtaagagtctgaagctgaacaagatgcagaaggcgggcttcctgtattacgaggatctggcgagcggtgttagtaaagaagaagccgatgccgttctggatatcgtgaaggaaacggtgcgcactgttagtccggatgcgctggtgaccatcgccggcggtttccgccgtggcaaacctatgggccacgacgttgacctgctgatcacgattccgggccgtcctacggatgacgagctgctcttgaaagtggttgatctgctcaagaagcaaggtctgctgctgtacggggacatccgtgagcgtacgttcgtggaggggcaactgccaaatcctaaacctgacgccctggacaaccatcagaagtgcttcgccattctcaagctgtaccgtccgaaggtggataacagtgcggttgggacgagtaagaaaagtgacatggctgaggttaaggattggaaagcggttcgtgtggatctggtggtcgctccagatgagcagttcgcctatgcgctgctcggttggacgggcagcggcatgtttcgtcgcgatactcgtcgctacgcggaggaagagcgcgacatgctgctcgacaaccatggtctctacgacctgaaaaagggcatctttctgagtgcggacagcgaagaagagattttcggtcatctggacctggattatctggagccgtgggaacgcaacgcg

SEQ ID NO: 5380 - protein, 394 aa, synthetic construct
  REGION 1..394: note = Variant of terminal deoxynucleotidyl transferase
MHHHHHHGGSGHPEGNTPEKEVPSVIARHVSPYACQRKTTLNNYNKKITDALEIMAENYKFKENLQACLEARRAASVLKSLPFEVTSMKDIQGLPCITDDVRPVIEEIIEVGESSRVKEILNDERYKAFKQFTSVFGVGVKTSEKWYRMGLRTREEAKASKSLKLNKMQKAGFLYYEDLASGVSKEEADAVLDIVKETVRTVSPDALVTIAGGFRRGKPMGHDVDLLITIPGRPTDDELLLKVVDLLKKQGLLLYGDIRERTFVEGQLPNPKPDALDNHQKCFAILKLYRPKVDNSAVGTSKKSDMAEVKDWKAVRVDLVVAPDEQFAYALLGWTGSGMFRRDTRRYAEEERDMLLDNHGLYDLKKGIFLSADSEEEIFGHLDLDYLEPWERNA

SEQ ID NO: 5381 - DNA, 1182 bp, synthetic construct
  misc_feature 1..1182: note = Variant of terminal deoxynucleotidyl transferase
  source 1..1182: mol_type = other DNA
atgcatcaccaccatcatcatgggggttctggtcatccggaaggtaataccccggagaaggaggtgccgagcgttatcgcccgtcatgttagtccgtacgcgtgccagcgcaagaccacgctgaataactacaacaaaaagatcaccgacgcgctggagatcatggccgagaactacaagtttaaagagaacctgcaggcgtgcctggaggcccgtcgcgccgcgagtgtcctgaaaagcctgccgttcgaggttaccagcatgaaagacatccaaggtctgccgtgcattaccgacgacgtacgtcctgtgatcgaagagatcatcgaagtaggcgagagcagccgtgttaaagaaatcctcaatgacgagcgctacaaggcctttaagcagttcaccagcgtgttcggtgtgggcgtcaagacctcggaaaagtggtaccgtatgggcctccgtacgcgcgaagaagcaaaggccagtaagagtctgaagctgaacaagatgcagaaggcgggcttcctgtattacgaggatctggcgagcggtgttagtaaagaagaagccgatgccgttctggatatcgtgaaggaaacggtgcgcactgttagtccggatgcgctggtgaccatcgccggcggtttccgccgtggcaaacctatgggccacgacgttgacctgctgatcacgattccgggccgtcctacggatgacgagctgctccacaaagtggttgatctgctcaagaagcaaggtctgctgctgtacggggacatccgtgagcgtacgttcgtggaggggcaactgccaaatcctaaacctgacgccctggacaaccatcagaagtgcttcgccattctcaagctgtaccgtccgaaggtggataacagtgcggttgggacgagtaagaaaagtgacatggctgaggttaaggattggaaagcggttcgtgtggatctggtggtcgctccagatgagcagttcgcctatgcgctgctcggttggacgggcagcggcatgtttcgtcgcgatactcgtcgctacgcggaggaagagcgcgacatgctgctcgacaaccatggtctctacgacctgaaaaagggcgtgtttctgagtgcggacagcgaagaagagattttcggtcatctggacctggattatctggagccgtgggaacgcaacgcg

SEQ ID NO: 5382 - protein, 394 aa, synthetic construct
  REGION 1..394: note = Variant of terminal deoxynucleotidyl transferase
MHHHHHHGGSGHPEGNTPEKEVPSVIARHVSPYACQRKTTLNNYNKKITDALEIMAENYKFKENLQACLEARRAASVLKSLPFEVTSMKDIQGLPCITDDVRPVIEEIIEVGESSRVKEILNDERYKAFKQFTSVFGVGVKTSEKWYRMGLRTREEAKASKSLKLNKMQKAGFLYYEDLASGVSKEEADAVLDIVKETVRTVSPDALVTIAGGFRRGKPMGHDVDLLITIPGRPTDDELLHKVVDLLKKQGLLLYGDIRERTFVEGQLPNPKPDALDNHQKCFAILKLYRPKVDNSAVGTSKKSDMAEVKDWKAVRVDLVVAPDEQFAYALLGWTGSGMFRRDTRRYAEEERDMLLDNHGLYDLKKGVFLSADSEEEIFGHLDLDYLEPWERNA

SEQ ID NO: 5383 - DNA, 1182 bp, synthetic construct
  misc_feature 1..1182: note = Variant of terminal deoxynucleotidyl transferase
  source 1..1182: mol_type = other DNA
atgcatcaccaccatcatcatgggggttctggtcatccggaaggtaataccccggagaaggaggtgccgagcgttatcgcccgtcatgttagtccgtacgcgtgccagcgcaagaccacgctgaataactacaacaaaaagatcaccgacgcgctggagatcatggccgagaactacaagtttaaagagaacctgcaggcgtgcctggaggcccgtcgcgccgcgagtgtcctgaaaagcctgccgttcgaggttaccagcatgaaagacatccaaggtctgccgtgcattaccgacgacgtacgtcctgtgatcgaagagatcatcgaagtaggcgagagcagccgtgttaaagaaatcctcaatgacgagcgctacaaggcctttaagcagttcaccagcgtgttcggtgtgggcgtcaagacctcggaaaagtggtaccgtatgggcctccgtacgcgcgaagaagcaaaggcctataagagtctgaagctgaacaagatgcagaaggcgggcttcctgtattacgaggatctggcgagcggtgttagtaaagaagaagccgatgccgttctggatatcgtgaaggaaacggtgcgcactgttagtccggatgcgctggtgaccatcgccggcggtttccgccgtggcaaacctatgggccacgacgttgacctgctgatcacgattccgggccgtcctacggatgacgagctgctccacaaagtggttgatctgctcaagaagcaaggtctgctgctgtacggggacatccgtgagcgtacgttcgtggaggggcaactgccaaatcctaaacctgacgccctggacaaccatcagaagtgcttcgccattctcaagctgtaccgtccgaaggtggataacagtgcggttgggacgagtaagaaaagtgacatggctgaggttaaggattggaaagcggttcgtgtggatctggtggtcgctccagatgagcagttcgcctatgcgctgctcggttggacgggcagcggcatgtttcgtcgcgatactcgtcgctacgcggaggaagagcgcgacatgctgctcgacaaccatggtctctacgacctgaaaaagggcatctttctgagtgcggacagcgaagaagagattttcggtcatctggacctggattatctggagccgtgggaacgcaacgcg

SEQ ID NO: 5384 - protein, 394 aa, synthetic construct
  REGION 1..394: note = Variant of terminal deoxynucleotidyl transferase
MHHHHHHGGSGHPEGNTPEKEVPSVIARHVSPYACQRKTTLNNYNKKITDALEIMAENYKFKENLQACLEARRAASVLKSLPFEVTSMKDIQGLPCITDDVRPVIEEIIEVGESSRVKEILNDERYKAFKQFTSVFGVGVKTSEKWYRMGLRTREEAKAYKSLKLNKMQKAGFLYYEDLASGVSKEEADAVLDIVKETVRTVSPDALVTIAGGFRRGKPMGHDVDLLITIPGRPTDDELLHKVVDLLKKQGLLLYGDIRERTFVEGQLPNPKPDALDNHQKCFAILKLYRPKVDNSAVGTSKKSDMAEVKDWKAVRVDLVVAPDEQFAYALLGWTGSGMFRRDTRRYAEEERDMLLDNHGLYDLKKGIFLSADSEEEIFGHLDLDYLEPWERNA

SEQ ID NO: 5385 - DNA, 1182 bp, synthetic construct
  misc_feature 1..1182: note = Variant of terminal deoxynucleotidyl transferase
  source 1..1182: mol_type = other DNA
atgcatcaccaccatcatcatgggggttctggtcatccggaaggtaataccccggagaaggaggtgccgagcgttatcgcccgtcatgttagtccgtacgcgtgccagcgcaagaccacgctgaataactacaacaaaaagatcaccgacgcgctggagatcatggccgagaactacaagtttaaagagaacctgcaggcgtgcctggaggcccgtcgcgccgcgagtgtcctgaaaagcctgccgttcgaggttaccagcatgaaagacatccaaggtctgccgtgcattaccgacgacgtacgtcctgtgatcgaagagatcatcgaagtaggcgagagcagccgtgttaaagaaatcctcaatgacgagcgctacaaggcctttaagcagttcaccagcgtgttcggtgtgggcgtcaagacctcggaaaagtggtaccgtatgggcctccgtacgcgcgaagaagcaaaggccagtaagagtctgaagctgaacaagatgcagaaggcgggcttcctgtattacgaggatctggcgagcggtgttagtaaagaagaagccgatgccgttctggatatcgtgaaggaaacggtgcgcactgttagtccggatgcgctggtgaccatcgccggcggtttccgccgtggcaaacctatgggccacgacgttgacctgctgatcacgattccgggccgtcctacggatgacgagctgctccacaaagtggttgatctgctcaagaagcaaggtctgctgctgtacggggacatccgtgcgcgtacgttcgtggaggggcaactgccaaatcctaaacctgacgccctggacaaccatcagaagtgcttcgccattctcaagctgtaccgtccgaaggtggataacagtgcggttgggacgagtaagaaaagtgacatggctgaggttaaggattggaaagcggttcgtgtggatctggtggtcgctccagatgagcagttcgcctatgcgctgctcggttggacgggcagcggcatgtttcgtcgcgatactcgtcgctacgcggaggaagagcgcgacatgctgctcgacaaccatggtctctacgacctgaaaaagggcatctttctgagtgcggacagcgaagaagagattttcggtcatctggacctggattatctggagccgtgggaacgcaacgcg

SEQ ID NO: 5386 - protein, 394 aa, synthetic construct
  REGION 1..394: note = Variant of terminal deoxynucleotidyl transferase
MHHHHHHGGSGHPEGNTPEKEVPSVIARHVSPYACQRKTTLNNYNKKITDALEIMAENYKFKENLQACLEARRAASVLKSLPFEVTSMKDIQGLPCITDDVRPVIEEIIEVGESSRVKEILNDERYKAFKQFTSVFGVGVKTSEKWYRMGLRTREEAKASKSLKLNKMQKAGFLYYEDLASGVSKEEADAVLDIVKETVRTVSPDALVTIAGGFRRGKPMGHDVDLLITIPGRPTDDELLHKVVDLLKKQGLLLYGDIRARTFVEGQLPNPKPDALDNHQKCFAILKLYRPKVDNSAVGTSKKSDMAEVKDWKAVRVDLVVAPDEQFAYALLGWTGSGMFRRDTRRYAEEERDMLLDNHGLYDLKKGIFLSADSEEEIFGHLDLDYLEPWERNA

SEQ ID NO: 5387 - DNA, 1182 bp, synthetic construct
  misc_feature 1..1182: note = Variant of terminal deoxynucleotidyl transferase
  source 1..1182: mol_type = other DNA
atgcatcaccaccatcatcatgggggttctggtcatccggaaggtaataccccggagaaggaggtgccgagcgttatcgcccgtcatgttagtccgtacgcgtgccagcgcaagaccacgctgaataactacaacaaaaagatcaccgacgcgctggagatcatggccgagaactacaagtttaaagagaacctgcaggcgtgcctggaggcccgtcgcgccgcgagtgtcctgaaaagcctgccgttcgaggttaccagcatgaaagacatccaaggtctgccgtgcattaccgacgacgtacgtcctgtgatcgaagagatcatcgaagtaggcgagagcagccgtgttaaagaaatcctcaatgacgagcgctacaaggcctttaagcagttcaccagcgtgttcggtgtgggcgtcaagacctcggaaaagtggtaccgtatgggcctccgtacgcgcgaagaagcaaaggccagtaagagtctgaagctgaacaagatgcagaaggcgggcttcctgtattacgaggatctggcgagcggtgttagtaaagaagaagccgatgccgttctggatatcgtgaaggaaacggtgcgcactgttagtccggatgcgctggtgaccatcgccggcggtttccgccgtggcaaacctatgggccacgacgttgacctgctgatcacgattccgggcttgcctacggatgacgagctgctccacaaagtggttgatctgctcaagaagcaaggtctgctgctgtacggggacatccgtgagcgtacgttcgtggaggggcaactgccaaatcctaaacctgacgccctggacaaccatcagaagtgcttcgccattctcaagctgtaccgtccgaaggtggataacagtgcggttgggacgagtaagaaaagtgacatggctgaggttaaggattggaaagcggttcgtgtggatctggtggtcgctccagatgagcagttcgcctatgcgctgctcggttggacgggcagcggcatgtttcgtcgcgatactcgtcgctacgcggaggaagagcgcgacatgctgctcgacaaccatggtctctacgacctgaaaaagggcatctttctgagtgcggacagcgaagaagagattttcggtcatctggacctggattatctggagccgtgggaacgcaacgcg

SEQ ID NO: 5388 - protein, 394 aa, synthetic construct
  REGION 1..394: note = Variant of terminal deoxynucleotidyl transferase
MHHHHHHGGSGHPEGNTPEKEVPSVIARHVSPYACQRKTTLNNYNKKITDALEIMAENYKFKENLQACLEARRAASVLKSLPFEVTSMKDIQGLPCITDDVRPVIEEIIEVGESSRVKEILNDERYKAFKQFTSVFGVGVKTSEKWYRMGLRTREEAKASKSLKLNKMQKAGFLYYEDLASGVSKEEADAVLDIVKETVRTVSPDALVTIAGGFRRGKPMGHDVDLLITIPGLPTDDELLHKVVDLLKKQGLLLYGDIRERTFVEGQLPNPKPDALDNHQKCFAILKLYRPKVDNSAVGTSKKSDMAEVKDWKAVRVDLVVAPDEQFAYALLGWTGSGMFRRDTRRYAEEERDMLLDNHGLYDLKKGIFLSADSEEEIFGHLDLDYLEPWERNA

SEQ ID NO: 5389 - DNA, 1182 bp, synthetic construct
  misc_feature 1..1182: note = Variant of terminal deoxynucleotidyl transferase
  source 1..1182: mol_type = other DNA
atgcatcaccaccatcatcatgggggttctggtcatccggaaggtaataccccggagaaggaggtgccgagcgttatcgcccgtcatgttagtccgtacgcgtgccagcgcaagaccacgctgaataactacaacaaaaagatcaccgacgcgctggagatcatggccgagaactacaagtttaaagagaacctgcaggcgtgcctggaggcccgtcgcgccgcgagtgtcctgaaaagcctgccgttcgaggttaccagcatgaaagacatccaaggtctgccgtgcattaccgacgacgtacgtcctgtgatcgaagagatcatcgaagtaggcgagagcagccgtgttaaagaaatcctcaatgacgagcgctacaaggcctttaagcagttcaccagcgtgttcggtgtgggcgtcaagacctcggaaaagtggtaccgtatgggcctccgtacgcgcgaagaagcaaaggccagtaagagtctgaagctgaacaagatgcagaaggcgggcttcctgtattacgaggatctggcgagcggtgttagtaaagaagaagccgatgccgttctggatatcgtgaaggaaacggtgcgcactgttagtccggatgcgctggtgaccatcgccggcggtttccgccgtggcaaacctatgggccacgacgttgacctgctgatcacgattccgggccgtcctacggatgacgagctgctccacaaagtggttgatctgctcaagaagcaaggtctgctgctgtacggggacatccgtgagcgtacgttcgtggaggggcaactgccaaatcctaaacctgacgccctggacaaccatcagaagtgcttcgccattctcaagctgtaccgtccgaaggtggataacagtgcggttgggacgagtaagaaaagtgacatggctgaggttaaggattggaaagcggttcgtgtggatctggtggtcgctccagatgagcagttcgcctatgcgctgctcggttggacgggcagcggcatgtttcgtcgcgatactcgtcgctacgcggaggaagagcgcgacatgctgctcgacaaccatggtctctacgacctgaaaaagggcatctttctgagtgcgcagagcgaagaagagattttcggtcatctggacctggattatctggagccgtgggaacgcaacgcg

SEQ ID NO: 5390 - protein, 394 aa, synthetic construct
  REGION 1..394: note = Variant of terminal deoxynucleotidyl transferase
MHHHHHHGGSGHPEGNTPEKEVPSVIARHVSPYACQRKTTLNNYNKKITDALEIMAENYKFKENLQACLEARRAASVLKSLPFEVTSMKDIQGLPCITDDVRPVIEEIIEVGESSRVKEILNDERYKAFKQFTSVFGVGVKTSEKWYRMGLRTREEAKASKSLKLNKMQKAGFLYYEDLASGVSKEEADAVLDIVKETVRTVSPDALVTIAGGFRRGKPMGHDVDLLITIPGRPTDDELLHKVVDLLKKQGLLLYGDIRERTFVEGQLPNPKPDALDNHQKCFAILKLYRPKVDNSAVGTSKKSDMAEVKDWKAVRVDLVVAPDEQFAYALLGWTGSGMFRRDTRRYAEEERDMLLDNHGLYDLKKGIFLSAQSEEEIFGHLDLDYLEPWERNA

SEQ ID NO: 5391 - DNA, 1182 bp, synthetic construct
  misc_feature 1..1182: note = Variant of terminal deoxynucleotidyl transferase
  source 1..1182: mol_type = other DNA
atgcatcaccaccatcatcatgggggttctggtcatccggaaggtaataccccggagaaggaggtgccgagcgttatcgcccgtcatgttagtccgtacgcgtgccagcgcaagaccacgctgaataactacaacaaaaagatcaccgacgcgctggagatcatggccgagaactacaagtttaaagagaacctgcaggcgtgcctggaggcccgtcgcgccgcgagtgtcctgaaaagcctgccgttcgaggttaccagcatgaaagacatccaaggtctgccgtgcattaccgacgacgtacgtcctgtgatcgaagagatcatcgaagtaggcgagagcagccgtgttaaagaaatcctcaatgacgagcgctacaaggcctttaagcagttcaccagcgtgttcggtgtgggcgtcaagacctcggaaaagtggtaccgtatgggcctccgtacgcgcgaagaagcaaaggccagtaagagtctgaagctgaacaagatgcagaaggcgggcttcctgtattacgaggatctggcgagcggtgttagtaaagaagaagccgatgccgttctggatatcgtgaaggaaacggtgctgactgttagtccggatgcgctggtgaccatcgccggcggtttccgccgtggcaaacctatgggccacgacgttgacctgctgatcacgattccgggccgtcctacggatgacgagctgctccacaaagtggttgatctgctcaagaagcaaggtctgctgctgtacggggacatccgtgagcgtacgttcgtggaggggcaactgccaaatcctaaacctgacgccctggacaaccatcagaagtgcttcgccattctcaagctgtaccgtccgaaggtggataacagtgcggttgggacgagtaagaaaagtgacatggctgaggttaaggattggaaagcggttcgtgtggatctggtggtcgctccagatgagcagttcgcctatgcgctgctcggttggacgggcagcggcatgtttcgtcgcgatactcgtcgctacgcggaggaagagcgcgacatgctgctcgacaaccatggtctctacgacctgaaaaagggcatctttctgagtgcggacagcgaagaagagattttcggtcatctggacctggattatctggagccgtgggaacgcaacgcg

SEQ ID NO: 5392 - protein, 394 aa, synthetic construct
  REGION 1..394: note = Variant of terminal deoxynucleotidyl transferase
MHHHHHHGGSGHPEGNTPEKEVPSVIARHVSPYACQRKTTLNNYNKKITDALEIMAENYKFKENLQACLEARRAASVLKSLPFEVTSMKDIQGLPCITDDVRPVIEEIIEVGESSRVKEILNDERYKAFKQFTSVFGVGVKTSEKWYRMGLRTREEAKASKSLKLNKMQKAGFLYYEDLASGVSKEEADAVLDIVKETVLTVSPDALVTIAGGFRRGKPMGHDVDLLITIPGRPTDDELLHKVVDLLKKQGLLLYGDIRERTFVEGQLPNPKPDALDNHQKCFAILKLYRPKVDNSAVGTSKKSDMAEVKDWKAVRVDLVVAPDEQFAYALLGWTGSGMFRRDTRRYAEEERDMLLDNHGLYDLKKGIFLSADSEEEIFGHLDLDYLEPWERNA

SEQ ID NO: 5393 - DNA, 1182 bp, synthetic construct
  misc_feature 1..1182: note = Variant of terminal deoxynucleotidyl transferase
  source 1..1182: mol_type = other DNA
atgcatcaccaccatcatcatgggggttctggtcatccggaaggtaataccccggagaaggaggtgccgagcgttatcgcccgtcatgttagtccgtacgcgtgccagcgcaagaccacgctgaataactacaacaaaaagatcaccgacgcgctggagatcatggccgagaactacaagtttaaagagaacctgcaggcgtgcctggaggcccgtcgcgccgcgagtgtcctgaaaagcctgccgttcgaggttaccagcatgaaagacatccaaggtctgccgtgcattaccgacgacgtacgtcctgtgatcgaagagatcatcgaagtaggcgagagcagccgtgttaaagaaatcctcaatgacgagcgctacaaggcctttaagcagttcaccagcgtgttcggtgtgggcgtcaagacctcggaaaagtggtaccgtatgggcctccgtacgcgcgaagaagcaaaggccagtaagagtctgaagctgaacaagatgcagaaggcgggcttcctgtattacgaggatctggcgagcggtgttagtaaagaagaagccgatgccgttctggatatcgtgaaggaaacggtgcgcactgttagtccggatgcgctggtgaccatcgtgggcggtttccgccgtggcaaacctatgggccacgacgttgacctgctgatcacgattccgggccgtcctacggatgacgagctgctccacaaagtggttgatctgctcaagaagcaaggtctgctgctgtacggggacatccgtgagcgtacgttcgtggaggggcaactgccaaatcctaaacctgacgccctggacaaccatcagaagtgcttcgccattctcaagctgtaccgtccgaaggtggataacagtgcggttgggacgagtaagaaaagtgacatggctgaggttaaggattggaaagcggttcgtgtggatctggtggtcgctccagatgagcagttcgcctatgcgctgctcggttggacgggcagcggcatgtttcgtcgcgatactcgtcgctacgcggaggaagagcgcgacatgctgctcgacaaccatggtctctacgacctgaaaaagggcatctttctgagtgcggacagcgaagaagagattttcggtcatctggacctggattatctggagccgtgggaacgcaacgcg

SEQ ID NO: 5394 - protein, 394 aa, synthetic construct
  REGION 1..394: note = Variant of terminal deoxynucleotidyl transferase
MHHHHHHGGSGHPEGNTPEKEVPSVIARHVSPYACQRKTTLNNYNKKITDALEIMAENYKFKENLQACLEARRAASVLKSLPFEVTSMKDIQGLPCITDDVRPVIEEIIEVGESSRVKEILNDERYKAFKQFTSVFGVGVKTSEKWYRMGLRTREEAKASKSLKLNKMQKAGFLYYEDLASGVSKEEADAVLDIVKETVRTVSPDALVTIVGGFRRGKPMGHDVDLLITIPGRPTDDELLHKVVDLLKKQGLLLYGDIRERTFVEGQLPNPKPDALDNHQKCFAILKLYRPKVDNSAVGTSKKSDMAEVKDWKAVRVDLVVAPDEQFAYALLGWTGSGMFRRDTRRYAEEERDMLLDNHGLYDLKKGIFLSADSEEEIFGHLDLDYLEPWERNA

SEQ ID NO: 5395 - DNA, 1182 bp, synthetic construct
  misc_feature 1..1182: note = Variant of terminal deoxynucleotidyl transferase
  source 1..1182: mol_type = other DNA
atgcatcaccaccatcatcatgggggttctggtcatccggaaggtaataccccggagaaggaggtgccgagcgttatcgcccgtcatgttagtccgtacgcgtgccagcgcaagaccacgctgaataactacaacaaaaagatcaccgacgcgctggagatcatggccgagaactacaagtttaaagagaacctgcaggcgtgcctggaggcccgtcgcgccgcgagtgtcctgaaaagcctgccgttcgaggttaccagcatgaaagacatccaaggtctgccgtgcattaccgacgacgtacgtcctgtgatcgaagagatcatcgaagtaggcgagagcagccgtgttaaagaaatcctcaatgacgagcgctacaaggcctttaagcagttcaccagcgtgttcggtgtgggcgtcaagacctcggaaaagtggtaccgtatgggcctccgtacgcgcgaagaagcaaaggccagtaagagtctgaagctgaacaagatgcagaaggcgggcttcctgtattacgaggatctggcgagcggtgttagtaaagaagaagccgatgccttgctggatatcgtgaaggaaacggtgcgcactgttagtccggatgcgctggtgaccatcgccggcggtttccgccgtggcaaacctatgggccacgacgttgacctgctgatcacgattccgggccgtcctacggatgacgagctgctccacaaagtggttgatctgctcaagaagcaaggtctgctgctgtacggggacatccgtgagcgtacgttcgtggaggggcaactgccaaatcctaaacctgacgccctggacaaccatcagaagtgcttcgccattctcaagctgtaccgtccgaaggtggataacagtgcggttgggacgagtaagaaaagtgacatggctgaggttaaggattggaaagcggttcgtgtggatctggtggtcgctccagatgagcagttcgcctatgcgctgctcggttggacgggcagcggcatgtttcgtcgcgatactcgtcgctacgcggaggaagagcgcgacatgctgctcgacaaccatggtctctacgacctgaaaaagggcatctttctgagtgcggacagcgaagaagagattttcggtcatctggacctggattatctggagccgtgggaacgcaacgcg

SEQ ID NO: 5396 - protein, 394 aa, synthetic construct
  REGION 1..394: note = Variant of terminal deoxynucleotidyl transferase
MHHHHHHGGSGHPEGNTPEKEVPSVIARHVSPYACQRKTTLNNYNKKITDALEIMAENYKFKENLQACLEARRAASVLKSLPFEVTSMKDIQGLPCITDDVRPVIEEIIEVGESSRVKEILNDERYKAFKQFTSVFGVGVKTSEKWYRMGLRTREEAKASKSLKLNKMQKAGFLYYEDLASGVSKEEADALLDIVKETVRTVSPDALVTIAGGFRRGKPMGHDVDLLITIPGRPTDDELLHKVVDLLKKQGLLLYGDIRERTFVEGQLPNPKPDALDNHQKCFAILKLYRPKVDNSAVGTSKKSDMAEVKDWKAVRVDLVVAPDEQFAYALLGWTGSGMFRRDTRRYAEEERDMLLDNHGLYDLKKGIFLSADSEEEIFGHLDLDYLEPWERNA

SEQ ID NO: 5397 - DNA, 1182 bp, synthetic construct
  misc_feature 1..1182: note = Variant of terminal deoxynucleotidyl transferase
  source 1..1182: mol_type = other DNA
atgcatcaccaccatcatcatgggggttctggtcatccggaaggtaataccccggagaaggaggtgccgagcgttatcgcccgtcatgttagtccgtacgcgtgccagcgcaagaccacgctgaataactacaacaaaaagatcaccgacgcgctggagatcatggccgagaactacaagtttaaagagaacctgcaggcgtgcctggaggcccgtcgcgccgcgagtgtcctgaaaagcctgccgttcgaggttaccagcatgaaagacatccaaggtctgccgtgcattaccgacgacgtacgtcctgtgatcgaagagatcatcgaagtaggcgagagcagccgtgttaaagaaatcctcaatgacgagcgctacaaggcctttaagcagttcaccagcgtgttcggtgtgggcgtcaagacctcggaaaagtggtaccgtatgggcctccgtacgcgcgaagaagcaaaggccagtaagagtctgaagctgaacaagatgcagaaggcgggcttcctgtattacgaggatctggcgagcggtgttagtaaagaagaagccgatgccgttctggatatcgtgaaggaaacgtggcgcactgttagtccggatgcgctggtgaccatcgccggcggtttccgccgtggcaaacctatgggccacgacgttgacctgctgatcacgattccgggccgtcctacggatgacgagctgctccacaaagtggttgatctgctcaagaagcaaggtctgctgctgtacggggacatccgtgagcgtacgttcgtggaggggcaactgccaaatcctaaacctgacgccctggacaaccatcagaagtgcttcgccattctcaagctgtaccgtccgaaggtggataacagtgcggttgggacgagtaagaaaagtgacatggctgaggttaaggattggaaagcggttcgtgtggatctggtggtcgctccagatgagcagttcgcctatgcgctgctcggttggacgggcagcggcatgtttcgtcgcgatactcgtcgctacgcggaggaagagcgcgacatgctgctcgacaaccatggtctctacgacctgaaaaagggcatctttctgagtgcggacagcgaagaagagattttcggtcatctggacctggattatctggagccgtgggaacgcaacgcg

SEQ ID NO: 5398 - protein, 394 aa, synthetic construct
  REGION 1..394: note = Variant of terminal deoxynucleotidyl transferase
MHHHHHHGGSGHPEGNTPEKEVPSVIARHVSPYACQRKTTLNNYNKKITDALEIMAENYKFKENLQACLEARRAASVLKSLPFEVTSMKDIQGLPCITDDVRPVIEEIIEVGESSRVKEILNDERYKAFKQFTSVFGVGVKTSEKWYRMGLRTREEAKASKSLKLNKMQKAGFLYYEDLASGVSKEEADAVLDIVKETWRTVSPDALVTIAGGFRRGKPMGHDVDLLITIPGRPTDDELLHKVVDLLKKQGLLLYGDIRERTFVEGQLPNPKPDALDNHQKCFAILKLYRPKVDNSAVGTSKKSDMAEVKDWKAVRVDLVVAPDEQFAYALLGWTGSGMFRRDTRRYAEEERDMLLDNHGLYDLKKGIFLSADSEEEIFGHLDLDYLEPWERNA

SEQ ID NO: 5399 - DNA, 1182 bp, synthetic construct
  misc_feature 1..1182: note = Variant of terminal deoxynucleotidyl transferase
  source 1..1182: mol_type = other DNA
atgcatcaccaccatcatcatgggggttctggtcatccggaaggtaataccccggagaaggaggtgccgagcgttatcgcccgtcatgttagtccgtacgcgtgccagcgcaagaccacgctgaataactacaacaaaaagatcaccgacgcgctggagatcatggccgagaactacaagtttaaagagaacctgcaggcgtgcctggaggcccgtcgcgccgcgagtgtcctgaaaagcctgccgttcgaggttaccagcatgaaagacatccaaggtctgccgtgcattaccgacgacgtacgtcctgtgatcgaagagatcatcgaagtaggcgagagcagccgtgttaaagaaatcctcaatgacgagcgctacaaggcctttaagcagttcaccagcgtgttcggtgtgggcgtcaagacctcggaaaagtggtaccgtatgggcctccgtacgcgcgaagaagcaaaggccagtaagagtctgaagctgaacaagatgcagaaggcgggcttcctgtattacgaggatctggcgagcggtgttagtaaagaagaagccgatgccgttctggatatcgtgaaggaaacggtgcgcactgttagtccggatcatctggtgaccatcgccggcggtttccgccgtggcaaacctatgggccacgacgttgacctgctgatcacgattccgggccgtcctacggatgacgagctgctccacaaagtggttgatctgctcaagaagcaaggtctgctgctgtacggggacatccgtgagcgtacgttcgtggaggggcaactgccaaatcctaaacctgacgccctggacaaccatcagaagtgcttcgccattctcaagctgtaccgtccgaaggtggataacagtgcggttgggacgagtaagaaaagtgacatggctgaggttaaggattggaaagcggttcgtgtggatctggtggtcgctccagatgagcagttcgcctatgcgctgctcggttggacgggcagcggcatgtttcgtcgcgatactcgtcgctacgcggaggaagagcgcgacatgctgctcgacaaccatggtctctacgacctgaaaaagggcatctttctgagtgcggacagcgaagaagagattttcggtcatctggacctggattatctggagccgtgggaacgcaacgcg

SEQ ID NO: 5400 - protein, 394 aa, synthetic construct
  REGION 1..394: note = Variant of terminal deoxynucleotidyl transferase
MHHHHHHGGSGHPEGNTPEKEVPSVIARHVSPYACQRKTTLNNYNKKITDALEIMAENYKFKENLQACLEARRAASVLKSLPFEVTSMKDIQGLPCITDDVRPVIEEIIEVGESSRVKEILNDERYKAFKQFTSVFGVGVKTSEKWYRMGLRTREEAKASKSLKLNKMQKAGFLYYEDLASGVSKEEADAVLDIVKETVRTVSPDHLVTIAGGFRRGKPMGHDVDLLITIPGRPTDDELLHKVVDLLKKQGLLLYGDIRERTFVEGQLPNPKPDALDNHQKCFAILKLYRPKVDNSAVGTSKKSDMAEVKDWKAVRVDLVVAPDEQFAYALLGWTGSGMFRRDTRRYAEEERDMLLDNHGLYDLKKGIFLSADSEEEIFGHLDLDYLEPWERNA

SEQ ID NO: 5401 - DNA, 1182 bp, synthetic construct
  misc_feature 1..1182: note = Variant of terminal deoxynucleotidyl transferase
  source 1..1182: mol_type = other DNA
atgcatcaccaccatcatcatgggggttctggtcatccggaaggtaataccccggagaaggaggtgccgagcgttatcgcccgtcatgttagtccgtacgcgtgccagcgcaagaccacgctgaataactacaacaaaaagatcaccgacgcgctggagatcatggccgagaactacaagtttaaagagaacctgcaggcgtgcctggaggcccgtcgcgccgcgagtgtcctgaaaagcctgccgttcgaggttaccagcatgaaagacatccaaggtctgccgtgcattaccgacgacgtacgtcctgtgatcgaagagatcatcgaagtaggcgagagcagccgtgttaaagaaatcctcaatgacgagcgctacaaggcctttaagcagttcaccagcgtgttcggtgtgggcgtcaagacctcggaaaagtggtaccgtatgggcctccgtacgcgcgaagaagcaaaggccagtaagagtctgaagctgaacaagatgcagaaggcgggcttcctgtattacgaggatctggcgagcggtgttagtaaagaagaagccgatgccgttctggggatcgtgaaggaaacggtgcgcactgttagtccggatgcgctggtgaccatcgccggcggtttccgccgtggcaaacctatgggccacgacgttgacctgctgatcacgattccgggccgtcctacggatgacgagctgctccacaaagtggttgatctgctcaagaagcaaggtctgctgctgtacggggacatccgtgagcgtacgttcgtggaggggcaactgccaaatcctaaacctgacgccctggacaaccatcagaagtgcttcgccattctcaagctgtaccgtccgaaggtggataacagtgcggttgggacgagtaagaaaagtgacatggctgaggttaaggattggaaagcggttcgtgtggatctggtggtcgctccagatgagcagttcgcctatgcgctgctcggttggacgggcagcggcatgtttcgtcgcgatactcgtcgctacgcggaggaagagcgcgacatgctgctcgacaaccatggtctctacgacctgaaaaagggcatctttctgagtgcggacagcgaagaagagattttcggtcatctggacctggattatctggagccgtgggaacgcaacgcg

SEQ ID NO: 5402 - protein, 394 aa, synthetic construct
  REGION 1..394: note = Variant of terminal deoxynucleotidyl transferase
MHHHHHHGGSGHPEGNTPEKEVPSVIARHVSPYACQRKTTLNNYNKKITDALEIMAENYKFKENLQACLEARRAASVLKSLPFEVTSMKDIQGLPCITDDVRPVIEEIIEVGESSRVKEILNDERYKAFKQFTSVFGVGVKTSEKWYRMGLRTREEAKASKSLKLNKMQKAGFLYYEDLASGVSKEEADAVLGIVKETVRTVSPDALVTIAGGFRRGKPMGHDVDLLITIPGRPTDDELLHKVVDLLKKQGLLLYGDIRERTFVEGQLPNPKPDALDNHQKCFAILKLYRPKVDNSAVGTSKKSDMAEVKDWKAVRVDLVVAPDEQFAYALLGWTGSGMFRRDTRRYAEEERDMLLDNHGLYDLKKGIFLSADSEEEIFGHLDLDYLEPWERNA

SEQ ID NO: 5403 - DNA, 1182 bp, synthetic construct
  misc_feature 1..1182: note = Variant of terminal deoxynucleotidyl transferase
  source 1..1182: mol_type = other DNA
atgcatcaccaccatcatcatgggggttctggtcatccggaaggtaataccccggagaaggaggtgccgagcgttatcgcccgtcatgttagtccgtacgcgtgccagcgcaagaccacgctgaataactacaacaaaaagatcaccgacgcgctggagatcatggccgagaactacaagtttaaagagaacctgcaggcgtgcctggaggcccgtcgcgccgcgagtgtcctgaaaagcctgccgttcgaggttaccagcatgaaagacatccaaggtctgccgtgcattaccgacgacgtacgtcctgtgatcgaagagatcatcgaagtaggcgagagcagccgtgttaaagaaatcctcaatgacgagcgctacaaggcctttaagcagttcaccagcgtgttcggtgtgggcgtcaagacctcggaaaagtggtaccgtatgggcctccgtacgcgcgaagaagcaaaggccagtaagagtctgaagctgaacaagatgcagaaggcgggcttcctgtattacgaggatctggcgagcggtgttagtaaagaagaagttgatgccgttctggatatcgtgaaggaaacggtgcgcactgttagtccggatgcgctggtgaccatcgccggcggtttccgccgtggcaaacctatgggccacgacgttgacctgctgatcacgattccgggccgtcctacggatgacgagctgctccacaaagtggttgatctgctcaagaagcaaggtctgctgctgtacggggacatccgtgagcgtacgttcgtggaggggcaactgccaaatcctaaacctgacgccctggacaaccatcagaagtgcttcgccattctcaagctgtaccgtccgaaggtggataacagtgcggttgggacgagtaagaaaagtgacatggctgaggttaaggattggaaagcggttcgtgtggatctggtggtcgctccagatgagcagttcgcctatgcgctgctcggttggacgggcagcggcatgtttcgtcgcgatactcgtcgctacgcggaggaagagcgcgacatgctgctcgacaaccatggtctctacgacctgaaaaagggcatctttctgagtgcggacagcgaagaagagattttcggtcatctggacctggattatctggagccgtgggaacgcaacgcg

SEQ ID NO: 5404 - protein, 394 aa, synthetic construct
  REGION 1..394: note = Variant of terminal deoxynucleotidyl transferase
MHHHHHHGGSGHPEGNTPEKEVPSVIARHVSPYACQRKTTLNNYNKKITDALEIMAENYKFKENLQACLEARRAASVLKSLPFEVTSMKDIQGLPCITDDVRPVIEEIIEVGESSRVKEILNDERYKAFKQFTSVFGVGVKTSEKWYRMGLRTREEAKASKSLKLNKMQKAGFLYYEDLASGVSKEEVDAVLDIVKETVRTVSPDALVTIAGGFRRGKPMGHDVDLLITIPGRPTDDELLHKVVDLLKKQGLLLYGDIRERTFVEGQLPNPKPDALDNHQKCFAILKLYRPKVDNSAVGTSKKSDMAEVKDWKAVRVDLVVAPDEQFAYALLGWTGSGMFRRDTRRYAEEERDMLLDNHGLYDLKKGIFLSADSEEEIFGHLDLDYLEPWERNA

SEQ ID NO: 5405 - DNA, 1182 bp, synthetic construct
  misc_feature 1..1182: note = Variant of terminal deoxynucleotidyl transferase
  source 1..1182: mol_type = other DNA
atgcatcaccaccatcatcatgggggttctggtcatccggaaggtaataccccggagaaggaggtgccgagcgttatcgcccgtcatgttagtccgtacgcgtgccagcgcaagaccacgctgaataactacaacaaaaagatcaccgacgcgctggagatcatggccgagaactacaagtttaaagagaacctgcaggcgtgcctggaggcccgtcgcgccgcgagtgtcctgaaaagcctgccgttcgaggttaccagcatgaaagacatccaaggtctgccgtgcattaccgacgacgtacgtcctgtgatcgaagagatcatcgaagtaggcgagagcagccgtgttaaagaaatcctcaatgacgagcgctacaaggcctttaagcagttcaccagcgtgttcggtgtgggcgtcaagacctcggaaaagtggtaccgtatgggcctccgtacgcgcgaagaagcaaaggccagtaagagtctgaagctgaacaagatgcagaaggcgggcttcctgtattacgaggatctggcgagcggtgttagtaaagaagaagccgatgccgttgtggatatcgtgaaggaaacggtgcgcactgttagtccggatgcgctggtgaccatcgccggcggtttccgccgtggcaaacctatgggccacgacgttgacctgctgatcacgattccgggccgtcctacggatgacgagctgctccacaaagtggttgatctgctcaagaagcaaggtctgctgctgtacggggacatccgtgagcgtacgttcgtggaggggcaactgccaaatcctaaacctgacgccctggacaaccatcagaagtgcttcgccattctcaagctgtaccgtccgaaggtggataacagtgcggttgggacgagtaagaaaagtgacatggctgaggttaaggattggaaagcggttcgtgtggatctggtggtcgctccagatgagcagttcgcctatgcgctgctcggttggacgggcagcggcatgtttcgtcgcgatactcgtcgctacgcggaggaagagcgcgacatgctgctcgacaaccatggtctctacgacctgaaaaagggcatctttctgagtgcggacagcgaagaagagattttcggtcatctggacctggattatctggagccgtgggaacgcaacgcg

SEQ ID NO: 5406 - protein, 394 aa, synthetic construct
  REGION 1..394: note = Variant of terminal deoxynucleotidyl transferase
MHHHHHHGGSGHPEGNTPEKEVPSVIARHVSPYACQRKTTLNNYNKKITDALEIMAENYKFKENLQACLEARRAASVLKSLPFEVTSMKDIQGLPCITDDVRPVIEEIIEVGESSRVKEILNDERYKAFKQFTSVFGVGVKTSEKWYRMGLRTREEAKASKSLKLNKMQKAGFLYYEDLASGVSKEEADAVVDIVKETVRTVSPDALVTIAGGFRRGKPMGHDVDLLITIPGRPTDDELLHKVVDLLKKQGLLLYGDIRERTFVEGQLPNPKPDALDNHQKCFAILKLYRPKVDNSAVGTSKKSDMAEVKDWKAVRVDLVVAPDEQFAYALLGWTGSGMFRRDTRRYAEEERDMLLDNHGLYDLKKGIFLSADSEEEIFGHLDLDYLEPWERNA

SEQ ID NO: 5407 - DNA, 1182 bp, synthetic construct
  misc_feature 1..1182: note = Variant of terminal deoxynucleotidyl transferase
  source 1..1182: mol_type = other DNA
atgcatcaccaccatcatcatgggggttctggtcatccggaaggtaataccccggagaaggaggtgccgagcgttatcgcccgtcatgttagtccgtacgcgtgccagcgcaagaccacgctgaataactacaacaaaaagatcaccgacgcgctggagatcatggccgagaactacaagtttaaagagaacctgcaggcgtgcctggaggcccgtcgcgccgcgagtgtcctgaaaagcctgccgttcgaggttaccagcatgaaagacatccaaggtctgccgtgcattaccgacgacgtacgtcctgtgatcgaagagatcatcgaagtaggcgagagcagccgtgttaaagaaatcctcaatgacgagcgctacaaggcctttaagcagttcaccagcgtgttcggtgtgggcgtcaagacctcggaaaagtggtaccgtatgggcctccgtacgcgcgaagaagcaaaggccagtaagagtctgaagctgaacaagatgcagaaggcgggcttcctgtattacgaggatctggcgagcggtgttagtaaagaagaagccgatgccgttctggatatcgtgaaggaaacggtgcgcactgttagtccggatgcgctggtgaccatcgccggcggtttccgccgtggcaaacctatgggccacgacgttgacctgctgatcacgattccgggccgtcctacggatgacgagctgctccacaaagtggttgatctgctcaagaagcaaggtctgctgctgtacggggacatccgtgagcgtacgttcgtggaggggcaactgccaaatcctaaacctgacgccctggacaaccatcagaagtgcttcgccattctcaagctgtaccgtccgaaggtggataacagtgcggttgtgacgagtaagaaaagtgacatggctgaggttaaggattggaaagcggttcgtgtggatctggtggtcgctccagatgagcagttcgcctatgcgctgctcggttggacgggcagcggcatgtttcgtcgcgatactcgtcgctacgcggaggaagagcgcgacatgctgctcgacaaccatggtctctacgacctgaaaaagggcatctttctgagtgcggacagcgaagaagagattttcggtcatctggacctggattatctggagccgtgggaacgcaacgcg

SEQ ID NO: 5408 - protein, 394 aa, synthetic construct
  REGION 1..394: note = Variant of terminal deoxynucleotidyl transferase
MHHHHHHGGSGHPEGNTPEKEVPSVIARHVSPYACQRKTTLNNYNKKITDALEIMAENYKFKENLQACLEARRAASVLKSLPFEVTSMKDIQGLPCITDDVRPVIEEIIEVGESSRVKEILNDERYKAFKQFTSVFGVGVKTSEKWYRMGLRTREEAKASKSLKLNKMQKAGFLYYEDLASGVSKEEADAVLDIVKETVRTVSPDALVTIAGGFRRGKPMGHDVDLLITIPGRPTDDELLHKVVDLLKKQGLLLYGDIRERTFVEGQLPNPKPDALDNHQKCFAILKLYRPKVDNSAVVTSKKSDMAEVKDWKAVRVDLVVAPDEQFAYALLGWTGSGMFRRDTRRYAEEERDMLLDNHGLYDLKKGIFLSADSEEEIFGHLDLDYLEPWERNA

SEQ ID NO: 5409 - DNA, 1182 bp, synthetic construct
  misc_feature 1..1182: note = Variant of terminal deoxynucleotidyl transferase
  source 1..1182: mol_type = other DNA
atgcatcaccaccatcatcatgggggttctggtcatccggaaggtaataccccggagaaggaggtgccgagcgttatcgcccgtcatgttagtccgtacgcgtgccagcgcaagaccacgctgaataactacaacaaaaagatcaccgacgcgctggagatcatggccgagaactacaagtttaaagagaacctgcaggcgtgcctggaggcccgtcgcgccgcgagtgtcctgaaaagcctgccgttcgaggttaccagcatgaaagacatccaaggtctgccgtgcattaccgacgacgtacgtcctgtgatcgaagagatcatcgaagtaggcgagagcagccgtgttaaagaaatcctcaatgacgagcgctacaaggcctttaagcagttcaccagcgtgttcggtgtgggcgtcaagacctcggaaaagtggtaccgtatgggcctccgtacgcgcgaagaagcaaaggccagtaagagtctgaagctgaacaagatgcagaaggcgggcttcctgtattacgaggatctggcgagcggtgttagtaaagaagaagccgatgccgttctggatatcgtgaaggaaacggtgcgcactgttagtccggatgcgctggtgaccatcgccggcggtttccgccgtggcaaacctatgggccacgacgttgacctgctgatcacgattccgggccgtcagacggatgacgagctgctccacaaagtggttgatctgctcaagaagcaaggtctgctgctgtacggggacatccgtgagcgtacgttcgtggaggggcaactgccaaatcctaaacctgacgccctggacaaccatcagaagtgcttcgccattctcaagctgtaccgtccgaaggtggataacagtgcggttgggacgagtaagaaaagtgacatggctgaggttaaggattggaaagcggttcgtgtggatctggtggtcgctccagatgagcagttcgcctatgcgctgctcggttggacgggcagcggcatgtttcgtcgcgatactcgtcgctacgcggaggaagagcgcgacatgctgctcgacaaccatggtctctacgacctgaaaaagggcatctttctgagtgcggacagcgaagaagagattttcggtcatctggacctggattatctggagccgtgggaacgcaacgcg

SEQ ID NO: 5410 - protein, 394 aa, synthetic construct
  REGION 1..394: note = Variant of terminal deoxynucleotidyl transferase
MHHHHHHGGSGHPEGNTPEKEVPSVIARHVSPYACQRKTTLNNYNKKITDALEIMAENYKFKENLQACLEARRAASVLKSLPFEVTSMKDIQGLPCITDDVRPVIEEIIEVGESSRVKEILNDERYKAFKQFTSVFGVGVKTSEKWYRMGLRTREEAKASKSLKLNKMQKAGFLYYEDLASGVSKEEADAVLDIVKETVRTVSPDALVTIAGGFRRGKPMGHDVDLLITIPGRQTDDELLHKVVDLLKKQGLLLYGDIRERTFVEGQLPNPKPDALDNHQKCFAILKLYRPKVDNSAVGTSKKSDMAEVKDWKAVRVDLVVAPDEQFAYALLGWTGSGMFRRDTRRYAEEERDMLLDNHGLYDLKKGIFLSADSEEEIFGHLDLDYLEPWERNA

SEQ ID NO: 5411 - DNA, 1182 bp, synthetic construct
  misc_feature 1..1182: note = Variant of terminal deoxynucleotidyl transferase
  source 1..1182: mol_type = other DNA
atgcatcaccaccatcatcatgggggttctggtcatccggaaggtaataccccggagaaggaggtgccgagcgttatcgcccgtcatgttagtccgtacgcgtgccagcgcaagaccacgctgaataactacaacaaaaagatcaccgacgcgctggagatcatggccgagaactacaagtttaaagagaacctgcaggcgtgcctggaggcccgtcgcgccgcgagtgtcctgaaaagcctgccgttcgaggttaccagcatgaaagacatccaaggtctgccgtgcattaccgacgacgtacgtcctgtgatcgaagagatcatcgaagtaggcgagagcagccgtgttaaagaaatcctcaatgacgagcgctacaaggcctttaagcagttcaccagcgtgttcggtgtgggcgtcaagacctcggaaaagtggtaccgtatgggcctccgtacgcgcgaagaagcaaaggccagtaagagtctgaagctgaacaagatgcagaaggcgggcttcctgtattacgaggatctggcgagcggtgttagtaaagaagaagccgatgccgttctggatatcgtgaaggaaacggtgcgcactgttagtccggatgcgctggtgcggatcgccggcggtttccgccgtggcaaacctatgggccacgacgttgacctgctgatcacgattccgggccgtcctacggatgacgagctgctccacaaagtggttgatctgctcaagaagcaaggtctgctgctgtacggggacatccgtgagcgtacgttcgtggaggggcaactgccaaatcctaaacctgacgccctggacaaccatcagaagtgcttcgccattctcaagctgtaccgtccgaaggtggataacagtgcggttgggacgagtaagaaaagtgacatggctgaggttaaggattggaaagcggttcgtgtggatctggtggtcgctccagatgagcagttcgcctatgcgctgctcggttggacgggcagcggcatgtttcgtcgcgatactcgtcgctacgcggaggaagagcgcgacatgctgctcgacaaccatggtctctacgacctgaaaaagggcatctttctgagtgcggacagcgaagaagagattttcggtcatctggacctggattatctggagccgtgggaacgcaacgcg

SEQ ID NO: 5412 - protein, 394 aa, synthetic construct
  REGION 1..394: note = Variant of terminal deoxynucleotidyl transferase
MHHHHHHGGSGHPEGNTPEKEVPSVIARHVSPYACQRKTTLNNYNKKITDALEIMAENYKFKENLQACLEARRAASVLKSLPFEVTSMKDIQGLPCITDDVRPVIEEIIEVGESSRVKEILNDERYKAFKQFTSVFGVGVKTSEKWYRMGLRTREEAKASKSLKLNKMQKAGFLYYEDLASGVSKEEADAVLDIVKETVRTVSPDALVRIAGGFRRGKPMGHDVDLLITIPGRPTDDELLHKVVDLLKKQGLLLYGDIRERTFVEGQLPNPKPDALDNHQKCFAILKLYRPKVDNSAVGTSKKSDMAEVKDWKAVRVDLVVAPDEQFAYALLGWTGSGMFRRDTRRYAEEERDMLLDNHGLYDLKKGIFLSADSEEEIFGHLDLDYLEPWERNA

SEQ ID NO: 5413 - DNA, 1182 bp, synthetic construct
  misc_feature 1..1182: note = Variant of terminal deoxynucleotidyl transferase
  source 1..1182: mol_type = other DNA
atgcatcaccaccatcatcatgggggttctggtcatccggaaggtaataccccggagaaggaggtgccgagcgttatcgcccgtcatgttagtccgtacgcgtgccagcgcaagaccacgctgaataactacaacaaaaagatcaccgacgcgctggagatcatggccgagaactacaagtttaaagagaacctgcaggcgtgcctggaggcccgtcgcgccgcgagtgtcctgaaaagcctgccgttcgaggttaccagcatgaaagacatccaaggtctgccgtgcattaccgacgacgtacgtcctgtgatcgaagagatcatcgaagtaggcgagagcagccgtgttaaagaaatcctcaatgacgagcgctacaaggcctttaagcagttcaccagcgtgttcggtgtgggcgtcaagacctcggaaaagtggtaccgtatgggcctccgtacgcgcgaagaagcaaaggccagtaagagtctgaagctgaacaagatgcagaaggcgggcttcctgtattacgaggatctggcgagcggtgttagtaaagaagaagccgatgccgttctggatatcattaaggaaacggtgcgcactgttagtccggatgcgctggtgaccatcgccggcggtttccgccgtggcaaacctatgggccacgacgttgacctgctgatcacgattccgggccgtcctacggatgacgagctgctccacaaagtggttgatctgctcaagaagcaaggtctgctgctgtacggggacatccgtgagcgtacgttcgtggaggggcaactgccaaatcctaaacctgacgccctggacaaccatcagaagtgcttcgccattctcaagctgtaccgtccgaaggtggataacagtgcggttgggacgagtaagaaaagtgacatggctgaggttaaggattggaaagcggttcgtgtggatctggtggtcgctccagatgagcagttcgcctatgcgctgctcggttggacgggcagcggcatgtttcgtcgcgatactcgtcgctacgcggaggaagagcgcgacatgctgctcgacaaccatggtctctacgacctgaaaaagggcatctttctgagtgcggacagcgaagaagagattttcggtcatctggacctggattatctggagccgtgggaacgcaacgcg

SEQ ID NO: 5414 - protein, 394 aa, synthetic construct
  REGION 1..394: note = Variant of terminal deoxynucleotidyl transferase
MHHHHHHGGSGHPEGNTPEKEVPSVIARHVSPYACQRKTTLNNYNKKITDALEIMAENYKFKENLQACLEARRAASVLKSLPFEVTSMKDIQGLPCITDDVRPVIEEIIEVGESSRVKEILNDERYKAFKQFTSVFGVGVKTSEKWYRMGLRTREEAKASKSLKLNKMQKAGFLYYEDLASGVSKEEADAVLDIIKETVRTVSPDALVTIAGGFRRGKPMGHDVDLLITIPGRPTDDELLHKVVDLLKKQGLLLYGDIRERTFVEGQLPNPKPDALDNHQKCFAILKLYRPKVDNSAVGTSKKSDMAEVKDWKAVRVDLVVAPDEQFAYALLGWTGSGMFRRDTRRYAEEERDMLLDNHGLYDLKKGIFLSADSEEEIFGHLDLDYLEPWERNA

SEQ ID NO: 5415 - DNA, 1182 bp, synthetic construct
  misc_feature 1..1182: note = Variant of terminal deoxynucleotidyl transferase
  source 1..1182: mol_type = other DNA
atgcatcaccaccatcatcatgggggttctggtcatccggaaggtaataccccggagaaggaggtgccgagcgttatcgcccgtcatgttagtccgtacgcgtgccagcgcaagaccacgctgaataactacaacaaaaagatcaccgacgcgctggagatcatggccgagaactacaagtttaaagagaacctgcaggcgtgcctggaggcccgtcgcgccgcgagtgtcctgaaaagcctgccgttcgaggttaccagcatgaaagacatccaaggtctgccgtgcattaccgacgacgtacgtcctgtgatcgaagagatcatcgaagtaggcgagagcagccgtgttaaagaaatcctcaatgacgagcgctacaaggcctttaagcagttcaccagcgtgttcggtgtgggcgtcaagacctcggaaaagtggtaccgtatgggcctccgtacgcgcgaagaagcaaaggccagtaagagtctgaagctgaacaagatgcagaaggcgggcttcctgtattacgaggatctggcgagcggtgttagtaaagaagaagccgatgccgttctggatatcgtgaaggaaacggtgcgcactgttagtccggatgcgctggtgaccatcgccggcggtttccgccgtggcaaacctatgggccacgacgttgacctgctgatcacgattccgggccgtcctacggatgacgagctgctccacaaagtggttgatctgctcaagaagcaaggtctgctgctgtacggggacatccgtgagcgtacgttcgtggaggggcaactgccaaatcctaaacctgacgccctggacaaccatcagaagtgcttcgccattctcaagctgtaccgtccgaaggtggataacagtggtgttgggacgagtaagaaaagtgacatggctgaggttaaggattggaaagcggttcgtgtggatctggtggtcgctccagatgagcagttcgcctatgcgctgctcggttggacgggcagcggcatgtttcgtcgcgatactcgtcgctacgcggaggaagagcgcgacatgctgctcgacaaccatggtctctacgacctgaaaaagggcatctttctgagtgcggacagcgaagaagagattttcggtcatctggacctggattatctggagccgtgggaacgcaacgcg

SEQ ID NO: 5416 - protein, 394 aa, synthetic construct
  REGION 1..394: note = Variant of terminal deoxynucleotidyl transferase
MHHHHHHGGSGHPEGNTPEKEVPSVIARHVSPYACQRKTTLNNYNKKITDALEIMAENYKFKENLQACLEARRAASVLKSLPFEVTSMKDIQGLPCITDDVRPVIEEIIEVGESSRVKEILNDERYKAFKQFTSVFGVGVKTSEKWYRMGLRTREEAKASKSLKLNKMQKAGFLYYEDLASGVSKEEADAVLDIVKETVRTVSPDALVTIAGGFRRGKPMGHDVDLLITIPGRPTDDELLHKVVDLLKKQGLLLYGDIRERTFVEGQLPNPKPDALDNHQKCFAILKLYRPKVDNSGVGTSKKSDMAEVKDWKAVRVDLVVAPDEQFAYALLGWTGSGMFRRDTRRYAEEERDMLLDNHGLYDLKKGIFLSADSEEEIFGHLDLDYLEPWERNA

SEQ ID NO: 5417 - DNA, 1182 bp, synthetic construct
  misc_feature 1..1182: note = Variant of terminal deoxynucleotidyl transferase
  source 1..1182: mol_type = other DNA
atgcatcaccaccatcatcatgggggttctggtcatccggaaggtaataccccggagaaggaggtgccgagcgttatcgcccgtcatgttagtccgtacgcgtgccagcgcaagaccacgctgaataactacaacaaaaagatcaccgacgcgctggagatcatggccgagaactacaagtttaaagagaacctgcaggcgtgcctggaggcccgtcgcgccgcgagtgtcctgaaaagcctgccgttcgaggttaccagcatgaaagacatccaaggtctgccgtgcattaccgacgacgtacgtcctgtgatcgaagagatcatcgaagtaggcgagagcagccgtgttaaagaaatcctcaatgacgagcgctacaaggcctttaagcagttcaccagcgtgttcggtgtgggcgtcaagacctcggaaaagtggtaccgtatgggcctccgtacgcgcgaagaagcaaaggccagtaagagtctgaagctgaacaagatgcagaaggcgggcttcctgtattacgaggatctggcgagcggtgttagtaaagaagaagccgatgccgttctggatatcgtgaaggaaacggtgcgcactgttagtccggatgcgctggtgaccatcgccggcggtttccgccgtggcaaacctatgggccacgacgttgacctgctgatcacgattccgggccgtcctacggatgacgagctgctccacaaagtggttgatctgctcaagaagcaaggtctgctgctgtacggggacatccgtgagcgtacgttcgtggaggggcaactgccaaatcctaaacctgacgccctggacaaccatcagaagtgcttcgccatttgtaagctgtaccgtccgaaggtggataacagtgcggttgggacgagtaagaaaagtgacatggctgaggttaaggattggaaagcggttcgtgtggatctggtggtcgctccagatgagcagttcgcctatgcgctgctcggttggacgggcagcggcatgtttcgtcgcgatactcgtcgctacgcggaggaagagcgcgacatgctgctcgacaaccatggtctctacgacctgaaaaagggcatctttctgagtgcggacagcgaagaagagattttcggtcatctggacctggattatctggagccgtgggaacgcaacgcg

SEQ ID NO: 5418 - protein, 394 aa, synthetic construct
  REGION 1..394: note = Variant of terminal deoxynucleotidyl transferase
MHHHHHHGGSGHPEGNTPEKEVPSVIARHVSPYACQRKTTLNNYNKKITDALEIMAENYKFKENLQACLEARRAASVLKSLPFEVTSMKDIQGLPCITDDVRPVIEEIIEVGESSRVKEILNDERYKAFKQFTSVFGVGVKTSEKWYRMGLRTREEAKASKSLKLNKMQKAGFLYYEDLASGVSKEEADAVLDIVKETVRTVSPDALVTIAGGFRRGKPMGHDVDLLITIPGRPTDDELLHKVVDLLKKQGLLLYGDIRERTFVEGQLPNPKPDALDNHQKCFAICKLYRPKVDNSAVGTSKKSDMAEVKDWKAVRVDLVVAPDEQFAYALLGWTGSGMFRRDTRRYAEEERDMLLDNHGLYDLKKGIFLSADSEEEIFGHLDLDYLEPWERNA

SEQ ID NO: 5419 - DNA, 1182 bp, synthetic construct
  misc_feature 1..1182: note = Variant of terminal deoxynucleotidyl transferase
  source 1..1182: mol_type = other DNA
atgcatcaccaccatcatcatgggggttctggtcatccggaaggtaataccccggagaaggaggtgccgagcgttatcgcccgtcatgttagtccgtacgcgtgccagcgcaagaccacgctgaataactacaacaaaaagatcaccgacgcgctggagatcatggccgagaactacaagtttaaagagaacctgcaggcgtgcctggaggcccgtcgcgccgcgagtgtcctgaaaagcctgccgttcgaggttaccagcatgaaagacatccaaggtctgccgtgcattaccgacgacgtacgtcctgtgatcgaagagatcatcgaagtaggcgagagcagccgtgttaaagaaatcctcaatgacgagcgctacaaggcctttaagcagttcaccagcgtgttcggtgtgggcgtcaagacctcggaaaagtggtaccgtatgggcctccgtacgcgcgaagaagcaaaggccatgaagagtctgaagctgaacaagatgcagaaggcgggcttcctgtattacgaggatctggcgagcggtgttagtaaagaagaagccgatgccgttctggatatcgtgaaggaaacggtgcgcactgttagtccggatgcgctggtgaccatcgccggcggtttccgccgtggcaaacctatgggccacgacgttgacctgctgatcacgattccgggccgtcctacggatgacgagctgctccacaaagtggttgatctgctcaagaagcaaggtctgctgctgtacggggacatccgtgagcgtacgttcgtggaggggcaactgccaaatcctaaacctgacgccctggacaaccatcagaagtgcttcgccattctcaagctgtaccgtccgaaggtggataacagtgcggttgggacgagtaagaaaagtgacatggctgaggttaaggattggaaagcggttcgtgtggatctggtggtcgctccagatgagcagttcgcctatgcgctgctcggttggacgggcagcggcatgtttcgtcgcgatactcgtcgctacgcggaggaagagcgcgacatgctgctcgacaaccatggtctctacgacctgaaaaagggcatctttctgagtgcggacagcgaagaagagattttcggtcatctggacctggattatctggagccgtgggaacgcaacgcg

SEQ ID NO: 5420 - protein, 394 aa, synthetic construct
  REGION 1..394: note = Variant of terminal deoxynucleotidyl transferase
MHHHHHHGGSGHPEGNTPEKEVPSVIARHVSPYACQRKTTLNNYNKKITDALEIMAENYKFKENLQACLEARRAASVLKSLPFEVTSMKDIQGLPCITDDVRPVIEEIIEVGESSRVKEILNDERYKAFKQFTSVFGVGVKTSEKWYRMGLRTREEAKAMKSLKLNKMQKAGFLYYEDLASGVSKEEADAVLDIVKETVRTVSPDALVTIAGGFRRGKPMGHDVDLLITIPGRPTDDELLHKVVDLLKKQGLLLYGDIRERTFVEGQLPNPKPDALDNHQKCFAILKLYRPKVDNSAVGTSKKSDMAEVKDWKAVRVDLVVAPDEQFAYALLGWTGSGMFRRDTRRYAEEERDMLLDNHGLYDLKKGIFLSADSEEEIFGHLDLDYLEPWERNA

SEQ ID NO: 5421 - DNA, 1182 bp, synthetic construct
  misc_feature 1..1182: note = Variant of terminal deoxynucleotidyl transferase
  source 1..1182: mol_type = other DNA
atgcatcaccaccatcatcatgggggttctggtcatccggaaggtaataccccggagaaggaggtgccgagcgttatcgcccgtcatgttagtccgtacgcgtgccagcgcaagaccacgctgaataactacaacaaaaagatcaccgacgcgctggagatcatggccgagaactacaagtttaaagagaacctgcaggcgtgcctggaggcccgtcgcgccgcgagtgtcctgaaaagcctgccgttcgaggttaccagcatgaaagacatccaaggtctgccgtgcattaccgacgacgtacgtcctgtgatcgaagagatcatcgaagtaggcgagagcagccgtgttaaagaaatcctcaatgacgagcgctacaaggcctttaagcagttcaccagcgtgttcggtgtgggcgtcaagacctcggaaaagtggtaccgtatgggcctccgtacgcgcgaagaagcaaaggccagtaagagtctgaagctgaacaagatgcagaaggcgggcttcctgtattacgaggatctggcgagcggtgttagtaaacttgaagccgatgccgttctggatatcgtgaaggaaacggtgcgcactgttagtccggatgcgctggtgaccatcgccggcggtttccgccgtggcaaacctatgggccacgacgttgacctgctgatcacgattccgggccgtcctacggatgacgagctgctccacaaagtggttgatctgctcaagaagcaaggtctgctgctgtacggggacatccgtgagcgtacgttcgtggaggggcaactgccaaatcctaaacctgacgccctggacaaccatcagaagtgcttcgccattctcaagctgtaccgtccgaaggtggataacagtgcggttgggacgagtaagaaaagtgacatggctgaggttaaggattggaaagcggttcgtgtggatctggtggtcgctccagatgagcagttcgcctatgcgctgctcggttggacgggcagcggcatgtttcgtcgcgatactcgtcgctacgcggaggaagagcgcgacatgctgctcgacaaccatggtctctacgacctgaaaaagggcatctttctgagtgcggacagcgaagaagagattttcggtcatctggacctggattatctggagccgtgggaacgcaacgcg

SEQ ID NO: 5422 - protein, 394 aa, synthetic construct
  REGION 1..394: note = Variant of terminal deoxynucleotidyl transferase
MHHHHHHGGSGHPEGNTPEKEVPSVIARHVSPYACQRKTTLNNYNKKITDALEIMAENYKFKENLQACLEARRAASVLKSLPFEVTSMKDIQGLPCITDDVRPVIEEIIEVGESSRVKEILNDERYKAFKQFTSVFGVGVKTSEKWYRMGLRTREEAKASKSLKLNKMQKAGFLYYEDLASGVSKLEADAVLDIVKETVRTVSPDALVTIAGGFRRGKPMGHDVDLLITIPGRPTDDELLHKVVDLLKKQGLLLYGDIRERTFVEGQLPNPKPDALDNHQKCFAILKLYRPKVDNSAVGTSKKSDMAEVKDWKAVRVDLVVAPDEQFAYALLGWTGSGMFRRDTRRYAEEERDMLLDNHGLYDLKKGIFLSADSEEEIFGHLDLDYLEPWERNA

SEQ ID NO: 5423 - DNA, 1182 bp, synthetic construct
  misc_feature 1..1182: note = Variant of terminal deoxynucleotidyl transferase
  source 1..1182: mol_type = other DNA
atgcatcaccaccatcatcatgggggttctggtcatccggaaggtaataccccggagaaggaggtgccgagcgttatcgcccgtcatgttagtccgtacgcgtgccagcgcaagaccacgctgaataactacaacaaaaagatcaccgacgcgctggagatcatggccgagaactacaagtttaaagagaacctgcaggcgtgcctggaggcccgtcgcgccgcgagtgtcctgaaaagcctgccgttcgaggttaccagcatgaaagacatccaaggtctgccgtgcattaccgacgacgtacgtcctgtgatcgaagagatcatcgaagtaggcgagagcagccgtgttaaagaaatcctcaatgacgagcgctacaaggcctttaagcagttcaccagcgtgttcggtgtgggcgtcaagacctcggaaaagtggtaccgtatgggcctccgtacgcgcgaagaagcaaaggccagtaagagtctgaagctgaacaagatgcagaaggcgggcttcctgtattacgaggatctggcgagcggtgttagtaaagaagaagccgatgccgttctggatatcgtgactgaaacggtgcgcactgttagtccggatgcgctggtgaccatcgccggcggtttccgccgtggcaaacctatgggccacgacgttgacctgctgatcacgattccgggccgtcctacggatgacgagctgctccacaaagtggttgatctgctcaagaagcaaggtctgctgctgtacggggacatccgtgagcgtacgttcgtggaggggcaactgccaaatcctaaacctgacgccctggacaaccatcagaagtgcttcgccattctcaagctgtaccgtccgaaggtggataacagtgcggttgggacgagtaagaaaagtgacatggctgaggttaaggattggaaagcggttcgtgtggatctggtggtcgctccagatgagcagttcgcctatgcgctgctcggttggacgggcagcggcatgtttcgtcgcgatactcgtcgctacgcggaggaagagcgcgacatgctgctcgacaaccatggtctctacgacctgaaaaagggcatctttctgagtgcggacagcgaagaagagattttcggtcatctggacctggattatctggagccgtgggaacgcaacgcg

SEQ ID NO: 5424 - protein, 394 aa, synthetic construct
  REGION 1..394: note = Variant of terminal deoxynucleotidyl transferase
MHHHHHHGGSGHPEGNTPEKEVPSVIARHVSPYACQRKTTLNNYNKKITDALEIMAENYKFKENLQACLEARRAASVLKSLPFEVTSMKDIQGLPCITDDVRPVIEEIIEVGESSRVKEILNDERYKAFKQFTSVFGVGVKTSEKWYRMGLRTREEAKASKSLKLNKMQKAGFLYYEDLASGVSKEEADAVLDIVTETVRTVSPDALVTIAGGFRRGKPMGHDVDLLITIPGRPTDDELLHKVVDLLKKQGLLLYGDIRERTFVEGQLPNPKPDALDNHQKCFAILKLYRPKVDNSAVGTSKKSDMAEVKDWKAVRVDLVVAPDEQFAYALLGWTGSGMFRRDTRRYAEEERDMLLDNHGLYDLKKGIFLSADSEEEIFGHLDLDYLEPWERNA

SEQ ID NO: 5425 - DNA, 1182 bp, synthetic construct
  misc_feature 1..1182: note = Variant of terminal deoxynucleotidyl transferase
  source 1..1182: mol_type = other DNA
atgcatcaccaccatcatcatgggggttctggtcatccggaaggtaataccccggagaaggaggtgccgagcgttatcgcccgtcatgttagtccgtacgcgtgccagcgcaagaccacgctgaataactacaacaaaaagatcaccgacgcgctggagatcatggccgagaactacaagtttaaagagaacctgcaggcgtgcctggaggcccgtcgcgccgcgagtgtcctgaaaagcctgccgttcgaggttaccagcatgaaagacatccaaggtctgccgtgcattaccgacgacgtacgtcctgtgatcgaagagatcatcgaagtaggcgagagcagccgtgttaaagaaatcctcaatgacgagcgctacaaggcctttaagcagttcaccagcgtgttcggtgtgggcgtcaagacctcggaaaagtggtaccgtatgggcctccgtacgcgcgaagaagcaaaggccagtaagagtctgaagctgaacaagatgcagaaggcgggcttcctgtattacgaggatctggcgagcggtgttagtaaagaagaagccgatgccgttctggatatcgtgaaggaaacggtgcgcactgttagtccggatgcgctggtgaccatcgccggcggtttccgccgtggcaaacctatgggccacgacgttgacctgctgatcacgattccgggccgtcctacggatgacgagctgctccacaaagtggttgatctgctcaagaagcaaggtctgctgctgtacggggacatccgtgagcgtacgttcgtggaggggcaactgccaaatcctaaacctgacgccctggacaaccatcagaagtgcttcgccattctcaagctgtaccgtccgaaggtggataacagtccggttgggacgagtaagaaaagtgacatggctgaggttaaggattggaaagcggttcgtgtggatctggtggtcgctccagatgagcagttcgcctatgcgctgctcggttggacgggcagcggcatgtttcgtcgcgatactcgtcgctacgcggaggaagagcgcgacatgctgctcgacaaccatggtctctacgacctgaaaaagggcatctttctgagtgcggacagcgaagaagagattttcggtcatctggacctggattatctggagccgtgggaacgcaacgcg

SEQ ID NO: 5426 - protein, 394 aa, synthetic construct
  REGION 1..394: note = Variant of terminal deoxynucleotidyl transferase
MHHHHHHGGSGHPEGNTPEKEVPSVIARHVSPYACQRKTTLNNYNKKITDALEIMAENYKFKENLQACLEARRAASVLKSLPFEVTSMKDIQGLPCITDDVRPVIEEIIEVGESSRVKEILNDERYKAFKQFTSVFGVGVKTSEKWYRMGLRTREEAKASKSLKLNKMQKAGFLYYEDLASGVSKEEADAVLDIVKETVRTVSPDALVTIAGGFRRGKPMGHDVDLLITIPGRPTDDELLHKVVDLLKKQGLLLYGDIRERTFVEGQLPNPKPDALDNHQKCFAILKLYRPKVDNSPVGTSKKSDMAEVKDWKAVRVDLVVAPDEQFAYALLGWTGSGMFRRDTRRYAEEERDMLLDNHGLYDLKKGIFLSADSEEEIFGHLDLDYLEPWERNA

SEQ ID NO: 5427 - DNA, 1182 bp, synthetic construct
  misc_feature 1..1182: note = Variant of terminal deoxynucleotidyl transferase
  source 1..1182: mol_type = other DNA
atgcatcaccaccatcatcatgggggttctggtcatccggaaggtaataccccggagaaggaggtgccgagcgttatcgcccgtcatgttagtccgtacgcgtgccagcgcaagaccacgctgaataactacaacaaaaagatcaccgacgcgctggagatcatggccgagaactacaagtttaaagagaacctgcaggcgtgcctggaggcccgtcgcgccgcgagtgtcctgaaaagcctgccgttcgaggttaccagcatgaaagacatccaaggtctgccgtgcattaccgacgacgtacgtcctgtgatcgaagagatcatcgaagtaggcgagagcagccgtgttaaagaaatcctcaatgacgagcgctacaaggcctttaagcagttcaccagcgtgttcggtgtgggcgtcaagacctcggaaaagtggtaccgtatgggcctccgtacgcgcgaagaagcaaaggccagtaagagtctgaagctgaacaagatgcagaaggcgggcttcctgtattacgaggatctggcgagcggtgttagtaaagaagaagccgatgccgttctggatatcgtgaaggaaacggtgcgcactgttagtccggatgcgctggtgaccatcgccggcggtttccgccgtggcaaacctatgggccacgacgttgacctgctgatcacgattccgggccgtcctacggatgacgagctgctccacaaagtggttgatctgctcaagaagcaaggtctgctgctgtacggggacatccgtgagcgtacgttcgtggaggggcaactgccaaatcctaaacctgacgccctggacaaccatcagaagtgcttcgccattctcaagctgtaccctccgaaggtggataacagtgcggttgggacgagtaagaaaagtgacatggctgaggttaaggattggaaagcggttcgtgtggatctggtggtcgctccagatgagcagttcgcctatgcgctgctcggttggacgggcagcggcatgtttcgtcgcgatactcgtcgctacgcggaggaagagcgcgacatgctgctcgacaaccatggtctctacgacctgaaaaagggcatctttctgagtgcggacagcgaagaagagattttcggtcatctggacctggattatctggagccgtgggaacgcaacgcg

SEQ ID NO: 5428 - protein, 394 aa, synthetic construct
  REGION 1..394: note = Variant of terminal deoxynucleotidyl transferase
MHHHHHHGGSGHPEGNTPEKEVPSVIARHVSPYACQRKTTLNNYNKKITDALEIMAENYKFKENLQACLEARRAASVLKSLPFEVTSMKDIQGLPCITDDVRPVIEEIIEVGESSRVKEILNDERYKAFKQFTSVFGVGVKTSEKWYRMGLRTREEAKASKSLKLNKMQKAGFLYYEDLASGVSKEEADAVLDIVKETVRTVSPDALVTIAGGFRRGKPMGHDVDLLITIPGRPTDDELLHKVVDLLKKQGLLLYGDIRERTFVEGQLPNPKPDALDNHQKCFAILKLYPPKVDNSAVGTSKKSDMAEVKDWKAVRVDLVVAPDEQFAYALLGWTGSGMFRRDTRRYAEEERDMLLDNHGLYDLKKGIFLSADSEEEIFGHLDLDYLEPWERNA

SEQ ID NO: 5429 - DNA, 1182 bp, synthetic construct
  misc_feature 1..1182: note = Variant of terminal deoxynucleotidyl transferase
  source 1..1182: mol_type = other DNA
atgcatcaccaccatcatcatgggggttctggtcatccggaaggtaataccccggagaaggaggtgccgagcgttatcgcccgtcatgttagtccgtacgcgtgccagcgcaagaccacgctgaataactacaacaaaaagatcaccgacgcgctggagatcatggccgagaactacaagtttaaagagaacctgcaggcgtgcctggaggcccgtcgcgccgcgagtgtcctgaaaagcctgccgttcgaggttaccagcatgaaagacatccaaggtctgccgtgcattaccgacgacgtacgtcctgtgatcgaagagatcatcgaagtaggcgagagcagccgtgttaaagaaatcctcaatgacgagcgctacaaggcctttaagcagttcaccagcgtgttcggtgtgggcgtcaagacctcggaaaagtggtaccgtatgggcctccgtacgcgcgaagaagcaaaggccagtaagagtctgaagctgaacaagatgcagaaggcgggcttcctgtattacgaggatctggcgagcggtgttagtaaagaagaagccgatgccgttctggatatcgtgaaggaaacggtgcgcacttggagtccggatgcgctggtgaccatcgccggcggtttccgccgtggcaaacctatgggccacgacgttgacctgctgatcacgattccgggccgtcctacggatgacgagctgctccacaaagtggttgatctgctcaagaagcaaggtctgctgctgtacggggacatccgtgagcgtacgttcgtggaggggcaactgccaaatcctaaacctgacgccctggacaaccatcagaagtgcttcgccattctcaagctgtaccgtccgaaggtggataacagtgcggttgggacgagtaagaaaagtgacatggctgaggttaaggattggaaagcggttcgtgtggatctggtggtcgctccagatgagcagttcgcctatgcgctgctcggttggacgggcagcggcatgtttcgtcgcgatactcgtcgctacgcggaggaagagcgcgacatgctgctcgacaaccatggtctctacgacctgaaaaagggcatctttctgagtgcggacagcgaagaagagattttcggtcatctggacctggattatctggagccgtgggaacgcaacgcg

SEQ ID NO: 5430 - protein, 394 aa, synthetic construct
  REGION 1..394: note = Variant of terminal deoxynucleotidyl transferase
MHHHHHHGGSGHPEGNTPEKEVPSVIARHVSPYACQRKTTLNNYNKKITDALEIMAENYKFKENLQACLEARRAASVLKSLPFEVTSMKDIQGLPCITDDVRPVIEEIIEVGESSRVKEILNDERYKAFKQFTSVFGVGVKTSEKWYRMGLRTREEAKASKSLKLNKMQKAGFLYYEDLASGVSKEEADAVLDIVKETVRTWSPDALVTIAGGFRRGKPMGHDVDLLITIPGRPTDDELLHKVVDLLKKQGLLLYGDIRERTFVEGQLPNPKPDALDNHQKCFAILKLYRPKVDNSAVGTSKKSDMAEVKDWKAVRVDLVVAPDEQFAYALLGWTGSGMFRRDTRRYAEEERDMLLDNHGLYDLKKGIFLSADSEEEIFGHLDLDYLEPWERNA

SEQ ID NO: 5431 - DNA, 1182 bp, synthetic construct
  misc_feature 1..1182: note = Variant of terminal deoxynucleotidyl transferase
  source 1..1182: mol_type = other DNA
atgcatcaccaccatcatcatgggggttctggtcatccggaaggtaataccccggagaaggaggtgccgagcgttatcgcccgtcatgttagtccgtacgcgtgccagcgcaagaccacgctgaataactacaacaaaaagatcaccgacgcgctggagatcatggccgagaactacaagtttaaagagaacctgcaggcgtgcctggaggcccgtcgcgccgcgagtgtcctgaaaagcctgccgttcgaggttaccagcatgaaagacatccaaggtctgccgtgcattaccgacgacgtacgtcctgtgatcgaagagatcatcgaagtaggcgagagcagccgtgttaaagaaatcctcaatgacgagcgctacaaggcctttaagcagttcaccagcgtgttcggtgtgggcgtcaagacctcggaaaagtggtaccgtatgggcctccgtacgcgcgaagaagcaaaggccagtaagagtctgaagctgaacaagatgcagaaggcgggcttcctgtattacgaggatctggcgagcggtgttagtaaagaagaagccgatgccgttctggatatcgtgaaggaaacggtgcgcactgttagtccggatgcgctggtgaccatcgccggcggtttccgccgtggcaaacctatgggccacgacgttgacctgctgatcacgattccgggccgtgttacggatgacgagctgctccacaaagtggttgatctgctcaagaagcaaggtctgctgctgtacggggacatccgtgagcgtacgttcgtggaggggcaactgccaaatcctaaacctgacgccctggacaaccatcagaagtgcttcgccattctcaagctgtaccgtccgaaggtggataacagtgcggttgggacgagtaagaaaagtgacatggctgaggttaaggattggaaagcggttcgtgtggatctggtggtcgctccagatgagcagttcgcctatgcgctgctcggttggacgggcagcggcatgtttcgtcgcgatactcgtcgctacgcggaggaagagcgcgacatgctgctcgacaaccatggtctctacgacctgaaaaagggcatctttctgagtgcggacagcgaagaagagattttcggtcatctggacctggattatctggagccgtgggaacgcaacgcg

SEQ ID NO: 5432 - protein, 394 aa, synthetic construct
  REGION 1..394: note = Variant of terminal deoxynucleotidyl transferase
MHHHHHHGGSGHPEGNTPEKEVPSVIARHVSPYACQRKTTLNNYNKKITDALEIMAENYKFKENLQACLEARRAASVLKSLPFEVTSMKDIQGLPCITDDVRPVIEEIIEVGESSRVKEILNDERYKAFKQFTSVFGVGVKTSEKWYRMGLRTREEAKASKSLKLNKMQKAGFLYYEDLASGVSKEEADAVLDIVKETVRTVSPDALVTIAGGFRRGKPMGHDVDLLITIPGRVTDDELLHKVVDLLKKQGLLLYGDIRERTFVEGQLPNPKPDALDNHQKCFAILKLYRPKVDNSAVGTSKKSDMAEVKDWKAVRVDLVVAPDEQFAYALLGWTGSGMFRRDTRRYAEEERDMLLDNHGLYDLKKGIFLSADSEEEIFGHLDLDYLEPWERNA

SEQ ID NO: 5433 - DNA, 1182 bp, synthetic construct
  misc_feature 1..1182: note = Variant of terminal deoxynucleotidyl transferase
  source 1..1182: mol_type = other DNA
atgcatcaccaccatcatcatgggggttctggtcatccggaaggtaataccccggagaaggaggtgccgagcgttatcgcccgtcatgttagtccgtacgcgtgccagcgcaagaccacgctgaataactacaacaaaaagatcaccgacgcgctggagatcatggccgagaactacaagtttaaagagaacctgcaggcgtgcctggaggcccgtcgcgccgcgagtgtcctgaaaagcctgccgttcgaggttaccagcatgaaagacatccaaggtctgccgtgcattaccgacgacgtacgtcctgtgatcgaagagatcatcgaagtaggcgagagcagccgtgttaaagaaatcctcaatgacgagcgctacaaggcctttaagcagttcaccagcgtgttcggtgtgggcgtcaagacctcggaaaagtggtaccgtatgggcctccgtacgcgcgaagaagcaaaggccagtaagagtctgaagctgaacaagatgcagaaggcgggcttcctgtattacgaggatctggcgagcggtgttagtaaagaagaagccgatgccgttctggatatcgtgaaggaaacggtgcgcactgttagtccggatgcgctggtgaccatcgccggcggtttccgccgtggcaaacctatgggccacgacgttgacctgctgatcacgattccgggccgtcctacggatgacgagctgctccacaaagtggttgatctgctcaagaagcaaggtctgctgctgtacggggacatccgtgagcgtacgttcgtggaggggcaactgccaaatcctaaacctgacgccctggacaaccatcagaagtgcttcgccattctcaagctgtaccgtccgaaggtggataacagtgcggttatgacgagtaagaaaagtgacatggctgaggttaaggattggaaagcggttcgtgtggatctggtggtcgctccagatgagcagttcgcctatgcgctgctcggttggacgggcagcggcatgtttcgtcgcgatactcgtcgctacgcggaggaagagcgcgacatgctgctcgacaaccatggtctctacgacctgaaaaagggcatctttctgagtgcggacagcgaagaagagattttcggtcatctggacctggattatctggagccgtgggaacgcaacgcg

SEQ ID NO: 5434 - protein, 394 aa, synthetic construct
  REGION 1..394: note = Variant of terminal deoxynucleotidyl transferase
MHHHHHHGGSGHPEGNTPEKEVPSVIARHVSPYACQRKTTLNNYNKKITDALEIMAENYKFKENLQACLEARRAASVLKSLPFEVTSMKDIQGLPCITDDVRPVIEEIIEVGESSRVKEILNDERYKAFKQFTSVFGVGVKTSEKWYRMGLRTREEAKASKSLKLNKMQKAGFLYYEDLASGVSKEEADAVLDIVKETVRTVSPDALVTIAGGFRRGKPMGHDVDLLITIPGRPTDDELLHKVVDLLKKQGLLLYGDIRERTFVEGQLPNPKPDALDNHQKCFAILKLYRPKVDNSAVMTSKKSDMAEVKDWKAVRVDLVVAPDEQFAYALLGWTGSGMFRRDTRRYAEEERDMLLDNHGLYDLKKGIFLSADSEEEIFGHLDLDYLEPWERNA

SEQ ID NO: 5435 - DNA, 1182 bp, synthetic construct
  misc_feature 1..1182: note = Variant of terminal deoxynucleotidyl transferase
  source 1..1182: mol_type = other DNA
atgcatcaccaccatcatcatgggggttctggtcatccggaaggtaataccccggagaaggaggtgccgagcgttatcgcccgtcatgttagtccgtacgcgtgccagcgcaagaccacgctgaataactacaacaaaaagatcaccgacgcgctggagatcatggccgagaactacaagtttaaagagaacctgcaggcgtgcctggaggcccgtcgcgccgcgagtgtcctgaaaagcctgccgttcgaggttaccagcatgaaagacatccaaggtctgccgtgcattaccgacgacgtacgtcctgtgatcgaagagatcatcgaagtaggcgagagcagccgtgttaaagaaatcctcaatgacgagcgctacaaggcctttaagcagttcaccagcgtgttcggtgtgggcgtcaagacctcggaaaagtggtaccgtatgggcctccgtacgcgcgaagaagcaaaggccagtaagagtctgaagctgaacaagatgcagaaggcgggcttcctgtattacgaggatctggcgagcggtgttagtaaagaagaagccgatgccgttctggatatcgtgaaggaaacggtgcgcactgttagtccggatgcgctggtgaccatcgccggcggtttccgccgtggcaaacctatgggccacgacgttgacctgctgatcacgattccgggccgtcctacggatgacgagctgctccacaaagtggttgatctgctcaagaagcaaggtctgctgctgtacggggacatccgtgagcgtacgttcgtggaggggcaactgccaaatccttctcctgacgccctggacaaccatcagaagtgcttcgccattctcaagctgtaccgtccgaaggtggataacagtgcggttgggacgagtaagaaaagtgacatggctgaggttaaggattggaaagcggttcgtgtggatctggtggtcgctccagatgagcagttcgcctatgcgctgctcggttggacgggcagcggcatgtttcgtcgcgatactcgtcgctacgcggaggaagagcgcgacatgctgctcgacaaccatggtctctacgacctgaaaaagggcatctttctgagtgcggacagcgaagaagagattttcggtcatctggacctggattatctggagccgtgggaacgcaacgcg

SEQ ID NO: 5436 - protein, 394 aa, synthetic construct
  REGION 1..394: note = Variant of terminal deoxynucleotidyl transferase
MHHHHHHGGSGHPEGNTPEKEVPSVIARHVSPYACQRKTTLNNYNKKITDALEIMAENYKFKENLQACLEARRAASVLKSLPFEVTSMKDIQGLPCITDDVRPVIEEIIEVGESSRVKEILNDERYKAFKQFTSVFGVGVKTSEKWYRMGLRTREEAKASKSLKLNKMQKAGFLYYEDLASGVSKEEADAVLDIVKETVRTVSPDALVTIAGGFRRGKPMGHDVDLLITIPGRPTDDELLHKVVDLLKKQGLLLYGDIRERTFVEGQLPNPSPDALDNHQKCFAILKLYRPKVDNSAVGTSKKSDMAEVKDWKAVRVDLVVAPDEQFAYALLGWTGSGMFRRDTRRYAEEERDMLLDNHGLYDLKKGIFLSADSEEEIFGHLDLDYLEPWERNA

SEQ ID NO: 5437 - DNA, 1182 bp, synthetic construct
  misc_feature 1..1182: note = Variant of terminal deoxynucleotidyl transferase
  source 1..1182: mol_type = other DNA
atgcatcaccaccatcatcatgggggttctggtcatccggaaggtaataccccggagaaggaggtgccgagcgttatcgcccgtcatgttagtccgtacgcgtgccagcgcaagaccacgctgaataactacaacaaaaagatcaccgacgcgctggagatcatggccgagaactacaagtttaaagagaacctgcaggcgtgcctggaggcccgtcgcgccgcgagtgtcctgaaaagcctgccgttcgaggttaccagcatgaaagacatccaaggtctgccgtgcattaccgacgacgtacgtcctgtgatcgaagagatcatcgaagtaggcgagagcagccgtgttaaagaaatcctcaatgacgagcgctacaaggcctttaagcagttcaccagcgtgttcggtgtgggcgtcaagacctcggaaaagtggtaccgtatgggcctccgtacgcgcgaagaagcaaaggccagtaagagtctgaagctgaacaagatgcagaaggcgggcttcctgtattacgaggatctggcgagcggtgttagtaaagaagaagccgatgccgttctggatatcgtgaaggaaacgatgcgcactgttagtccggatgcgctggtgaccatcgccggcggtttccgccgtggcaaacctatgggccacgacgttgacctgctgatcacgattccgggccgtcctacggatgacgagctgctccacaaagtggttgatctgctcaagaagcaaggtctgctgctgtacggggacatccgtgagcgtacgttcgtggaggggcaactgccaaatcctaaacctgacgccctggacaaccatcagaagtgcttcgccattctcaagctgtaccgtccgaaggtggataacagtgcggttgggacgagtaagaaaagtgacatggctgaggttaaggattggaaagcggttcgtgtggatctggtggtcgctccagatgagcagttcgcctatgcgctgctcggttggacgggcagcggcatgtttcgtcgcgatactcgtcgctacgcggaggaagagcgcgacatgctgctcgacaaccatggtctctacgacctgaaaaagggcatctttctgagtgcggacagcgaagaagagattttcggtcatctggacctggattatctggagccgtgggaacgcaacgcg

SEQ ID NO: 5438 - protein, 394 aa, synthetic construct
  REGION 1..394: note = Variant of terminal deoxynucleotidyl transferase
MHHHHHHGGSGHPEGNTPEKEVPSVIARHVSPYACQRKTTLNNYNKKITDALEIMAENYKFKENLQACLEARRAASVLKSLPFEVTSMKDIQGLPCITDDVRPVIEEIIEVGESSRVKEILNDERYKAFKQFTSVFGVGVKTSEKWYRMGLRTREEAKASKSLKLNKMQKAGFLYYEDLASGVSKEEADAVLDIVKETMRTVSPDALVTIAGGFRRGKPMGHDVDLLITIPGRPTDDELLHKVVDLLKKQGLLLYGDIRERTFVEGQLPNPKPDALDNHQKCFAILKLYRPKVDNSAVGTSKKSDMAEVKDWKAVRVDLVVAPDEQFAYALLGWTGSGMFRRDTRRYAEEERDMLLDNHGLYDLKKGIFLSADSEEEIFGHLDLDYLEPWERNA

SEQ ID NO: 5439 - DNA, 1182 bp, synthetic construct
  misc_feature 1..1182: note = Variant of terminal deoxynucleotidyl transferase
  source 1..1182: mol_type = other DNA
atgcatcaccaccatcatcatgggggttctggtcatccggaaggtaataccccggagaaggaggtgccgagcgttatcgcccgtcatgttagtccgtacgcgtgccagcgcaagaccacgctgaataactacaacaaaaagatcaccgacgcgctggagatcatggccgagaactacaagtttaaagagaacctgcaggcgtgcctggaggcccgtcgcgccgcgagtgtcctgaaaagcctgccgttcgaggttaccagcatgaaagacatccaaggtctgccgtgcattaccgacgacgtacgtcctgtgatcgaagagatcatcgaagtaggcgagagcagccgtgttaaagaaatcctcaatgacgagcgctacaaggcctttaagcagttcaccagcgtgttcggtgtgggcgtcaagacctcggaaaagtggtaccgtatgggcctccgtacgcgcgaagaagcaaaggccagtaagagtctgaagctgaacaagatgcagaaggcgggcttcctgtattacgaggatctggcgagcggtgttagtaaagaagaagccgatgccgttctggatatcgtgaaggaaacggtgcgcactgttagtccggatgcgctggtgaccatcgccggcggtttccgccgtggcaaacctatgggccacgacgttgacctgctgatcacgattccgggccgtcctacggatgacgagctgctcgagaaagtggttgatctgctcaagaagcaaggtctgctgctgtacggggacatccgtgagcgtacgttcgtggaggggcaactgccaaatcctaaacctgacgccctggacaaccatcagaagtgcttcgccattctcaagctgtaccgtccgaaggtggataacagtgcggttgggacgagtaagaaaagtgacatggctgaggttaaggattggaaagcggttcgtgtggatctggtggtcgctccagatgagcagttcgcctatgcgctgctcggttggacgggcagcggcatgtttcgtcgcgatactcgtcgctacgcggaggaagagcgcgacatgctgctcgacaaccatggtctctacgacctgaaaaagggcatctttctgagtgcggacagcgaagaagagattttcggtcatctggacctggattatctggagccgtgggaacgcaacgcg

SEQ ID NO: 5440 - protein, 394 aa, synthetic construct
  REGION 1..394: note = Variant of terminal deoxynucleotidyl transferase
MHHHHHHGGSGHPEGNTPEKEVPSVIARHVSPYACQRKTTLNNYNKKITDALEIMAENYKFKENLQACLEARRAASVLKSLPFEVTSMKDIQGLPCITDDVRPVIEEIIEVGESSRVKEILNDERYKAFKQFTSVFGVGVKTSEKWYRMGLRTREEAKASKSLKLNKMQKAGFLYYEDLASGVSKEEADAVLDIVKETVRTVSPDALVTIAGGFRRGKPMGHDVDLLITIPGRPTDDELLEKVVDLLKKQGLLLYGDIRERTFVEGQLPNPKPDALDNHQKCFAILKLYRPKVDNSAVGTSKKSDMAEVKDWKAVRVDLVVAPDEQFAYALLGWTGSGMFRRDTRRYAEEERDMLLDNHGLYDLKKGIFLSADSEEEIFGHLDLDYLEPWERNA

SEQ ID NO: 5441 - DNA, 1182 bp, synthetic construct
  misc_feature 1..1182: note = Variant of terminal deoxynucleotidyl transferase
  source 1..1182: mol_type = other DNA
atgcatcaccaccatcatcatgggggttctggtcatccggaaggtaataccccggagaaggaggtgccgagcgttatcgcccgtcatgttagtccgtacgcgtgccagcgcaagaccacgctgaataactacaacaaaaagatcaccgacgcgctggagatcatggccgagaactacaagtttaaagagaacctgcaggcgtgcctggaggcccgtcgcgccgcgagtgtcctgaaaagcctgccgttcgaggttaccagcatgaaagacatccaaggtctgccgtgcattaccgacgacgtacgtcctgtgatcgaagagatcatcgaagtaggcgagagcagccgtgttaaagaaatcctcaatgacgagcgctacaaggcctttaagcagttcaccagcgtgttcggtgtgggcgtcaagacctcggaaaagtggtaccgtatgggcctccgtacgcgcgaagaagcaaaggccagtaagagtctgaagctgaacaagatgcagaaggcgggcttcctgtattacgaggatctggcgagcggtgttagtaaagaagaagccgatgccgttctggatatcgtgaaggaaacggtgcgcactgttagtccggatgcgctggtgaccatcgccggcggtttccgccgtggcaaacctatgggccacgacgttgacctgctgatcacgattccgggccgtcctacggatgacgagctgctccacaaaatggttgatctgctcaagaagcaaggtctgctgctgtacggggacatccgtgagcgtacgttcgtggaggggcaactgccaaatcctaaacctgacgccctggacaaccatcagaagtgcttcgccattctcaagctgtaccgtccgaaggtggataacagtgcggttgggacgagtaagaaaagtgacatggctgaggttaaggattggaaagcggttcgtgtggatctggtggtcgctccagatgagcagttcgcctatgcgctgctcggttggacgggcagcggcatgtttcgtcgcgatactcgtcgctacgcggaggaagagcgcgacatgctgctcgacaaccatggtctctacgacctgaaaaagggcatctttctgagtgcggacagcgaagaagagattttcggtcatctggacctggattatctggagccgtgggaacgcaacgcg

SEQ ID NO: 5442 - protein, 394 aa, synthetic construct
  REGION 1..394: note = Variant of terminal deoxynucleotidyl transferase
MHHHHHHGGSGHPEGNTPEKEVPSVIARHVSPYACQRKTTLNNYNKKITDALEIMAENYKFKENLQACLEARRAASVLKSLPFEVTSMKDIQGLPCITDDVRPVIEEIIEVGESSRVKEILNDERYKAFKQFTSVFGVGVKTSEKWYRMGLRTREEAKASKSLKLNKMQKAGFLYYEDLASGVSKEEADAVLDIVKETVRTVSPDALVTIAGGFRRGKPMGHDVDLLITIPGRPTDDELLHKMVDLLKKQGLLLYGDIRERTFVEGQLPNPKPDALDNHQKCFAILKLYRPKVDNSAVGTSKKSDMAEVKDWKAVRVDLVVAPDEQFAYALLGWTGSGMFRRDTRRYAEEERDMLLDNHGLYDLKKGIFLSADSEEEIFGHLDLDYLEPWERNA

SEQ ID NO: 5443 - DNA, 1182 bp, synthetic construct
  misc_feature 1..1182: note = Variant of terminal deoxynucleotidyl transferase
  source 1..1182: mol_type = other DNA
atgcatcaccaccatcatcatgggggttctggtcatccggaaggtaataccccggagaaggaggtgccgagcgttatcgcccgtcatgttagtccgtacgcgtgccagcgcaagaccacgctgaataactacaacaaaaagatcaccgacgcgctggagatcatggccgagaactacaagtttaaagagaacctgcaggcgtgcctggaggcccgtcgcgccgcgagtgtcctgaaaagcctgccgttcgaggttaccagcatgaaagacatccaaggtctgccgtgcattaccgacgacgtacgtcctgtgatcgaagagatcatcgaagtaggcgagagcagccgtgttaaagaaatcctcaatgacgagcgctacaaggcctttaagcagttcaccagcgtgttcggtgtgggcgtcaagacctcggaaaagtggtaccgtatgggcctccgtacgcgcgaagaagcaaaggccagtaagagtctgaagctgaacaagatgcagaaggcgggcttcctgtattacgaggatctggcgagcggtgttagtaaagaagaagccgatatggttctggatatcgtgaaggaaacggtgcgcactgttagtccggatgcgctggtgaccatcgccggcggtttccgccgtggcaaacctatgggccacgacgttgacctgctgatcacgattccgggccgtcctacggatgacgagctgctccacaaagtggttgatctgctcaagaagcaaggtctgctgctgtacggggacatccgtgagcgtacgttcgtggaggggcaactgccaaatcctaaacctgacgccctggacaaccatcagaagtgcttcgccattctcaagctgtaccgtccgaaggtggataacagtgcggttgggacgagtaagaaaagtgacatggctgaggttaaggattggaaagcggttcgtgtggatctggtggtcgctccagatgagcagttcgcctatgcgctgctcggttggacgggcagcggcatgtttcgtcgcgatactcgtcgctacgcggaggaagagcgcgacatgctgctcgacaaccatggtctctacgacctgaaaaagggcatctttctgagtgcggacagcgaagaagagattttcggtcatctggacctggattatctggagccgtgggaacgcaacgcg

SEQ ID NO: 5444 - protein, 394 aa, synthetic construct
  REGION 1..394: note = Variant of terminal deoxynucleotidyl transferase
MHHHHHHGGSGHPEGNTPEKEVPSVIARHVSPYACQRKTTLNNYNKKITDALEIMAENYKFKENLQACLEARRAASVLKSLPFEVTSMKDIQGLPCITDDVRPVIEEIIEVGESSRVKEILNDERYKAFKQFTSVFGVGVKTSEKWYRMGLRTREEAKASKSLKLNKMQKAGFLYYEDLASGVSKEEADMVLDIVKETVRTVSPDALVTIAGGFRRGKPMGHDVDLLITIPGRPTDDELLHKVVDLLKKQGLLLYGDIRERTFVEGQLPNPKPDALDNHQKCFAILKLYRPKVDNSAVGTSKKSDMAEVKDWKAVRVDLVVAPDEQFAYALLGWTGSGMFRRDTRRYAEEERDMLLDNHGLYDLKKGIFLSADSEEEIFGHLDLDYLEPWERNA

SEQ ID NO: 5445 - DNA, 1182 bp, synthetic construct
  misc_feature 1..1182: note = Variant of terminal deoxynucleotidyl transferase
  source 1..1182: mol_type = other DNA
atgcatcaccaccatcatcatgggggttctggtcatccggaaggtaataccccggagaaggaggtgccgagcgttatcgcccgtcatgttagtccgtacgcgtgccagcgcaagaccacgctgaataactacaacaaaaagatcaccgacgcgctggagatcatggccgagaactacaagtttaaagagaacctgcaggcgtgcctggaggcccgtcgcgccgcgagtgtcctgaaaagcctgccgttcgaggttaccagcatgaaagacatccaaggtctgccgtgcattaccgacgacgtacgtcctgtgatcgaagagatcatcgaagtaggcgagagcagccgtgttaaagaaatcctcaatgacgagcgctacaaggcctttaagcagttcaccagcgtgttcggtgtgggcgtcaagacctcggaaaagtggtaccgtatgggcctccgtacgcgcgaagaagcaaaggccagtaagagtctgaagctgaacaagatgcagaaggcgggcttcctgtattacgaggatctggcgagcggtgttagtaaagaagaagccgatgccgttctggatatcgtgaaggaaacggtgcgcactgttagtccggatgcgctggtgaccatcgccggcggtttccgccgtggcaaacctatgggccacgacgttgacctgctgatcacgattccgggccgtcctacggatgaccttctgctccacaaagtggttgatctgctcaagaagcaaggtctgctgctgtacggggacatccgtgagcgtacgttcgtggaggggcaactgccaaatcctaaacctgacgccctggacaaccatcagaagtgcttcgccattctcaagctgtaccgtccgaaggtggataacagtgcggttgggacgagtaagaaaagtgacatggctgaggttaaggattggaaagcggttcgtgtggatctggtggtcgctccagatgagcagttcgcctatgcgctgctcggttggacgggcagcggcatgtttcgtcgcgatactcgtcgctacgcggaggaagagcgcgacatgctgctcgacaaccatggtctctacgacctgaaaaagggcatctttctgagtgcggacagcgaagaagagattttcggtcatctggacctggattatctggagccgtgggaacgcaacgcg

SEQ ID NO: 5446 - protein, 394 aa, synthetic construct
  REGION 1..394: note = Variant of terminal deoxynucleotidyl transferase
MHHHHHHGGSGHPEGNTPEKEVPSVIARHVSPYACQRKTTLNNYNKKITDALEIMAENYKFKENLQACLEARRAASVLKSLPFEVTSMKDIQGLPCITDDVRPVIEEIIEVGESSRVKEILNDERYKAFKQFTSVFGVGVKTSEKWYRMGLRTREEAKASKSLKLNKMQKAGFLYYEDLASGVSKEEADAVLDIVKETVRTVSPDALVTIAGGFRRGKPMGHDVDLLITIPGRPTDDLLLHKVVDLLKKQGLLLYGDIRERTFVEGQLPNPKPDALDNHQKCFAILKLYRPKVDNSAVGTSKKSDMAEVKDWKAVRVDLVVAPDEQFAYALLGWTGSGMFRRDTRRYAEEERDMLLDNHGLYDLKKGIFLSADSEEEIFGHLDLDYLEPWERNA

SEQ ID NO: 5447 - DNA, 1182 bp, synthetic construct
  misc_feature 1..1182: note = Variant of terminal deoxynucleotidyl transferase
  source 1..1182: mol_type = other DNA
atgcatcaccaccatcatcatgggggttctggtcatccggaaggtaataccccggagaaggaggtgccgagcgttatcgcccgtcatgttagtccgtacgcgtgccagcgcaagaccacgctgaataactacaacaaaaagatcaccgacgcgctggagatcatggccgagaactacaagtttaaagagaacctgcaggcgtgcctggaggcccgtcgcgccgcgagtgtcctgaaaagcctgccgttcgaggttaccagcatgaaagacatccaaggtctgccgtgcattaccgacgacgtacgtcctgtgatcgaagagatcatcgaagtaggcgagagcagccgtgttaaagaaatcctcaatgacgagcgctacaaggcctttaagcagttcaccagcgtgttcggtgtgggcgtcaagacctcggaaaagtggtaccgtatgggcctccgtacgcgcgaagaagcaaaggccagtaagagtctgaagctgaacaagatgcagaaggcgggcttcctgtattacgaggatctggcgagcggtgttagtaaagaagaagccgatgccgttctggatatcgtgaaggaaacggtgcgcactgttagtccggatgcgctggtgaccatcgccggcggtttccgccgtggcaaacctatgggccacgacgttgacctgctgatcacgattccgggccgtcctacggatgacgagctgctccacaaagtggttgatctgctcaagaagcaaggtctgctgctgtacggggacatccgtgagcgtacgttcgtggaggggcaactgccaaatcctaaacctgacgccctggacaaccatcagaagtgcttcgccattctcaagctgtaccgtccgagggtggataacagtgcggttgggacgagtaagaaaagtgacatggctgaggttaaggattggaaagcggttcgtgtggatctggtggtcgctccagatgagcagttcgcctatgcgctgctcggttggacgggcagcggcatgtttcgtcgcgatactcgtcgctacgcggaggaagagcgcgacatgctgctcgacaaccatggtctctacgacctgaaaaagggcatctttctgagtgcggacagcgaagaagagattttcggtcatctggacctggattatctggagccgtgggaacgcaacgcg

SEQ ID NO: 5448 - protein, 394 aa, synthetic construct
  REGION 1..394: note = Variant of terminal deoxynucleotidyl transferase
MHHHHHHGGSGHPEGNTPEKEVPSVIARHVSPYACQRKTTLNNYNKKITDALEIMAENYKFKENLQACLEARRAASVLKSLPFEVTSMKDIQGLPCITDDVRPVIEEIIEVGESSRVKEILNDERYKAFKQFTSVFGVGVKTSEKWYRMGLRTREEAKASKSLKLNKMQKAGFLYYEDLASGVSKEEADAVLDIVKETVRTVSPDALVTIAGGFRRGKPMGHDVDLLITIPGRPTDDELLHKVVDLLKKQGLLLYGDIRERTFVEGQLPNPKPDALDNHQKCFAILKLYRPRVDNSAVGTSKKSDMAEVKDWKAVRVDLVVAPDEQFAYALLGWTGSGMFRRDTRRYAEEERDMLLDNHGLYDLKKGIFLSADSEEEIFGHLDLDYLEPWERNA

SEQ ID NO: 5449 - DNA, 1182 bp, synthetic construct
  misc_feature 1..1182: note = Variant of terminal deoxynucleotidyl transferase
  source 1..1182: mol_type = other DNA
atgcatcaccaccatcatcatgggggttctggtcatccggaaggtaataccccggagaaggaggtgccgagcgttatcgcccgtcatgttagtccgtacgcgtgccagcgcaagaccacgctgaataactacaacaaaaagatcaccgacgcgctggagatcatggccgagaactacaagtttaaagagaacctgcaggcgtgcctggaggcccgtcgcgccgcgagtgtcctgaaaagcctgccgttcgaggttaccagcatgaaagacatccaaggtctgccgtgcattaccgacgacgtacgtcctgtgatcgaagagatcatcgaagtaggcgagagcagccgtgttaaagaaatcctcaatgacgagcgctacaaggcctttaagcagttcaccagcgtgttcggtgtgggcgtcaagacctcggaaaagtggtaccgtatgggcctccgtacgcgcgaagaagcaaaggccagtaagagtctgaagctgaacaagatgcagaaggcgggcttcctgtattacgaggatctggcgagcggtgttagtaaagaagaagccgatgccgttctggatatcgtgaaggaaacggtgcgcactgttagtccggatgcgctggtgaccatcgccggcggtttccgccgtggcaaacctatgggccacgacgttgacctgctgatccggattccgggccgtcctacggatgacgagctgctccacaaagtggttgatctgctcaagaagcaaggtctgctgctgtacggggacatccgtgagcgtacgttcgtggaggggcaactgccaaatcctaaacctgacgccctggacaaccatcagaagtgcttcgccattctcaagctgtaccgtccgaaggtggataacagtgcggttgggacgagtaagaaaagtgacatggctgaggttaaggattggaaagcggttcgtgtggatctggtggtcgctccagatgagcagttcgcctatgcgctgctcggttggacgggcagcggcatgtttcgtcgcgatactcgtcgctacgcggaggaagagcgcgacatgctgctcgacaaccatggtctctacgacctgaaaaagggcatctttctgagtgcggacagcgaagaagagattttcggtcatctggacctggattatctggagccgtgggaacgcaacgcg

SEQ ID NO: 5450 - protein, 394 aa, synthetic construct
  REGION 1..394: note = Variant of terminal deoxynucleotidyl transferase
MHHHHHHGGSGHPEGNTPEKEVPSVIARHVSPYACQRKTTLNNYNKKITDALEIMAENYKFKENLQACLEARRAASVLKSLPFEVTSMKDIQGLPCITDDVRPVIEEIIEVGESSRVKEILNDERYKAFKQFTSVFGVGVKTSEKWYRMGLRTREEAKASKSLKLNKMQKAGFLYYEDLASGVSKEEADAVLDIVKETVRTVSPDALVTIAGGFRRGKPMGHDVDLLIRIPGRPTDDELLHKVVDLLKKQGLLLYGDIRERTFVEGQLPNPKPDALDNHQKCFAILKLYRPKVDNSAVGTSKKSDMAEVKDWKAVRVDLVVAPDEQFAYALLGWTGSGMFRRDTRRYAEEERDMLLDNHGLYDLKKGIFLSADSEEEIFGHLDLDYLEPWERNA

SEQ ID NO: 5451 - DNA, 1182 bp, synthetic construct
  misc_feature 1..1182: note = Variant of terminal deoxynucleotidyl transferase
  source 1..1182: mol_type = other DNA
atgcatcaccaccatcatcatgggggttctggtcatccggaaggtaataccccggagaaggaggtgccgagcgttatcgcccgtcatgttagtccgtacgcgtgccagcgcaagaccacgctgaataactacaacaaaaagatcaccgacgcgctggagatcatggccgagaactacaagtttaaagagaacctgcaggcgtgcctggaggcccgtcgcgccgcgagtgtcctgaaaagcctgccgttcgaggttaccagcatgaaagacatccaaggtctgccgtgcattaccgacgacgtacgtcctgtgatcgaagagatcatcgaagtaggcgagagcagccgtgttaaagaaatcctcaatgacgagcgctacaaggcctttaagcagttcaccagcgtgttcggtgtgggcgtcaagacctcggaaaagtggtaccgtatgggcctccgtacgcgcgaagaagcaaaggccagtaagagtctgaagctgaacaagatgcagaaggcgggcttcctgtattacgaggatctggcgagcggtgttagtaaagaagaagccgatgccgtttatgatatcgtgaaggaaacggtgcgcactgttagtccggatgcgctggtgaccatcgccggcggtttccgccgtggcaaacctatgggccacgacgttgacctgctgatcacgattccgggccgtcctacggatgacgagctgctccacaaagtggttgatctgctcaagaagcaaggtctgctgctgtacggggacatccgtgagcgtacgttcgtggaggggcaactgccaaatcctaaacctgacgccctggacaaccatcagaagtgcttcgccattctcaagctgtaccgtccgaaggtggataacagtgcggttgggacgagtaagaaaagtgacatggctgaggttaaggattggaaagcggttcgtgtggatctggtggtcgctccagatgagcagttcgcctatgcgctgctcggttggacgggcagcggcatgtttcgtcgcgatactcgtcgctacgcggaggaagagcgcgacatgctgctcgacaaccatggtctctacgacctgaaaaagggcatctttctgagtgcggacagcgaagaagagattttcggtcatctggacctggattatctggagccgtgggaacgcaacgcg

SEQ ID NO: 5452 - protein, 394 aa, synthetic construct
  REGION 1..394: note = Variant of terminal deoxynucleotidyl transferase
MHHHHHHGGSGHPEGNTPEKEVPSVIARHVSPYACQRKTTLNNYNKKITDALEIMAENYKFKENLQACLEARRAASVLKSLPFEVTSMKDIQGLPCITDDVRPVIEEIIEVGESSRVKEILNDERYKAFKQFTSVFGVGVKTSEKWYRMGLRTREEAKASKSLKLNKMQKAGFLYYEDLASGVSKEEADAVYDIVKETVRTVSPDALVTIAGGFRRGKPMGHDVDLLITIPGRPTDDELLHKVVDLLKKQGLLLYGDIRERTFVEGQLPNPKPDALDNHQKCFAILKLYRPKVDNSAVGTSKKSDMAEVKDWKAVRVDLVVAPDEQFAYALLGWTGSGMFRRDTRRYAEEERDMLLDNHGLYDLKKGIFLSADSEEEIFGHLDLDYLEPWERNA

SEQ ID NO: 5453 - DNA, 1182 bp, synthetic construct
  misc_feature 1..1182: note = Variant of terminal deoxynucleotidyl transferase
  source 1..1182: mol_type = other DNA
atgcatcaccaccatcatcatgggggttctggtcatccggaaggtaataccccggagaaggaggtgccgagcgttatcgcccgtcatgttagtccgtacgcgtgccagcgcaagaccacgctgaataactacaacaaaaagatcaccgacgcgctggagatcatggccgagaactacaagtttaaagagaacctgcaggcgtgcctggaggcccgtcgcgccgcgagtgtcctgaaaagcctgccgttcgaggttaccagcatgaaagacatccaaggtctgccgtgcattaccgacgacgtacgtcctgtgatcgaagagatcatcgaagtaggcgagagcagccgtgttaaagaaatcctcaatgacgagcgctacaaggcctttaagcagttcaccagcgtgttcggtgtgggcgtcaagacctcggaaaagtggtaccgtatgggcctccgtacgcgcgaagaagcaaaggccagtaagagtctgaagctgaacaagatgcagaaggcgggcttcctgtattacgaggatctggcgagcggtgttagtaaagaagaagccgatgccgttctggatatcgtgaaggaaacggtgcgcactgttagtccggatgcgctggtgaccatcgccggcggtttccgccgtggcaaacctatgggccacgacgttgacctgctgatcgggattccgggccgtcctacggatgacgagctgctccacaaagtggttgatctgctcaagaagcaaggtctgctgctgtacggggacatccgtgagcgtacgttcgtggaggggcaactgccaaatcctaaacctgacgccctggacaaccatcagaagtgcttcgccattctcaagctgtaccgtccgaaggtggataacagtgcggttgggacgagtaagaaaagtgacatggctgaggttaaggattggaaagcggttcgtgtggatctggtggtcgctccagatgagcagttcgcctatgcgctgctcggttggacgggcagcggcatgtttcgtcgcgatactcgtcgctacgcggaggaagagcgcgacatgctgctcgacaaccatggtctctacgacctgaaaaagggcatctttctgagtgcggacagcgaagaagagattttcggtcatctggacctggattatctggagccgtgggaacgcaacgcg

SEQ ID NO: 5454 - protein, 394 aa, synthetic construct
  REGION 1..394: note = Variant of terminal deoxynucleotidyl transferase
MHHHHHHGGSGHPEGNTPEKEVPSVIARHVSPYACQRKTTLNNYNKKITDALEIMAENYKFKENLQACLEARRAASVLKSLPFEVTSMKDIQGLPCITDDVRPVIEEIIEVGESSRVKEILNDERYKAFKQFTSVFGVGVKTSEKWYRMGLRTREEAKASKSLKLNKMQKAGFLYYEDLASGVSKEEADAVLDIVKETVRTVSPDALVTIAGGFRRGKPMGHDVDLLIGIPGRPTDDELLHKVVDLLKKQGLLLYGDIRERTFVEGQLPNPKPDALDNHQKCFAILKLYRPKVDNSAVGTSKKSDMAEVKDWKAVRVDLVVAPDEQFAYALLGWTGSGMFRRDTRRYAEEERDMLLDNHGLYDLKKGIFLSADSEEEIFGHLDLDYLEPWERNA

SEQ ID NO: 5455 - DNA, 1182 bp, synthetic construct
  misc_feature 1..1182: note = Variant of terminal deoxynucleotidyl transferase
  source 1..1182: mol_type = other DNA
atgcatcaccaccatcatcatgggggttctggtcatccggaaggtaataccccggagaaggaggtgccgagcgttatcgcccgtcatgttagtccgtacgcgtgccagcgcaagaccacgctgaataactacaacaaaaagatcaccgacgcgctggagatcatggccgagaactacaagtttaaagagaacctgcaggcgtgcctggaggcccgtcgcgccgcgagtgtcctgaaaagcctgccgttcgaggttaccagcatgaaagacatccaaggtctgccgtgcattaccgacgacgtacgtcctgtgatcgaagagatcatcgaagtaggcgagagcagccgtgttaaagaaatcctcaatgacgagcgctacaaggcctttaagcagttcaccagcgtgttcggtgtgggcgtcaagacctcggaaaagtggtaccgtatgggcctccgtacgcgcgaagaagcaaaggccagtaagagtctgaagctgaacaagatgcagaaggcgggcttcctgtattacgaggatctggcgagcggtgttagtaaagaagaagccgatgccgttctggatatcgtgaaggaaacggtgcgcactgttagtccggatgcgctggtgaccatcgccggcggtttccgccgtggcaaacctatgggccacgacgttgacctgctgatcacgattccgggccgtcctacggatggcgagctgctccacaaagtggttgatctgctcaagaagcaaggtctgctgctgtacggggacatccgtgagcgtacgttcgtggaggggcaactgccaaatcctaaacctgacgccctggacaaccatcagaagtgcttcgccattctcaagctgtaccgtccgaaggtggataacagtgcggttgggacgagtaagaaaagtgacatggctgaggttaaggattggaaagcggttcgtgtggatctggtggtcgctccagatgagcagttcgcctatgcgctgctcggttggacgggcagcggcatgtttcgtcgcgatactcgtcgctacgcggaggaagagcgcgacatgctgctcgacaaccatggtctctacgacctgaaaaagggcatctttctgagtgcggacagcgaagaagagattttcggttggctggacctggattatctggagccgtgggaacgcaacgcg

SEQ ID NO: 5456 - protein, 394 aa, synthetic construct
  REGION 1..394: note = Variant of terminal deoxynucleotidyl transferase
MHHHHHHGGSGHPEGNTPEKEVPSVIARHVSPYACQRKTTLNNYNKKITDALEIMAENYKFKENLQACLEARRAASVLKSLPFEVTSMKDIQGLPCITDDVRPVIEEIIEVGESSRVKEILNDERYKAFKQFTSVFGVGVKTSEKWYRMGLRTREEAKASKSLKLNKMQKAGFLYYEDLASGVSKEEADAVLDIVKETVRTVSPDALVTIAGGFRRGKPMGHDVDLLITIPGRPTDGELLHKVVDLLKKQGLLLYGDIRERTFVEGQLPNPKPDALDNHQKCFAILKLYRPKVDNSAVGTSKKSDMAEVKDWKAVRVDLVVAPDEQFAYALLGWTGSGMFRRDTRRYAEEERDMLLDNHGLYDLKKGIFLSADSEEEIFGWLDLDYLEPWERNA

SEQ ID NO: 5457 - DNA, 1182 bp, synthetic construct
  misc_feature 1..1182: note = Variant of terminal deoxynucleotidyl transferase
  source 1..1182: mol_type = other DNA
atgcatcaccaccatcatcatgggggttctggtcatccggaaggtaataccccggagaaggaggtgccgagcgttatcgcccgtcatgttagtccgtacgcgtgccagcgcaagaccacgctgaataactacaacaaaaagatcaccgacgcgctggagatcatggccgagaactacaagtttaaagagaacctgcaggcgtgcctggaggcccgtcgcgccgcgagtgtcctgaaaagcctgccgttcgaggttaccagcatgaaagacatccaaggtctgccgtgcattaccgacgacgtacgtcctgtgatcgaagagatcatcgaagtaggcgagagcagccgtgttaaagaaatcctcaatgacgagcgctacaaggcctttaagcagttcaccagcgtgttcggtgtgggcgtcaagacctcggaaaagtggtaccgtatgggcctccgtacgcgcgaagaagcaaaggccagtaagagtctgaagctgaacaagatgcagaaggcgggcttcctgtattacgaggatctggcgagcggtgttagtaaagaagaagccgatgccgttctggatatcgtgaaggaaacggtgcgcactgttagtccggatgcgctggtgaccatcgccggcggtttccgccgtggcaaacctatgggccacgacgttgacctgctgatcacgattccgggccgtcctacggatgacgagctgctccacaaagtggttgatctgctcaagaagcaaggtctgctgctgtacggggacatccgtgagcgtacgttcgtggaggggcaactgccaaatcctaaacctgacgccctggactcgcatcagaagtgcttcgccattctcaagctgtaccgtccgaaggtggataacagtgcggttgggacgagtaagaaaagtgacatggctgaggttaaggattggaaagcggttcgtgtggatctggtggtcgctccagatgagcagttcgcctatgcgctgctcggttggacgggcagcggcatgtttcgtcgcgatactcgtcgctacgcggaggaagagcgcgacatgctgctcgacaaccatggtctctacgacctgaaaaagggcatctttctgagtgcggacagcgaagaagagattttcggtcatctggacctggattatctggagccgtgggaacgcaacgcg

SEQ ID NO: 5458 - protein, 394 aa, synthetic construct
  REGION 1..394: note = Variant of terminal deoxynucleotidyl transferase
MHHHHHHGGSGHPEGNTPEKEVPSVIARHVSPYACQRKTTLNNYNKKITDALEIMAENYKFKENLQACLEARRAASVLKSLPFEVTSMKDIQGLPCITDDVRPVIEEIIEVGESSRVKEILNDERYKAFKQFTSVFGVGVKTSEKWYRMGLRTREEAKASKSLKLNKMQKAGFLYYEDLASGVSKEEADAVLDIVKETVRTVSPDALVTIAGGFRRGKPMGHDVDLLITIPGRPTDDELLHKVVDLLKKQGLLLYGDIRERTFVEGQLPNPKPDALDSHQKCFAILKLYRPKVDNSAVGTSKKSDMAEVKDWKAVRVDLVVAPDEQFAYALLGWTGSGMFRRDTRRYAEEERDMLLDNHGLYDLKKGIFLSADSEEEIFGHLDLDYLEPWERNA

SEQ ID NO: 5459 - DNA, 1182 bp, synthetic construct
  misc_feature 1..1182: note = Variant of terminal deoxynucleotidyl transferase
  source 1..1182: mol_type = other DNA
atgcatcaccaccatcatcatgggggttctggtcatccggaaggtaataccccggagaaggaggtgccgagcgttatcgcccgtcatgttagtccgtacgcgtgccagcgcaagaccacgctgaataactacaacaaaaagatcaccgacgcgctggagatcatggccgagaactacaagtttaaagagaacctgcaggcgtgcctggaggcccgtcgcgccgcgagtgtcctgaaaagcctgccgttcgaggttaccagcatgaaagacatccaaggtctgccgtgcattaccgacgacgtacgtcctgtgatcgaagagatcatcgaagtaggcgagagcagccgtgttaaagaaatcctcaatgacgagcgctacaaggcctttaagcagttcaccagcgtgttcggtgtgggcgtcaagacctcggaaaagtggtaccgtatgggcctccgtacgcgcgaagaagcaaaggccagtaagagtctgaagctgaacaagatgcagaaggcgggcttcctgtattacgaggatctggcgagcggtgttagtaaagaagaagccgatgccgttctggatatcgtgaaggaaacggtgcgcagtgttagtccggatgcgctggtgaccatcgccggcggtttccgccgtggcaaacctatgggccacgacgttgacctgctgatcacgattccgggccgtcctacggatgacgagctgctccacaaagtggttgatctgctcaagaagcaaggtctgctgctgtacggggacatccgtgagcgtacgttcgtggaggggcaactgccaaatcctaaacctgacgccctggacaaccatcagaagtgcttcgccattctcaagctgtaccgtccgaaggtggataacagtgcggttgggacgagtaagaaaagtgacatggctgaggttaaggattggaaagcggttcgtgtggatctggtggtcgctccagatgagcagttcgcctatgcgctgctcggttggacgggcagcggcatgtttcgtcgcgatactcgtcgctacgcggaggaagagcgcgacatgctgctcgacaaccatggtctctacgacctgaaaaagggcatctttctgagtgcggacagcgaagaagagattttcggtcatctggacctggattatctggagccgtgggaacgcaacgcg

SEQ ID NO: 5460 - protein, 394 aa, synthetic construct
  REGION 1..394: note = Variant of terminal deoxynucleotidyl transferase
MHHHHHHGGSGHPEGNTPEKEVPSVIARHVSPYACQRKTTLNNYNKKITDALEIMAENYKFKENLQACLEARRAASVLKSLPFEVTSMKDIQGLPCITDDVRPVIEEIIEVGESSRVKEILNDERYKAFKQFTSVFGVGVKTSEKWYRMGLRTREEAKASKSLKLNKMQKAGFLYYEDLASGVSKEEADAVLDIVKETVRSVSPDALVTIAGGFRRGKPMGHDVDLLITIPGRPTDDELLHKVVDLLKKQGLLLYGDIRERTFVEGQLPNPKPDALDNHQKCFAILKLYRPKVDNSAVGTSKKSDMAEVKDWKAVRVDLVVAPDEQFAYALLGWTGSGMFRRDTRRYAEEERDMLLDNHGLYDLKKGIFLSADSEEEIFGHLDLDYLEPWERNA

SEQ ID NO: 5461 - DNA, 1182 bp, synthetic construct
  misc_feature 1..1182: note = Variant of terminal deoxynucleotidyl transferase
  source 1..1182: mol_type = other DNA
atgcatcaccaccatcatcatgggggttctggtcatccggaaggtaataccccggagaaggaggtgccgagcgttatcgcccgtcatgttagtccgtacgcgtgccagcgcaagaccacgctgaataactacaacaaaaagatcaccgacgcgctggagatcatggccgagaactacaagtttaaagagaacctgcaggcgtgcctggaggcccgtcgcgccgcgagtgtcctgaaaagcctgccgttcgaggttaccagcatgaaagacatccaaggtctgccgtgcattaccgacgacgtacgtcctgtgatcgaagagatcatcgaagtaggcgagagcagccgtgttaaagaaatcctcaatgacgagcgctacaaggcctttaagcagttcaccagcgtgttcggtgtgggcgtcaagacctcggaaaagtggtaccgtatgggcctccgtacgcgcgaagaagcaaaggccagtaagagtctgaagctgaacaagatgcagaaggcgggcttcctgtattacgaggatctggcgagcggtgttagtaaagaagaagccgatgccgttctggatatcgtgaaggaaacggtgcgcactgttagtccggatgcgctggtgaccatcgccggcggtttccgccgtggcaaacctatgggccacgacgttgacctgctgatcacgattccgggccgtcctacggatgacgagctgctccacaaagtggttgatctgctcaagaagcaaggtctgctgctgtacggggacatccgtgagcgtacgttcgtggaggggcaactgccaaatcctaaacctgacgccctggacaaccatcagaagacgttcgccattctcaagctgtaccgtccgaaggtggataacagtgcggttgggacgagtaagaaaagtgacatggctgaggttaaggattggaaagcggttcgtgtggatctggtggtcgctccagatgagcagttcgcctatgcgctgctcggttggacgggcagcggcatgtttcgtcgcgatactcgtcgctacgcggaggaagagcgcgacatgctgctcgacaaccatggtctctacgacctgaaaaagggcatctttctgagtgcggacagcgaagaagagattttcggtcatctggacctggattatctggagccgtgggaacgcaacgcg

SEQ ID NO: 5462 - protein, 394 aa, synthetic construct
  REGION 1..394: note = Variant of terminal deoxynucleotidyl transferase
MHHHHHHGGSGHPEGNTPEKEVPSVIARHVSPYACQRKTTLNNYNKKITDALEIMAENYKFKENLQACLEARRAASVLKSLPFEVTSMKDIQGLPCITDDVRPVIEEIIEVGESSRVKEILNDERYKAFKQFTSVFGVGVKTSEKWYRMGLRTREEAKASKSLKLNKMQKAGFLYYEDLASGVSKEEADAVLDIVKETVRTVSPDALVTIAGGFRRGKPMGHDVDLLITIPGRPTDDELLHKVVDLLKKQGLLLYGDIRERTFVEGQLPNPKPDALDNHQKTFAILKLYRPKVDNSAVGTSKKSDMAEVKDWKAVRVDLVVAPDEQFAYALLGWTGSGMFRRDTRRYAEEERDMLLDNHGLYDLKKGIFLSADSEEEIFGHLDLDYLEPWERNA

SEQ ID NO: 5463 - DNA, 1182 bp, synthetic construct
  misc_feature 1..1182: note = Variant of terminal deoxynucleotidyl transferase
  source 1..1182: mol_type = other DNA
atgcatcaccaccatcatcatgggggttctggtcatccggaaggtaataccccggagaaggaggtgccgagcgttatcgcccgtcatgttagtccgtacgcgtgccagcgcaagaccacgctgaataactacaacaaaaagatcaccgacgcgctggagatcatggccgagaactacaagtttaaagagaacctgcaggcgtgcctggaggcccgtcgcgccgcgagtgtcctgaaaagcctgccgttcgaggttaccagcatgaaagacatccaaggtctgccgtgcattaccgacgacgtacgtcctgtgatcgaagagatcatcgaagtaggcgagagcagccgtgttaaagaaatcctcaatgacgagcgctacaaggcctttaagcagttcaccagcgtgttcggtgtgggcgtcaagacctcggaaaagtggtaccgtatgggcctccgtacgcgcgaagaagcaaaggccagtaagagtctgaagctgaacaagatgcagaaggcgggcttcctgtattacgaggatctggcgagcggtgttagtaaagaagaagccgatgccgttctggatatcgtgggggaaacggtgcgcactgttagtccggatgcgctggtgaccatcgccggcggtttccgccgtggcaaacctatgggccacgacgttgacctgctgatcacgattccgggccgtcctacggatgacgagctgctccacaaagtggttgatctgctcaagaagcaaggtctgctgctgtacggggacatccgtgagcgtacgttcgtggaggggcaactgccaaatcctaaacctgacgccctggacaaccatcagaagtgcttcgccattctcaagctgtaccgtccgaaggtggataacagtgcggttgggacgagtaagaaaagtgacatggctgaggttaaggattggaaagcggttcgtgtggatctggtggtcgctccagatgagcagttcgcctatgcgctgctcggttggacgggcagcggcatgtttcgtcgcgatactcgtcgctacgcggaggaagagcgcgacatgctgctcgacaaccatggtctctacgacctgaaaaagggcatctttctgagtgcggacagcgaagaagagattttcggtcatctggacctggattatctggagccgtgggaacgcaacgcg

SEQ ID NO: 5464 - protein, 394 aa, synthetic construct
  REGION 1..394: note = Variant of terminal deoxynucleotidyl transferase
MHHHHHHGGSGHPEGNTPEKEVPSVIARHVSPYACQRKTTLNNYNKKITDALEIMAENYKFKENLQACLEARRAASVLKSLPFEVTSMKDIQGLPCITDDVRPVIEEIIEVGESSRVKEILNDERYKAFKQFTSVFGVGVKTSEKWYRMGLRTREEAKASKSLKLNKMQKAGFLYYEDLASGVSKEEADAVLDIVGETVRTVSPDALVTIAGGFRRGKPMGHDVDLLITIPGRPTDDELLHKVVDLLKKQGLLLYGDIRERTFVEGQLPNPKPDALDNHQKCFAILKLYRPKVDNSAVGTSKKSDMAEVKDWKAVRVDLVVAPDEQFAYALLGWTGSGMFRRDTRRYAEEERDMLLDNHGLYDLKKGIFLSADSEEEIFGHLDLDYLEPWERNA

SEQ ID NO: 5465 - DNA, 1182 bp, synthetic construct
  misc_feature 1..1182: note = Variant of terminal deoxynucleotidyl transferase
  source 1..1182: mol_type = other DNA
atgcatcaccaccatcatcatgggggttctggtcatccggaaggtaataccccggagaaggaggtgccgagcgttatcgcccgtcatgttagtccgtacgcgtgccagcgcaagaccacgctgaataactacaacaaaaagatcaccgacgcgctggagatcatggccgagaactacaagtttaaagagaacctgcaggcgtgcctggaggcccgtcgcgccgcgagtgtcctgaaaagcctgccgttcgaggttaccagcatgaaagacatccaaggtctgccgtgcattaccgacgacgtacgtcctgtgatcgaagagatcatcgaagtaggcgagagcagccgtgttaaagaaatcctcaatgacgagcgctacaaggcctttaagcagttcaccagcgtgttcggtgtgggcgtcaagacctcggaaaagtggtaccgtatgggcctccgtacgcgcgaagaagcaaaggccagtaagagtctgaagctgaacaagatgcagaaggcgggcttcctgtattacgaggatctggcgagcggtgttagtaaagaagaagccgatgccgttctggatatcgtgaaggaaacggtgcgcactgttagtccggatgcgctggtgaccatcgccggcggtttccgccgtggcaaacctatgggccacgacgttgacctgctgatcacgattccgggccgtcctacggatgacgagctgctccacaaagtggttgatctgctcaagaagcaaggtctgctgctgtacggggacatccgtgagcgtacgttcgtggaggggcaactgccaaatcctaaacctgacgccctggacaaccatcagaagtgcttcgccattctcaagctgtaccgtccgaaggtggataacagttttgttgggacgagtaagaaaagtgacatggctgaggttaaggattggaaagcggttcgtgtggatctggtggtcgctccagatgagcagttcgcctatgcgctgctcggttggacgggcagcggcatgtttcgtcgcgatactcgtcgctacgcggaggaagagcgcgacatgctgctcgacaaccatggtctctacgacctgaaaaagggcatctttctgagtgcggacagcgaagaagagattttcggtcatctggacctggattatctggagccgtgggaacgcaacgcg

SEQ ID NO: 5466 - protein, 394 aa, synthetic construct
  REGION 1..394: note = Variant of terminal deoxynucleotidyl transferase
MHHHHHHGGSGHPEGNTPEKEVPSVIARHVSPYACQRKTTLNNYNKKITDALEIMAENYKFKENLQACLEARRAASVLKSLPFEVTSMKDIQGLPCITDDVRPVIEEIIEVGESSRVKEILNDERYKAFKQFTSVFGVGVKTSEKWYRMGLRTREEAKASKSLKLNKMQKAGFLYYEDLASGVSKEEADAVLDIVKETVRTVSPDALVTIAGGFRRGKPMGHDVDLLITIPGRPTDDELLHKVVDLLKKQGLLLYGDIRERTFVEGQLPNPKPDALDNHQKCFAILKLYRPKVDNSFVGTSKKSDMAEVKDWKAVRVDLVVAPDEQFAYALLGWTGSGMFRRDTRRYAEEERDMLLDNHGLYDLKKGIFLSADSEEEIFGHLDLDYLEPWERNA

SEQ ID NO: 5467 - DNA, 1182 bp, synthetic construct
  misc_feature 1..1182: note = Variant of terminal deoxynucleotidyl transferase
  source 1..1182: mol_type = other DNA
atgcatcaccaccatcatcatgggggttctggtcatccggaaggtaataccccggagaaggaggtgccgagcgttatcgcccgtcatgttagtccgtacgcgtgccagcgcaagaccacgctgaataactacaacaaaaagatcaccgacgcgctggagatcatggccgagaactacaagtttaaagagaacctgcaggcgtgcctggaggcccgtcgcgccgcgagtgtcctgaaaagcctgccgttcgaggttaccagcatgaaagacatccaaggtctgccgtgcattaccgacgacgtacgtcctgtgatcgaagagatcatcgaagtaggcgagagcagccgtgttaaagaaatcctcaatgacgagcgctacaaggcctttaagcagttcaccagcgtgttcggtgtgggcgtcaagacctcggaaaagtggtaccgtatgggcctccgtacgcgcgaagaagcaaaggccagtaagagtctgaagctgaacaagatgcagaaggcgggcttcctgtattacgaggatctggcgagcggtgttagtaaagaagaagccgatgccgttctggatatcgtgaaggaaacggtgcgcactgttagtccggatgcgctggtgaccatcgccggcggtttccgccgtggcaaacctatgggccacgacgttgacctgctgatcacgattccgggccgtcggacggatgacgagctgctccacaaagtggttgatctgctcaagaagcaaggtctgctgctgtacggggacatccgtgagcgtacgttcgtggaggggcaactgccaaatcctaaacctgacgccctggacaaccatcagaagtgcttcgccattctcaagctgtaccgtccgaaggtggataacagtgcggttgggacgagtaagaaaagtgacatggctgaggttaaggattggaaagcggttcgtgtggatctggtggtcgctccagatgagcagttcgcctatgcgctgctcggttggacgggcagcggcatgtttcgtcgcgatactcgtcgctacgcggaggaagagcgcgacatgctgctcgacaaccatggtctctacgacctgaaaaagggcatctttctgagtgcggacagcgaagaagagattttcggtcatctggacctggattatctggagccgtgggaacgcaacgcg

SEQ ID NO: 5468 - protein, 394 aa, synthetic construct
  REGION 1..394: note = Variant of terminal deoxynucleotidyl transferase
MHHHHHHGGSGHPEGNTPEKEVPSVIARHVSPYACQRKTTLNNYNKKITDALEIMAENYKFKENLQACLEARRAASVLKSLPFEVTSMKDIQGLPCITDDVRPVIEEIIEVGESSRVKEILNDERYKAFKQFTSVFGVGVKTSEKWYRMGLRTREEAKASKSLKLNKMQKAGFLYYEDLASGVSKEEADAVLDIVKETVRTVSPDALVTIAGGFRRGKPMGHDVDLLITIPGRRTDDELLHKVVDLLKKQGLLLYGDIRERTFVEGQLPNPKPDALDNHQKCFAILKLYRPKVDNSAVGTSKKSDMAEVKDWKAVRVDLVVAPDEQFAYALLGWTGSGMFRRDTRRYAEEERDMLLDNHGLYDLKKGIFLSADSEEEIFGHLDLDYLEPWERNA

SEQ ID NO: 5469 - DNA, 1182 bp, synthetic construct
  misc_feature 1..1182: note = Variant of terminal deoxynucleotidyl transferase
  source 1..1182: mol_type = other DNA
atgcatcaccaccatcatcatgggggttctggtcatccggaaggtaataccccggagaaggaggtgccgagcgttatcgcccgtcatgttagtccgtacgcgtgccagcgcaagaccacgctgaataactacaacaaaaagatcaccgacgcgctggagatcatggccgagaactacaagtttaaagagaacctgcaggcgtgcctggaggcccgtcgcgccgcgagtgtcctgaaaagcctgccgttcgaggttaccagcatgaaagacatccaaggtctgccgtgcattaccgacgacgtacgtcctgtgatcgaagagatcatcgaagtaggcgagagcagccgtgttaaagaaatcctcaatgacgagcgctacaaggcctttaagcagttcaccagcgtgttcggtgtgggcgtcaagacctcggaaaagtggtaccgtatgggcctccgtacgcgcgaagaagcaaaggccagtaagagtctgaagctgaacaagatgcagaaggcgggcttcctgtattacgaggatctggcgagcggtgttagtaaagaagaagccgatgccgttacggatatcgtgaaggaaacggtgcgcactgttagtccggatgcgctggtgaccatcgccggcggtttccgccgtggcaaacctatgggccacgacgttgacctgctgatcacgattccgggccgtcctacggatgacgagctgctccacaaagtggttgatctgctcaagaagcaaggtctgctgctgtacggggacatccgtgagcgtacgttcgtggaggggcaactgccaaatcctaaacctgacgccctggacaaccatcagaagtgcttcgccattctcaagctgtaccgtccgaaggtggataacagtgcggttgggacgagtaagaaaagtgacatggctgaggttaaggattggaaagcggttcgtgtggatctggtggtcgctccagatgagcagttcgcctatgcgctgctcggttggacgggcagcggcatgtttcgtcgcgatactcgtcgctacgcggaggaagagcgcgacatgctgctcgacaaccatggtctctacgacctgaaaaagggcatctttctgagtgcggacagcgaagaagagattttcggtcatctggacctggattatctggagccgtgggaacgcaacgcg

SEQ ID NO: 5470 - protein, 394 aa, synthetic construct
  REGION 1..394: note = Variant of terminal deoxynucleotidyl transferase
MHHHHHHGGSGHPEGNTPEKEVPSVIARHVSPYACQRKTTLNNYNKKITDALEIMAENYKFKENLQACLEARRAASVLKSLPFEVTSMKDIQGLPCITDDVRPVIEEIIEVGESSRVKEILNDERYKAFKQFTSVFGVGVKTSEKWYRMGLRTREEAKASKSLKLNKMQKAGFLYYEDLASGVSKEEADAVTDIVKETVRTVSPDALVTIAGGFRRGKPMGHDVDLLITIPGRPTDDELLHKVVDLLKKQGLLLYGDIRERTFVEGQLPNPKPDALDNHQKCFAILKLYRPKVDNSAVGTSKKSDMAEVKDWKAVRVDLVVAPDEQFAYALLGWTGSGMFRRDTRRYAEEERDMLLDNHGLYDLKKGIFLSADSEEEIFGHLDLDYLEPWERNA

SEQ ID NO: 5471 - DNA, 1182 bp, synthetic construct
  misc_feature 1..1182: note = Variant of terminal deoxynucleotidyl transferase
  source 1..1182: mol_type = other DNA
atgcatcaccaccatcatcatgggggttctggtcatccggaaggtaataccccggagaaggaggtgccgagcgttatcgcccgtcatgttagtccgtacgcgtgccagcgcaagaccacgctgaataactacaacaaaaagatcaccgacgcgctggagatcatggccgagaactacaagtttaaagagaacctgcaggcgtgcctggaggcccgtcgcgccgcgagtgtcctgaaaagcctgccgttcgaggttaccagcatgaaagacatccaaggtctgccgtgcattaccgacgacgtacgtcctgtgatcgaagagatcatcgaagtaggcgagagcagccgtgttaaagaaatcctcaatgacgagcgctacaaggcctttaagcagttcaccagcgtgttcggtgtgggcgtcaagacctcggaaaagtggtaccgtatgggcctccgtacgcgcgaagaagcaaaggccagtaagagtctgaagctgaacaagatgcagaaggcgggcttcctgtattacgaggatctggcgagcggtgttagtaaagaagaagccgatgccgttctgcgtatcgtgaaggaaacggtgcgcactgttagtccggatgcgctggtgaccatcgccggcggtttccgccgtggcaaacctatgggccacgacgttgacctgctgatcacgattccgggccgtcctacggatgacgagctgctccacaaagtggttgatctgctcaagaagcaaggtctgctgctgtacggggacatccgtgagcgtacgttcgtggaggggcaactgccaaatcctaaacctgacgccctggacaaccatcagaagtgcttcgccattctcaagctgtaccgtccgaaggtggataacagtgcggttgggacgagtaagaaaagtgacatggctgaggttaaggattggaaagcggttcgtgtggatctggtggtcgctccagatgagcagttcgcctatgcgctgctcggttggacgggcagcggcatgtttcgtcgcgatactcgtcgctacgcggaggaagagcgcgacatgctgctcgacaaccatggtctctacgacctgaaaaagggcatctttctgagtgcggacagcgaagaagagattttcggtcatctggacctggattatctggagccgtgggaacgcaacgcg

SEQ ID NO: 5472 - protein, 394 aa, synthetic construct
  REGION 1..394: note = Variant of terminal deoxynucleotidyl transferase
MHHHHHHGGSGHPEGNTPEKEVPSVIARHVSPYACQRKTTLNNYNKKITDALEIMAENYKFKENLQACLEARRAASVLKSLPFEVTSMKDIQGLPCITDDVRPVIEEIIEVGESSRVKEILNDERYKAFKQFTSVFGVGVKTSEKWYRMGLRTREEAKASKSLKLNKMQKAGFLYYEDLASGVSKEEADAVLRIVKETVRTVSPDALVTIAGGFRRGKPMGHDVDLLITIPGRPTDDELLHKVVDLLKKQGLLLYGDIRERTFVEGQLPNPKPDALDNHQKCFAILKLYRPKVDNSAVGTSKKSDMAEVKDWKAVRVDLVVAPDEQFAYALLGWTGSGMFRRDTRRYAEEERDMLLDNHGLYDLKKGIFLSADSEEEIFGHLDLDYLEPWERNA

SEQ ID NO: 5473 - DNA, 1182 bp, synthetic construct
  misc_feature 1..1182: note = Variant of terminal deoxynucleotidyl transferase
  source 1..1182: mol_type = other DNA
atgcatcaccaccatcatcatgggggttctggtcatccggaaggtaataccccggagaaggaggtgccgagcgttatcgcccgtcatgttagtccgtacgcgtgccagcgcaagaccacgctgaataactacaacaaaaagatcaccgacgcgctggagatcatggccgagaactacaagtttaaagagaacctgcaggcgtgcctggaggcccgtcgcgccgcgagtgtcctgaaaagcctgccgttcgaggttaccagcatgaaagacatccaaggtctgccgtgcattaccgacgacgtacgtcctgtgatcgaagagatcatcgaagtaggcgagagcagccgtgttaaagaaatcctcaatgacgagcgctacaaggcctttaagcagttcaccagcgtgttcggtgtgggcgtcaagacctcggaaaagtggtaccgtatgggcctccgtacgcgcgaagaagcaaaggccagtaagagtctgaagctgaacaagatgcagaaggcgggcttcctgtattacgaggatctggcgagcggtgttagtaaagaagaagccgatgccgttctggatatcgtgaaggaaacggtgcgcactgttagtccggatgcgctggtgaccatcgccggcggtttccgccgtggcaaacctatgggccacgacgttgacctgctgatcacgattccgggccgtcctacggatgacgagctgctccacaaagtggttgatctgctcaagaagcaaggtctgctgctgtacggggacgtgcgtgagcgtacgttcgtggaggggcaactgccaaatcctaaacctgacgccctggacaaccatcagaagtgcttcgccattctcaagctgtaccgtccgaaggtggataacagtgcggttgggacgagtaagaaaagtgacatggctgaggttaaggattggaaagcggttcgtgtggatctggtggtcgctccagatgagcagttcgcctatgcgctgctcggttggacgggcagcggcatgtttcgtcgcgatactcgtcgctacgcggaggaagagcgcgacatgctgctcgacaaccatggtctctacgacctgaaaaagggcatctttctgagtgcggacagcgaagaagagattttcggtcatctggacctggattatctggagccgtgggaacgcaacgcg

SEQ ID NO: 5474 - protein, 394 aa, synthetic construct
  REGION 1..394: note = Variant of terminal deoxynucleotidyl transferase
MHHHHHHGGSGHPEGNTPEKEVPSVIARHVSPYACQRKTTLNNYNKKITDALEIMAENYKFKENLQACLEARRAASVLKSLPFEVTSMKDIQGLPCITDDVRPVIEEIIEVGESSRVKEILNDERYKAFKQFTSVFGVGVKTSEKWYRMGLRTREEAKASKSLKLNKMQKAGFLYYEDLASGVSKEEADAVLDIVKETVRTVSPDALVTIAGGFRRGKPMGHDVDLLITIPGRPTDDELLHKVVDLLKKQGLLLYGDVRERTFVEGQLPNPKPDALDNHQKCFAILKLYRPKVDNSAVGTSKKSDMAEVKDWKAVRVDLVVAPDEQFAYALLGWTGSGMFRRDTRRYAEEERDMLLDNHGLYDLKKGIFLSADSEEEIFGHLDLDYLEPWERNA

SEQ ID NO: 5475 - DNA, 1182 bp, synthetic construct
  misc_feature 1..1182: note = Variant of terminal deoxynucleotidyl transferase
  source 1..1182: mol_type = other DNA
atgcatcaccaccatcatcatgggggttctggtcatccggaaggtaataccccggagaaggaggtgccgagcgttatcgcccgtcatgttagtccgtacgcgtgccagcgcaagaccacgctgaataactacaacaaaaagatcaccgacgcgctggagatcatggccgagaactacaagtttaaagagaacctgcaggcgtgcctggaggcccgtcgcgccgcgagtgtcctgaaaagcctgccgttcgaggttaccagcatgaaagacatccaaggtctgccgtgcattaccgacgacgtacgtcctgtgatcgaagagatcatcgaagtaggcgagagcagccgtgttaaagaaatcctcaatgacgagcgctacaaggcctttaagcagttcaccagcgtgttcggtgtgggcgtcaagacctcggaaaagtggtaccgtatgggcctccgtacgcgcgaagaagcaaaggccagtaagagtctgaagctgaacaagatgcagaaggcgggcttcctgtattacgaggatctggcgagcggtgttagtaaagaagaagccgatgccgttctggatatcgtgaaggaaacggtgcgcactgttgatccggatgcgctggtgaccatcgccggcggtttccgccgtggcaaacctatgggccacgacgttgacctgctgatcacgattccgggccgtcctacggatgacgagctgctccacaaagtggttgatctgctcaagaagcaaggtctgctgctgtacggggacatccgtgagcgtacgttcgtggaggggcaactgccaaatcctaaacctgacgccctggacaaccatcagaagtgcttcgccattctcaagctgtaccgtccgaaggtggataacagtgcggttgggacgagtaagaaaagtgacatggctgaggttaaggattggaaagcggttcgtgtggatctggtggtcgctccagatgagcagttcgcctatgcgctgctcggttggacgggcagcggcatgtttcgtcgcgatactcgtcgctacgcggaggaagagcgcgacatgctgctcgacaaccatggtctctacgacctgaaaaagggcatctttctgagtgcggacagcgaagaagagattttcggtcatctggacctggattatctggagccgtgggaacgcaacgcg

SEQ ID NO: 5476 - protein, 394 aa, synthetic construct
  REGION 1..394: note = Variant of terminal deoxynucleotidyl transferase
MHHHHHHGGSGHPEGNTPEKEVPSVIARHVSPYACQRKTTLNNYNKKITDALEIMAENYKFKENLQACLEARRAASVLKSLPFEVTSMKDIQGLPCITDDVRPVIEEIIEVGESSRVKEILNDERYKAFKQFTSVFGVGVKTSEKWYRMGLRTREEAKASKSLKLNKMQKAGFLYYEDLASGVSKEEADAVLDIVKETVRTVDPDALVTIAGGFRRGKPMGHDVDLLITIPGRPTDDELLHKVVDLLKKQGLLLYGDIRERTFVEGQLPNPKPDALDNHQKCFAILKLYRPKVDNSAVGTSKKSDMAEVKDWKAVRVDLVVAPDEQFAYALLGWTGSGMFRRDTRRYAEEERDMLLDNHGLYDLKKGIFLSADSEEEIFGHLDLDYLEPWERNA

SEQ ID NO: 5477 - DNA, 1182 bp, synthetic construct
  misc_feature 1..1182: note = Variant of terminal deoxynucleotidyl transferase
  source 1..1182: mol_type = other DNA
atgcatcaccaccatcatcatgggggttctggtcatccggaaggtaataccccggagaaggaggtgccgagcgttatcgcccgtcatgttagtccgtacgcgtgccagcgcaagaccacgctgaataactacaacaaaaagatcaccgacgcgctggagatcatggccgagaactacaagtttaaagagaacctgcaggcgtgcctggaggcccgtcgcgccgcgagtgtcctgaaaagcctgccgttcgaggttaccagcatgaaagacatccaaggtctgccgtgcattaccgacgacgtacgtcctgtgatcgaagagatcatcgaagtaggcgagagcagccgtgttaaagaaatcctcaatgacgagcgctacaaggcctttaagcagttcaccagcgtgttcggtgtgggcgtcaagacctcggaaaagtggtaccgtatgggcctccgtacgcgcgaagaagcaaaggccagtaagagtctgaagctgaacaagatgcagaaggcgggcttcctgtattacgaggatctggcgagcggtgttagtaaagaagaagccgatgccgttctggatatcgtgaaggaaacggtgcgcactgttttgccggatgcgctggtgaccatcgccggcggtttccgccgtggcaaacctatgggccacgacgttgacctgctgatcacgattccgggccgtcctacggatgacgagctgctccacaaagtggttgatctgctcaagaagcaaggtctgctgctgtacggggacatccgtgagcgtacgttcgtggaggggcaactgccaaatcctaaacctgacgccctggacaaccatcagaagtgcttcgccattctcaagctgtaccgtccgaaggtggataacagtgcggttgggacgagtaagaaaagtgacatggctgaggttaaggattggaaagcggttcgtgtggatctggtggtcgctccagatgagcagttcgcctatgcgctgctcggttggacgggcagcggcatgtttcgtcgcgatactcgtcgctacgcggaggaagagcgcgacatgctgctcgacaaccatggtctctacgacctgaaaaagggcatctttctgagtgcggacagcgaagaagagattttcggtcatctggacctggattatctggagccgtgggaacgcaacgcg

SEQ ID NO: 5478 - protein, 394 aa, synthetic construct
  REGION 1..394: note = Variant of terminal deoxynucleotidyl transferase
MHHHHHHGGSGHPEGNTPEKEVPSVIARHVSPYACQRKTTLNNYNKKITDALEIMAENYKFKENLQACLEARRAASVLKSLPFEVTSMKDIQGLPCITDDVRPVIEEIIEVGESSRVKEILNDERYKAFKQFTSVFGVGVKTSEKWYRMGLRTREEAKASKSLKLNKMQKAGFLYYEDLASGVSKEEADAVLDIVKETVRTVLPDALVTIAGGFRRGKPMGHDVDLLITIPGRPTDDELLHKVVDLLKKQGLLLYGDIRERTFVEGQLPNPKPDALDNHQKCFAILKLYRPKVDNSAVGTSKKSDMAEVKDWKAVRVDLVVAPDEQFAYALLGWTGSGMFRRDTRRYAEEERDMLLDNHGLYDLKKGIFLSADSEEEIFGHLDLDYLEPWERNA

SEQ ID NO: 5479 - DNA, 1182 bp, synthetic construct
  misc_feature 1..1182: note = Variant of terminal deoxynucleotidyl transferase
  source 1..1182: mol_type = other DNA
atgcatcaccaccatcatcatgggggttctggtcatccggaaggtaataccccggagaaggaggtgccgagcgttatcgcccgtcatgttagtccgtacgcgtgccagcgcaagaccacgctgaataactacaacaaaaagatcaccgacgcgctggagatcatggccgagaactacaagtttaaagagaacctgcaggcgtgcctggaggcccgtcgcgccgcgagtgtcctgaaaagcctgccgttcgaggttaccagcatgaaagacatccaaggtctgccgtgcattaccgacgacgtacgtcctgtgatcgaagagatcatcgaagtaggcgagagcagccgtgttaaagaaatcctcaatgacgagcgctacaaggcctttaagcagttcaccagcgtgttcggtgtgggcgtcaagacctcggaaaagtggtaccgtatgggcctccgtacgcgcgaagaagcaaaggccagtaagagtctgaagctgaacaagatgcagaaggcgggcttcctgtattacgaggatctggcgagcggtgttagtaaagaagaagccgatgccgttctggatatcgtgaaggaaacggtgcgcactgttagtccggatgcgctggtgaccatcgccggcggtttccgccgtggcaaacctatgggccacgacgttgacctgctgatcacgattccgggctggcctacggatgacgagctgctccacaaagtggttgatctgctcaagaagcaaggtctgctgctgtacggggacatccgtgagcgtacgttcgtggaggggcaactgccaaatcctaaacctgacgccctggacaaccatcagaagtgcttcgccattctcaagctgtaccgtccgaaggtggataacagtgcggttgggacgagtaagaaaagtgacatggctgaggttaaggattggaaagcggttcgtgtggatctggtggtcgctccagatgagcagttcgcctatgcgctgctcggttggacgggcagcggcatgtttcgtcgcgatactcgtcgctacgcggaggaagagcgcgacatgctgctcgacaaccatggtctctacgacctgaaaaagggcatctttctgagtgcggacagcgaagaagagattttcggtcatctggacctggattatctggagccgtgggaacgcaacgcg

SEQ ID NO: 5480 - protein, 394 aa, synthetic construct
  REGION 1..394: note = Variant of terminal deoxynucleotidyl transferase
MHHHHHHGGSGHPEGNTPEKEVPSVIARHVSPYACQRKTTLNNYNKKITDALEIMAENYKFKENLQACLEARRAASVLKSLPFEVTSMKDIQGLPCITDDVRPVIEEIIEVGESSRVKEILNDERYKAFKQFTSVFGVGVKTSEKWYRMGLRTREEAKASKSLKLNKMQKAGFLYYEDLASGVSKEEADAVLDIVKETVRTVSPDALVTIAGGFRRGKPMGHDVDLLITIPGWPTDDELLHKVVDLLKKQGLLLYGDIRERTFVEGQLPNPKPDALDNHQKCFAILKLYRPKVDNSAVGTSKKSDMAEVKDWKAVRVDLVVAPDEQFAYALLGWTGSGMFRRDTRRYAEEERDMLLDNHGLYDLKKGIFLSADSEEEIFGHLDLDYLEPWERNA

SEQ ID NO: 5481 - DNA, 1182 bp, synthetic construct
  misc_feature 1..1182: note = Variant of terminal deoxynucleotidyl transferase
  source 1..1182: mol_type = other DNA
atgcatcaccaccatcatcatgggggttctggtcatccggaaggtaataccccggagaaggaggtgccgagcgttatcgcccgtcatgttagtccgtacgcgtgccagcgcaagaccacgctgaataactacaacaaaaagatcaccgacgcgctggagatcatggccgagaactacaagtttaaagagaacctgcaggcgtgcctggaggcccgtcgcgccgcgagtgtcctgaaaagcctgccgttcgaggttaccagcatgaaagacatccaaggtctgccgtgcattaccgacgacgtacgtcctgtgatcgaagagatcatcgaagtaggcgagagcagccgtgttaaagaaatcctcaatgacgagcgctacaaggcctttaagcagttcaccagcgtgttcggtgtgggcgtcaagacctcggaaaagtggtaccgtatgggcctccgtacgcgcgaagaagcaaaggccagtaagagtctgaagctgaacaagatgcagaaggcgggcttcctgtattacgaggatctggcgagcggtgttagtaaagaagaagccgatgccgttctggatatcgtgaaggaaacggtgcgcactgttagtccggatgcgctggtgaccatcgccggcggtttccgccgtggcaaacctatgggccacgacgttgacctgctgatcacgattccgggccgtcctacggatgaccggctgctccacaaagtggttgatctgctcaagaagcaaggtctgctgctgtacggggacatccgtgagcgtacgttcgtggaggggcaactgccaaatcctaaacctgacgccctggacaaccatcagaagtgcttcgccattctcaagctgtaccgtccgaaggtggataacagtgcggttgggacgagtaagaaaagtgacatggctgaggttaaggattggaaagcggttcgtgtggatctggtggtcgctccagatgagcagttcgcctatgcgctgctcggttggacgggcagcggcatgtttcgtcgcgatactcgtcgctacgcggaggaagagcgcgacatgctgctcgacaaccatggtctctacgacctgaaaaagggcatctttctgagtgcggacagcgaagaagagattttcggtcatctggacctggattatctggagccgtgggaacgcaacgcg

SEQ ID NO: 5482 - protein, 394 aa, synthetic construct
  REGION 1..394: note = Variant of terminal deoxynucleotidyl transferase
MHHHHHHGGSGHPEGNTPEKEVPSVIARHVSPYACQRKTTLNNYNKKITDALEIMAENYKFKENLQACLEARRAASVLKSLPFEVTSMKDIQGLPCITDDVRPVIEEIIEVGESSRVKEILNDERYKAFKQFTSVFGVGVKTSEKWYRMGLRTREEAKASKSLKLNKMQKAGFLYYEDLASGVSKEEADAVLDIVKETVRTVSPDALVTIAGGFRRGKPMGHDVDLLITIPGRPTDDRLLHKVVDLLKKQGLLLYGDIRERTFVEGQLPNPKPDALDNHQKCFAILKLYRPKVDNSAVGTSKKSDMAEVKDWKAVRVDLVVAPDEQFAYALLGWTGSGMFRRDTRRYAEEERDMLLDNHGLYDLKKGIFLSADSEEEIFGHLDLDYLEPWERNA

SEQ ID NO: 5483 - DNA, 1182 bp, synthetic construct
  misc_feature 1..1182: note = Variant of terminal deoxynucleotidyl transferase
  source 1..1182: mol_type = other DNA
atgcatcaccaccatcatcatgggggttctggtcatccggaaggtaataccccggagaaggaggtgccgagcgttatcgcccgtcatgttagtccgtacgcgtgccagcgcaagaccacgctgaataactacaacaaaaagatcaccgacgcgctggagatcatggccgagaactacaagtttaaagagaacctgcaggcgtgcctggaggcccgtcgcgccgcgagtgtcctgaaaagcctgccgttcgaggttaccagcatgaaagacatccaaggtctgccgtgcattaccgacgacgtacgtcctgtgatcgaagagatcatcgaagtaggcgagagcagccgtgttaaagaaatcctcaatgacgagcgctacaaggcctttaagcagttcaccagcgtgttcggtgtgggcgtcaagacctcggaaaagtggtaccgtatgggcctccgtacgcgcgaagaagcaaaggccagtaagagtctgaagctgaacaagatgcagaaggcgggcttcctgtattacgaggatctggcgagcggtgttagtaaagaagaagccgatgccgttctggatatcgtgaaggaaacggtgcgcactgttagtccggatgcgctggtgaccatcgccggcggtttccgccgtggcaaacctatgggccacgacgttgacctgctgatcacgattccgggccgtcctacggatgacgagctgctccacaaagtggttgatctgctcaagaagcaaggtctgctgctgtacggggacatccgtggtcgtacgttcgtggaggggcaactgccaaatcctaaacctgacgccctggacaaccatcagaagtgcttcgccattctcaagctgtaccgtccgaaggtggataacagtgcggttgggacgagtaagaaaagtgacatggctgaggttaaggattggaaagcggttcgtgtggatctggtggtcgctccagatgagcagttcgcctatgcgctgctcggttggacgggcagcggcatgtttcgtcgcgatactcgtcgctacgcggaggaagagcgcgacatgctgctcgacaaccatggtctctacgacctgaaaaagggcatctttctgagtgcggacagcgaagaagagattttcggtcatctggacctggattatctggagccgtgggaacgcaacgcg

SEQ ID NO: 5484 - protein, 394 aa, synthetic construct
  REGION 1..394: note = Variant of terminal deoxynucleotidyl transferase
MHHHHHHGGSGHPEGNTPEKEVPSVIARHVSPYACQRKTTLNNYNKKITDALEIMAENYKFKENLQACLEARRAASVLKSLPFEVTSMKDIQGLPCITDDVRPVIEEIIEVGESSRVKEILNDERYKAFKQFTSVFGVGVKTSEKWYRMGLRTREEAKASKSLKLNKMQKAGFLYYEDLASGVSKEEADAVLDIVKETVRTVSPDALVTIAGGFRRGKPMGHDVDLLITIPGRPTDDELLHKVVDLLKKQGLLLYGDIRGRTFVEGQLPNPKPDALDNHQKCFAILKLYRPKVDNSAVGTSKKSDMAEVKDWKAVRVDLVVAPDEQFAYALLGWTGSGMFRRDTRRYAEEERDMLLDNHGLYDLKKGIFLSADSEEEIFGHLDLDYLEPWERNA

SEQ ID NO: 5485 - DNA, 1182 bp, synthetic construct
  misc_feature 1..1182: note = Variant of terminal deoxynucleotidyl transferase
  source 1..1182: mol_type = other DNA
atgcatcaccaccatcatcatgggggttctggtcatccggaaggtaataccccggagaaggaggtgccgagcgttatcgcccgtcatgttagtccgtacgcgtgccagcgcaagaccacgctgaataactacaacaaaaagatcaccgacgcgctggagatcatggccgagaactacaagtttaaagagaacctgcaggcgtgcctggaggcccgtcgcgccgcgagtgtcctgaaaagcctgccgttcgaggttaccagcatgaaagacatccaaggtctgccgtgcattaccgacgacgtacgtcctgtgatcgaagagatcatcgaagtaggcgagagcagccgtgttaaagaaatcctcaatgacgagcgctacaaggcctttaagcagttcaccagcgtgttcggtgtgggcgtcaagacctcggaaaagtggtaccgtatgggcctccgtacgcgcgaagaagcaaaggccagtaagagtctgaagctgaacaagatgcagaaggcgggcttcctgtattacgaggatctggcgagcggtgttagtaaagaagaagccagggccgttctggatatcgtgaaggaaacggtgcgcactgttagtccggatgcgctggtgaccatcgccggcggtttccgccgtggcaaacctatgggccacgacgttgacctgctgatcacgattccgggccgtcctacggatgacgagctgctccacaaagtggttgatctgctcaagaagcaaggtctgctgctgtacggggacatccgtgagcgtacgttcgtggaggggcaactgccaaatcctaaacctgacgccctggacaaccatcagaagtgcttcgccattctcaagctgtaccgtccgaaggtggataacagtgcggttgggacgagtaagaaaagtgacatggctgaggttaaggattggaaagcggttcgtgtggatctggtggtcgctccagatgagcagttcgcctatgcgctgctcggttggacgggcagcggcatgtttcgtcgcgatactcgtcgctacgcggaggaagagcgcgacatgctgctcgacaaccatggtctctacgacctgaaaaagggcatctttctgagtgcggacagcgaagaagagattttcggtcatctggacctggattatctggagccgtgggaacgcaacgcg

SEQ ID NO: 5486 - protein, 394 aa, synthetic construct
  REGION 1..394: note = Variant of terminal deoxynucleotidyl transferase
MHHHHHHGGSGHPEGNTPEKEVPSVIARHVSPYACQRKTTLNNYNKKITDALEIMAENYKFKENLQACLEARRAASVLKSLPFEVTSMKDIQGLPCITDDVRPVIEEIIEVGESSRVKEILNDERYKAFKQFTSVFGVGVKTSEKWYRMGLRTREEAKASKSLKLNKMQKAGFLYYEDLASGVSKEEARAVLDIVKETVRTVSPDALVTIAGGFRRGKPMGHDVDLLITIPGRPTDDELLHKVVDLLKKQGLLLYGDIRERTFVEGQLPNPKPDALDNHQKCFAILKLYRPKVDNSAVGTSKKSDMAEVKDWKAVRVDLVVAPDEQFAYALLGWTGSGMFRRDTRRYAEEERDMLLDNHGLYDLKKGIFLSADSEEEIFGHLDLDYLEPWERNA

SEQ ID NO: 5487 - DNA, 1182 bp, synthetic construct
  misc_feature 1..1182: note = Variant of terminal deoxynucleotidyl transferase
  source 1..1182: mol_type = other DNA
atgcatcaccaccatcatcatgggggttctggtcatccggaaggtaataccccggagaaggaggtgccgagcgttatcgcccgtcatgttagtccgtacgcgtgccagcgcaagaccacgctgaataactacaacaaaaagatcaccgacgcgctggagatcatggccgagaactacaagtttaaagagaacctgcaggcgtgcctggaggcccgtcgcgccgcgagtgtcctgaaaagcctgccgttcgaggttaccagcatgaaagacatccaaggtctgccgtgcattaccgacgacgtacgtcctgtgatcgaagagatcatcgaagtaggcgagagcagccgtgttaaagaaatcctcaatgacgagcgctacaaggcctttaagcagttcaccagcgtgttcggtgtgggcgtcaagacctcggaaaagtggtaccgtatgggcctccgtacgcgcgaagaagcaaaggccagtaagagtctgaagctgaacaagatgcagaaggcgggcttcctgtattacgaggatctggcgagcggtgttagtaaagaagaagccgatgccgttctggatatcgtgaaggaaacggtgcgcactgttagtccggatgcgctggtgaccatcgccggcggtttccgccgtggcaaacctatgggccacgacgttgacctgctgatcacgattccgggccgtcctacggatgacgagctgctccacaaagtggttgatctgctcaagaagcaaggtctgctgctgtacggggacatccgtgagcgtacgttcgtggaggggcaactgccaaatcctaaacctgacgccctggacaaccatcagaagtgcttcgccattctcaagaagtaccgtccgaaggtggataacagtgcggttgggacgagtaagaaaagtgacatggctgaggttaaggattggaaagcggttcgtgtggatctggtggtcgctccagatgagcagttcgcctatgcgctgctcggttggacgggcagcggcatgtttcgtcgcgatactcgtcgctacgcggaggaagagcgcgacatgctgctcgacaaccatggtctctacgacctgaaaaagggcatctttctgagtgcggacagcgaagaagagattttcggtcatctggacctggattatctggagccgtgggaacgcaacgcg

SEQ ID NO: 5488 - protein, 394 aa, synthetic construct
  REGION 1..394: note = Variant of terminal deoxynucleotidyl transferase
MHHHHHHGGSGHPEGNTPEKEVPSVIARHVSPYACQRKTTLNNYNKKITDALEIMAENYKFKENLQACLEARRAASVLKSLPFEVTSMKDIQGLPCITDDVRPVIEEIIEVGESSRVKEILNDERYKAFKQFTSVFGVGVKTSEKWYRMGLRTREEAKASKSLKLNKMQKAGFLYYEDLASGVSKEEADAVLDIVKETVRTVSPDALVTIAGGFRRGKPMGHDVDLLITIPGRPTDDELLHKVVDLLKKQGLLLYGDIRERTFVEGQLPNPKPDALDNHQKCFAILKKYRPKVDNSAVGTSKKSDMAEVKDWKAVRVDLVVAPDEQFAYALLGWTGSGMFRRDTRRYAEEERDMLLDNHGLYDLKKGIFLSADSEEEIFGHLDLDYLEPWERNA

SEQ ID NO: 5489 - DNA, 1182 bp, synthetic construct
  misc_feature 1..1182: note = Variant of terminal deoxynucleotidyl transferase
  source 1..1182: mol_type = other DNA
atgcatcaccaccatcatcatgggggttctggtcatccggaaggtaataccccggagaaggaggtgccgagcgttatcgcccgtcatgttagtccgtacgcgtgccagcgcaagaccacgctgaataactacaacaaaaagatcaccgacgcgctggagatcatggccgagaactacaagtttaaagagaacctgcaggcgtgcctggaggcccgtcgcgccgcgagtgtcctgaaaagcctgccgttcgaggttaccagcatgaaagacatccaaggtctgccgtgcattaccgacgacgtacgtcctgtgatcgaagagatcatcgaagtaggcgagagcagccgtgttaaagaaatcctcaatgacgagcgctacaaggcctttaagcagttcaccagcgtgttcggtgtgggcgtcaagacctcggaaaagtggtaccgtatgggcctccgtacgcgcgaagaagcaaaggccagtaagagtctgaagctgaacaagatgcagaaggcgggcttcctgtattacgaggatctggcgagcggtgttagtaaagaagaagccgatgccgttctggatatcgtgaaggaaacggtgcgcactgttagtccggatgcgctggtgaccatcgccggcggtttccgccgtggcaaacctatgggccacgacgttgacctgctgatcacgattccgggccgtcctacggatgacgagctgctccacaaagtggttgatctgctcaagaagcaaggtctgctgctgtacggggacatccgtgagcgtacgttcgtggaggggcaactgccaaatcctaaacctgacgccctggacaaccatcagaagtgcttcgccattctcaagctgtaccgtccgaaggtggataacagtgcggttaatacgagtaagaaaagtgacatggctgaggttaaggattggaaagcggttcgtgtggatctggtggtcgctccagatgagcagttcgcctatgcgctgctcggttggacgggcagcggcatgtttcgtcgcgatactcgtcgctacgcggaggaagagcgcgacatgctgctcgacaaccatggtctctacgacctgaaaaagggcatctttctgagtgcggacagcgaagaagagattttcggtcatctggacctggattatctggagccgtgggaacgcaacgcg

SEQ ID NO: 5490 - protein, 394 aa, synthetic construct
  REGION 1..394: note = Variant of terminal deoxynucleotidyl transferase
MHHHHHHGGSGHPEGNTPEKEVPSVIARHVSPYACQRKTTLNNYNKKITDALEIMAENYKFKENLQACLEARRAASVLKSLPFEVTSMKDIQGLPCITDDVRPVIEEIIEVGESSRVKEILNDERYKAFKQFTSVFGVGVKTSEKWYRMGLRTREEAKASKSLKLNKMQKAGFLYYEDLASGVSKEEADAVLDIVKETVRTVSPDALVTIAGGFRRGKPMGHDVDLLITIPGRPTDDELLHKVVDLLKKQGLLLYGDIRERTFVEGQLPNPKPDALDNHQKCFAILKLYRPKVDNSAVNTSKKSDMAEVKDWKAVRVDLVVAPDEQFAYALLGWTGSGMFRRDTRRYAEEERDMLLDNHGLYDLKKGIFLSADSEEEIFGHLDLDYLEPWERNA

SEQ ID NO: 5491 - DNA, 1182 bp, synthetic construct
  misc_feature 1..1182: note = Variant of terminal deoxynucleotidyl transferase
  source 1..1182: mol_type = other DNA
atgcatcaccaccatcatcatgggggttctggtcatccggaaggtaataccccggagaaggaggtgccgagcgttatcgcccgtcatgttagtccgtacgcgtgccagcgcaagaccacgctgaataactacaacaaaaagatcaccgacgcgctggagatcatggccgagaactacaagtttaaagagaacctgcaggcgtgcctggaggcccgtcgcgccgcgagtgtcctgaaaagcctgccgttcgaggttaccagcatgaaagacatccaaggtctgccgtgcattaccgacgacgtacgtcctgtgatcgaagagatcatcgaagtaggcgagagcagccgtgttaaagaaatcctcaatgacgagcgctacaaggcctttaagcagttcaccagcgtgttcggtgtgggcgtcaagacctcggaaaagtggtaccgtatgggcctccgtacgcgcgaagaagcaaaggccagtaagagtctgaagctgaacaagatgcagaaggcgggcttcctgtattacgaggatctggcgagcggtgttagtaaagaagaagccgatgccgttctggatatcgtgaaggaaacggtgcgcactgttagtccggatgcgctggtgaccatcgccggcggtttccgccgtggcaaacctatgggccacgacgttgacctgctgatcacgattccgggccgtcctacggatgacgagctgctccacaaagtggttgatctgctcaagaagcaaggtctgctgctgtacggggacttgcgtgagcgtacgttcgtggaggggcaactgccaaatcctaaacctgacgccctggacaaccatcagaagtgcttcgccattctcaagctgtaccgtccgaaggtggataacagtgcggttgggacgagtaagaaaagtgacatggctgaggttaaggattggaaagcggttcgtgtggatctggtggtcgctccagatgagcagttcgcctatgcgctgctcggttggacgggcagcggcatgtttcgtcgcgatactcgtcgctacgcggaggaagagcgcgacatgctgctcgacaaccatggtctctacgacctgaaaaagggcatctttctgagtgcggacagcgaagaagagattttcggtcatctggacctggattatctggagccgtgggaacgcaacgcg

SEQ ID NO: 5492 - protein, 394 aa, synthetic construct
  REGION 1..394: note = Variant of terminal deoxynucleotidyl transferase
MHHHHHHGGSGHPEGNTPEKEVPSVIARHVSPYACQRKTTLNNYNKKITDALEIMAENYKFKENLQACLEARRAASVLKSLPFEVTSMKDIQGLPCITDDVRPVIEEIIEVGESSRVKEILNDERYKAFKQFTSVFGVGVKTSEKWYRMGLRTREEAKASKSLKLNKMQKAGFLYYEDLASGVSKEEADAVLDIVKETVRTVSPDALVTIAGGFRRGKPMGHDVDLLITIPGRPTDDELLHKVVDLLKKQGLLLYGDLRERTFVEGQLPNPKPDALDNHQKCFAILKLYRPKVDNSAVGTSKKSDMAEVKDWKAVRVDLVVAPDEQFAYALLGWTGSGMFRRDTRRYAEEERDMLLDNHGLYDLKKGIFLSADSEEEIFGHLDLDYLEPWERNA

SEQ ID NO: 5493 - DNA, 1182 bp, synthetic construct
  misc_feature 1..1182: note = Variant of terminal deoxynucleotidyl transferase
  source 1..1182: mol_type = other DNA
atgcatcaccaccatcatcatgggggttctggtcatccggaaggtaataccccggagaaggaggtgccgagcgttatcgcccgtcatgttagtccgtacgcgtgccagcgcaagaccacgctgaataactacaacaaaaagatcaccgacgcgctggagatcatggccgagaactacaagtttaaagagaacctgcaggcgtgcctggaggcccgtcgcgccgcgagtgtcctgaaaagcctgccgttcgaggttaccagcatgaaagacatccaaggtctgccgtgcattaccgacgacgtacgtcctgtgatcgaagagatcatcgaagtaggcgagagcagccgtgttaaagaaatcctcaatgacgagcgctacaaggcctttaagcagttcaccagcgtgttcggtgtgggcgtcaagacctcggaaaagtggtaccgtatgggcctccgtacgcgcgaagaagcaaaggccagtaagagtctgaagctgaacaagatgcagaaggcgggcttcctgtattacgaggatctggcgagcggtgttagtaaagaagaagccgatgccgttctggatatcgtgaaggaaacggtgcgcactgttagtccggatgcgctggtgaccatcgccggcggtttccgccgtggcaaacctatgggccacgacgttgacctggtgatcacgattccgggccgtcctacggatgacgagctgctccacaaagtggttgatctgctcaagaagcaaggtctgctgctgtacggggacatccgtgagcgtacgttcgtggaggggcaactgccaaatcctaaacctgacgccctggacaaccatcagaagtgcttcgccattctcaagctgtaccgtccgaaggtggataacagtgcggttgggacgagtaagaaaagtgacatggctgaggttaaggattggaaagcggttcgtgtggatctggtggtcgctccagatgagcagttcgcctatgcgctgctcggttggacgggcagcggcatgtttcgtcgcgatactcgtcgctacgcggaggaagagcgcgacatgctgctcgacaaccatggtctctacgacctgaaaaagggcatctttctgagtgcggacagcgaagaagagattttcggtcatctggacctggattatctggagccgtgggaacgcaacgcg

SEQ ID NO: 5494 - protein, 394 aa, synthetic construct
  REGION 1..394: note = Variant of terminal deoxynucleotidyl transferase
MHHHHHHGGSGHPEGNTPEKEVPSVIARHVSPYACQRKTTLNNYNKKITDALEIMAENYKFKENLQACLEARRAASVLKSLPFEVTSMKDIQGLPCITDDVRPVIEEIIEVGESSRVKEILNDERYKAFKQFTSVFGVGVKTSEKWYRMGLRTREEAKASKSLKLNKMQKAGFLYYEDLASGVSKEEADAVLDIVKETVRTVSPDALVTIAGGFRRGKPMGHDVDLVITIPGRPTDDELLHKVVDLLKKQGLLLYGDIRERTFVEGQLPNPKPDALDNHQKCFAILKLYRPKVDNSAVGTSKKSDMAEVKDWKAVRVDLVVAPDEQFAYALLGWTGSGMFRRDTRRYAEEERDMLLDNHGLYDLKKGIFLSADSEEEIFGHLDLDYLEPWERNA

SEQ ID NO: 5495 - DNA, 1182 bp, synthetic construct
  misc_feature 1..1182: note = Variant of terminal deoxynucleotidyl transferase
  source 1..1182: mol_type = other DNA
atgcatcaccaccatcatcatgggggttctggtcatccggaaggtaataccccggagaaggaggtgccgagcgttatcgcccgtcatgttagtccgtacgcgtgccagcgcaagaccacgctgaataactacaacaaaaagatcaccgacgcgctggagatcatggccgagaactacaagtttaaagagaacctgcaggcgtgcctggaggcccgtcgcgccgcgagtgtcctgaaaagcctgccgttcgaggttaccagcatgaaagacatccaaggtctgccgtgcattaccgacgacgtacgtcctgtgatcgaagagatcatcgaagtaggcgagagcagccgtgttaaagaaatcctcaatgacgagcgctacaaggcctttaagcagttcaccagcgtgttcggtgtgggcgtcaagacctcggaaaagtggtaccgtatgggcctccgtacgcgcgaagaagcaaaggccagtaagagtctgaagctgaacaagatgcagaaggcgggcttcctgtattacgaggatctggcgagcggtgttagtaaagaagaagccgatgccgttctggatatcgtgaaggaaacggtgcgcactgttagtccggatgcgctggtgaccatcgccggcggtttccgccgtggcaaacctatgggccacgacgttgacctgctgatcacgattccgggccgtcctacggatgacgagctgctccacaaagtggttgatctgctcaagaagcaaggtctgctgctgtacggggacatccgtgagcgtacgttcgtggaggggcaactgccaaatcctaggcctgacgccctggacaaccatcagaagtgcttcgccattctcaagctgtaccgtccgaaggtggataacagtgcggttgggacgagtaagaaaagtgacatggctgaggttaaggattggaaagcggttcgtgtggatctggtggtcgctccagatgagcagttcgcctatgcgctgctcggttggacgggcagcggcatgtttcgtcgcgatactcgtcgctacgcggaggaagagcgcgacatgctgctcgacaaccatggtctctacgacctgaaaaagggcatctttctgagtgcggacagcgaagaagagattttcggtcatctggacctggattatctggagccgtgggaacgcaacgcg

SEQ ID NO: 5496 - protein, 394 aa, synthetic construct
  REGION 1..394: note = Variant of terminal deoxynucleotidyl transferase
MHHHHHHGGSGHPEGNTPEKEVPSVIARHVSPYACQRKTTLNNYNKKITDALEIMAENYKFKENLQACLEARRAASVLKSLPFEVTSMKDIQGLPCITDDVRPVIEEIIEVGESSRVKEILNDERYKAFKQFTSVFGVGVKTSEKWYRMGLRTREEAKASKSLKLNKMQKAGFLYYEDLASGVSKEEADAVLDIVKETVRTVSPDALVTIAGGFRRGKPMGHDVDLLITIPGRPTDDELLHKVVDLLKKQGLLLYGDIRERTFVEGQLPNPRPDALDNHQKCFAILKLYRPKVDNSAVGTSKKSDMAEVKDWKAVRVDLVVAPDEQFAYALLGWTGSGMFRRDTRRYAEEERDMLLDNHGLYDLKKGIFLSADSEEEIFGHLDLDYLEPWERNA

SEQ ID NO: 5497 - DNA, 1182 bp, synthetic construct
  misc_feature 1..1182: note = Variant of terminal deoxynucleotidyl transferase
  source 1..1182: mol_type = other DNA
atgcatcaccaccatcatcatgggggttctggtcatccggaaggtaataccccggagaaggaggtgccgagcgttatcgcccgtcatgttagtccgtacgcgtgccagcgcaagaccacgctgaataactacaacaaaaagatcaccgacgcgctggagatcatggccgagaactacaagtttaaagagaacctgcaggcgtgcctggaggcccgtcgcgccgcgagtgtcctgaaaagcctgccgttcgaggttaccagcatgaaagacatccaaggtctgccgtgcattaccgacgacgtacgtcctgtgatcgaagagatcatcgaagtaggcgagagcagccgtgttaaagaaatcctcaatgacgagcgctacaaggcctttaagcagttcaccagcgtgttcggtgtgggcgtcaagacctcggaaaagtggtaccgtatgggcctccgtacgcgcgaagaagcaaaggccagtaagagtctgaagctgaacaagatgcagaaggcgggcttcctgtattacgaggatctggcgagcggtgttagtaaagaagaagccgatgccgttctgcagatcgtgaaggaaacggtgcgcactgttagtccggatgcgctggtgaccatcgccggcggtttccgccgtggcaaacctatgggccacgacgttgacctgctgatcacgattccgggccgtcctacggatgacgagctgctccacaaagtggttgatctgctcaagaagcaaggtctgctgctgtacggggacatccgtgagcgtacgttcgtggaggggcaactgccaaatcctaaacctgacgccctggacaaccatcagaagtgcttcgccattctcaagctgtaccgtccgaaggtggataacagtgcggttgggacgagtaagaaaagtgacatggctgaggttaaggattggaaagcggttcgtgtggatctggtggtcgctccagatgagcagttcgcctatgcgctgctcggttggacgggcagcggcatgtttcgtcgcgatactcgtcgctacgcggaggaagagcgcgacatgctgctcgacaaccatggtctctacgacctgaaaaagggcatctttctgagtgcggacagcgaagaagagattttcggtcatctggacctggattatctggagccgtgggaacgcaacgcg

SEQ ID NO: 5498 - protein, 394 aa, synthetic construct
  REGION 1..394: note = Variant of terminal deoxynucleotidyl transferase
MHHHHHHGGSGHPEGNTPEKEVPSVIARHVSPYACQRKTTLNNYNKKITDALEIMAENYKFKENLQACLEARRAASVLKSLPFEVTSMKDIQGLPCITDDVRPVIEEIIEVGESSRVKEILNDERYKAFKQFTSVFGVGVKTSEKWYRMGLRTREEAKASKSLKLNKMQKAGFLYYEDLASGVSKEEADAVLQIVKETVRTVSPDALVTIAGGFRRGKPMGHDVDLLITIPGRPTDDELLHKVVDLLKKQGLLLYGDIRERTFVEGQLPNPKPDALDNHQKCFAILKLYRPKVDNSAVGTSKKSDMAEVKDWKAVRVDLVVAPDEQFAYALLGWTGSGMFRRDTRRYAEEERDMLLDNHGLYDLKKGIFLSADSEEEIFGHLDLDYLEPWERNA

SEQ ID NO: 5499 - DNA, 1182 bp, synthetic construct
  misc_feature 1..1182: note = Variant of terminal deoxynucleotidyl transferase
  source 1..1182: mol_type = other DNA
atgcatcaccaccatcatcatgggggttctggtcatccggaaggtaataccccggagaaggaggtgccgagcgttatcgcccgtcatgttagtccgtacgcgtgccagcgcaagaccacgctgaataactacaacaaaaagatcaccgacgcgctggagatcatggccgagaactacaagtttaaagagaacctgcaggcgtgcctggaggcccgtcgcgccgcgagtgtcctgaaaagcctgccgttcgaggttaccagcatgaaagacatccaaggtctgccgtgcattaccgacgacgtacgtcctgtgatcgaagagatcatcgaagtaggcgagagcagccgtgttaaagaaatcctcaatgacgagcgctacaaggcctttaagcagttcaccagcgtgttcggtgtgggcgtcaagacctcggaaaagtggtaccgtatgggcctccgtacgcgcgaagaagcaaaggccagtaagagtctgaagctgaacaagatgcagaaggcgggcttcctgtattacgaggatctggcgagcggtgttagtaaagaagaagccgatgccgttctggatatcgtgaaggaaacggtgcgcactgttagtccggatgcgctggtgaccatcgccggcggtttccgccgtggcaaacctatgggccacgacgttgacctgctgatcacgattccgggccgtcctacggatgacgagctgctcgctaaagtggttgatctgctcaagaagcaaggtctgctgctgtacggggacatccgtgagcgtacgttcgtggaggggcaactgccaaatcctaaacctgacgccctggacaaccatcagaagtgcttcgccattctcaagctgtaccgtccgaaggtggataacagtgcggttgggacgagtaagaaaagtgacatggctgaggttaaggattggaaagcggttcgtgtggatctggtggtcgctccagatgagcagttcgcctatgcgctgctcggttggacgggcagcggcatgtttcgtcgcgatactcgtcgctacgcggaggaagagcgcgacatgctgctcgacaaccatggtctctacgacctgaaaaagggcatctttctgagtgcggacagcgaagaagagattttcggtcatctggacctggattatctggagccgtgggaacgcaacgcg

SEQ ID NO: 5500 - protein, 394 aa, synthetic construct
  REGION 1..394: note = Variant of terminal deoxynucleotidyl transferase
MHHHHHHGGSGHPEGNTPEKEVPSVIARHVSPYACQRKTTLNNYNKKITDALEIMAENYKFKENLQACLEARRAASVLKSLPFEVTSMKDIQGLPCITDDVRPVIEEIIEVGESSRVKEILNDERYKAFKQFTSVFGVGVKTSEKWYRMGLRTREEAKASKSLKLNKMQKAGFLYYEDLASGVSKEEADAVLDIVKETVRTVSPDALVTIAGGFRRGKPMGHDVDLLITIPGRPTDDELLAKVVDLLKKQGLLLYGDIRERTFVEGQLPNPKPDALDNHQKCFAILKLYRPKVDNSAVGTSKKSDMAEVKDWKAVRVDLVVAPDEQFAYALLGWTGSGMFRRDTRRYAEEERDMLLDNHGLYDLKKGIFLSADSEEEIFGHLDLDYLEPWERNA

SEQ ID NO: 5501 - DNA, 1182 bp, synthetic construct
  misc_feature 1..1182: note = Variant of terminal deoxynucleotidyl transferase
  source 1..1182: mol_type = other DNA
atgcatcaccaccatcatcatgggggttctggtcatccggaaggtaataccccggagaaggaggtgccgagcgttatcgcccgtcatgttagtccgtacgcgtgccagcgcaagaccacgctgaataactacaacaaaaagatcaccgacgcgctggagatcatggccgagaactacaagtttaaagagaacctgcaggcgtgcctggaggcccgtcgcgccgcgagtgtcctgaaaagcctgccgttcgaggttaccagcatgaaagacatccaaggtctgccgtgcattaccgacgacgtacgtcctgtgatcgaagagatcatcgaagtaggcgagagcagccgtgttaaagaaatcctcaatgacgagcgctacaaggcctttaagcagttcaccagcgtgttcggtgtgggcgtcaagacctcggaaaagtggtaccgtatgggcctccgtacgcgcgaagaagcaaaggccagtaagagtctgaagctgaacaagatgcagaaggcgggcttcctgtattacgaggatctggcgagcggtgttagtaaagaagaagccgatgccgttctggatatcgtgaaggaaacggtgcgcactgttagtccggatgcgctggtgaccgctgccggcggtttccgccgtggcaaacctatgggccacgacgttgacctgctgatcacgattccgggccgtcctacggatgacgagctgctccacaaagtggttgatctgctcaagaagcaaggtctgctgctgtacggggacatccgtgagcgtacgttcgtggaggggcaactgccaaatcctaaacctgacgccctggacaaccatcagaagtgcttcgccattctcaagctgtaccgtccgaaggtggataacagtgcggttgggacgagtaagaaaagtgacatggctgaggttaaggattggaaagcggttcgtgtggatctggtggtcgctccagatgagcagttcgcctatgcgctgctcggttggacgggcagcggcatgtttcgtcgcgatactcgtcgctacgcggaggaagagcgcgacatgctgctcgacaaccatggtctctacgacctgaaaaagggcatctttctgagtgcggacagcgaagaagagattttcggtcatctggacctggattatctggagccgtgggaacgcaacgcg

SEQ ID NO: 5502 - protein, 394 aa, synthetic construct
  REGION 1..394: note = Variant of terminal deoxynucleotidyl transferase
MHHHHHHGGSGHPEGNTPEKEVPSVIARHVSPYACQRKTTLNNYNKKITDALEIMAENYKFKENLQACLEARRAASVLKSLPFEVTSMKDIQGLPCITDDVRPVIEEIIEVGESSRVKEILNDERYKAFKQFTSVFGVGVKTSEKWYRMGLRTREEAKASKSLKLNKMQKAGFLYYEDLASGVSKEEADAVLDIVKETVRTVSPDALVTAAGGFRRGKPMGHDVDLLITIPGRPTDDELLHKVVDLLKKQGLLLYGDIRERTFVEGQLPNPKPDALDNHQKCFAILKLYRPKVDNSAVGTSKKSDMAEVKDWKAVRVDLVVAPDEQFAYALLGWTGSGMFRRDTRRYAEEERDMLLDNHGLYDLKKGIFLSADSEEEIFGHLDLDYLEPWERNA

SEQ ID NO: 5503 - DNA, 1182 bp, synthetic construct
  misc_feature 1..1182: note = Variant of terminal deoxynucleotidyl transferase
  source 1..1182: mol_type = other DNA
atgcatcaccaccatcatcatgggggttctggtcatccggaaggtaataccccggagaaggaggtgccgagcgttatcgcccgtcatgttagtccgtacgcgtgccagcgcaagaccacgctgaataactacaacaaaaagatcaccgacgcgctggagatcatggccgagaactacaagtttaaagagaacctgcaggcgtgcctggaggcccgtcgcgccgcgagtgtcctgaaaagcctgccgttcgaggttaccagcatgaaagacatccaaggtctgccgtgcattaccgacgacgtacgtcctgtgatcgaagagatcatcgaagtaggcgagagcagccgtgttaaagaaatcctcaatgacgagcgctacaaggcctttaagcagttcaccagcgtgttcggtgtgggcgtcaagacctcggaaaagtggtaccgtatgggcctccgtacgcgcgaagaagcaaaggccagtaagagtctgaagctgaacaagatgcagaaggcgggcttcctgtattacgaggatctggcgagcggtgttagtaaagaagaagccttggccgttctggatatcgtgaaggaaacggtgcgcactgttagtccggatgcgctggtgaccatcgccggcggtttccgccgtggcaaacctatgggccacgacgttgacctgctgatcacgattccgggccgtcctacggatgacgagctgctccacaaagtggttgatctgctcaagaagcaaggtctgctgctgtacggggacatccgtgagcgtacgttcgtggaggggcaactgccaaatcctaaacctgacgccctggacaaccatcagaagtgcttcgccattctcaagctgtaccgtccgaaggtggataacagtgcggttgggacgagtaagaaaagtgacatggctgaggttaaggattggaaagcggttcgtgtggatctggtggtcgctccagatgagcagttcgcctatgcgctgctcggttggacgggcagcggcatgtttcgtcgcgatactcgtcgctacgcggaggaagagcgcgacatgctgctcgacaaccatggtctctacgacctgaaaaagggcatctttctgagtgcggacagcgaagaagagattttcggtcatctggacctggattatctggagccgtgggaacgcaacgcg

SEQ ID NO: 5504 - protein, 394 aa, synthetic construct
  REGION 1..394: note = Variant of terminal deoxynucleotidyl transferase
MHHHHHHGGSGHPEGNTPEKEVPSVIARHVSPYACQRKTTLNNYNKKITDALEIMAENYKFKENLQACLEARRAASVLKSLPFEVTSMKDIQGLPCITDDVRPVIEEIIEVGESSRVKEILNDERYKAFKQFTSVFGVGVKTSEKWYRMGLRTREEAKASKSLKLNKMQKAGFLYYEDLASGVSKEEALAVLDIVKETVRTVSPDALVTIAGGFRRGKPMGHDVDLLITIPGRPTDDELLHKVVDLLKKQGLLLYGDIRERTFVEGQLPNPKPDALDNHQKCFAILKLYRPKVDNSAVGTSKKSDMAEVKDWKAVRVDLVVAPDEQFAYALLGWTGSGMFRRDTRRYAEEERDMLLDNHGLYDLKKGIFLSADSEEEIFGHLDLDYLEPWERNA

SEQ ID NO: 5505 - DNA, 1182 bp, synthetic construct
  misc_feature 1..1182: note = Variant of terminal deoxynucleotidyl transferase
  source 1..1182: mol_type = other DNA
atgcatcaccaccatcatcatgggggttctggtcatccggaaggtaataccccggagaaggaggtgccgagcgttatcgcccgtcatgttagtccgtacgcgtgccagcgcaagaccacgctgaataactacaacaaaaagatcaccgacgcgctggagatcatggccgagaactacaagtttaaagagaacctgcaggcgtgcctggaggcccgtcgcgccgcgagtgtcctgaaaagcctgccgttcgaggttaccagcatgaaagacatccaaggtctgccgtgcattaccgacgacgtacgtcctgtgatcgaagagatcatcgaagtaggcgagagcagccgtgttaaagaaatcctcaatgacgagcgctacaaggcctttaagcagttcaccagcgtgttcggtgtgggcgtcaagacctcggaaaagtggtaccgtatgggcctccgtacgcgcgaagaagcaaaggccagtaagagtctgaagctgaacaagatgcagaaggcgggcttcctgtattacgaggatctggcgagcggtgttagtaaagaagaagccgatgccgttctggatatcgtgaaggaaacggtgcgcactgttagtccggatgcgctggtgaccatcgccggcggtttccgccgtggcaaacctatgggccacgacgttgacctgctgatcacgattccgggccgtcctacggatgacgagctgctccacaaagtggttgatctgctcaagaagcaaggtctgctgctgtacggggacatccgtgagcgtacgttcgtggaggggcaactgccaaatcctaaacctgacgccctggacaaccatcagaagtgcttcgccattctcaagctgtaccgtccgaaggtggataacagtgcggttgggacgagtaagaaaagtgacatggctgaggttaaggattggaaagcggttcgtgtggatctggtggtcgctccagatgagcagttcgcctatgcgctgctcggttggacgggcagcggcatgtttcgtcgcgatactcgtcgctacgcggaggaagagcgcgacatgctgctcgacaaccatggtctctacgacctgaaaaagggcatctttctgagtgcggacagcgaagaagagattttcggtttgctggacctggattatctggagccgtgggaacgcaacgcg

SEQ ID NO: 5506 - protein, 394 aa, synthetic construct
  REGION 1..394: note = Variant of terminal deoxynucleotidyl transferase
MHHHHHHGGSGHPEGNTPEKEVPSVIARHVSPYACQRKTTLNNYNKKITDALEIMAENYKFKENLQACLEARRAASVLKSLPFEVTSMKDIQGLPCITDDVRPVIEEIIEVGESSRVKEILNDERYKAFKQFTSVFGVGVKTSEKWYRMGLRTREEAKASKSLKLNKMQKAGFLYYEDLASGVSKEEADAVLDIVKETVRTVSPDALVTIAGGFRRGKPMGHDVDLLITIPGRPTDDELLHKVVDLLKKQGLLLYGDIRERTFVEGQLPNPKPDALDNHQKCFAILKLYRPKVDNSAVGTSKKSDMAEVKDWKAVRVDLVVAPDEQFAYALLGWTGSGMFRRDTRRYAEEERDMLLDNHGLYDLKKGIFLSADSEEEIFGLLDLDYLEPWERNA

SEQ ID NO: 5507 - DNA, 1182 bp, synthetic construct
  misc_feature 1..1182: note = Variant of terminal deoxynucleotidyl transferase
  source 1..1182: mol_type = other DNA
atgcatcaccaccatcatcatgggggttctggtcatccggaaggtaataccccggagaaggaggtgccgagcgttatcgcccgtcatgttagtccgtacgcgtgccagcgcaagaccacgctgaataactacaacaaaaagatcaccgacgcgctggagatcatggccgagaactacaagtttaaagagaacctgcaggcgtgcctggaggcccgtcgcgccgcgagtgtcctgaaaagcctgccgttcgaggttaccagcatgaaagacatccaaggtctgccgtgcattaccgacgacgtacgtcctgtgatcgaagagatcatcgaagtaggcgagagcagccgtgttaaagaaatcctcaatgacgagcgctacaaggcctttaagcagttcaccagcgtgttcggtgtgggcgtcaagacctcggaaaagtggtaccgtatgggcctccgtacgcgcgaagaagcaaaggccagtaagagtctgaagctgaacaagatgcagaaggcgggcttcctgtattacgaggatctggcgagcggtgttagtaaagaagaagccgatgccgttctggattgggtgaaggaaacggtgcgcactgttagtccggatgcgctggtgaccatcgccggcggtttccgccgtggcaaacctatgggccacgacgttgacctgctgatcacgattccgggccgtcctacggatgacgagctgctccacaaagtggttgatctgctcaagaagcaaggtctgctgctgtacggggacatccgtgagcgtacgttcgtggaggggcaactgccaaatcctaaacctgacgccctggacaaccatcagaagtgcttcgccattctcaagctgtaccgtccgaaggtggataacagtgcggttgggacgagtaagaaaagtgacatggctgaggttaaggattggaaagcggttcgtgtggatctggtggtcgctccagatgagcagttcgcctatgcgctgctcggttggacgggcagcggcatgtttcgtcgcgatactcgtcgctacgcggaggaagagcgcgacatgctgctcgacaaccatggtctctacgacctgaaaaagggcatctttctgagtgcggacagcgaagaagagattttcggtcatctggacctggattatctggagccgtgggaacgcaacgcg

SEQ ID NO: 5508 - protein, 394 aa, synthetic construct
  REGION 1..394: note = Variant of terminal deoxynucleotidyl transferase
MHHHHHHGGSGHPEGNTPEKEVPSVIARHVSPYACQRKTTLNNYNKKITDALEIMAENYKFKENLQACLEARRAASVLKSLPFEVTSMKDIQGLPCITDDVRPVIEEIIEVGESSRVKEILNDERYKAFKQFTSVFGVGVKTSEKWYRMGLRTREEAKASKSLKLNKMQKAGFLYYEDLASGVSKEEADAVLDWVKETVRTVSPDALVTIAGGFRRGKPMGHDVDLLITIPGRPTDDELLHKVVDLLKKQGLLLYGDIRERTFVEGQLPNPKPDALDNHQKCFAILKLYRPKVDNSAVGTSKKSDMAEVKDWKAVRVDLVVAPDEQFAYALLGWTGSGMFRRDTRRYAEEERDMLLDNHGLYDLKKGIFLSADSEEEIFGHLDLDYLEPWERNA

SEQ ID NO: 5509 - DNA, 1182 bp, synthetic construct
  misc_feature 1..1182: note = Variant of terminal deoxynucleotidyl transferase
  source 1..1182: mol_type = other DNA
atgcatcaccaccatcatcatgggggttctggtcatccggaaggtaataccccggagaaggaggtgccgagcgttatcgcccgtcatgttagtccgtacgcgtgccagcgcaagaccacgctgaataactacaacaaaaagatcaccgacgcgctggagatcatggccgagaactacaagtttaaagagaacctgcaggcgtgcctggaggcccgtcgcgccgcgagtgtcctgaaaagcctgccgttcgaggttaccagcatgaaagacatccaaggtctgccgtgcattaccgacgacgtacgtcctgtgatcgaagagatcatcgaagtaggcgagagcagccgtgttaaagaaatcctcaatgacgagcgctacaaggcctttaagcagttcaccagcgtgttcggtgtgggcgtcaagacctcggaaaagtggtaccgtatgggcctccgtacgcgcgaagaagcaaaggccagtaagagtctgaagctgaacaagatgcagaaggcgggcttcctgtattacgaggatctggcgagcggtgttagtaaagaagaagccgcggccgttctggatatcgtgaaggaaacggtgcgcactgttagtccggatgcgctggtgaccatcgccggcggtttccgccgtggcaaacctatgggccacgacgttgacctgctgatcacgattccgggccgtcctacggatgacgagctgctccacaaagtggttgatctgctcaagaagcaaggtctgctgctgtacggggacatccgtgagcgtacgttcgtggaggggcaactgccaaatcctaaacctgacgccctggacaaccatcagaagtgcttcgccattctcaagctgtaccgtccgaaggtggataacagtgcggttgggacgagtaagaaaagtgacatggctgaggttaaggattggaaagcggttcgtgtggatctggtggtcgctccagatgagcagttcgcctatgcgctgctcggttggacgggcagcggcatgtttcgtcgcgatactcgtcgctacgcggaggaagagcgcgacatgctgctcgacaaccatggtctctacgacctgaaaaagggcatctttctgagtgcggacagcgaagaagagattttcggtcatctggacctggattatctggagccgtgggaacgcaacgcg

SEQ ID NO: 5510 - protein, 394 aa, synthetic construct
  REGION 1..394: note = Variant of terminal deoxynucleotidyl transferase
MHHHHHHGGSGHPEGNTPEKEVPSVIARHVSPYACQRKTTLNNYNKKITDALEIMAENYKFKENLQACLEARRAASVLKSLPFEVTSMKDIQGLPCITDDVRPVIEEIIEVGESSRVKEILNDERYKAFKQFTSVFGVGVKTSEKWYRMGLRTREEAKASKSLKLNKMQKAGFLYYEDLASGVSKEEAAAVLDIVKETVRTVSPDALVTIAGGFRRGKPMGHDVDLLITIPGRPTDDELLHKVVDLLKKQGLLLYGDIRERTFVEGQLPNPKPDALDNHQKCFAILKLYRPKVDNSAVGTSKKSDMAEVKDWKAVRVDLVVAPDEQFAYALLGWTGSGMFRRDTRRYAEEERDMLLDNHGLYDLKKGIFLSADSEEEIFGHLDLDYLEPWERNA

SEQ ID NO: 5511 - DNA, 1182 bp, synthetic construct
  misc_feature 1..1182: note = Variant of terminal deoxynucleotidyl transferase
  source 1..1182: mol_type = other DNA
atgcatcaccaccatcatcatgggggttctggtcatccggaaggtaataccccggagaaggaggtgccgagcgttatcgcccgtcatgttagtccgtacgcgtgccagcgcaagaccacgctgaataactacaacaaaaagatcaccgacgcgctggagatcatggccgagaactacaagtttaaagagaacctgcaggcgtgcctggaggcccgtcgcgccgcgagtgtcctgaaaagcctgccgttcgaggttaccagcatgaaagacatccaaggtctgccgtgcattaccgacgacgtacgtcctgtgatcgaagagatcatcgaagtaggcgagagcagccgtgttaaagaaatcctcaatgacgagcgctacaaggcctttaagcagttcaccagcgtgttcggtgtgggcgtcaagacctcggaaaagtggtaccgtatgggcctccgtacgcgcgaagaagcaaaggccagtaagagtctgaagctgaacaagatgcagaaggcgggcttcctgtattacgaggatctggcgagcggtgttagtaaagaagaagccgatagtgttctggatatcgtgaaggaaacggtgcgcactgttagtccggatgcgctggtgaccatcgccggcggtttccgccgtggcaaacctatgggccacgacgttgacctgctgatcacgattccgggccgtcctacggatgacgagctgctccacaaagtggttgatctgctcaagaagcaaggtctgctgctgtacggggacatccgtgagcgtacgttcgtggaggggcaactgccaaatcctaaacctgacgccctggacaaccatcagaagtgcttcgccattctcaagctgtaccgtccgaaggtggataacagtgcggttgggacgagtaagaaaagtgacatggctgaggttaaggattggaaagcggttcgtgtggatctggtggtcgctccagatgagcagttcgcctatgcgctgctcggttggacgggcagcggcatgtttcgtcgcgatactcgtcgctacgcggaggaagagcgcgacatgctgctcgacaaccatggtctctacgacctgaaaaagggcatctttctgagtgcggacagcgaagaagagattttcggtcatctggacctggattatctggagccgtgggaacgcaacgcg

SEQ ID NO: 5512 - protein, 394 aa, synthetic construct
  REGION 1..394: note = Variant of terminal deoxynucleotidyl transferase
MHHHHHHGGSGHPEGNTPEKEVPSVIARHVSPYACQRKTTLNNYNKKITDALEIMAENYKFKENLQACLEARRAASVLKSLPFEVTSMKDIQGLPCITDDVRPVIEEIIEVGESSRVKEILNDERYKAFKQFTSVFGVGVKTSEKWYRMGLRTREEAKASKSLKLNKMQKAGFLYYEDLASGVSKEEADSVLDIVKETVRTVSPDALVTIAGGFRRGKPMGHDVDLLITIPGRPTDDELLHKVVDLLKKQGLLLYGDIRERTFVEGQLPNPKPDALDNHQKCFAILKLYRPKVDNSAVGTSKKSDMAEVKDWKAVRVDLVVAPDEQFAYALLGWTGSGMFRRDTRRYAEEERDMLLDNHGLYDLKKGIFLSADSEEEIFGHLDLDYLEPWERNA

SEQ ID NO: 5513 - DNA, 1182 bp, synthetic construct
  misc_feature 1..1182: note = Variant of terminal deoxynucleotidyl transferase
  source 1..1182: mol_type = other DNA
atgcatcaccaccatcatcatgggggttctggtcatccggaaggtaataccccggagaaggaggtgccgagcgttatcgcccgtcatgttagtccgtacgcgtgccagcgcaagaccacgctgaataactacaacaaaaagatcaccgacgcgctggagatcatggccgagaactacaagtttaaagagaacctgcaggcgtgcctggaggcccgtcgcgccgcgagtgtcctgaaaagcctgccgttcgaggttaccagcatgaaagacatccaaggtctgccgtgcattaccgacgacgtacgtcctgtgatcgaagagatcatcgaagtaggcgagagcagccgtgttaaagaaatcctcaatgacgagcgctacaaggcctttaagcagttcaccagcgtgttcggtgtgggcgtcaagacctcggaaaagtggtaccgtatgggcctccgtacgcgcgaagaagcaaaggccagtaagagtctgaagctgaacaagatgcagaaggcgggcttcctgtattacgaggatctggcgagcggtgttagtaaagaagaagccgatgccgttctggatcgtgtgaaggaaacggtgcgcactgttagtccggatgcgctggtgaccatcgccggcggtttccgccgtggcaaacctatgggccacgacgttgacctgctgatcacgattccgggccgtcctacggatgacgagctgctccacaaagtggttgatctgctcaagaagcaaggtctgctgctgtacggggacatccgtgagcgtacgttcgtggaggggcaactgccaaatcctaaacctgacgccctggacaaccatcagaagtgcttcgccattctcaagctgtaccgtccgaaggtggataacagtgcggttgggacgagtaagaaaagtgacatggctgaggttaaggattggaaagcggttcgtgtggatctggtggtcgctccagatgagcagttcgcctatgcgctgctcggttggacgggcagcggcatgtttcgtcgcgatactcgtcgctacgcggaggaagagcgcgacatgctgctcgacaaccatggtctctacgacctgaaaaagggcatctttctgagtgcggacagcgaagaagagattttcggtcatctggacctggattatctggagccgtgggaacgcaacgcg

SEQ ID NO: 5514 - protein, 394 aa, synthetic construct
  REGION 1..394: note = Variant of terminal deoxynucleotidyl transferase
MHHHHHHGGSGHPEGNTPEKEVPSVIARHVSPYACQRKTTLNNYNKKITDALEIMAENYKFKENLQACLEARRAASVLKSLPFEVTSMKDIQGLPCITDDVRPVIEEIIEVGESSRVKEILNDERYKAFKQFTSVFGVGVKTSEKWYRMGLRTREEAKASKSLKLNKMQKAGFLYYEDLASGVSKEEADAVLDRVKETVRTVSPDALVTIAGGFRRGKPMGHDVDLLITIPGRPTDDELLHKVVDLLKKQGLLLYGDIRERTFVEGQLPNPKPDALDNHQKCFAILKLYRPKVDNSAVGTSKKSDMAEVKDWKAVRVDLVVAPDEQFAYALLGWTGSGMFRRDTRRYAEEERDMLLDNHGLYDLKKGIFLSADSEEEIFGHLDLDYLEPWERNA

SEQ ID NO: 5515 - DNA, 1182 bp, synthetic construct
  misc_feature 1..1182: note = Variant of terminal deoxynucleotidyl transferase
  source 1..1182: mol_type = other DNA
atgcatcaccaccatcatcatgggggttctggtcatccggaaggtaataccccggagaaggaggtgccgagcgttatcgcccgtcatgttagtccgtacgcgtgccagcgcaagaccacgctgaataactacaacaaaaagatcaccgacgcgctggagatcatggccgagaactacaagtttaaagagaacctgcaggcgtgcctggaggcccgtcgcgccgcgagtgtcctgaaaagcctgccgttcgaggttaccagcatgaaagacatccaaggtctgccgtgcattaccgacgacgtacgtcctgtgatcgaagagatcatcgaagtaggcgagagcagccgtgttaaagaaatcctcaatgacgagcgctacaaggcctttaagcagttcaccagcgtgttcggtgtgggcgtcaagacctcggaaaagtggtaccgtatgggcctccgtacgcgcgaagaagcaaaggccagtaagagtctgaagctgaacaagatgcagaaggcgggcttcctgtattacgaggatctggcgagcggtgttagtaaagaagaagccgatgccgttctggatatcgtgaaggaaacggtgcgcactgttagtccggatgcgctggtgaccatcgccggcggtttccgccgtggcaaacctatgggccacgacgttgacctgctgatcacgattccgggccgtcctcatgatgacgagctgctccacaaagtggttgatctgctcaagaagcaaggtctgctgctgtacggggacatccgtgagcgtacgttcgtggaggggcaactgccaaatcctaaacctgacgccctggacaaccatcagaagtgcttcgccattctcaagctgtaccgtccgaaggtggataacagtgcggttgggacgagtaagaaaagtgacatggctgaggttaaggattggaaagcggttcgtgtggatctggtggtcgctccagatgagcagttcgcctatgcgctgctcggttggacgggcagcggcatgtttcgtcgcgatactcgtcgctacgcggaggaagagcgcgacatgctgctcgacaaccatggtctctacgacctgaaaaagggcatctttctgagtgcggacagcgaagaagagattttcggtcatctggacctggattatctggagccgtgggaacgcaacgcg

SEQ ID NO: 5516 - protein, 394 aa, synthetic construct
  REGION 1..394: note = Variant of terminal deoxynucleotidyl transferase
MHHHHHHGGSGHPEGNTPEKEVPSVIARHVSPYACQRKTTLNNYNKKITDALEIMAENYKFKENLQACLEARRAASVLKSLPFEVTSMKDIQGLPCITDDVRPVIEEIIEVGESSRVKEILNDERYKAFKQFTSVFGVGVKTSEKWYRMGLRTREEAKASKSLKLNKMQKAGFLYYEDLASGVSKEEADAVLDIVKETVRTVSPDALVTIAGGFRRGKPMGHDVDLLITIPGRPHDDELLHKVVDLLKKQGLLLYGDIRERTFVEGQLPNPKPDALDNHQKCFAILKLYRPKVDNSAVGTSKKSDMAEVKDWKAVRVDLVVAPDEQFAYALLGWTGSGMFRRDTRRYAEEERDMLLDNHGLYDLKKGIFLSADSEEEIFGHLDLDYLEPWERNA

SEQ ID NO: 5517 - DNA, 1182 bp, synthetic construct
  misc_feature 1..1182: note = Variant of terminal deoxynucleotidyl transferase
  source 1..1182: mol_type = other DNA
atgcatcaccaccatcatcatgggggttctggtcatccggaaggtaataccccggagaaggaggtgccgagcgttatcgcccgtcatgttagtccgtacgcgtgccagcgcaagaccacgctgaataactacaacaaaaagatcaccgacgcgctggagatcatggccgagaactacaagtttaaagagaacctgcaggcgtgcctggaggcccgtcgcgccgcgagtgtcctgaaaagcctgccgttcgaggttaccagcatgaaagacatccaaggtctgccgtgcattaccgacgacgtacgtcctgtgatcgaagagatcatcgaagtaggcgagagcagccgtgttaaagaaatcctcaatgacgagcgctacaaggcctttaagcagttcaccagcgtgttcggtgtgggcgtcaagacctcggaaaagtggtaccgtatgggcctccgtacgcgcgaagaagcaaaggccagtaagagtctgaagctgaacaagatgcagaaggcgggcttcctgtattacgaggatctggcgagcggtgttagtaaagaagaagccgatgccgttctggagatcgtgaaggaaacggtgcgcactgttagtccggatgcgctggtgaccatcgccggcggtttccgccgtggcaaacctatgggccacgacgttgacctgctgatcacgattccgggccgtcctacggatgacgagctgctccacaaagtggttgatctgctcaagaagcaaggtctgctgctgtacggggacatccgtgagcgtacgttcgtggaggggcaactgccaaatcctaaacctgacgccctggacaaccatcagaagtgcttcgccattctcaagctgtaccgtccgaaggtggataacagtgcggttgggacgagtaagaaaagtgacatggctgaggttaaggattggaaagcggttcgtgtggatctggtggtcgctccagatgagcagttcgcctatgcgctgctcggttggacgggcagcggcatgtttcgtcgcgatactcgtcgctacgcggaggaagagcgcgacatgctgctcgacaaccatggtctctacgacctgaaaaagggcatctttctgagtgcggacagcgaagaagagattttcggtcatctggacctggattatctggagccgtgggaacgcaacgcg

SEQ ID NO: 5518 - protein, 394 aa, synthetic construct
  REGION 1..394: note = Variant of terminal deoxynucleotidyl transferase
MHHHHHHGGSGHPEGNTPEKEVPSVIARHVSPYACQRKTTLNNYNKKITDALEIMAENYKFKENLQACLEARRAASVLKSLPFEVTSMKDIQGLPCITDDVRPVIEEIIEVGESSRVKEILNDERYKAFKQFTSVFGVGVKTSEKWYRMGLRTREEAKASKSLKLNKMQKAGFLYYEDLASGVSKEEADAVLEIVKETVRTVSPDALVTIAGGFRRGKPMGHDVDLLITIPGRPTDDELLHKVVDLLKKQGLLLYGDIRERTFVEGQLPNPKPDALDNHQKCFAILKLYRPKVDNSAVGTSKKSDMAEVKDWKAVRVDLVVAPDEQFAYALLGWTGSGMFRRDTRRYAEEERDMLLDNHGLYDLKKGIFLSADSEEEIFGHLDLDYLEPWERNA

SEQ ID NO: 5519 - DNA, 1182 bp, synthetic construct
  misc_feature 1..1182: note = Variant of terminal deoxynucleotidyl transferase
  source 1..1182: mol_type = other DNA
atgcatcaccaccatcatcatgggggttctggtcatccggaaggtaataccccggagaaggaggtgccgagcgttatcgcccgtcatgttagtccgtacgcgtgccagcgcaagaccacgctgaataactacaacaaaaagatcaccgacgcgctggagatcatggccgagaactacaagtttaaagagaacctgcaggcgtgcctggaggcccgtcgcgccgcgagtgtcctgaaaagcctgccgttcgaggttaccagcatgaaagacatccaaggtctgccgtgcattaccgacgacgtacgtcctgtgatcgaagagatcatcgaagtaggcgagagcagccgtgttaaagaaatcctcaatgacgagcgctacaaggcctttaagcagttcaccagcgtgttcggtgtgggcgtcaagacctcggaaaagtggtaccgtatgggcctccgtacgcgcgaagaagcaaaggccagtaagagtctgaagctgaacaagatgcagaaggcgggcttcctgtattacgaggatctggcgagcggtgttagtaaagaagaagccgatgccgttctggatatcgtgaaggaaacggtgcgcactgttagtccggatgcgctggtgaccatcgccggcggtttccgccgtggcaaacctatgggccacgacgttgacctgctgatcacgattccgggccgtcctacggatgacgagctgctctggaaagtggttgatctgctcaagaagcaaggtctgctgctgtacggggacatccgtgagcgtacgttcgtggaggggcaactgccaaatcctaaacctgacgccctggacaaccatcagaagtgcttcgccattctcaagctgtaccgtccgaaggtggataacagtgcggttgggacgagtaagaaaagtgacatggctgaggttaaggattggaaagcggttcgtgtggatctggtggtcgctccagatgagcagttcgcctatgcgctgctcggttggacgggcagcggcatgtttcgtcgcgatactcgtcgctacgcggaggaagagcgcgacatgctgctcgacaaccatggtctctacgacctgaaaaagggcatctttctgagtgcggacagcgaagaagagattttcggtcatctggacctggattatctggagccgtgggaacgcaacgcg

SEQ ID NO: 5520 - protein, 394 aa, synthetic construct
  REGION 1..394: note = Variant of terminal deoxynucleotidyl transferase
MHHHHHHGGSGHPEGNTPEKEVPSVIARHVSPYACQRKTTLNNYNKKITDALEIMAENYKFKENLQACLEARRAASVLKSLPFEVTSMKDIQGLPCITDDVRPVIEEIIEVGESSRVKEILNDERYKAFKQFTSVFGVGVKTSEKWYRMGLRTREEAKASKSLKLNKMQKAGFLYYEDLASGVSKEEADAVLDIVKETVRTVSPDALVTIAGGFRRGKPMGHDVDLLITIPGRPTDDELLWKVVDLLKKQGLLLYGDIRERTFVEGQLPNPKPDALDNHQKCFAILKLYRPKVDNSAVGTSKKSDMAEVKDWKAVRVDLVVAPDEQFAYALLGWTGSGMFRRDTRRYAEEERDMLLDNHGLYDLKKGIFLSADSEEEIFGHLDLDYLEPWERNA

SEQ ID NO: 5521 - DNA, 1182 bp, synthetic construct
  misc_feature 1..1182: note = Variant of terminal deoxynucleotidyl transferase
  source 1..1182: mol_type = other DNA
atgcatcaccaccatcatcatgggggttctggtcatccggaaggtaataccccggagaaggaggtgccgagcgttatcgcccgtcatgttagtccgtacgcgtgccagcgcaagaccacgctgaataactacaacaaaaagatcaccgacgcgctggagatcatggccgagaactacaagtttaaagagaacctgcaggcgtgcctggaggcccgtcgcgccgcgagtgtcctgaaaagcctgccgttcgaggttaccagcatgaaagacatccaaggtctgccgtgcattaccgacgacgtacgtcctgtgatcgaagagatcatcgaagtaggcgagagcagccgtgttaaagaaatcctcaatgacgagcgctacaaggcctttaagcagttcaccagcgtgttcggtgtgggcgtcaagacctcggaaaagtggtaccgtatgggcctccgtacgcgcgaagaagcaaaggccagtaagagtctgaagctgaacaagatgcagaaggcgggcttcctgtattacgaggatctggcgagcggtgttagtaaagaagaagccgatgccgttctggatatcgtgaaggaaacggtgcgcactgttagtccggatgcgctggtgaccatcgccggcggtttccgccgtggcaaacctatgggccacgacgttgacctgctgatcacgattccgggccgtcctacggatgacgagctgctccacaaagtggttgatctgctcaagaagcaaggtctgctgctgtacggggacatccgtgagcgtacgttcgtggaggggactctgccaaatcctaaacctgacgccctggacaaccatcagaagtgcttcgccattctcaagctgtaccgtccgaaggtggataacagtgcggttgggacgagtaagaaaagtgacatggctgaggttaaggattggaaagcggttcgtgtggatctggtggtcgctccagatgagcagttcgcctatgcgctgctcggttggacgggcagcggcatgtttcgtcgcgatactcgtcgctacgcggaggaagagcgcgacatgctgctcgacaaccatggtctctacgacctgaaaaagggcatctttctgagtgcggacagcgaagaagagattttcggtcatctggacctggattatctggagccgtgggaacgcaacgcg

SEQ ID NO: 5522 - protein, 394 aa, synthetic construct
  REGION 1..394: note = Variant of terminal deoxynucleotidyl transferase
MHHHHHHGGSGHPEGNTPEKEVPSVIARHVSPYACQRKTTLNNYNKKITDALEIMAENYKFKENLQACLEARRAASVLKSLPFEVTSMKDIQGLPCITDDVRPVIEEIIEVGESSRVKEILNDERYKAFKQFTSVFGVGVKTSEKWYRMGLRTREEAKASKSLKLNKMQKAGFLYYEDLASGVSKEEADAVLDIVKETVRTVSPDALVTIAGGFRRGKPMGHDVDLLITIPGRPTDDELLHKVVDLLKKQGLLLYGDIRERTFVEGTLPNPKPDALDNHQKCFAILKLYRPKVDNSAVGTSKKSDMAEVKDWKAVRVDLVVAPDEQFAYALLGWTGSGMFRRDTRRYAEEERDMLLDNHGLYDLKKGIFLSADSEEEIFGHLDLDYLEPWERNA

SEQ ID NO: 5523 - DNA, 1182 bp, synthetic construct
  misc_feature 1..1182: note = Variant of terminal deoxynucleotidyl transferase
  source 1..1182: mol_type = other DNA
atgcatcaccaccatcatcatgggggttctggtcatccggaaggtaataccccggagaaggaggtgccgagcgttatcgcccgtcatgttagtccgtacgcgtgccagcgcaagaccacgctgaataactacaacaaaaagatcaccgacgcgctggagatcatggccgagaactacaagtttaaagagaacctgcaggcgtgcctggaggcccgtcgcgccgcgagtgtcctgaaaagcctgccgttcgaggttaccagcatgaaagacatccaaggtctgccgtgcattaccgacgacgtacgtcctgtgatcgaagagatcatcgaagtaggcgagagcagccgtgttaaagaaatcctcaatgacgagcgctacaaggcctttaagcagttcaccagcgtgttcggtgtgggcgtcaagacctcggaaaagtggtaccgtatgggcctccgtacgcgcgaagaagcaaaggccagtaagagtctgaagctgaacaagatgcagaaggcgggcttcctgtattacgaggatctggcgagcggtgttagtaaagaagaagccgatgccgttctggatatcgtgaaggaaacggtgcgcactgttagtccggatgcgctggtgaccatcgccggcggtttccgccgtggcaaacctatgggccacgacgttgacctgctgatcacgattccgggccgtcctacggatgacgagctgctccacaaagtggttgatctgctcaagaagcaaggtctgctgctgtacggggacatccgtatgcgtacgttcgtggaggggcaactgccaaatcctaaacctgacgccctggacaaccatcagaagtgcttcgccattctcaagctgtaccgtccgaaggtggataacagtgcggttgggacgagtaagaaaagtgacatggctgaggttaaggattggaaagcggttcgtgtggatctggtggtcgctccagatgagcagttcgcctatgcgctgctcggttggacgggcagcggcatgtttcgtcgcgatactcgtcgctacgcggaggaagagcgcgacatgctgctcgacaaccatggtctctacgacctgaaaaagggcatctttctgagtgcggacagcgaagaagagattttcggtcatctggacctggattatctggagccgtgggaacgcaacgcg

SEQ ID NO: 5524 - protein, 394 aa, synthetic construct
  REGION 1..394: note = Variant of terminal deoxynucleotidyl transferase
MHHHHHHGGSGHPEGNTPEKEVPSVIARHVSPYACQRKTTLNNYNKKITDALEIMAENYKFKENLQACLEARRAASVLKSLPFEVTSMKDIQGLPCITDDVRPVIEEIIEVGESSRVKEILNDERYKAFKQFTSVFGVGVKTSEKWYRMGLRTREEAKASKSLKLNKMQKAGFLYYEDLASGVSKEEADAVLDIVKETVRTVSPDALVTIAGGFRRGKPMGHDVDLLITIPGRPTDDELLHKVVDLLKKQGLLLYGDIRMRTFVEGQLPNPKPDALDNHQKCFAILKLYRPKVDNSAVGTSKKSDMAEVKDWKAVRVDLVVAPDEQFAYALLGWTGSGMFRRDTRRYAEEERDMLLDNHGLYDLKKGIFLSADSEEEIFGHLDLDYLEPWERNA

SEQ ID NO: 5525 - DNA, 1182 bp, synthetic construct
  misc_feature 1..1182: note = Variant of terminal deoxynucleotidyl transferase
  source 1..1182: mol_type = other DNA
atgcatcaccaccatcatcatgggggttctggtcatccggaaggtaataccccggagaaggaggtgccgagcgttatcgcccgtcatgttagtccgtacgcgtgccagcgcaagaccacgctgaataactacaacaaaaagatcaccgacgcgctggagatcatggccgagaactacaagtttaaagagaacctgcaggcgtgcctggaggcccgtcgcgccgcgagtgtcctgaaaagcctgccgttcgaggttaccagcatgaaagacatccaaggtctgccgtgcattaccgacgacgtacgtcctgtgatcgaagagatcatcgaagtaggcgagagcagccgtgttaaagaaatcctcaatgacgagcgctacaaggcctttaagcagttcaccagcgtgttcggtgtgggcgtcaagacctcggaaaagtggtaccgtatgggcctccgtacgcgcgaagaagcaaaggccagtaagagtctgaagctgaacaagatgcagaaggcgggcttcctgtattacgaggatctggcgagcggtgttagtaaagaagaagccgatgccgttctggatatcgtgaaggaaacggtgatgactgttagtccggatgcgctggtgaccatcgccggcggtttccgccgtggcaaacctatgggccacgacgttgacctgctgatcacgattccgggccgtcctacggatgacgagctgctccacaaagtggttgatctgctcaagaagcaaggtctgctgctgtacggggacatccgtgagcgtacgttcgtggaggggcaactgccaaatcctaaacctgacgccctggacaaccatcagaagtgcttcgccattctcaagctgtaccgtccgaaggtggataacagtgcggttgggacgagtaagaaaagtgacatggctgaggttaaggattggaaagcggttcgtgtggatctggtggtcgctccagatgagcagttcgcctatgcgctgctcggttggacgggcagcggcatgtttcgtcgcgatactcgtcgctacgcggaggaagagcgcgacatgctgctcgacaaccatggtctctacgacctgaaaaagggcatctttctgagtgcggacagcgaagaagagattttcggtcatctggacctggattatctggagccgtgggaacgcaacgcg

SEQ ID NO: 5526 - protein, 394 aa, synthetic construct
  REGION 1..394: note = Variant of terminal deoxynucleotidyl transferase
MHHHHHHGGSGHPEGNTPEKEVPSVIARHVSPYACQRKTTLNNYNKKITDALEIMAENYKFKENLQACLEARRAASVLKSLPFEVTSMKDIQGLPCITDDVRPVIEEIIEVGESSRVKEILNDERYKAFKQFTSVFGVGVKTSEKWYRMGLRTREEAKASKSLKLNKMQKAGFLYYEDLASGVSKEEADAVLDIVKETVMTVSPDALVTIAGGFRRGKPMGHDVDLLITIPGRPTDDELLHKVVDLLKKQGLLLYGDIRERTFVEGQLPNPKPDALDNHQKCFAILKLYRPKVDNSAVGTSKKSDMAEVKDWKAVRVDLVVAPDEQFAYALLGWTGSGMFRRDTRRYAEEERDMLLDNHGLYDLKKGIFLSADSEEEIFGHLDLDYLEPWERNA

SEQ ID NO: 5527 - DNA, 1182 bp, synthetic construct
  misc_feature 1..1182: note = Variant of terminal deoxynucleotidyl transferase
  source 1..1182: mol_type = other DNA
atgcatcaccaccatcatcatgggggttctggtcatccggaaggtaataccccggagaaggaggtgccgagcgttatcgcccgtcatgttagtccgtacgcgtgccagcgcaagaccacgctgaataactacaacaaaaagatcaccgacgcgctggagatcatggccgagaactacaagtttaaagagaacctgcaggcgtgcctggaggcccgtcgcgccgcgagtgtcctgaaaagcctgccgttcgaggttaccagcatgaaagacatccaaggtctgccgtgcattaccgacgacgtacgtcctgtgatcgaagagatcatcgaagtaggcgagagcagccgtgttaaagaaatcctcaatgacgagcgctacaaggcctttaagcagttcaccagcgtgttcggtgtgggcgtcaagacctcggaaaagtggtaccgtatgggcctccgtacgcgcgaagaagcaaaggccagtaagagtctgaagctgaacaagatgcagaaggcgggcttcctgtattacgaggatctggcgagcggtgttagtaaagaagaagccgatattgttctggatatcgtgaaggaaacggtgcgcactgttagtccggatgcgctggtgaccatcgccggcggtttccgccgtggcaaacctatgggccacgacgttgacctgctgatcacgattccgggccgtcctacggatgacgagctgctccacaaagtggttgatctgctcaagaagcaaggtctgctgctgtacggggacatccgtgagcgtacgttcgtggaggggcaactgccaaatcctaaacctgacgccctggacaaccatcagaagtgcttcgccattctcaagctgtaccgtccgaaggtggataacagtgcggttgggacgagtaagaaaagtgacatggctgaggttaaggattggaaagcggttcgtgtggatctggtggtcgctccagatgagcagttcgcctatgcgctgctcggttggacgggcagcggcatgtttcgtcgcgatactcgtcgctacgcggaggaagagcgcgacatgctgctcgacaaccatggtctctacgacctgaaaaagggcatctttctgagtgcggacagcgaagaagagattttcggtcatctggacctggattatctggagccgtgggaacgcaacgcg

SEQ ID NO: 5528 - protein, 394 aa, synthetic construct
  REGION 1..394: note = Variant of terminal deoxynucleotidyl transferase
MHHHHHHGGSGHPEGNTPEKEVPSVIARHVSPYACQRKTTLNNYNKKITDALEIMAENYKFKENLQACLEARRAASVLKSLPFEVTSMKDIQGLPCITDDVRPVIEEIIEVGESSRVKEILNDERYKAFKQFTSVFGVGVKTSEKWYRMGLRTREEAKASKSLKLNKMQKAGFLYYEDLASGVSKEEADIVLDIVKETVRTVSPDALVTIAGGFRRGKPMGHDVDLLITIPGRPTDDELLHKVVDLLKKQGLLLYGDIRERTFVEGQLPNPKPDALDNHQKCFAILKLYRPKVDNSAVGTSKKSDMAEVKDWKAVRVDLVVAPDEQFAYALLGWTGSGMFRRDTRRYAEEERDMLLDNHGLYDLKKGIFLSADSEEEIFGHLDLDYLEPWERNA

SEQ ID NO: 5529 - DNA, 1182 bp, synthetic construct
  misc_feature 1..1182: note = Variant of terminal deoxynucleotidyl transferase
  source 1..1182: mol_type = other DNA
atgcatcaccaccatcatcatgggggttctggtcatccggaaggtaataccccggagaaggaggtgccgagcgttatcgcccgtcatgttagtccgtacgcgtgccagcgcaagaccacgctgaataactacaacaaaaagatcaccgacgcgctggagatcatggccgagaactacaagtttaaagagaacctgcaggcgtgcctggaggcccgtcgcgccgcgagtgtcctgaaaagcctgccgttcgaggttaccagcatgaaagacatccaaggtctgccgtgcattaccgacgacgtacgtcctgtgatcgaagagatcatcgaagtaggcgagagcagccgtgttaaagaaatcctcaatgacgagcgctacaaggcctttaagcagttcaccagcgtgttcggtgtgggcgtcaagacctcggaaaagtggtaccgtatgggcctccgtacgcgcgaagaagcaaaggccagtaagagtctgaagctgaacaagatgcagaaggcgggcttcctgtattacgaggatctggcgagcggtgttagtaaagaagaagccgatgccgttctggatatcgtgaaggaaacggtgcgcactgttagtccggatgcgctggtgaccatcgccggcggtttccgccgtggcaaacctatgggccacgacgttgacctgctgatcacgattccgggccgtcctacggatgacgagctgctccacaaagtggttgatctggttaagaagcaaggtctgctgctgtacggggacatccgtgagcgtacgttcgtggaggggcaactgccaaatcctaaacctgacgccctggacaaccatcagaagtgcttcgccattctcaagctgtaccgtccgaaggtggataacagtgcggttgggacgagtaagaaaagtgacatggctgaggttaaggattggaaagcggttcgtgtggatctggtggtcgctccagatgagcagttcgcctatgcgctgctcggttggacgggcagcggcatgtttcgtcgcgatactcgtcgctacgcggaggaagagcgcgacatgctgctcgacaaccatggtctctacgacctgaaaaagggcatctttctgagtgcggacagcgaagaagagattttcggtcatctggacctggattatctggagccgtgggaacgcaacgcg

SEQ ID NO: 5530 - protein, 394 aa, synthetic construct
  REGION 1..394: note = Variant of terminal deoxynucleotidyl transferase
MHHHHHHGGSGHPEGNTPEKEVPSVIARHVSPYACQRKTTLNNYNKKITDALEIMAENYKFKENLQACLEARRAASVLKSLPFEVTSMKDIQGLPCITDDVRPVIEEIIEVGESSRVKEILNDERYKAFKQFTSVFGVGVKTSEKWYRMGLRTREEAKASKSLKLNKMQKAGFLYYEDLASGVSKEEADAVLDIVKETVRTVSPDALVTIAGGFRRGKPMGHDVDLLITIPGRPTDDELLHKVVDLVKKQGLLLYGDIRERTFVEGQLPNPKPDALDNHQKCFAILKLYRPKVDNSAVGTSKKSDMAEVKDWKAVRVDLVVAPDEQFAYALLGWTGSGMFRRDTRRYAEEERDMLLDNHGLYDLKKGIFLSADSEEEIFGHLDLDYLEPWERNA

SEQ ID NO: 5531 - DNA, 1182 bp, synthetic construct
  misc_feature 1..1182: note = Variant of terminal deoxynucleotidyl transferase
  source 1..1182: mol_type = other DNA
atgcatcaccaccatcatcatgggggttctggtcatccggaaggtaataccccggagaaggaggtgccgagcgttatcgcccgtcatgttagtccgtacgcgtgccagcgcaagaccacgctgaataactacaacaaaaagatcaccgacgcgctggagatcatggccgagaactacaagtttaaagagaacctgcaggcgtgcctggaggcccgtcgcgccgcgagtgtcctgaaaagcctgccgttcgaggttaccagcatgaaagacatccaaggtctgccgtgcattaccgacgacgtacgtcctgtgatcgaagagatcatcgaagtaggcgagagcagccgtgttaaagaaatcctcaatgacgagcgctacaaggcctttaagcagttcaccagcgtgttcggtgtgggcgtcaagacctcggaaaagtggtaccgtatgggcctccgtacgcgcgaagaagcaaaggccagtaagagtctgaagctgaacaagatgcagaaggcgggcttcctgtattacgaggatctggcgagcggtgttagtaaagaagaaatggatgccgttctggatatcgtgaaggaaacggtgcgcactgttagtccggatgcgctggtgaccatcgccggcggtttccgccgtggcaaacctatgggccacgacgttgacctgctgatcacgattccgggccgtcctacggatgacgagctgctccacaaagtggttgatctgctcaagaagcaaggtctgctgctgtacggggacatccgtgagcgtacgttcgtggaggggcaactgccaaatcctaaacctgacgccctggacaaccatcagaagtgcttcgccattctcaagctgtaccgtccgaaggtggataacagtgcggttgggacgagtaagaaaagtgacatggctgaggttaaggattggaaagcggttcgtgtggatctggtggtcgctccagatgagcagttcgcctatgcgctgctcggttggacgggcagcggcatgtttcgtcgcgatactcgtcgctacgcggaggaagagcgcgacatgctgctcgacaaccatggtctctacgacctgaaaaagggcatctttctgagtgcggacagcgaagaagagattttcggtcatctggacctggattatctggagccgtgggaacgcaacgcg

SEQ ID NO: 5532 - protein, 394 aa, synthetic construct
  REGION 1..394: note = Variant of terminal deoxynucleotidyl transferase
MHHHHHHGGSGHPEGNTPEKEVPSVIARHVSPYACQRKTTLNNYNKKITDALEIMAENYKFKENLQACLEARRAASVLKSLPFEVTSMKDIQGLPCITDDVRPVIEEIIEVGESSRVKEILNDERYKAFKQFTSVFGVGVKTSEKWYRMGLRTREEAKASKSLKLNKMQKAGFLYYEDLASGVSKEEMDAVLDIVKETVRTVSPDALVTIAGGFRRGKPMGHDVDLLITIPGRPTDDELLHKVVDLLKKQGLLLYGDIRERTFVEGQLPNPKPDALDNHQKCFAILKLYRPKVDNSAVGTSKKSDMAEVKDWKAVRVDLVVAPDEQFAYALLGWTGSGMFRRDTRRYAEEERDMLLDNHGLYDLKKGIFLSADSEEEIFGHLDLDYLEPWERNA

SEQ ID NO: 5533 - DNA, 1182 bp, synthetic construct
  misc_feature 1..1182: note = Variant of terminal deoxynucleotidyl transferase
  source 1..1182: mol_type = other DNA
atgcatcaccaccatcatcatgggggttctggtcatccggaaggtaataccccggagaaggaggtgccgagcgttatcgcccgtcatgttagtccgtacgcgtgccagcgcaagaccacgctgaataactacaacaaaaagatcaccgacgcgctggagatcatggccgagaactacaagtttaaagagaacctgcaggcgtgcctggaggcccgtcgcgccgcgagtgtcctgaaaagcctgccgttcgaggttaccagcatgaaagacatccaaggtctgccgtgcattaccgacgacgtacgtcctgtgatcgaagagatcatcgaagtaggcgagagcagccgtgttaaagaaatcctcaatgacgagcgctacaaggcctttaagcagttcaccagcgtgttcggtgtgggcgtcaagacctcggaaaagtggtaccgtatgggcctccgtacgcgcgaagaagcaaaggccagtaagagtctgaagctgaacaagatgcagaaggcgggcttcctgtattacgaggatctggcgagcggtgttagtaaagaagaagccgatgccgttctggatatcgtgaaggaaacggtgcgcactgttagtccggatgcgctggtgaccatcgccggcggtttccgccgtggcaaacctatgggccacgacgttgacctgctgatcacgattccgggccgtcctacggatgacgagctgctccacaaagtggttgatctgctcaagaagcaaggtctgctgctgtacggggactgtcgtgagcgtacgttcgtggaggggcaactgccaaatcctaaacctgacgccctggacaaccatcagaagtgcttcgccattctcaagctgtaccgtccgaaggtggataacagtgcggttgggacgagtaagaaaagtgacatggctgaggttaaggattggaaagcggttcgtgtggatctggtggtcgctccagatgagcagttcgcctatgcgctgctcggttggacgggcagcggcatgtttcgtcgcgatactcgtcgctacgcggaggaagagcgcgacatgctgctcgacaaccatggtctctacgacctgaaaaagggcatctttctgagtgcggacagcgaagaagagattttcggtcatctggacctggattatctggagccgtgggaacgcaacgcg

SEQ ID NO: 5534 - protein, 394 aa, synthetic construct
  REGION 1..394: note = Variant of terminal deoxynucleotidyl transferase
MHHHHHHGGSGHPEGNTPEKEVPSVIARHVSPYACQRKTTLNNYNKKITDALEIMAENYKFKENLQACLEARRAASVLKSLPFEVTSMKDIQGLPCITDDVRPVIEEIIEVGESSRVKEILNDERYKAFKQFTSVFGVGVKTSEKWYRMGLRTREEAKASKSLKLNKMQKAGFLYYEDLASGVSKEEADAVLDIVKETVRTVSPDALVTIAGGFRRGKPMGHDVDLLITIPGRPTDDELLHKVVDLLKKQGLLLYGDCRERTFVEGQLPNPKPDALDNHQKCFAILKLYRPKVDNSAVGTSKKSDMAEVKDWKAVRVDLVVAPDEQFAYALLGWTGSGMFRRDTRRYAEEERDMLLDNHGLYDLKKGIFLSADSEEEIFGHLDLDYLEPWERNA

SEQ ID NO: 5535 - DNA, 1182 bp, synthetic construct
  misc_feature 1..1182: note = Variant of terminal deoxynucleotidyl transferase
  source 1..1182: mol_type = other DNA
atgcatcaccaccatcatcatgggggttctggtcatccggaaggtaataccccggagaaggaggtgccgagcgttatcgcccgtcatgttagtccgtacgcgtgccagcgcaagaccacgctgaataactacaacaaaaagatcaccgacgcgctggagatcatggccgagaactacaagtttaaagagaacctgcaggcgtgcctggaggcccgtcgcgccgcgagtgtcctgaaaagcctgccgttcgaggttaccagcatgaaagacatccaaggtctgccgtgcattaccgacgacgtacgtcctgtgatcgaagagatcatcgaagtaggcgagagcagccgtgttaaagaaatcctcaatgacgagcgctacaaggcctttaagcagttcaccagcgtgttcggtgtgggcgtcaagacctcggaaaagtggtaccgtatgggcctccgtacgcgcgaagaagcaaaggcctttaagagtctgaagctgaacaagatgcagaaggcgggcttcctgtattacgaggatctggcgagcggtgttagtaaagaagaagccgatgccgttctggatatcgtgaaggaaacggtgcgcactgttagtccggatgcgctggtgaccatcgccggcggtttccgccgtggcaaacctatgggccacgacgttgacctgctgatcacgattccgggccgtcctacggatgacgagctgctccacaaagtggttgatctgctcaagaagcaaggtctgctgctgtacggggacatccgtgagcgtacgttcgtggaggggcaactgccaaatcctaaacctgacgccctggacaaccatcagaagtgcttcgccattctcaagctgtaccgtccgaaggtggataacagtgcggttgggacgagtaagaaaagtgacatggctgaggttaaggattggaaagcggttcgtgtggatctggtggtcgctccagatgagcagttcgcctatgcgctgctcggttggacgggcagcggcatgtttcgtcgcgatactcgtcgctacgcggaggaagagcgcgacatgctgctcgacaaccatggtctctacgacctgaaaaagggcatctttctgagtgcggacagcgaagaagagattttcggtcatctggacctggattatctggagccgtgggaacgcaacgcg

SEQ ID NO: 5536 - protein, 394 aa, synthetic construct
  REGION 1..394: note = Variant of terminal deoxynucleotidyl transferase
MHHHHHHGGSGHPEGNTPEKEVPSVIARHVSPYACQRKTTLNNYNKKITDALEIMAENYKFKENLQACLEARRAASVLKSLPFEVTSMKDIQGLPCITDDVRPVIEEIIEVGESSRVKEILNDERYKAFKQFTSVFGVGVKTSEKWYRMGLRTREEAKAFKSLKLNKMQKAGFLYYEDLASGVSKEEADAVLDIVKETVRTVSPDALVTIAGGFRRGKPMGHDVDLLITIPGRPTDDELLHKVVDLLKKQGLLLYGDIRERTFVEGQLPNPKPDALDNHQKCFAILKLYRPKVDNSAVGTSKKSDMAEVKDWKAVRVDLVVAPDEQFAYALLGWTGSGMFRRDTRRYAEEERDMLLDNHGLYDLKKGIFLSADSEEEIFGHLDLDYLEPWERNA

SEQ ID NO: 5537 - DNA, 1182 bp, synthetic construct
  misc_feature 1..1182: note = Variant of terminal deoxynucleotidyl transferase
  source 1..1182: mol_type = other DNA
atgcatcaccaccatcatcatgggggttctggtcatccggaaggtaataccccggagaaggaggtgccgagcgttatcgcccgtcatgttagtccgtacgcgtgccagcgcaagaccacgctgaataactacaacaaaaagatcaccgacgcgctggagatcatggccgagaactacaagtttaaagagaacctgcaggcgtgcctggaggcccgtcgcgccgcgagtgtcctgaaaagcctgccgttcgaggttaccagcatgaaagacatccaaggtctgccgtgcattaccgacgacgtacgtcctgtgatcgaagagatcatcgaagtaggcgagagcagccgtgttaaagaaatcctcaatgacgagcgctacaaggcctttaagcagttcaccagcgtgttcggtgtgggcgtcaagacctcggaaaagtggtaccgtatgggcctccgtacgcgcgaagaagcaaaggccagtaagagtctgaagctgaacaagatgcagaaggcgggcttcctgtattacgaggatctggcgagcggtgttagtaaagaagaagccgatgccgttctggatatcgtgaaggaaacggtgcgcactgttagtccggatgcgctggtgaccatcgccggcggtttccgccgtggcaaacctatgggccacgacgttgacctgctgatcacgattccgggccgtcctacggatgacgagctgctccacaaagtggttgatctgctcaagaagcaaggtctgctgctgtacggggacatccgtgagcgtacgttcgtggaggggcaactgccaaatcctaaacctgacgccctggacaaccatcagaagtgcttcgccattctcaagctgtaccgtccgaaggtggataacagtgcgagggggacgagtaagaaaagtgacatggctgaggttaaggattggaaagcggttcgtgtggatctggtggtcgctccagatgagcagttcgcctatgcgctgctcggttggacgggcagcggcatgtttcgtcgcgatactcgtcgctacgcggaggaagagcgcgacatgctgctcgacaaccatggtctctacgacctgaaaaagggcatctttctgagtgcggacagcgaagaagagattttcggtcatctggacctggattatctggagccgtgggaacgcaacgcg

SEQ ID NO: 5538 - protein, 394 aa, synthetic construct
  REGION 1..394: note = Variant of terminal deoxynucleotidyl transferase
MHHHHHHGGSGHPEGNTPEKEVPSVIARHVSPYACQRKTTLNNYNKKITDALEIMAENYKFKENLQACLEARRAASVLKSLPFEVTSMKDIQGLPCITDDVRPVIEEIIEVGESSRVKEILNDERYKAFKQFTSVFGVGVKTSEKWYRMGLRTREEAKASKSLKLNKMQKAGFLYYEDLASGVSKEEADAVLDIVKETVRTVSPDALVTIAGGFRRGKPMGHDVDLLITIPGRPTDDELLHKVVDLLKKQGLLLYGDIRERTFVEGQLPNPKPDALDNHQKCFAILKLYRPKVDNSARGTSKKSDMAEVKDWKAVRVDLVVAPDEQFAYALLGWTGSGMFRRDTRRYAEEERDMLLDNHGLYDLKKGIFLSADSEEEIFGHLDLDYLEPWERNA

SEQ ID NO: 5539 - DNA, 1182 bp, synthetic construct
  misc_feature 1..1182: note = Variant of terminal deoxynucleotidyl transferase
  source 1..1182: mol_type = other DNA
atgcatcaccaccatcatcatgggggttctggtcatccggaaggtaataccccggagaaggaggtgccgagcgttatcgcccgtcatgttagtccgtacgcgtgccagcgcaagaccacgctgaataactacaacaaaaagatcaccgacgcgctggagatcatggccgagaactacaagtttaaagagaacctgcaggcgtgcctggaggcccgtcgcgccgcgagtgtcctgaaaagcctgccgttcgaggttaccagcatgaaagacatccaaggtctgccgtgcattaccgacgacgtacgtcctgtgatcgaagagatcatcgaagtaggcgagagcagccgtgttaaagaaatcctcaatgacgagcgctacaaggcctttaagcagttcaccagcgtgttcggtgtgggcgtcaagacctcggaaaagtggtaccgtatgggcctccgtacgcgcgaagaagcaaaggccagtaagagtctgaagctgaacaagatgcagaaggcgggcttcctgtattacgaggatctggcgagcggtgttagtaaagaagaagccgatgccgttctggatatcgtgaaggaagtggtgcgcactgttagtccggatgcgctggtgaccatcgccggcggtttccgccgtggcaaacctatgggccacgacgttgacctgctgatcacgattccgggccgtcctacggatgacgagctgctccacaaagtggttgatctgctcaagaagcaaggtctgctgctgtacggggacatccgtgagcgtacgttcgtggaggggcaactgccaaatcctaaacctgacgccctggacaaccatcagaagtgcttcgccattctcaagctgtaccgtccgaaggtggataacagtgcggttgggacgagtaagaaaagtgacatggctgaggttaaggattggaaagcggttcgtgtggatctggtggtcgctccagatgagcagttcgcctatgcgctgctcggttggacgggcagcggcatgtttcgtcgcgatactcgtcgctacgcggaggaagagcgcgacatgctgctcgacaaccatggtctctacgacctgaaaaagggcatctttctgagtgcggacagcgaagaagagattttcggtcatctggacctggattatctggagccgtgggaacgcaacgcg

SEQ ID NO: 5540 - protein, 394 aa, synthetic construct
  REGION 1..394: note = Variant of terminal deoxynucleotidyl transferase
MHHHHHHGGSGHPEGNTPEKEVPSVIARHVSPYACQRKTTLNNYNKKITDALEIMAENYKFKENLQACLEARRAASVLKSLPFEVTSMKDIQGLPCITDDVRPVIEEIIEVGESSRVKEILNDERYKAFKQFTSVFGVGVKTSEKWYRMGLRTREEAKASKSLKLNKMQKAGFLYYEDLASGVSKEEADAVLDIVKEVVRTVSPDALVTIAGGFRRGKPMGHDVDLLITIPGRPTDDELLHKVVDLLKKQGLLLYGDIRERTFVEGQLPNPKPDALDNHQKCFAILKLYRPKVDNSAVGTSKKSDMAEVKDWKAVRVDLVVAPDEQFAYALLGWTGSGMFRRDTRRYAEEERDMLLDNHGLYDLKKGIFLSADSEEEIFGHLDLDYLEPWERNA

SEQ ID NO: 5541 - DNA, 1182 bp, synthetic construct
  misc_feature 1..1182: note = Variant of terminal deoxynucleotidyl transferase
  source 1..1182: mol_type = other DNA
atgcatcaccaccatcatcatgggggttctggtcatccggaaggtaataccccggagaaggaggtgccgagcgttatcgcccgtcatgttagtccgtacgcgtgccagcgcaagaccacgctgaataactacaacaaaaagatcaccgacgcgctggagatcatggccgagaactacaagtttaaagagaacctgcaggcgtgcctggaggcccgtcgcgccgcgagtgtcctgaaaagcctgccgttcgaggttaccagcatgaaagacatccaaggtctgccgtgcattaccgacgacgtacgtcctgtgatcgaagagatcatcgaagtaggcgagagcagccgtgttaaagaaatcctcaatgacgagcgctacaaggcctttaagcagttcaccagcgtgttcggtgtgggcgtcaagacctcggaaaagtggtaccgtatgggcctccgtacgcgcgaagaagcaaaggccagtaagagtctgaagctgaacaagatgcagaaggcgggcttcctgtattacgaggatctggcgagcggtgttagtaaagaagaagccgatgccgttctggatatcgtgaaggaaacggtgcgctatgttagtccggatgcgctggtgaccatcgccggcggtttccgccgtggcaaacctatgggccacgacgttgacctgctgatcacgattccgggccgtcctacggatgacgagctgctccacaaagtggttgatctgctcaagaagcaaggtctgctgctgtacggggacatccgtgagcgtacgttcgtggaggggcaactgccaaatcctaaacctgacgccctggacaaccatcagaagtgcttcgccattctcaagctgtaccgtccgaaggtggataacagtgcggttgggacgagtaagaaaagtgacatggctgaggttaaggattggaaagcggttcgtgtggatctggtggtcgctccagatgagcagttcgcctatgcgctgctcggttggacgggcagcggcatgtttcgtcgcgatactcgtcgctacgcggaggaagagcgcgacatgctgctcgacaaccatggtctctacgacctgaaaaagggcatctttctgagtgcggacagcgaagaagagattttcggtcatctggacctggattatctggagccgtgggaacgcaacgcg

SEQ ID NO: 5542 - protein, 394 aa, synthetic construct
  REGION 1..394: note = Variant of terminal deoxynucleotidyl transferase
MHHHHHHGGSGHPEGNTPEKEVPSVIARHVSPYACQRKTTLNNYNKKITDALEIMAENYKFKENLQACLEARRAASVLKSLPFEVTSMKDIQGLPCITDDVRPVIEEIIEVGESSRVKEILNDERYKAFKQFTSVFGVGVKTSEKWYRMGLRTREEAKASKSLKLNKMQKAGFLYYEDLASGVSKEEADAVLDIVKETVRYVSPDALVTIAGGFRRGKPMGHDVDLLITIPGRPTDDELLHKVVDLLKKQGLLLYGDIRERTFVEGQLPNPKPDALDNHQKCFAILKLYRPKVDNSAVGTSKKSDMAEVKDWKAVRVDLVVAPDEQFAYALLGWTGSGMFRRDTRRYAEEERDMLLDNHGLYDLKKGIFLSADSEEEIFGHLDLDYLEPWERNA

SEQ ID NO: 5543 - DNA, 1182 bp, synthetic construct
  misc_feature 1..1182: note = Variant of terminal deoxynucleotidyl transferase
  source 1..1182: mol_type = other DNA
atgcatcaccaccatcatcatgggggttctggtcatccggaaggtaataccccggagaaggaggtgccgagcgttatcgcccgtcatgttagtccgtacgcgtgccagcgcaagaccacgctgaataactacaacaaaaagatcaccgacgcgctggagatcatggccgagaactacaagtttaaagagaacctgcaggcgtgcctggaggcccgtcgcgccgcgagtgtcctgaaaagcctgccgttcgaggttaccagcatgaaagacatccaaggtctgccgtgcattaccgacgacgtacgtcctgtgatcgaagagatcatcgaagtaggcgagagcagccgtgttaaagaaatcctcaatgacgagcgctacaaggcctttaagcagttcaccagcgtgttcggtgtgggcgtcaagacctcggaaaagtggtaccgtatgggcctccgtacgcgcgaagaagcaaaggccagtaagagtctgaagctgaacaagatgcagaaggcgggcttcctgtattacgaggatctggcgagcggtgttagtaaagaagaagccgatgccgttctggatatcgtgaaggaaacggtgcgcactgttagtccggatgcgctggtgaccatcgccggcggtttccgccgtggcaaacctatgggccacgacgttgacctgctgatcacgattccgggccgtcctacggatgacgagctgctccacaaagtggttgatctgctcaagaagcaaggtctgctgctgtacggggacatccgtgagcgtacgttcgtggaggggcaactgccaaatcctaaacctgacgccctggacaaccatcagaagtgcttcgccattctcaagctgtaccgtccgaaggtggataacagtgcggttgggacgagtaagaaaagtgacatggctgaggttaaggattggaaagcggttcgtgtggatctggtggtcgctccagatgagcagttcgcctatgcgctgctcggttggacgggcagcggcatgtttcgtcgcgatactcgtcgctacgcggaggaagagcgcgacatgctgctcgacaaccatggtctctacgacctgaaaaagggcgggtttctgagtgcggacagcgaagaagagattttcggtcatctggacctggattatctggagccgtgggaacgcaacgcg

SEQ ID NO: 5544 - protein, 394 aa, synthetic construct
  REGION 1..394: note = Variant of terminal deoxynucleotidyl transferase
MHHHHHHGGSGHPEGNTPEKEVPSVIARHVSPYACQRKTTLNNYNKKITDALEIMAENYKFKENLQACLEARRAASVLKSLPFEVTSMKDIQGLPCITDDVRPVIEEIIEVGESSRVKEILNDERYKAFKQFTSVFGVGVKTSEKWYRMGLRTREEAKASKSLKLNKMQKAGFLYYEDLASGVSKEEADAVLDIVKETVRTVSPDALVTIAGGFRRGKPMGHDVDLLITIPGRPTDDELLHKVVDLLKKQGLLLYGDIRERTFVEGQLPNPKPDALDNHQKCFAILKLYRPKVDNSAVGTSKKSDMAEVKDWKAVRVDLVVAPDEQFAYALLGWTGSGMFRRDTRRYAEEERDMLLDNHGLYDLKKGGFLSADSEEEIFGHLDLDYLEPWERNA

SEQ ID NO: 5545 - DNA, 1182 bp, synthetic construct
  misc_feature 1..1182: note = Variant of terminal deoxynucleotidyl transferase
  source 1..1182: mol_type = other DNA
atgcatcaccaccatcatcatgggggttctggtcatccggaaggtaataccccggagaaggaggtgccgagcgttatcgcccgtcatgttagtccgtacgcgtgccagcgcaagaccacgctgaataactacaacaaaaagatcaccgacgcgctggagatcatggccgagaactacaagtttaaagagaacctgcaggcgtgcctggaggcccgtcgcgccgcgagtgtcctgaaaagcctgccgttcgaggttaccagcatgaaagacatccaaggtctgccgtgcattaccgacgacgtacgtcctgtgatcgaagagatcatcgaagtaggcgagagcagccgtgttaaagaaatcctcaatgacgagcgctacaaggcctttaagcagttcaccagcgtgttcggtgtgggcgtcaagacctcggaaaagtggtaccgtatgggcctccgtacgcgcgaagaagcaaaggccagtaagagtctgaagctgaacaagatgcagaaggcgggcttcctgtattacgaggatctggcgagcggtgttagtaaagaagaagccgatgccgttctggatatcgtgaaggaaacggtgcgcactgttagtccggatgcgctggtgaccatcgccggcggtttccgccgtggcaaacctatgggccacgacgttgacctgctgatcacgattccgggccgtgggacggatgacgagctgctccacaaagtggttgatctgctcaagaagcaaggtctgctgctgtacggggacatccgtgagcgtacgttcgtggaggggcaactgccaaatcctaaacctgacgccctggacaaccatcagaagtgcttcgccattctcaagctgtaccgtccgaaggtggataacagtgcggttgggacgagtaagaaaagtgacatggctgaggttaaggattggaaagcggttcgtgtggatctggtggtcgctccagatgagcagttcgcctatgcgctgctcggttggacgggcagcggcatgtttcgtcgcgatactcgtcgctacgcggaggaagagcgcgacatgctgctcgacaaccatggtctctacgacctgaaaaagggcatctttctgagtgcggacagcgaagaagagattttcggtcatctggacctggattatctggagccgtgggaacgcaacgcg

SEQ ID NO: 5546 - protein, 394 aa, synthetic construct
  REGION 1..394: note = Variant of terminal deoxynucleotidyl transferase
MHHHHHHGGSGHPEGNTPEKEVPSVIARHVSPYACQRKTTLNNYNKKITDALEIMAENYKFKENLQACLEARRAASVLKSLPFEVTSMKDIQGLPCITDDVRPVIEEIIEVGESSRVKEILNDERYKAFKQFTSVFGVGVKTSEKWYRMGLRTREEAKASKSLKLNKMQKAGFLYYEDLASGVSKEEADAVLDIVKETVRTVSPDALVTIAGGFRRGKPMGHDVDLLITIPGRGTDDELLHKVVDLLKKQGLLLYGDIRERTFVEGQLPNPKPDALDNHQKCFAILKLYRPKVDNSAVGTSKKSDMAEVKDWKAVRVDLVVAPDEQFAYALLGWTGSGMFRRDTRRYAEEERDMLLDNHGLYDLKKGIFLSADSEEEIFGHLDLDYLEPWERNA

SEQ ID NO: 5547 - DNA, 1182 bp, synthetic construct
  misc_feature 1..1182: note = Variant of terminal deoxynucleotidyl transferase
  source 1..1182: mol_type = other DNA
atgcatcaccaccatcatcatgggggttctggtcatccggaaggtaataccccggagaaggaggtgccgagcgttatcgcccgtcatgttagtccgtacgcgtgccagcgcaagaccacgctgaataactacaacaaaaagatcaccgacgcgctggagatcatggccgagaactacaagtttaaagagaacctgcaggcgtgcctggaggcccgtcgcgccgcgagtgtcctgaaaagcctgccgttcgaggttaccagcatgaaagacatccaaggtctgccgtgcattaccgacgacgtacgtcctgtgatcgaagagatcatcgaagtaggcgagagcagccgtgttaaagaaatcctcaatgacgagcgctacaaggcctttaagcagttcaccagcgtgttcggtgtgggcgtcaagacctcggaaaagtggtaccgtatgggcctccgtacgcgcgaagaagcaaaggccagtaagagtctgaagctgaacaagatgcagaaggcgggcttcctgtattacgaggatctggcgagcggtgttagtaaagaagaagccgatgccgttctggatatcgtgaaggaaacggtgcgcactgttagtccggatgcgctggtgaccatcgccggcggtttccgccgtggcaaacctatgggccacgacgttgacctgctgatcacgattccgggccgtcctacggatgacgagctgctccacaaagtggttgatctgctcaagaagcaaggtctgctgctgtacggggacatccgtgagcgtacgttcgtggaggggcaactgccaaatcctaaacctgacgccctggacaaccatcagaagtgcttcgccattctcaagctgtaccgtccgaaggtggataacagtgcgtttgggacgagtaagaaaagtgacatggctgaggttaaggattggaaagcggttcgtgtggatctggtggtcgctccagatgagcagttcgcctatgcgctgctcggttggacgggcagcggcatgtttcgtcgcgatactcgtcgctacgcggaggaagagcgcgacatgctgctcgacaaccatggtctctacgacctgaaaaagggcatctttctgagtgcggacagcgaagaagagattttcggtcatctggacctggattatctggagccgtgggaacgcaacgcg

SEQ ID NO: 5548 - protein, 394 aa, synthetic construct
  REGION 1..394: note = Variant of terminal deoxynucleotidyl transferase
MHHHHHHGGSGHPEGNTPEKEVPSVIARHVSPYACQRKTTLNNYNKKITDALEIMAENYKFKENLQACLEARRAASVLKSLPFEVTSMKDIQGLPCITDDVRPVIEEIIEVGESSRVKEILNDERYKAFKQFTSVFGVGVKTSEKWYRMGLRTREEAKASKSLKLNKMQKAGFLYYEDLASGVSKEEADAVLDIVKETVRTVSPDALVTIAGGFRRGKPMGHDVDLLITIPGRPTDDELLHKVVDLLKKQGLLLYGDIRERTFVEGQLPNPKPDALDNHQKCFAILKLYRPKVDNSAFGTSKKSDMAEVKDWKAVRVDLVVAPDEQFAYALLGWTGSGMFRRDTRRYAEEERDMLLDNHGLYDLKKGIFLSADSEEEIFGHLDLDYLEPWERNA

SEQ ID NO: 5549 - DNA, 1182 bp, synthetic construct
  misc_feature 1..1182: note = Variant of terminal deoxynucleotidyl transferase
  source 1..1182: mol_type = other DNA
atgcatcaccaccatcatcatgggggttctggtcatccggaaggtaataccccggagaaggaggtgccgagcgttatcgcccgtcatgttagtccgtacgcgtgccagcgcaagaccacgctgaataactacaacaaaaagatcaccgacgcgctggagatcatggccgagaactacaagtttaaagagaacctgcaggcgtgcctggaggcccgtcgcgccgcgagtgtcctgaaaagcctgccgttcgaggttaccagcatgaaagacatccaaggtctgccgtgcattaccgacgacgtacgtcctgtgatcgaagagatcatcgaagtaggcgagagcagccgtgttaaagaaatcctcaatgacgagcgctacaaggcctttaagcagttcaccagcgtgttcggtgtgggcgtcaagacctcggaaaagtggtaccgtatgggcctccgtacgcgcgaagaagcaaaggccagtaagagtctgaagctgaacaagatgcagaaggcgggcttcctgtattacgaggatctggcgagcggtgttagtaaagaagaagccgatgccgttctggatatcgtgaaggaaacggtgcgcactgttagtccggatgcgctggtgaccatcgccggcggtttccgccgtggcaaacctatgggccacgacgttgacctgctgatcacgattccgggccgtcctacgccggacgagctgctccacaaagtggttgatctgctcaagaagcaaggtctgctgctgtacggggacatccgtgagcgtacgttcgtggaggggcaactgccaaatcctaaacctgacgccctggacaaccatcagaagtgcttcgccattctcaagctgtaccgtccgaaggtggataacagtgcggttgggacgagtaagaaaagtgacatggctgaggttaaggattggaaagcggttcgtgtggatctggtggtcgctccagatgagcagttcgcctatgcgctgctcggttggacgggcagcggcatgtttcgtcgcgatactcgtcgctacgcggaggaagagcgcgacatgctgctcgacaaccatggtctctacgacctgaaaaagggcatctttctgagtgcggacagcgaagaagagattttcggtcatctggacctggattatctggagccgtgggaacgcaacgcg

SEQ ID NO: 5550 - protein, 394 aa, synthetic construct
  REGION 1..394: note = Variant of terminal deoxynucleotidyl transferase
MHHHHHHGGSGHPEGNTPEKEVPSVIARHVSPYACQRKTTLNNYNKKITDALEIMAENYKFKENLQACLEARRAASVLKSLPFEVTSMKDIQGLPCITDDVRPVIEEIIEVGESSRVKEILNDERYKAFKQFTSVFGVGVKTSEKWYRMGLRTREEAKASKSLKLNKMQKAGFLYYEDLASGVSKEEADAVLDIVKETVRTVSPDALVTIAGGFRRGKPMGHDVDLLITIPGRPTPDELLHKVVDLLKKQGLLLYGDIRERTFVEGQLPNPKPDALDNHQKCFAILKLYRPKVDNSAVGTSKKSDMAEVKDWKAVRVDLVVAPDEQFAYALLGWTGSGMFRRDTRRYAEEERDMLLDNHGLYDLKKGIFLSADSEEEIFGHLDLDYLEPWERNA

SEQ ID NO: 5551 - DNA, 1182 bp, synthetic construct
  misc_feature 1..1182: note = Variant of terminal deoxynucleotidyl transferase
  source 1..1182: mol_type = other DNA
atgcatcaccaccatcatcatgggggttctggtcatccggaaggtaataccccggagaaggaggtgccgagcgttatcgcccgtcatgttagtccgtacgcgtgccagcgcaagaccacgctgaataactacaacaaaaagatcaccgacgcgctggagatcatggccgagaactacaagtttaaagagaacctgcaggcgtgcctggaggcccgtcgcgccgcgagtgtcctgaaaagcctgccgttcgaggttaccagcatgaaagacatccaaggtctgccgtgcattaccgacgacgtacgtcctgtgatcgaagagatcatcgaagtaggcgagagcagccgtgttaaagaaatcctcaatgacgagcgctacaaggcctttaagcagttcaccagcgtgttcggtgtgggcgtcaagacctcggaaaagtggtaccgtatgggcctccgtacgcgcgaagaagcaaaggccagtaagagtctgaagctgaacaagatgcagaaggcgggcttcctgtattacgaggatctggcgagcggtgttagtaaagaagaagccgatgccgttctggatatcgtgaaggaaacggtgcgcactgttagtccggatgcgctggtgaccatcgccggcggtttccgccgtggcaaacctatgggccacgacgttgacctgctgatcacgattccgggccgtcctacggatgactggctgctccacaaagtggttgatctgctcaagaagcaaggtctgctgctgtacggggacatccgtgagcgtacgttcgtggaggggcaactgccaaatcctaaacctgacgccctggacaaccatcagaagtgcttcgccattctcaagctgtaccgtccgaaggtggataacagtgcggttgggacgagtaagaaaagtgacatggctgaggttaaggattggaaagcggttcgtgtggatctggtggtcgctccagatgagcagttcgcctatgcgctgctcggttggacgggcagcggcatgtttcgtcgcgatactcgtcgctacgcggaggaagagcgcgacatgctgctcgacaaccatggtctctacgacctgaaaaagggcatctttctgagtgcggacagcgaagaagagattttcggtcatctggacctggattatctggagccgtgggaacgcaacgcg

SEQ ID NO: 5552 - protein, 394 aa, synthetic construct
  REGION 1..394: note = Variant of terminal deoxynucleotidyl transferase
MHHHHHHGGSGHPEGNTPEKEVPSVIARHVSPYACQRKTTLNNYNKKITDALEIMAENYKFKENLQACLEARRAASVLKSLPFEVTSMKDIQGLPCITDDVRPVIEEIIEVGESSRVKEILNDERYKAFKQFTSVFGVGVKTSEKWYRMGLRTREEAKASKSLKLNKMQKAGFLYYEDLASGVSKEEADAVLDIVKETVRTVSPDALVTIAGGFRRGKPMGHDVDLLITIPGRPTDDWLLHKVVDLLKKQGLLLYGDIRERTFVEGQLPNPKPDALDNHQKCFAILKLYRPKVDNSAVGTSKKSDMAEVKDWKAVRVDLVVAPDEQFAYALLGWTGSGMFRRDTRRYAEEERDMLLDNHGLYDLKKGIFLSADSEEEIFGHLDLDYLEPWERNA

SEQ ID NO: 5553 - DNA, 1182 bp, synthetic construct
  misc_feature 1..1182: note = Variant of terminal deoxynucleotidyl transferase
  source 1..1182: mol_type = other DNA
atgcatcaccaccatcatcatgggggttctggtcatccggaaggtaataccccggagaaggaggtgccgagcgttatcgcccgtcatgttagtccgtacgcgtgccagcgcaagaccacgctgaataactacaacaaaaagatcaccgacgcgctggagatcatggccgagaactacaagtttaaagagaacctgcaggcgtgcctggaggcccgtcgcgccgcgagtgtcctgaaaagcctgccgttcgaggttaccagcatgaaagacatccaaggtctgccgtgcattaccgacgacgtacgtcctgtgatcgaagagatcatcgaagtaggcgagagcagccgtgttaaagaaatcctcaatgacgagcgctacaaggcctttaagcagttcaccagcgtgttcggtgtgggcgtcaagacctcggaaaagtggtaccgtatgggcctccgtacgcgcgaagaagcaaaggccagtaagagtctgaagctgaacaagatgcagaaggcgggcttcctgtattacgaggatctggcgagcggtgttagtaaagaagaagccgatgccgttctggatatcgtgaaggaaacggtgcgcactgttagtccggatgcgctggtgaccatcgccggcggtttccgccgtggcaaacctatgggccacgacgttgacctgctgatcacgattccgggccgtcctacggatgacgagctgctccacaaagtggttgatctgctcaagaagcaaggtctgctgctgtacggggacatccgtgagcgtacgttcgtggaggggcaactgccaaatcctaaacctgacgccctggacaaccatcagaagtgcttcgccattctcaagctgtaccgtccgaaggtggataacagtgcggttgggacgagtaagaaaagtgacatggctgaggttaaggattggaaagcggttcgtgtggatctggtggtcgctccagatgagcagttcgcctatgcgctgctcggttggacgggcagcggcatgtttcgtcgcgatactcgtcgctacgcggaggaagagcgcgacatgctgctcgacaaccatggtctctacgacctgaaaaagggcatctttctgagtgcggacagcgaagaagagattttcggtgttctggacctggattatctggagccgtgggaacgcaacgcg

SEQ ID NO: 5554 - protein, 394 aa, synthetic construct
  REGION 1..394: note = Variant of terminal deoxynucleotidyl transferase
MHHHHHHGGSGHPEGNTPEKEVPSVIARHVSPYACQRKTTLNNYNKKITDALEIMAENYKFKENLQACLEARRAASVLKSLPFEVTSMKDIQGLPCITDDVRPVIEEIIEVGESSRVKEILNDERYKAFKQFTSVFGVGVKTSEKWYRMGLRTREEAKASKSLKLNKMQKAGFLYYEDLASGVSKEEADAVLDIVKETVRTVSPDALVTIAGGFRRGKPMGHDVDLLITIPGRPTDDELLHKVVDLLKKQGLLLYGDIRERTFVEGQLPNPKPDALDNHQKCFAILKLYRPKVDNSAVGTSKKSDMAEVKDWKAVRVDLVVAPDEQFAYALLGWTGSGMFRRDTRRYAEEERDMLLDNHGLYDLKKGIFLSADSEEEIFGVLDLDYLEPWERNA

SEQ ID NO: 5555 - DNA, 1182 bp, synthetic construct
  misc_feature 1..1182: note = Variant of terminal deoxynucleotidyl transferase
  source 1..1182: mol_type = other DNA
atgcatcaccaccatcatcatgggggttctggtcatccggaaggtaataccccggagaaggaggtgccgagcgttatcgcccgtcatgttagtccgtacgcgtgccagcgcaagaccacgctgaataactacaacaaaaagatcaccgacgcgctggagatcatggccgagaactacaagtttaaagagaacctgcaggcgtgcctggaggcccgtcgcgccgcgagtgtcctgaaaagcctgccgttcgaggttaccagcatgaaagacatccaaggtctgccgtgcattaccgacgacgtacgtcctgtgatcgaagagatcatcgaagtaggcgagagcagccgtgttaaagaaatcctcaatgacgagcgctacaaggcctttaagcagttcaccagcgtgttcggtgtgggcgtcaagacctcggaaaagtggtaccgtatgggcctccgtacgcgcgaagaagcaaaggccagtaagagtctgaagctgaacaagatgcagaaggcgggcttcctgtattacgaggatctggcgagcggtgttagtaaagaagaagccgatgccgttctggatatcgtgaaggaaacggtgcgcactgttagtccggatgcgctggtgaccatcgccggcggtttccgccgtggcaaacctatgggccacgacgttgacctgctgatcacgattccgggccgtcctacggatgacgagctgctccacaaagtggttgatctgctcaagaagcaaggtctgctgctgtacggggacatccgtgagcgtacgttcgtggaggggcaactgccaaatcctaaacctgacgccctggacaaccatcagaagtgcttcgccattgtgaagctgtaccgtccgaaggtggataacagtgcggttgggacgagtaagaaaagtgacatggctgaggttaaggattggaaagcggttcgtgtggatctggtggtcgctccagatgagcagttcgcctatgcgctgctcggttggacgggcagcggcatgtttcgtcgcgatactcgtcgctacgcggaggaagagcgcgacatgctgctcgacaaccatggtctctacgacctgaaaaagggcatctttctgagtgcggacagcgaagaagagattttcggtcatctggacctggattatctggagccgtgggaacgcaacgcg

SEQ ID NO: 5556 - protein, 394 aa, synthetic construct
  REGION 1..394: note = Variant of terminal deoxynucleotidyl transferase
MHHHHHHGGSGHPEGNTPEKEVPSVIARHVSPYACQRKTTLNNYNKKITDALEIMAENYKFKENLQACLEARRAASVLKSLPFEVTSMKDIQGLPCITDDVRPVIEEIIEVGESSRVKEILNDERYKAFKQFTSVFGVGVKTSEKWYRMGLRTREEAKASKSLKLNKMQKAGFLYYEDLASGVSKEEADAVLDIVKETVRTVSPDALVTIAGGFRRGKPMGHDVDLLITIPGRPTDDELLHKVVDLLKKQGLLLYGDIRERTFVEGQLPNPKPDALDNHQKCFAIVKLYRPKVDNSAVGTSKKSDMAEVKDWKAVRVDLVVAPDEQFAYALLGWTGSGMFRRDTRRYAEEERDMLLDNHGLYDLKKGIFLSADSEEEIFGHLDLDYLEPWERNA

SEQ ID NO: 5557 - DNA, 1182 bp, synthetic construct
  misc_feature 1..1182: note = Variant of terminal deoxynucleotidyl transferase
  source 1..1182: mol_type = other DNA
atgcatcaccaccatcatcatgggggttctggtcatccggaaggtaataccccggagaaggaggtgccgagcgttatcgcccgtcatgttagtccgtacgcgtgccagcgcaagaccacgctgaataactacaacaaaaagatcaccgacgcgctggagatcatggccgagaactacaagtttaaagagaacctgcaggcgtgcctggaggcccgtcgcgccgcgagtgtcctgaaaagcctgccgttcgaggttaccagcatgaaagacatccaaggtctgccgtgcattaccgacgacgtacgtcctgtgatcgaagagatcatcgaagtaggcgagagcagccgtgttaaagaaatcctcaatgacgagcgctacaaggcctttaagcagttcaccagcgtgttcggtgtgggcgtcaagacctcggaaaagtggtaccgtatgggcctccgtacgcgcgaagaagcaaaggccagtaagagtctgaagctgaacaagatgcagaaggcgggcttcctgtattacgaggatctggcgagcggtgttagtaaagaagaagccgatgccgttctggatatcgtgaaggaaacggtgcgcactgttcgtccggatgcgctggtgaccatcgccggcggtttccgccgtggcaaacctatgggccacgacgttgacctgctgatcacgattccgggccgtcctacggatgacgagctgctccacaaagtggttgatctgctcaagaagcaaggtctgctgctgtacggggacatccgtgagcgtacgttcgtggaggggcaactgccaaatcctaaacctgacgccctggacaaccatcagaagtgcttcgccattctcaagctgtaccgtccgaaggtggataacagtgcggttgggacgagtaagaaaagtgacatggctgaggttaaggattggaaagcggttcgtgtggatctggtggtcgctccagatgagcagttcgcctatgcgctgctcggttggacgggcagcggcatgtttcgtcgcgatactcgtcgctacgcggaggaagagcgcgacatgctgctcgacaaccatggtctctacgacctgaaaaagggcatctttctgagtgcggacagcgaagaagagattttcggtcatctggacctggattatctggagccgtgggaacgcaacgcg

SEQ ID NO: 5558 - protein, 394 aa, synthetic construct
  REGION 1..394: note = Variant of terminal deoxynucleotidyl transferase
MHHHHHHGGSGHPEGNTPEKEVPSVIARHVSPYACQRKTTLNNYNKKITDALEIMAENYKFKENLQACLEARRAASVLKSLPFEVTSMKDIQGLPCITDDVRPVIEEIIEVGESSRVKEILNDERYKAFKQFTSVFGVGVKTSEKWYRMGLRTREEAKASKSLKLNKMQKAGFLYYEDLASGVSKEEADAVLDIVKETVRTVRPDALVTIAGGFRRGKPMGHDVDLLITIPGRPTDDELLHKVVDLLKKQGLLLYGDIRERTFVEGQLPNPKPDALDNHQKCFAILKLYRPKVDNSAVGTSKKSDMAEVKDWKAVRVDLVVAPDEQFAYALLGWTGSGMFRRDTRRYAEEERDMLLDNHGLYDLKKGIFLSADSEEEIFGHLDLDYLEPWERNA

SEQ ID NO: 5559 - DNA, 1182 bp, synthetic construct
  misc_feature 1..1182: note = Variant of terminal deoxynucleotidyl transferase
  source 1..1182: mol_type = other DNA
atgcatcaccaccatcatcatgggggttctggtcatccggaaggtaataccccggagaaggaggtgccgagcgttatcgcccgtcatgttagtccgtacgcgtgccagcgcaagaccacgctgaataactacaacaaaaagatcaccgacgcgctggagatcatggccgagaactacaagtttaaagagaacctgcaggcgtgcctggaggcccgtcgcgccgcgagtgtcctgaaaagcctgccgttcgaggttaccagcatgaaagacatccaaggtctgccgtgcattaccgacgacgtacgtcctgtgatcgaagagatcatcgaagtaggcgagagcagccgtgttaaagaaatcctcaatgacgagcgctacaaggcctttaagcagttcaccagcgtgttcggtgtgggcgtcaagacctcggaaaagtggtaccgtatgggcctccgtacgcgcgaagaagcaaaggccagtaagagtctgaagctgaacaagatgcagaaggcgggcttcctgtattacgaggatctggcgagcggtgttagtaaagaagaagccgatgccgttctggatacggtgaaggaaacggtgcgcactgttagtccggatgcgctggtgaccatcgccggcggtttccgccgtggcaaacctatgggccacgacgttgacctgctgatcacgattccgggccgtcctacggatgacgagctgctccacaaagtggttgatctgctcaagaagcaaggtctgctgctgtacggggacatccgtgagcgtacgttcgtggaggggcaactgccaaatcctaaacctgacgccctggacaaccatcagaagtgcttcgccattctcaagctgtaccgtccgaaggtggataacagtgcggttgggacgagtaagaaaagtgacatggctgaggttaaggattggaaagcggttcgtgtggatctggtggtcgctccagatgagcagttcgcctatgcgctgctcggttggacgggcagcggcatgtttcgtcgcgatactcgtcgctacgcggaggaagagcgcgacatgctgctcgacaaccatggtctctacgacctgaaaaagggcatctttctgagtgcggacagcgaagaagagattttcggtcatctggacctggattatctggagccgtgggaacgcaacgcg

SEQ ID NO: 5560 - protein, 394 aa, synthetic construct
  REGION 1..394: note = Variant of terminal deoxynucleotidyl transferase
MHHHHHHGGSGHPEGNTPEKEVPSVIARHVSPYACQRKTTLNNYNKKITDALEIMAENYKFKENLQACLEARRAASVLKSLPFEVTSMKDIQGLPCITDDVRPVIEEIIEVGESSRVKEILNDERYKAFKQFTSVFGVGVKTSEKWYRMGLRTREEAKASKSLKLNKMQKAGFLYYEDLASGVSKEEADAVLDTVKETVRTVSPDALVTIAGGFRRGKPMGHDVDLLITIPGRPTDDELLHKVVDLLKKQGLLLYGDIRERTFVEGQLPNPKPDALDNHQKCFAILKLYRPKVDNSAVGTSKKSDMAEVKDWKAVRVDLVVAPDEQFAYALLGWTGSGMFRRDTRRYAEEERDMLLDNHGLYDLKKGIFLSADSEEEIFGHLDLDYLEPWERNA

SEQ ID NO: 5561 - DNA, 1182 bp, synthetic construct
  misc_feature 1..1182: note = Variant of terminal deoxynucleotidyl transferase
  source 1..1182: mol_type = other DNA
atgcatcaccaccatcatcatgggggttctggtcatccggaaggtaataccccggagaaggaggtgccgagcgttatcgcccgtcatgttagtccgtacgcgtgccagcgcaagaccacgctgaataactacaacaaaaagatcaccgacgcgctggagatcatggccgagaactacaagtttaaagagaacctgcaggcgtgcctggaggcccgtcgcgccgcgagtgtcctgaaaagcctgccgttcgaggttaccagcatgaaagacatccaaggtctgccgtgcattaccgacgacgtacgtcctgtgatcgaagagatcatcgaagtaggcgagagcagccgtgttaaagaaatcctcaatgacgagcgctacaaggcctttaagcagttcaccagcgtgttcggtgtgggcgtcaagacctcggaaaagtggtaccgtatgggcctccgtacgcgcgaagaagcaaaggccagtaagagtctgaagctgaacaagatgcagaaggcgggcttcctgtattacgaggatctggcgagcggtgttagtaaagaagaagccgatgccgttctggatatcgtgaaggaaacggtgcgcactgttagtccggatgcgctggtgaccatcgccggcggtttccgccgtggcaaacctatgggccacgacgttgacctgctgatcacgattccgggccgtcctacggatgacgagctgctccacgttgtggttgatctgctcaagaagcaaggtctgctgctgtacggggacatccgtgagcgtacgttcgtggaggggcaactgccaaatcctaaacctgacgccctggacaaccatcagaagtgcttcgccattctcaagctgtaccgtccgaaggtggataacagtgcggttgggacgagtaagaaaagtgacatggctgaggttaaggattggaaagcggttcgtgtggatctggtggtcgctccagatgagcagttcgcctatgcgctgctcggttggacgggcagcggcatgtttcgtcgcgatactcgtcgctacgcggaggaagagcgcgacatgctgctcgacaaccatggtctctacgacctgaaaaagggcatctttctgagtgcggacagcgaagaagagattttcggtcatctggacctggattatctggagccgtgggaacgcaacgcg

SEQ ID NO: 5562 - protein, 394 aa, synthetic construct
  REGION 1..394: note = Variant of terminal deoxynucleotidyl transferase
MHHHHHHGGSGHPEGNTPEKEVPSVIARHVSPYACQRKTTLNNYNKKITDALEIMAENYKFKENLQACLEARRAASVLKSLPFEVTSMKDIQGLPCITDDVRPVIEEIIEVGESSRVKEILNDERYKAFKQFTSVFGVGVKTSEKWYRMGLRTREEAKASKSLKLNKMQKAGFLYYEDLASGVSKEEADAVLDIVKETVRTVSPDALVTIAGGFRRGKPMGHDVDLLITIPGRPTDDELLHVVVDLLKKQGLLLYGDIRERTFVEGQLPNPKPDALDNHQKCFAILKLYRPKVDNSAVGTSKKSDMAEVKDWKAVRVDLVVAPDEQFAYALLGWTGSGMFRRDTRRYAEEERDMLLDNHGLYDLKKGIFLSADSEEEIFGHLDLDYLEPWERNA

SEQ ID NO: 5563 - DNA, 1182 bp, synthetic construct
  misc_feature 1..1182: note = Variant of terminal deoxynucleotidyl transferase
  source 1..1182: mol_type = other DNA
atgcatcaccaccatcatcatgggggttctggtcatccggaaggtaataccccggagaaggaggtgccgagcgttatcgcccgtcatgttagtccgtacgcgtgccagcgcaagaccacgctgaataactacaacaaaaagatcaccgacgcgctggagatcatggccgagaactacaagtttaaagagaacctgcaggcgtgcctggaggcccgtcgcgccgcgagtgtcctgaaaagcctgccgttcgaggttaccagcatgaaagacatccaaggtctgccgtgcattaccgacgacgtacgtcctgtgatcgaagagatcatcgaagtaggcgagagcagccgtgttaaagaaatcctcaatgacgagcgctacaaggcctttaagcagttcaccagcgtgttcggtgtgggcgtcaagacctcggaaaagtggtaccgtatgggcctccgtacgcgcgaagaagcaaaggccagtaagagtctgaagctgaacaagatgcagaaggcgggcttcctgtattacgaggatctggcgagcggtgttagtaaagaagaagccgatgccgttctggatatcgtgaaggaaacggtgcgcactgttagtccggatgcgctggtgaccatcgccggcggtttccgccgtggcaaacctatgggccacgacgttgacctgctgatcacgattccgggccgtcctacggatgacgagctgctccacaaaagtgttgatctgctcaagaagcaaggtctgctgctgtacggggacatccgtgagcgtacgttcgtggaggggcaactgccaaatcctaaacctgacgccctggacaaccatcagaagtgcttcgccattctcaagctgtaccgtccgaaggtggataacagtgcggttgggacgagtaagaaaagtgacatggctgaggttaaggattggaaagcggttcgtgtggatctggtggtcgctccagatgagcagttcgcctatgcgctgctcggttggacgggcagcggcatgtttcgtcgcgatactcgtcgctacgcggaggaagagcgcgacatgctgctcgacaaccatggtctctacgacctgaaaaagggcatctttctgagtgcggacagcgaagaagagattttcggtcatctggacctggattatctggagccgtgggaacgcaacgcg

SEQ ID NO: 5564 - protein, 394 aa, synthetic construct
  REGION 1..394: note = Variant of terminal deoxynucleotidyl transferase
MHHHHHHGGSGHPEGNTPEKEVPSVIARHVSPYACQRKTTLNNYNKKITDALEIMAENYKFKENLQACLEARRAASVLKSLPFEVTSMKDIQGLPCITDDVRPVIEEIIEVGESSRVKEILNDERYKAFKQFTSVFGVGVKTSEKWYRMGLRTREEAKASKSLKLNKMQKAGFLYYEDLASGVSKEEADAVLDIVKETVRTVSPDALVTIAGGFRRGKPMGHDVDLLITIPGRPTDDELLHKSVDLLKKQGLLLYGDIRERTFVEGQLPNPKPDALDNHQKCFAILKLYRPKVDNSAVGTSKKSDMAEVKDWKAVRVDLVVAPDEQFAYALLGWTGSGMFRRDTRRYAEEERDMLLDNHGLYDLKKGIFLSADSEEEIFGHLDLDYLEPWERNA

SEQ ID NO: 5565 - DNA, 1182 bp, synthetic construct
  misc_feature 1..1182: note = Variant of terminal deoxynucleotidyl transferase
  source 1..1182: mol_type = other DNA
atgcatcaccaccatcatcatgggggttctggtcatccggaaggtaataccccggagaaggaggtgccgagcgttatcgcccgtcatgttagtccgtacgcgtgccagcgcaagaccacgctgaataactacaacaaaaagatcaccgacgcgctggagatcatggccgagaactacaagtttaaagagaacctgcaggcgtgcctggaggcccgtcgcgccgcgagtgtcctgaaaagcctgccgttcgaggttaccagcatgaaagacatccaaggtctgccgtgcattaccgacgacgtacgtcctgtgatcgaagagatcatcgaagtaggcgagagcagccgtgttaaagaaatcctcaatgacgagcgctacaaggcctttaagcagttcaccagcgtgttcggtgtgggcgtcaagacctcggaaaagtggtaccgtatgggcctccgtacgcgcgaagaagcaaaggccagtaagagtctgaagctgaacaagatgcagaaggcgggcttcctgtattacgaggatctggcgagcggtgttagtaaagaagaagccgatgccgttctggatatcgtgaaggaaacggtgcgcactgttagtccggatgcgctggtgaccatcgccggcggtttccgccgtggcaaacctatgggccacgacgttgacctgctgatcacgattccgggcagtcctacggatgacgagctgctccacaaagtggttgatctgctcaagaagcaaggtctgctgctgtacggggacatccgtgagcgtacgttcgtggaggggcaactgccaaatcctaaacctgacgccctggacaaccatcagaagtgcttcgccattctcaagctgtaccgtccgaaggtggataacagtgcggttgggacgagtaagaaaagtgacatggctgaggttaaggattggaaagcggttcgtgtggatctggtggtcgctccagatgagcagttcgcctatgcgctgctcggttggacgggcagcggcatgtttcgtcgcgatactcgtcgctacgcggaggaagagcgcgacatgctgctcgacaaccatggtctctacgacctgaaaaagggcatctttctgagtgcggacagcgaagaagagattttcggtcatctggacctggattatctggagccgtgggaacgcaacgcg

SEQ ID NO: 5566 - protein, 394 aa, synthetic construct
  REGION 1..394: note = Variant of terminal deoxynucleotidyl transferase
MHHHHHHGGSGHPEGNTPEKEVPSVIARHVSPYACQRKTTLNNYNKKITDALEIMAENYKFKENLQACLEARRAASVLKSLPFEVTSMKDIQGLPCITDDVRPVIEEIIEVGESSRVKEILNDERYKAFKQFTSVFGVGVKTSEKWYRMGLRTREEAKASKSLKLNKMQKAGFLYYEDLASGVSKEEADAVLDIVKETVRTVSPDALVTIAGGFRRGKPMGHDVDLLITIPGSPTDDELLHKVVDLLKKQGLLLYGDIRERTFVEGQLPNPKPDALDNHQKCFAILKLYRPKVDNSAVGTSKKSDMAEVKDWKAVRVDLVVAPDEQFAYALLGWTGSGMFRRDTRRYAEEERDMLLDNHGLYDLKKGIFLSADSEEEIFGHLDLDYLEPWERNA

SEQ ID NO: 5567 - DNA, 1182 bp, synthetic construct
  misc_feature 1..1182: note = Variant of terminal deoxynucleotidyl transferase
  source 1..1182: mol_type = other DNA
atgcatcaccaccatcatcatgggggttctggtcatccggaaggtaataccccggagaaggaggtgccgagcgttatcgcccgtcatgttagtccgtacgcgtgccagcgcaagaccacgctgaataactacaacaaaaagatcaccgacgcgctggagatcatggccgagaactacaagtttaaagagaacctgcaggcgtgcctggaggcccgtcgcgccgcgagtgtcctgaaaagcctgccgttcgaggttaccagcatgaaagacatccaaggtctgccgtgcattaccgacgacgtacgtcctgtgatcgaagagatcatcgaagtaggcgagagcagccgtgttaaagaaatcctcaatgacgagcgctacaaggcctttaagcagttcaccagcgtgttcggtgtgggcgtcaagacctcggaaaagtggtaccgtatgggcctccgtacgcgcgaagaagcaaaggccagtaagagtctgaagctgaacaagatgcagaaggcgggcttcctgtattacgaggatctggcgagcggtgttagtaaagaagaagccgatgccgttctggatatcgtgaaggaaacggtgcgcactgttagtggggatgcgctggtgaccatcgccggcggtttccgccgtggcaaacctatgggccacgacgttgacctgctgatcacgattccgggccgtcctacggatgacgagctgctccacaaagtggttgatctgctcaagaagcaaggtctgctgctgtacggggacatccgtgagcgtacgttcgtggaggggcaactgccaaatcctaaacctgacgccctggacaaccatcagaagtgcttcgccattctcaagctgtaccgtccgaaggtggataacagtgcggttgggacgagtaagaaaagtgacatggctgaggttaaggattggaaagcggttcgtgtggatctggtggtcgctccagatgagcagttcgcctatgcgctgctcggttggacgggcagcggcatgtttcgtcgcgatactcgtcgctacgcggaggaagagcgcgacatgctgctcgacaaccatggtctctacgacctgaaaaagggcatctttctgagtgcggacagcgaagaagagattttcggtcatctggacctggattatctggagccgtgggaacgcaacgcg

SEQ ID NO: 5568 - protein, 394 aa, synthetic construct
  REGION 1..394: note = Variant of terminal deoxynucleotidyl transferase
MHHHHHHGGSGHPEGNTPEKEVPSVIARHVSPYACQRKTTLNNYNKKITDALEIMAENYKFKENLQACLEARRAASVLKSLPFEVTSMKDIQGLPCITDDVRPVIEEIIEVGESSRVKEILNDERYKAFKQFTSVFGVGVKTSEKWYRMGLRTREEAKASKSLKLNKMQKAGFLYYEDLASGVSKEEADAVLDIVKETVRTVSGDALVTIAGGFRRGKPMGHDVDLLITIPGRPTDDELLHKVVDLLKKQGLLLYGDIRERTFVEGQLPNPKPDALDNHQKCFAILKLYRPKVDNSAVGTSKKSDMAEVKDWKAVRVDLVVAPDEQFAYALLGWTGSGMFRRDTRRYAEEERDMLLDNHGLYDLKKGIFLSADSEEEIFGHLDLDYLEPWERNA

SEQ ID NO: 5569 - DNA, 1182 bp, synthetic construct
  misc_feature 1..1182: note = Variant of terminal deoxynucleotidyl transferase
  source 1..1182: mol_type = other DNA
atgcatcaccaccatcatcatgggggttctggtcatccggaaggtaataccccggagaaggaggtgccgagcgttatcgcccgtcatgttagtccgtacgcgtgccagcgcaagaccacgctgaataactacaacaaaaagatcaccgacgcgctggagatcatggccgagaactacaagtttaaagagaacctgcaggcgtgcctggaggcccgtcgcgccgcgagtgtcctgaaaagcctgccgttcgaggttaccagcatgaaagacatccaaggtctgccgtgcattaccgacgacgtacgtcctgtgatcgaagagatcatcgaagtaggcgagagcagccgtgttaaagaaatcctcaatgacgagcgctacaaggcctttaagcagttcaccagcgtgttcggtgtgggcgtcaagacctcggaaaagtggtaccgtatgggcctccgtacgcgcgaagaagcaaaggccagtaagagtctgaagctgaacaagatgcagaaggcgggcttcctgtattacgaggatctggcgagcggtgttagtaaagaagaagccgatgccgttctggatatcctgaaggaaacggtgcgcactgttagtccggatgcgctggtgaccatcgccggcggtttccgccgtggcaaacctatgggccacgacgttgacctgctgatcacgattccgggccgtcctacggatgacgagctgctccacaaagtggttgatctgctcaagaagcaaggtctgctgctgtacggggacatccgtgagcgtacgttcgtggaggggcaactgccaaatcctaaacctgacgccctggacaaccatcagaagtgcttcgccattctcaagctgtaccgtccgaaggtggataacagtgcggttgggacgagtaagaaaagtgacatggctgaggttaaggattggaaagcggttcgtgtggatctggtggtcgctccagatgagcagttcgcctatgcgctgctcggttggacgggcagcggcatgtttcgtcgcgatactcgtcgctacgcggaggaagagcgcgacatgctgctcgacaaccatggtctctacgacctgaaaaagggcatctttctgagtgcggacagcgaagaagagattttcggtcatctggacctggattatctggagccgtgggaacgcaacgcg

SEQ ID NO: 5570 - protein, 394 aa, synthetic construct
  REGION 1..394: note = Variant of terminal deoxynucleotidyl transferase
MHHHHHHGGSGHPEGNTPEKEVPSVIARHVSPYACQRKTTLNNYNKKITDALEIMAENYKFKENLQACLEARRAASVLKSLPFEVTSMKDIQGLPCITDDVRPVIEEIIEVGESSRVKEILNDERYKAFKQFTSVFGVGVKTSEKWYRMGLRTREEAKASKSLKLNKMQKAGFLYYEDLASGVSKEEADAVLDILKETVRTVSPDALVTIAGGFRRGKPMGHDVDLLITIPGRPTDDELLHKVVDLLKKQGLLLYGDIRERTFVEGQLPNPKPDALDNHQKCFAILKLYRPKVDNSAVGTSKKSDMAEVKDWKAVRVDLVVAPDEQFAYALLGWTGSGMFRRDTRRYAEEERDMLLDNHGLYDLKKGIFLSADSEEEIFGHLDLDYLEPWERNA

SEQ ID NO: 5571 - DNA, 1182 bp, synthetic construct
  misc_feature 1..1182: note = Variant of terminal deoxynucleotidyl transferase
  source 1..1182: mol_type = other DNA
atgcatcaccaccatcatcatgggggttctggtcatccggaaggtaataccccggagaaggaggtgccgagcgttatcgcccgtcatgttagtccgtacgcgtgccagcgcaagaccacgctgaataactacaacaaaaagatcaccgacgcgctggagatcatggccgagaactacaagtttaaagagaacctgcaggcgtgcctggaggcccgtcgcgccgcgagtgtcctgaaaagcctgccgttcgaggttaccagcatgaaagacatccaaggtctgccgtgcattaccgacgacgtacgtcctgtgatcgaagagatcatcgaagtaggcgagagcagccgtgttaaagaaatcctcaatgacgagcgctacaaggcctttaagcagttcaccagcgtgttcggtgtgggcgtcaagacctcggaaaagtggtaccgtatgggcctccgtacgcgcgaagaagcaaaggccagtaagagtctgaagctgaacaagatgcagaaggcgggcttcctgtattacgaggatctggcgagcggtgttagtaaagaagaagccgatgccgttctggatatcgtgaaggaaacggtgcgcactgttagtccggatgcgctggtgaccatcgccggcggtttccgccgtggcaaacctatgggccacgacgttgacctgctgatcacgattccgggccgtcctacggatgacgggctgctccacaaagtggttgatctgctcaagaagcaaggtctgctgctgtacggggacatccgtgagcgtacgttcgtggaggggcaactgccaaatcctaaacctgacgccctggacaaccatcagaagtgcttcgccattctcaagctgtaccgtccgaaggtggataacagtgcggttgggacgagtaagaaaagtgacatggctgaggttaaggattggaaagcggttcgtgtggatctggtggtcgctccagatgagcagttcgcctatgcgctgctcggttggacgggcagcggcatgtttcgtcgcgatactcgtcgctacgcggaggaagagcgcgacatgctgctcgacaaccatggtctctacgacctgaaaaagggcatctttctgagtgcggacagcgaagaagagattttcggtcatctggacctggattatctggagccgtgggaacgcaacgcg

SEQ ID NO: 5572 - protein, 394 aa, synthetic construct
  REGION 1..394: note = Variant of terminal deoxynucleotidyl transferase
MHHHHHHGGSGHPEGNTPEKEVPSVIARHVSPYACQRKTTLNNYNKKITDALEIMAENYKFKENLQACLEARRAASVLKSLPFEVTSMKDIQGLPCITDDVRPVIEEIIEVGESSRVKEILNDERYKAFKQFTSVFGVGVKTSEKWYRMGLRTREEAKASKSLKLNKMQKAGFLYYEDLASGVSKEEADAVLDIVKETVRTVSPDALVTIAGGFRRGKPMGHDVDLLITIPGRPTDDGLLHKVVDLLKKQGLLLYGDIRERTFVEGQLPNPKPDALDNHQKCFAILKLYRPKVDNSAVGTSKKSDMAEVKDWKAVRVDLVVAPDEQFAYALLGWTGSGMFRRDTRRYAEEERDMLLDNHGLYDLKKGIFLSADSEEEIFGHLDLDYLEPWERNA

SEQ ID NO: 5573 - DNA, 1182 bp, synthetic construct
  misc_feature 1..1182: note = Variant of terminal deoxynucleotidyl transferase
  source 1..1182: mol_type = other DNA
atgcatcaccaccatcatcatgggggttctggtcatccggaaggtaataccccggagaaggaggtgccgagcgttatcgcccgtcatgttagtccgtacgcgtgccagcgcaagaccacgctgaataactacaacaaaaagatcaccgacgcgctggagatcatggccgagaactacaagtttaaagagaacctgcaggcgtgcctggaggcccgtcgcgccgcgagtgtcctgaaaagcctgccgttcgaggttaccagcatgaaagacatccaaggtctgccgtgcattaccgacgacgtacgtcctgtgatcgaagagatcatcgaagtaggcgagagcagccgtgttaaagaaatcctcaatgacgagcgctacaaggcctttaagcagttcaccagcgtgttcggtgtgggcgtcaagacctcggaaaagtggtaccgtatgggcctccgtacgcgcgaagaagttaaggccagtaagagtctgaagctgaacaagatgcagaaggcgggcttcctgtattacgaggatctggcgagcggtgttagtaaagaagaagccgatgccgttctggatatcgtgaaggaaacggtgcgcactgttagtccggatgcgctggtgaccatcgccggcggtttccgccgtggcaaacctatgggccacgacgttgacctgctgatcacgattccgggccgtcctacggatgacgagctgctccacaaagtggttgatctgctcaagaagcaaggtctgctgctgtacggggacatccgtgagcgtacgttcgtggaggggcaactgccaaatcctaaacctgacgccctggacaaccatcagaagtgcttcgccattctcaagctgtaccgtccgaaggtggataacagtgcggttgggacgagtaagaaaagtgacatggctgaggttaaggattggaaagcggttcgtgtggatctggtggtcgctccagatgagcagttcgcctatgcgctgctcggttggacgggcagcggcatgtttcgtcgcgatactcgtcgctacgcggaggaagagcgcgacatgctgctcgacaaccatggtctctacgacctgaaaaagggcatctttctgagtgcggacagcgaagaagagattttcggtcatctggacctggattatctggagccgtgggaacgcaacgcg

SEQ ID NO: 5574 - protein, 394 aa, synthetic construct
  REGION 1..394: note = Variant of terminal deoxynucleotidyl transferase
MHHHHHHGGSGHPEGNTPEKEVPSVIARHVSPYACQRKTTLNNYNKKITDALEIMAENYKFKENLQACLEARRAASVLKSLPFEVTSMKDIQGLPCITDDVRPVIEEIIEVGESSRVKEILNDERYKAFKQFTSVFGVGVKTSEKWYRMGLRTREEVKASKSLKLNKMQKAGFLYYEDLASGVSKEEADAVLDIVKETVRTVSPDALVTIAGGFRRGKPMGHDVDLLITIPGRPTDDELLHKVVDLLKKQGLLLYGDIRERTFVEGQLPNPKPDALDNHQKCFAILKLYRPKVDNSAVGTSKKSDMAEVKDWKAVRVDLVVAPDEQFAYALLGWTGSGMFRRDTRRYAEEERDMLLDNHGLYDLKKGIFLSADSEEEIFGHLDLDYLEPWERNA

SEQ ID NO: 5575 - DNA, 1182 bp, synthetic construct
  misc_feature 1..1182: note = Variant of terminal deoxynucleotidyl transferase
  source 1..1182: mol_type = other DNA
atgcatcaccaccatcatcatgggggttctggtcatccggaaggtaataccccggagaaggaggtgccgagcgttatcgcccgtcatgttagtccgtacgcgtgccagcgcaagaccacgctgaataactacaacaaaaagatcaccgacgcgctggagatcatggccgagaactacaagtttaaagagaacctgcaggcgtgcctggaggcccgtcgcgccgcgagtgtcctgaaaagcctgccgttcgaggttaccagcatgaaagacatccaaggtctgccgtgcattaccgacgacgtacgtcctgtgatcgaagagatcatcgaagtaggcgagagcagccgtgttaaagaaatcctcaatgacgagcgctacaaggcctttaagcagttcaccagcgtgttcggtgtgggcgtcaagacctcggaaaagtggtaccgtatgggcctccgtacgcgcgaagaagcaaaggccagtaagagtctgaagctgaacaagatgcagaaggcgggcttcctgtattacgaggatctggcgagcggtgttagtaaagaagaagccgatgccgttctggatatcgtgaaggaaacggtgcgcactgttagtccggatgcgctggtgaccatcgccggcggtttccgccgtggcaaacctatgggccacgacgttgacctgctgatcacgattccgggccgtcctacggatgacgagctgctccacaaagtggttgatctgctcaagaagcaaggtctgctgctgtacggggacatccgtgagcgtacgttcgtggaggggcaactgccaaatcctaaacctgacgccctggacaaccatcagaagtgcttcgccattctcaagtattaccgtccgaaggtggataacagtgcggttgggacgagtaagaaaagtgacatggctgaggttaaggattggaaagcggttcgtgtggatctggtggtcgctccagatgagcagttcgcctatgcgctgctcggttggacgggcagcggcatgtttcgtcgcgatactcgtcgctacgcggaggaagagcgcgacatgctgctcgacaaccatggtctctacgacctgaaaaagggcatctttctgagtgcggacagcgaagaagagattttcggtcatctggacctggattatctggagccgtgggaacgcaacgcg

SEQ ID NO: 5576 - protein, 394 aa, synthetic construct
  REGION 1..394: note = Variant of terminal deoxynucleotidyl transferase
MHHHHHHGGSGHPEGNTPEKEVPSVIARHVSPYACQRKTTLNNYNKKITDALEIMAENYKFKENLQACLEARRAASVLKSLPFEVTSMKDIQGLPCITDDVRPVIEEIIEVGESSRVKEILNDERYKAFKQFTSVFGVGVKTSEKWYRMGLRTREEAKASKSLKLNKMQKAGFLYYEDLASGVSKEEADAVLDIVKETVRTVSPDALVTIAGGFRRGKPMGHDVDLLITIPGRPTDDELLHKVVDLLKKQGLLLYGDIRERTFVEGQLPNPKPDALDNHQKCFAILKYYRPKVDNSAVGTSKKSDMAEVKDWKAVRVDLVVAPDEQFAYALLGWTGSGMFRRDTRRYAEEERDMLLDNHGLYDLKKGIFLSADSEEEIFGHLDLDYLEPWERNA

SEQ ID NO: 5577 - DNA, 1182 bp, synthetic construct
  misc_feature 1..1182: note = Variant of terminal deoxynucleotidyl transferase
  source 1..1182: mol_type = other DNA
atgcatcaccaccatcatcatgggggttctggtcatccggaaggtaataccccggagaaggaggtgccgagcgttatcgcccgtcatgttagtccgtacgcgtgccagcgcaagaccacgctgaataactacaacaaaaagatcaccgacgcgctggagatcatggccgagaactacaagtttaaagagaacctgcaggcgtgcctggaggcccgtcgcgccgcgagtgtcctgaaaagcctgccgttcgaggttaccagcatgaaagacatccaaggtctgccgtgcattaccgacgacgtacgtcctgtgatcgaagagatcatcgaagtaggcgagagcagccgtgttaaagaaatcctcaatgacgagcgctacaaggcctttaagcagttcaccagcgtgttcggtgtgggcgtcaagacctcggaaaagtggtaccgtatgggcctccgtacgcgcgaagaagcaaaggccagtaagagtctgaagctgaacaagatgcagaaggcgggcttcctgtattacgaggatctggcgagcggtgttagtaaagaagaagccgatgccgttctggatatcgtgaaggaaacggtgcgcactgttagtccggatgcgctggtgaccatcgccggcggtttccgccgtggcaaacctatgggccacgacgttgacctgctgatcacgattccgggccgtcctacggatgacgagctgctccacaaagtggttgatctgctcaagaagcaaggtctgctgctgtacggggacatccgtgagcgtacgttcgtggaggggcaactgccaaatcctaaacctgacgccctggacaaccatcagaagtgcttcgccattgctaagctgtaccgtccgaaggtggataacagtgcggttgggacgagtaagaaaagtgacatggctgaggttaaggattggaaagcggttcgtgtggatctggtggtcgctccagatgagcagttcgcctatgcgctgctcggttggacgggcagcggcatgtttcgtcgcgatactcgtcgctacgcggaggaagagcgcgacatgctgctcgacaaccatggtctctacgacctgaaaaagggcatctttctgagtgcggacagcgaagaagagattttcggtcatctggacctggattatctggagccgtgggaacgcaacgcg

SEQ ID NO: 5578 - protein, 394 aa, synthetic construct
  REGION 1..394: note = Variant of terminal deoxynucleotidyl transferase
MHHHHHHGGSGHPEGNTPEKEVPSVIARHVSPYACQRKTTLNNYNKKITDALEIMAENYKFKENLQACLEARRAASVLKSLPFEVTSMKDIQGLPCITDDVRPVIEEIIEVGESSRVKEILNDERYKAFKQFTSVFGVGVKTSEKWYRMGLRTREEAKASKSLKLNKMQKAGFLYYEDLASGVSKEEADAVLDIVKETVRTVSPDALVTIAGGFRRGKPMGHDVDLLITIPGRPTDDELLHKVVDLLKKQGLLLYGDIRERTFVEGQLPNPKPDALDNHQKCFAIAKLYRPKVDNSAVGTSKKSDMAEVKDWKAVRVDLVVAPDEQFAYALLGWTGSGMFRRDTRRYAEEERDMLLDNHGLYDLKKGIFLSADSEEEIFGHLDLDYLEPWERNA

SEQ ID NO: 5579 - DNA, 1182 bp, synthetic construct
  misc_feature 1..1182: note = Variant of terminal deoxynucleotidyl transferase
  source 1..1182: mol_type = other DNA
atgcatcaccaccatcatcatgggggttctggtcatccggaaggtaataccccggagaaggaggtgccgagcgttatcgcccgtcatgttagtccgtacgcgtgccagcgcaagaccacgctgaataactacaacaaaaagatcaccgacgcgctggagatcatggccgagaactacaagtttaaagagaacctgcaggcgtgcctggaggcccgtcgcgccgcgagtgtcctgaaaagcctgccgttcgaggttaccagcatgaaagacatccaaggtctgccgtgcattaccgacgacgtacgtcctgtgatcgaagagatcatcgaagtaggcgagagcagccgtgttaaagaaatcctcaatgacgagcgctacaaggcctttaagcagttcaccagcgtgttcggtgtgggcgtcaagacctcggaaaagtggtaccgtatgggcctccgtacgcgcgaagaagcaaaggccagtaagagtctgaagctgaacaagatgcagaaggcgggcttcctgtattacgaggatctggcgagcggtgttagtaaagaagaagccgatgccgttctggatatcgtgaaggaaacggtgcgcactgttagtccggatgcgctggtgaccatcgccggcggtttccgccgtggcaaacctatgggccacgacgttgacctgctgatcacgaatccgggccgtcctacggatgacgagctgctccacaaagtggttgatctgctcaagaagcaaggtctgctgctgtacggggacatccgtgagcgtacgttcgtggaggggcaactgccaaatcctaaacctgacgccctggacaaccatcagaagtgcttcgccattctcaagctgtaccgtccgaaggtggataacagtgcggttgggacgagtaagaaaagtgacatggctgaggttaaggattggaaagcggttcgtgtggatctggtggtcgctccagatgagcagttcgcctatgcgctgctcggttggacgggcagcggcatgtttcgtcgcgatactcgtcgctacgcggaggaagagcgcgacatgctgctcgacaaccatggtctctacgacctgaaaaagggcatctttctgagtgcggacagcgaagaagagattttcggtcatctggacctggattatctggagccgtgggaacgcaacgcg

SEQ ID NO: 5580 - protein, 394 aa, synthetic construct
  REGION 1..394: note = Variant of terminal deoxynucleotidyl transferase
MHHHHHHGGSGHPEGNTPEKEVPSVIARHVSPYACQRKTTLNNYNKKITDALEIMAENYKFKENLQACLEARRAASVLKSLPFEVTSMKDIQGLPCITDDVRPVIEEIIEVGESSRVKEILNDERYKAFKQFTSVFGVGVKTSEKWYRMGLRTREEAKASKSLKLNKMQKAGFLYYEDLASGVSKEEADAVLDIVKETVRTVSPDALVTIAGGFRRGKPMGHDVDLLITNPGRPTDDELLHKVVDLLKKQGLLLYGDIRERTFVEGQLPNPKPDALDNHQKCFAILKLYRPKVDNSAVGTSKKSDMAEVKDWKAVRVDLVVAPDEQFAYALLGWTGSGMFRRDTRRYAEEERDMLLDNHGLYDLKKGIFLSADSEEEIFGHLDLDYLEPWERNA

SEQ ID NO: 5581 - DNA, 1182 bp, synthetic construct
  misc_feature 1..1182: note = Variant of terminal deoxynucleotidyl transferase
  source 1..1182: mol_type = other DNA
atgcatcaccaccatcatcatgggggttctggtcatccggaaggtaataccccggagaaggaggtgccgagcgttatcgcccgtcatgttagtccgtacgcgtgccagcgcaagaccacgctgaataactacaacaaaaagatcaccgacgcgctggagatcatggccgagaactacaagtttaaagagaacctgcaggcgtgcctggaggcccgtcgcgccgcgagtgtcctgaaaagcctgccgttcgaggttaccagcatgaaagacatccaaggtctgccgtgcattaccgacgacgtacgtcctgtgatcgaagagatcatcgaagtaggcgagagcagccgtgttaaagaaatcctcaatgacgagcgctacaaggcctttaagcagttcaccagcgtgttcggtgtgggcgtcaagacctcggaaaagtggtaccgtatgggcctccgtacgcgcgaagaagcaaaggccagtaagagtctgaagctgaacaagatgcagaaggcgggcttcctgtattacgaggatctggcgagcggtgttagtaaagaagaagccgatgccgttctggatatcgtgaaggaaacggtgcgcactgttagtccggatgcgctggtgaccatcgccggcggtttccgccgtggcaaacctatgggccacgacgttgacctgctgatcacgattccgggccgtcctttggatgacgagctgctccacaaagtggttgatctgctcaagaagcaaggtctgctgctgtacggggacatccgtgagcgtacgttcgtggaggggcaactgccaaatcctaaacctgacgccctggacaaccatcagaagtgcttcgccattctcaagctgtaccgtccgaaggtggataacagtgcggttgggacgagtaagaaaagtgacatggctgaggttaaggattggaaagcggttcgtgtggatctggtggtcgctccagatgagcagttcgcctatgcgctgctcggttggacgggcagcggcatgtttcgtcgcgatactcgtcgctacgcggaggaagagcgcgacatgctgctcgacaaccatggtctctacgacctgaaaaagggcatctttctgagtgcggacagcgaagaagagattttcggtcatctggacctggattatctggagccgtgggaacgcaacgcg

SEQ ID NO: 5582 - protein, 394 aa, synthetic construct
  REGION 1..394: note = Variant of terminal deoxynucleotidyl transferase
MHHHHHHGGSGHPEGNTPEKEVPSVIARHVSPYACQRKTTLNNYNKKITDALEIMAENYKFKENLQACLEARRAASVLKSLPFEVTSMKDIQGLPCITDDVRPVIEEIIEVGESSRVKEILNDERYKAFKQFTSVFGVGVKTSEKWYRMGLRTREEAKASKSLKLNKMQKAGFLYYEDLASGVSKEEADAVLDIVKETVRTVSPDALVTIAGGFRRGKPMGHDVDLLITIPGRPLDDELLHKVVDLLKKQGLLLYGDIRERTFVEGQLPNPKPDALDNHQKCFAILKLYRPKVDNSAVGTSKKSDMAEVKDWKAVRVDLVVAPDEQFAYALLGWTGSGMFRRDTRRYAEEERDMLLDNHGLYDLKKGIFLSADSEEEIFGHLDLDYLEPWERNA

SEQ ID NO: 5583 - DNA, 1182 bp, synthetic construct
  misc_feature 1..1182: note = Variant of terminal deoxynucleotidyl transferase
  source 1..1182: mol_type = other DNA
atgcatcaccaccatcatcatgggggttctggtcatccggaaggtaataccccggagaaggaggtgccgagcgttatcgcccgtcatgttagtccgtacgcgtgccagcgcaagaccacgctgaataactacaacaaaaagatcaccgacgcgctggagatcatggccgagaactacaagtttaaagagaacctgcaggcgtgcctggaggcccgtcgcgccgcgagtgtcctgaaaagcctgccgttcgaggttaccagcatgaaagacatccaaggtctgccgtgcattaccgacgacgtacgtcctgtgatcgaagagatcatcgaagtaggcgagagcagccgtgttaaagaaatcctcaatgacgagcgctacaaggcctttaagcagttcaccagcgtgttcggtgtgggcgtcaagacctcggaaaagtggtaccgtatgggcctccgtacgcgcgaagaagcaaaggccagtaagagtctgaagctgaacaagatgcagaaggcgggcttcctgtattacgaggatctggcgagcggtgttagtaaagaagaagccgatgccgttctggatatcgtgaaggaaacggtgcgcactgttagtccggatgcgctggtgaccatcgccggcggtttccgccgtggcaaacctatgggccacgacgttgacctgctgatcacgattccgggccgtcctacggatgacgagctgctccacaaagtggttgatctgctcaagaagcaaggtctgctgctgtacggggacatccgtgagcgtacgttcgtggaggggcaactgccaaatcctaaacctgacgccctggacaaccatcagaagtgcttcgccattctcaagctgtaccgtccgaaggtggataacagtgcggttgggacgagtaagaaaagtgacatggctgaggttaaggattggaaagcggttcgtgtggatctggtggtcgctccagatgagcagttcgcctatgcgctgctcggttggacgggcagcggcatgtttcgtcgcgatactcgtcgctacgcggaggaagagcgcgacatgctgctcgacaaccatggtctctacgacctgaaaaagggctcgtttctgagtgcggacagcgaagaagagattttcggtcatctggacctggattatctggagccgtgggaacgcaacgcg

SEQ ID NO: 5584 - protein, 394 aa, synthetic construct
  REGION 1..394: note = Variant of terminal deoxynucleotidyl transferase
MHHHHHHGGSGHPEGNTPEKEVPSVIARHVSPYACQRKTTLNNYNKKITDALEIMAENYKFKENLQACLEARRAASVLKSLPFEVTSMKDIQGLPCITDDVRPVIEEIIEVGESSRVKEILNDERYKAFKQFTSVFGVGVKTSEKWYRMGLRTREEAKASKSLKLNKMQKAGFLYYEDLASGVSKEEADAVLDIVKETVRTVSPDALVTIAGGFRRGKPMGHDVDLLITIPGRPTDDELLHKVVDLLKKQGLLLYGDIRERTFVEGQLPNPKPDALDNHQKCFAILKLYRPKVDNSAVGTSKKSDMAEVKDWKAVRVDLVVAPDEQFAYALLGWTGSGMFRRDTRRYAEEERDMLLDNHGLYDLKKGSFLSADSEEEIFGHLDLDYLEPWERNA

SEQ ID NO: 5585 - DNA, 1182 bp, synthetic construct
  misc_feature 1..1182: note = Variant of terminal deoxynucleotidyl transferase
  source 1..1182: mol_type = other DNA
atgcatcaccaccatcatcatgggggttctggtcatccggaaggtaataccccggagaaggaggtgccgagcgttatcgcccgtcatgttagtccgtacgcgtgccagcgcaagaccacgctgaataactacaacaaaaagatcaccgacgcgctggagatcatggccgagaactacaagtttaaagagaacctgcaggcgtgcctggaggcccgtcgcgccgcgagtgtcctgaaaagcctgccgttcgaggttaccagcatgaaagacatccaaggtctgccgtgcattaccgacgacgtacgtcctgtgatcgaagagatcatcgaagtaggcgagagcagccgtgttaaagaaatcctcaatgacgagcgctacaaggcctttaagcagttcaccagcgtgttcggtgtgggcgtcaagacctcggaaaagtggtaccgtatgggcctccgtacgcgcgaagaagcaaaggccagtaagagtctgaagctgaacaagatgcagaaggcgggcttcctgtattacgaggatctggcgagcggtgttagtaaagaagaagccgatgccgttctggatatcgtgaaggaaacggtgcgcactgttagtccggatgcgctggtgaccatcgccggcggtttccgccgtggcaaacctatgggccacgacgttgacctgctgatcacgattccgggccgtcctacggatgacgagctgctccacaaagtggttgatctgctcaagaagcaaggtctgctgctgtacggggacatccgtgagcgtacgttcgtggaggggcaactgccaaatcctaaacctgacgccctggacaaccatcagaagtgcttcgccattctcaaggcgtaccgtccgaaggtggataacagtgcggttgggacgagtaagaaaagtgacatggctgaggttaaggattggaaagcggttcgtgtggatctggtggtcgctccagatgagcagttcgcctatgcgctgctcggttggacgggcagcggcatgtttcgtcgcgatactcgtcgctacgcggaggaagagcgcgacatgctgctcgacaaccatggtctctacgacctgaaaaagggcatctttctgagtgcggacagcgaagaagagattttcggtcatctggacctggattatctggagccgtgggaacgcaacgcg

SEQ ID NO: 5586 - protein, 394 aa, synthetic construct
  REGION 1..394: note = Variant of terminal deoxynucleotidyl transferase
MHHHHHHGGSGHPEGNTPEKEVPSVIARHVSPYACQRKTTLNNYNKKITDALEIMAENYKFKENLQACLEARRAASVLKSLPFEVTSMKDIQGLPCITDDVRPVIEEIIEVGESSRVKEILNDERYKAFKQFTSVFGVGVKTSEKWYRMGLRTREEAKASKSLKLNKMQKAGFLYYEDLASGVSKEEADAVLDIVKETVRTVSPDALVTIAGGFRRGKPMGHDVDLLITIPGRPTDDELLHKVVDLLKKQGLLLYGDIRERTFVEGQLPNPKPDALDNHQKCFAILKAYRPKVDNSAVGTSKKSDMAEVKDWKAVRVDLVVAPDEQFAYALLGWTGSGMFRRDTRRYAEEERDMLLDNHGLYDLKKGIFLSADSEEEIFGHLDLDYLEPWERNA

SEQ ID NO: 5587 - DNA, 1182 bp, synthetic construct
  misc_feature 1..1182: note = Variant of terminal deoxynucleotidyl transferase
  source 1..1182: mol_type = other DNA
atgcatcaccaccatcatcatgggggttctggtcatccggaaggtaataccccggagaaggaggtgccgagcgttatcgcccgtcatgttagtccgtacgcgtgccagcgcaagaccacgctgaataactacaacaaaaagatcaccgacgcgctggagatcatggccgagaactacaagtttaaagagaacctgcaggcgtgcctggaggcccgtcgcgccgcgagtgtcctgaaaagcctgccgttcgaggttaccagcatgaaagacatccaaggtctgccgtgcattaccgacgacgtacgtcctgtgatcgaagagatcatcgaagtaggcgagagcagccgtgttaaagaaatcctcaatgacgagcgctacaaggcctttaagcagttcaccagcgtgttcggtgtgggcgtcaagacctcggaaaagtggtaccgtatgggcctccgtacgcgcgaagaagcaaaggccagtaagagtctgaagctgaacaagatgcagaaggcgggcttcctgtattacgaggatctggcgagcggtgttagtaaagaagaagccgatgccgttctggatatcgtgaagcagacggtgcgcactgttagtccggatgcgctggtgaccatcgccggcggtttccgccgtggcaaacctatgggccacgacgttgacctgctgatcacgattccgggccgtcctacggatgacgagctgctccacaaagtggttgatctgctcaagaagcaaggtctgctgctgtacggggacatccgtgagcgtacgttcgtggaggggcaactgccaaatcctaaacctgacgccctggacaaccatcagaagtgcttcgccattctcaagctgtaccgtccgaaggtggataacagtgcggttgggacgagtaagaaaagtgacatggctgaggttaaggattggaaagcggttcgtgtggatctggtggtcgctccagatgagcagttcgcctatgcgctgctcggttggacgggcagcggcatgtttcgtcgcgatactcgtcgctacgcggaggaagagcgcgacatgctgctcgacaaccatggtctctacgacctgaaaaagggcatctttctgagtgcggacagcgaagaagagattttcggtcatctggacctggattatctggagccgtgggaacgcaacgcg

SEQ ID NO: 5588 - protein, 394 aa, synthetic construct
  REGION 1..394: note = Variant of terminal deoxynucleotidyl transferase
MHHHHHHGGSGHPEGNTPEKEVPSVIARHVSPYACQRKTTLNNYNKKITDALEIMAENYKFKENLQACLEARRAASVLKSLPFEVTSMKDIQGLPCITDDVRPVIEEIIEVGESSRVKEILNDERYKAFKQFTSVFGVGVKTSEKWYRMGLRTREEAKASKSLKLNKMQKAGFLYYEDLASGVSKEEADAVLDIVKQTVRTVSPDALVTIAGGFRRGKPMGHDVDLLITIPGRPTDDELLHKVVDLLKKQGLLLYGDIRERTFVEGQLPNPKPDALDNHQKCFAILKLYRPKVDNSAVGTSKKSDMAEVKDWKAVRVDLVVAPDEQFAYALLGWTGSGMFRRDTRRYAEEERDMLLDNHGLYDLKKGIFLSADSEEEIFGHLDLDYLEPWERNA

SEQ ID NO: 5589 - DNA, 1182 bp, synthetic construct
  misc_feature 1..1182: note = Variant of terminal deoxynucleotidyl transferase
  source 1..1182: mol_type = other DNA
atgcatcaccaccatcatcatgggggttctggtcatccggaaggtaataccccggagaaggaggtgccgagcgttatcgcccgtcatgttagtccgtacgcgtgccagcgcaagaccacgctgaataactacaacaaaaagatcaccgacgcgctggagatcatggccgagaactacaagtttaaagagaacctgcaggcgtgcctggaggcccgtcgcgccgcgagtgtcctgaaaagcctgccgttcgaggttaccagcatgaaagacatccaaggtctgccgtgcattaccgacgacgtacgtcctgtgatcgaagagatcatcgaagtaggcgagagcagccgtgttaaagaaatcctcaatgacgagcgctacaaggcctttaagcagttcaccagcgtgttcggtgtgggcgtcaagacctcggaaaagtggtaccgtatgggcctccgtacgcgcgaagaagcaaaggccagtaagagtctgaagctgaacaagatgcagaaggcgggcttcctgtattacgaggatctggcgagcggtgttagtaaagaagaagccgatgccgttctggatatcgtgaaggaaacggtgcgcactgttagtccggatgcgctggtgaccatcgccggcggtttccgccgtggcaaacctatgggccacgacgttgacctgctgatcacgattccgggccgtcctacggatgacgagctgctccacaaagtggttgatctgctcaagaagcaaggtctgctgctgtacggggacatccgtgagcgtacgttcgtggaggggcaactgccaaatcctaaacctgacgccctggacaaccatcagaagtgcttcgccattctcaagctgtaccgtccgaaggtggataacagtgcggttgggacgagtaagaaaagtgacatggctgaggttaaggattggaaagcggttcgtgtggatctggtggtcgctccagatgagcagttcgcctatgcgctgctcggttggacgggcagcggcatgtttcgtcgcgatactcgtcgctacgcggaggaagagcgcgacatgctgctcgacaaccatggtctctacgacctgaaaaagggcacgtttctgagtgcggacagcgaagaagagattttcggtcatctggacctggattatctggagccgtgggaacgcaacgcg

SEQ ID NO: 5590 - protein, 394 aa, synthetic construct
  REGION 1..394: note = Variant of terminal deoxynucleotidyl transferase
MHHHHHHGGSGHPEGNTPEKEVPSVIARHVSPYACQRKTTLNNYNKKITDALEIMAENYKFKENLQACLEARRAASVLKSLPFEVTSMKDIQGLPCITDDVRPVIEEIIEVGESSRVKEILNDERYKAFKQFTSVFGVGVKTSEKWYRMGLRTREEAKASKSLKLNKMQKAGFLYYEDLASGVSKEEADAVLDIVKETVRTVSPDALVTIAGGFRRGKPMGHDVDLLITIPGRPTDDELLHKVVDLLKKQGLLLYGDIRERTFVEGQLPNPKPDALDNHQKCFAILKLYRPKVDNSAVGTSKKSDMAEVKDWKAVRVDLVVAPDEQFAYALLGWTGSGMFRRDTRRYAEEERDMLLDNHGLYDLKKGTFLSADSEEEIFGHLDLDYLEPWERNA

SEQ ID NO: 5591 - DNA, 1182 bp, synthetic construct
  misc_feature 1..1182: note = Variant of terminal deoxynucleotidyl transferase
  source 1..1182: mol_type = other DNA
atgcatcaccaccatcatcatgggggttctggtcatccggaaggtaataccccggagaaggaggtgccgagcgttatcgcccgtcatgttagtccgtacgcgtgccagcgcaagaccacgctgaataactacaacaaaaagatcaccgacgcgctggagatcatggccgagaactacaagtttaaagagaacctgcaggcgtgcctggaggcccgtcgcgccgcgagtgtcctgaaaagcctgccgttcgaggttaccagcatgaaagacatccaaggtctgccgtgcattaccgacgacgtacgtcctgtgatcgaagagatcatcgaagtaggcgagagcagccgtgttaaagaaatcctcaatgacgagcgctacaaggcctttaagcagttcaccagcgtgttcggtgtgggcgtcaagacctcggaaaagtggtaccgtatgggcctccgtacgcgcgaagaagcaaaggccagtaagagtctgaagctgaacaagatgcagaaggcgggcttcctgtattacgaggatctggcgagcggtgttagtaaagaagaagccgatgccgttctggatatcgtgaaggaaacggtgcgcactgttattccggatgcgctggtgaccatcgccggcggtttccgccgtggcaaacctatgggccacgacgttgacctgctgatcacgattccgggccgtcctacggatgacgagctgctccacaaagtggttgatctgctcaagaagcaaggtctgctgctgtacggggacatccgtgagcgtacgttcgtggaggggcaactgccaaatcctaaacctgacgccctggacaaccatcagaagtgcttcgccattctcaagctgtaccgtccgaaggtggataacagtgcggttgggacgagtaagaaaagtgacatggctgaggttaaggattggaaagcggttcgtgtggatctggtggtcgctccagatgagcagttcgcctatgcgctgctcggttggacgggcagcggcatgtttcgtcgcgatactcgtcgctacgcggaggaagagcgcgacatgctgctcgacaaccatggtctctacgacctgaaaaagggcatctttctgagtgcggacagcgaagaagagattttcggtcatctggacctggattatctggagccgtgggaacgcaacgcg

SEQ ID NO: 5592 - protein, 394 aa, synthetic construct
  REGION 1..394: note = Variant of terminal deoxynucleotidyl transferase
MHHHHHHGGSGHPEGNTPEKEVPSVIARHVSPYACQRKTTLNNYNKKITDALEIMAENYKFKENLQACLEARRAASVLKSLPFEVTSMKDIQGLPCITDDVRPVIEEIIEVGESSRVKEILNDERYKAFKQFTSVFGVGVKTSEKWYRMGLRTREEAKASKSLKLNKMQKAGFLYYEDLASGVSKEEADAVLDIVKETVRTVIPDALVTIAGGFRRGKPMGHDVDLLITIPGRPTDDELLHKVVDLLKKQGLLLYGDIRERTFVEGQLPNPKPDALDNHQKCFAILKLYRPKVDNSAVGTSKKSDMAEVKDWKAVRVDLVVAPDEQFAYALLGWTGSGMFRRDTRRYAEEERDMLLDNHGLYDLKKGIFLSADSEEEIFGHLDLDYLEPWERNA

SEQ ID NO: 5593 - DNA, 1182 bp, synthetic construct
  misc_feature 1..1182: note = Variant of terminal deoxynucleotidyl transferase
  source 1..1182: mol_type = other DNA
atgcatcaccaccatcatcatgggggttctggtcatccggaaggtaataccccggagaaggaggtgccgagcgttatcgcccgtcatgttagtccgtacgcgtgccagcgcaagaccacgctgaataactacaacaaaaagatcaccgacgcgctggagatcatggccgagaactacaagtttaaagagaacctgcaggcgtgcctggaggcccgtcgcgccgcgagtgtcctgaaaagcctgccgttcgaggttaccagcatgaaagacatccaaggtctgccgtgcattaccgacgacgtacgtcctgtgatcgaagagatcatcgaagtaggcgagagcagccgtgttaaagaaatcctcaatgacgagcgctacaaggcctttaagcagttcaccagcgtgttcggtgtgggcgtcaagacctcggaaaagtggtaccgtatgggcctccgtacgcgcgaagaagcaaaggccagtaagagtctgaagctgaacaagatgcagaaggcgggcttcctgtattacgaggatctggcgagcggtgttagtaaagaagaagccgatgccgttctggatatcgtgaaggaaacggtgcgcactctgagtccggatgcgctggtgaccatcgccggcggtttccgccgtggcaaacctatgggccacgacgttgacctgctgatcacgattccgggccgtcctacggatgacgagctgctccacaaagtggttgatctgctcaagaagcaaggtctgctgctgtacggggacatccgtgagcgtacgttcgtggaggggcaactgccaaatcctaaacctgacgccctggacaaccatcagaagtgcttcgccattctcaagctgtaccgtccgaaggtggataacagtgcggttgggacgagtaagaaaagtgacatggctgaggttaaggattggaaagcggttcgtgtggatctggtggtcgctccagatgagcagttcgcctatgcgctgctcggttggacgggcagcggcatgtttcgtcgcgatactcgtcgctacgcggaggaagagcgcgacatgctgctcgacaaccatggtctctacgacctgaaaaagggcatctttctgagtgcggacagcgaagaagagattttcggtcatctggacctggattatctggagccgtgggaacgcaacgcg

SEQ ID NO: 5594 - protein, 394 aa, synthetic construct
  REGION 1..394: note = Variant of terminal deoxynucleotidyl transferase
MHHHHHHGGSGHPEGNTPEKEVPSVIARHVSPYACQRKTTLNNYNKKITDALEIMAENYKFKENLQACLEARRAASVLKSLPFEVTSMKDIQGLPCITDDVRPVIEEIIEVGESSRVKEILNDERYKAFKQFTSVFGVGVKTSEKWYRMGLRTREEAKASKSLKLNKMQKAGFLYYEDLASGVSKEEADAVLDIVKETVRTLSPDALVTIAGGFRRGKPMGHDVDLLITIPGRPTDDELLHKVVDLLKKQGLLLYGDIRERTFVEGQLPNPKPDALDNHQKCFAILKLYRPKVDNSAVGTSKKSDMAEVKDWKAVRVDLVVAPDEQFAYALLGWTGSGMFRRDTRRYAEEERDMLLDNHGLYDLKKGIFLSADSEEEIFGHLDLDYLEPWERNA

SEQ ID NO: 5595 - DNA, 1182 bp, synthetic construct
  misc_feature 1..1182: note = Variant of terminal deoxynucleotidyl transferase
  source 1..1182: mol_type = other DNA
atgcatcaccaccatcatcatgggggttctggtcatccggaaggtaataccccggagaaggaggtgccgagcgttatcgcccgtcatgttagtccgtacgcgtgccagcgcaagaccacgctgaataactacaacaaaaagatcaccgacgcgctggagatcatggccgagaactacaagtttaaagagaacctgcaggcgtgcctggaggcccgtcgcgccgcgagtgtcctgaaaagcctgccgttcgaggttaccagcatgaaagacatccaaggtctgccgtgcattaccgacgacgtacgtcctgtgatcgaagagatcatcgaagtaggcgagagcagccgtgttaaagaaatcctcaatgacgagcgctacaaggcctttaagcagttcaccagcgtgttcggtgtgggcgtcaagacctcggaaaagtggtaccgtatgggcctccgtacgcgcgaagaagcaaaggccagtaagagtctgaagctgaacaagatgcagaaggcgggcttcctgtattacgaggatctggcgagcggtgttagtaaagaagaagccgatgccgttctggatatcgtggaggaaacggtgcgcactgttagtccggatgcgctggtgaccatcgccggcggtttccgccgtggcaaacctatgggccacgacgttgacctgctgatcacgattccgggccgtcctacggatgacgagctgctccacaaagtggttgatctgctcaagaagcaaggtctgctgctgtacggggacatccgtgagcgtacgttcgtggaggggcaactgccaaatcctaaacctgacgccctggacaaccatcagaagtgcttcgccattctcaagctgtaccgtccgaaggtggataacagtgcggttgggacgagtaagaaaagtgacatggctgaggttaaggattggaaagcggttcgtgtggatctggtggtcgctccagatgagcagttcgcctatgcgctgctcggttggacgggcagcggcatgtttcgtcgcgatactcgtcgctacgcggaggaagagcgcgacatgctgctcgacaaccatggtctctacgacctgaaaaagggcatctttctgagtgcggacagcgaagaagagattttcggtcatctggacctggattatctggagccgtgggaacgcaacgcg

SEQ ID NO: 5596 - protein, 394 aa, synthetic construct
  REGION 1..394: note = Variant of terminal deoxynucleotidyl transferase
MHHHHHHGGSGHPEGNTPEKEVPSVIARHVSPYACQRKTTLNNYNKKITDALEIMAENYKFKENLQACLEARRAASVLKSLPFEVTSMKDIQGLPCITDDVRPVIEEIIEVGESSRVKEILNDERYKAFKQFTSVFGVGVKTSEKWYRMGLRTREEAKASKSLKLNKMQKAGFLYYEDLASGVSKEEADAVLDIVEETVRTVSPDALVTIAGGFRRGKPMGHDVDLLITIPGRPTDDELLHKVVDLLKKQGLLLYGDIRERTFVEGQLPNPKPDALDNHQKCFAILKLYRPKVDNSAVGTSKKSDMAEVKDWKAVRVDLVVAPDEQFAYALLGWTGSGMFRRDTRRYAEEERDMLLDNHGLYDLKKGIFLSADSEEEIFGHLDLDYLEPWERNA

SEQ ID NO: 5597 - DNA, 1182 bp, synthetic construct
  misc_feature 1..1182: note = Variant of terminal deoxynucleotidyl transferase
  source 1..1182: mol_type = other DNA
atgcatcaccaccatcatcatgggggttctggtcatccggaaggtaataccccggagaaggaggtgccgagcgttatcgcccgtcatgttagtccgtacgcgtgccagcgcaagaccacgctgaataactacaacaaaaagatcaccgacgcgctggagatcatggccgagaactacaagtttaaagagaacctgcaggcgtgcctggaggcccgtcgcgccgcgagtgtcctgaaaagcctgccgttcgaggttaccagcatgaaagacatccaaggtctgccgtgcattaccgacgacgtacgtcctgtgatcgaagagatcatcgaagtaggcgagagcagccgtgttaaagaaatcctcaatgacgagcgctacaaggcctttaagcagttcaccagcgtgttcggtgtgggcgtcaagacctcggaaaagtggtaccgtatgggcctccgtacgcgcgaagaagcaaaggccagtaagagtctgaagctgaacaagatgcagaaggcgggcttcctgtattacgaggatctggcgagcggtgttagtaaagaagaagccgatgccgttctggatatcgtgaaggaaacggtgcgcactgttagtccggatgcgctggtgaccatcgccggcggtttccgccgtggcaaacctatgggccacgacgttgacctgctgatcacgattccgggccgtcctacggatgacgagctgctccacaaagtggttgatctgctcaagaagcaaggtctgctgctgtacggggacatccgtgagcgtacgttcgtggaggggcaactgccaaatcctaaacctgacgccctggacaaccatcagaagtgcttcgccattctcaagctgtaccgtccgaaggtggataacagtgcggttgggacgagtaagaaaagtgacatggctgaggttaaggattggaaagcggttcgtgtggatctggtggtcgctccagatgagcagttcgcctatgcgctgctcggttggacgggcagcggcatgtttcgtcgcgatactcgtcgctacgcggaggaagagcgcgacatgctgctcgacaaccatggtctctacgacctgaaaaagggcatctttctgagtgcgaggagcgaagaagagattttcggtcatctggacctggattatctggagccgtgggaacgcaacgcg

SEQ ID NO: 5598 - protein, 394 aa, synthetic construct
  REGION 1..394: note = Variant of terminal deoxynucleotidyl transferase
MHHHHHHGGSGHPEGNTPEKEVPSVIARHVSPYACQRKTTLNNYNKKITDALEIMAENYKFKENLQACLEARRAASVLKSLPFEVTSMKDIQGLPCITDDVRPVIEEIIEVGESSRVKEILNDERYKAFKQFTSVFGVGVKTSEKWYRMGLRTREEAKASKSLKLNKMQKAGFLYYEDLASGVSKEEADAVLDIVKETVRTVSPDALVTIAGGFRRGKPMGHDVDLLITIPGRPTDDELLHKVVDLLKKQGLLLYGDIRERTFVEGQLPNPKPDALDNHQKCFAILKLYRPKVDNSAVGTSKKSDMAEVKDWKAVRVDLVVAPDEQFAYALLGWTGSGMFRRDTRRYAEEERDMLLDNHGLYDLKKGIFLSARSEEEIFGHLDLDYLEPWERNA

SEQ ID NO: 5599 - DNA, 1182 bp, synthetic construct
  misc_feature 1..1182: note = Variant of terminal deoxynucleotidyl transferase
  source 1..1182: mol_type = other DNA
atgcatcaccaccatcatcatgggggttctggtcatccggaaggtaataccccggagaaggaggtgccgagcgttatcgcccgtcatgttagtccgtacgcgtgccagcgcaagaccacgctgaataactacaacaaaaagatcaccgacgcgctggagatcatggccgagaactacaagtttaaagagaacctgcaggcgtgcctggaggcccgtcgcgccgcgagtgtcctgaaaagcctgccgttcgaggttaccagcatgaaagacatccaaggtctgccgtgcattaccgacgacgtacgtcctgtgatcgaagagatcatcgaagtaggcgagagcagccgtgttaaagaaatcctcaatgacgagcgctacaaggcctttaagcagttcaccagcgtgttcggtgtgggcgtcaagacctcggaaaagtggtaccgtatgggcctccgtacgcgcgaagaagcaaaggccagtaagagtctgaagctgaacaagatgcagaaggcgggcttcctgtattacgaggatctggcgagcggtgttagtaaagaagaagccgatgccgttctggatatcgtgaaggaaacggtgcgcatggttagtccggatgcgctggtgaccatcgccggcggtttccgccgtggcaaacctatgggccacgacgttgacctgctgatcacgattccgggccgtcctacggatgacgagctgctccacaaagtggttgatctgctcaagaagcaaggtctgctgctgtacggggacatccgtgagcgtacgttcgtggaggggcaactgccaaatcctaaacctgacgccctggacaaccatcagaagtgcttcgccattctcaagctgtaccgtccgaaggtggataacagtgcggttgggacgagtaagaaaagtgacatggctgaggttaaggattggaaagcggttcgtgtggatctggtggtcgctccagatgagcagttcgcctatgcgctgctcggttggacgggcagcggcatgtttcgtcgcgatactcgtcgctacgcggaggaagagcgcgacatgctgctcgacaaccatggtctctacgacctgaaaaagggcatctttctgagtgcggacagcgaagaagagattttcggtcatctggacctggattatctggagccgtgggaacgcaacgcg

SEQ ID NO: 5600 - protein, 394 aa, synthetic construct
  REGION 1..394: note = Variant of terminal deoxynucleotidyl transferase
MHHHHHHGGSGHPEGNTPEKEVPSVIARHVSPYACQRKTTLNNYNKKITDALEIMAENYKFKENLQACLEARRAASVLKSLPFEVTSMKDIQGLPCITDDVRPVIEEIIEVGESSRVKEILNDERYKAFKQFTSVFGVGVKTSEKWYRMGLRTREEAKASKSLKLNKMQKAGFLYYEDLASGVSKEEADAVLDIVKETVRMVSPDALVTIAGGFRRGKPMGHDVDLLITIPGRPTDDELLHKVVDLLKKQGLLLYGDIRERTFVEGQLPNPKPDALDNHQKCFAILKLYRPKVDNSAVGTSKKSDMAEVKDWKAVRVDLVVAPDEQFAYALLGWTGSGMFRRDTRRYAEEERDMLLDNHGLYDLKKGIFLSADSEEEIFGHLDLDYLEPWERNA

SEQ ID NO: 5601 - DNA, 1182 bp, synthetic construct
  misc_feature 1..1182: note = Variant of terminal deoxynucleotidyl transferase
  source 1..1182: mol_type = other DNA
atgcatcaccaccatcatcatgggggttctggtcatccggaaggtaataccccggagaaggaggtgccgagcgttatcgcccgtcatgttagtccgtacgcgtgccagcgcaagaccacgctgaataactacaacaaaaagatcaccgacgcgctggagatcatggccgagaactacaagtttaaagagaacctgcaggcgtgcctggaggcccgtcgcgccgcgagtgtcctgaaaagcctgccgttcgaggttaccagcatgaaagacatccaaggtctgccgtgcattaccgacgacgtacgtcctgtgatcgaagagatcatcgaagtaggcgagagcagccgtgttaaagaaatcctcaatgacgagcgctacaaggcctttaagcagttcaccagcgtgttcggtgtgggcgtcaagacctcggaaaagtggtaccgtatgggcctccgtacgcgcgaagaagcaaaggccagtaagagtctgaagctgaacaagatgcagaaggcgggcttcctgtattacgaggatctggcgagcggtgttagtaaagaagaagccgatgccgttctggatatcgtgaaggaaacggtgcgcactgttagtccggatgcgctggtgaccatcgccggcggtttccgccgtggcaaacctatgggccacgacgttgacctgctgatcacgattccgggccgtcctacggatgacgagctgctccacaaagtggttgatctgctcaagaagcaaggtctgctgctgtacggggacatccgtgagcgtacgttcgtggaggggcaactgccaaatcctaaacctgacgccctggacaaccatcagaagtgcttcgccattctcaagctgtaccgtccgaaggtggataacagtgcggttgggacgagtaagaaaagtgacatggctgaggttaaggattggaaagcggttcgtgtggatctggtggtcgctccagatgagcagttcgcctatgcgctgctcggttggacgggcagcggcatgtttcgtcgcgatactcgtcgctacgcggaggaagagcgcgacatgctgctcgacaaccatggtctctacgacctgaaaaagggcgagtttctgagtgcggacagcgaagaagagattttcggtcatctggacctggattatctggagccgtgggaacgcaacgcg

SEQ ID NO: 5602 - protein, 394 aa, synthetic construct
  REGION 1..394: note = Variant of terminal deoxynucleotidyl transferase
MHHHHHHGGSGHPEGNTPEKEVPSVIARHVSPYACQRKTTLNNYNKKITDALEIMAENYKFKENLQACLEARRAASVLKSLPFEVTSMKDIQGLPCITDDVRPVIEEIIEVGESSRVKEILNDERYKAFKQFTSVFGVGVKTSEKWYRMGLRTREEAKASKSLKLNKMQKAGFLYYEDLASGVSKEEADAVLDIVKETVRTVSPDALVTIAGGFRRGKPMGHDVDLLITIPGRPTDDELLHKVVDLLKKQGLLLYGDIRERTFVEGQLPNPKPDALDNHQKCFAILKLYRPKVDNSAVGTSKKSDMAEVKDWKAVRVDLVVAPDEQFAYALLGWTGSGMFRRDTRRYAEEERDMLLDNHGLYDLKKGEFLSADSEEEIFGHLDLDYLEPWERNA

SEQ ID NO: 5603 - DNA, 1182 bp, synthetic construct
  misc_feature 1..1182: note = Variant of terminal deoxynucleotidyl transferase
  source 1..1182: mol_type = other DNA
atgcatcaccaccatcatcatgggggttctggtcatccggaaggtaataccccggagaaggaggtgccgagcgttatcgcccgtcatgttagtccgtacgcgtgccagcgcaagaccacgctgaataactacaacaaaaagatcaccgacgcgctggagatcatggccgagaactacaagtttaaagagaacctgcaggcgtgcctggaggcccgtcgcgccgcgagtgtcctgaaaagcctgccgttcgaggttaccagcatgaaagacatccaaggtctgccgtgcattaccgacgacgtacgtcctgtgatcgaagagatcatcgaagtaggcgagagcagccgtgttaaagaaatcctcaatgacgagcgctacaaggcctttaagcagttcaccagcgtgttcggtgtgggcgtcaagacctcggaaaagtggtaccgtatgggcctccgtacgcgcgaagaagcaaaggccagtaagagtctgaagctgaacaagatgcagaaggcgggcttcctgtattacgaggatctggcgagcggtgttagtaaagaagaagccgatgccgttctggatatcgtgaaggaaacggtgcgcactgttagttgtgatgcgctggtgaccatcgccggcggtttccgccgtggcaaacctatgggccacgacgttgacctgctgatcacgattccgggccgtcctacggatgacgagctgctccacaaagtggttgatctgctcaagaagcaaggtctgctgctgtacggggacatccgtgagcgtacgttcgtggaggggcaactgccaaatcctaaacctgacgccctggacaaccatcagaagtgcttcgccattctcaagctgtaccgtccgaaggtggataacagtgcggttgggacgagtaagaaaagtgacatggctgaggttaaggattggaaagcggttcgtgtggatctggtggtcgctccagatgagcagttcgcctatgcgctgctcggttggacgggcagcggcatgtttcgtcgcgatactcgtcgctacgcggaggaagagcgcgacatgctgctcgacaaccatggtctctacgacctgaaaaagggcatctttctgagtgcggacagcgaagaagagattttcggtcatctggacctggattatctggagccgtgggaacgcaacgcg

SEQ ID NO: 5604 - protein, 394 aa, synthetic construct
  REGION 1..394: note = Variant of terminal deoxynucleotidyl transferase
MHHHHHHGGSGHPEGNTPEKEVPSVIARHVSPYACQRKTTLNNYNKKITDALEIMAENYKFKENLQACLEARRAASVLKSLPFEVTSMKDIQGLPCITDDVRPVIEEIIEVGESSRVKEILNDERYKAFKQFTSVFGVGVKTSEKWYRMGLRTREEAKASKSLKLNKMQKAGFLYYEDLASGVSKEEADAVLDIVKETVRTVSCDALVTIAGGFRRGKPMGHDVDLLITIPGRPTDDELLHKVVDLLKKQGLLLYGDIRERTFVEGQLPNPKPDALDNHQKCFAILKLYRPKVDNSAVGTSKKSDMAEVKDWKAVRVDLVVAPDEQFAYALLGWTGSGMFRRDTRRYAEEERDMLLDNHGLYDLKKGIFLSADSEEEIFGHLDLDYLEPWERNA

SEQ ID NO: 5605 - DNA, 1182 bp, synthetic construct
  misc_feature 1..1182: note = Variant of terminal deoxynucleotidyl transferase
  source 1..1182: mol_type = other DNA
atgcatcaccaccatcatcatgggggttctggtcatccggaaggtaataccccggagaaggaggtgccgagcgttatcgcccgtcatgttagtccgtacgcgtgccagcgcaagaccacgctgaataactacaacaaaaagatcaccgacgcgctggagatcatggccgagaactacaagtttaaagagaacctgcaggcgtgcctggaggcccgtcgcgccgcgagtgtcctgaaaagcctgccgttcgaggttaccagcatgaaagacatccaaggtctgccgtgcattaccgacgacgtacgtcctgtgatcgaagagatcatcgaagtaggcgagagcagccgtgttaaagaaatcctcaatgacgagcgctacaaggcctttaagcagttcaccagcgtgttcggtgtgggcgtcaagacctcggaaaagtggtaccgtatgggcctccgtacgcgcgaagaagcaaaggccagtaagagtctgaagctgaacaagatgcagaaggcgggcttcctgtattacgaggatctggcgagcggtgttagtaaagaagaagccgatgccgttctggatatcgtgaaggaaacggtgcgcactgttagtccggatgcgctggtgagtatcgccggcggtttccgccgtggcaaacctatgggccacgacgttgacctgctgatcacgattccgggccgtcctacggatgacgagctgctccacaaagtggttgatctgctcaagaagcaaggtctgctgctgtacggggacatccgtgagcgtacgttcgtggaggggcaactgccaaatcctaaacctgacgccctggacaaccatcagaagtgcttcgccattctcaagctgtaccgtccgaaggtggataacagtgcggttgggacgagtaagaaaagtgacatggctgaggttaaggattggaaagcggttcgtgtggatctggtggtcgctccagatgagcagttcgcctatgcgctgctcggttggacgggcagcggcatgtttcgtcgcgatactcgtcgctacgcggaggaagagcgcgacatgctgctcgacaaccatggtctctacgacctgaaaaagggcatctttctgagtgcggacagcgaagaagagattttcggtcatctggacctggattatctggagccgtgggaacgcaacgcg

SEQ ID NO: 5606 - protein, 394 aa, synthetic construct
  REGION 1..394: note = Variant of terminal deoxynucleotidyl transferase
MHHHHHHGGSGHPEGNTPEKEVPSVIARHVSPYACQRKTTLNNYNKKITDALEIMAENYKFKENLQACLEARRAASVLKSLPFEVTSMKDIQGLPCITDDVRPVIEEIIEVGESSRVKEILNDERYKAFKQFTSVFGVGVKTSEKWYRMGLRTREEAKASKSLKLNKMQKAGFLYYEDLASGVSKEEADAVLDIVKETVRTVSPDALVSIAGGFRRGKPMGHDVDLLITIPGRPTDDELLHKVVDLLKKQGLLLYGDIRERTFVEGQLPNPKPDALDNHQKCFAILKLYRPKVDNSAVGTSKKSDMAEVKDWKAVRVDLVVAPDEQFAYALLGWTGSGMFRRDTRRYAEEERDMLLDNHGLYDLKKGIFLSADSEEEIFGHLDLDYLEPWERNA

SEQ ID NO: 5607 - DNA, 1182 bp, synthetic construct
  misc_feature 1..1182: note = Variant of terminal deoxynucleotidyl transferase
  source 1..1182: mol_type = other DNA
atgcatcaccaccatcatcatgggggttctggtcatccggaaggtaataccccggagaaggaggtgccgagcgttatcgcccgtcatgttagtccgtacgcgtgccagcgcaagaccacgctgaataactacaacaaaaagatcaccgacgcgctggagatcatggccgagaactacaagtttaaagagaacctgcaggcgtgcctggaggcccgtcgcgccgcgagtgtcctgaaaagcctgccgttcgaggttaccagcatgaaagacatccaaggtctgccgtgcattaccgacgacgtacgtcctgtgatcgaagagatcatcgaagtaggcgagagcagccgtgttaaagaaatcctcaatgacgagcgctacaaggcctttaagcagttcaccagcgtgttcggtgtgggcgtcaagacctcggaaaagtggtaccgtatgggcctccgtacgcgcgaagaagcaaaggccagtaagagtctgaagctgaacaagatgcagaaggcgggcttcctgtattacgaggatctggcgagcggtgttagtaaagaagaagccgatgccgttctggatatcgtgaaggaaacggtgcgcactgttagtccggatgcgctggtgaccatcgccggcggtttccgccgtggcaaacctatgggccacgacgttgacctgctgatcacgattccgggccgtcctacggatgacgagctgctccacaaagtggttgatctgtttaagaagcaaggtctgctgctgtacggggacatccgtgagcgtacgttcgtggaggggcaactgccaaatcctaaacctgacgccctggacaaccatcagaagtgcttcgccattctcaagctgtaccgtccgaaggtggataacagtgcggttgggacgagtaagaaaagtgacatggctgaggttaaggattggaaagcggttcgtgtggatctggtggtcgctccagatgagcagttcgcctatgcgctgctcggttggacgggcagcggcatgtttcgtcgcgatactcgtcgctacgcggaggaagagcgcgacatgctgctcgacaaccatggtctctacgacctgaaaaagggcatctttctgagtgcggacagcgaagaagagattttcggtcatctggacctggattatctggagccgtgggaacgcaacgcg

SEQ ID NO: 5608 - protein, 394 aa, synthetic construct
  REGION 1..394: note = Variant of terminal deoxynucleotidyl transferase
MHHHHHHGGSGHPEGNTPEKEVPSVIARHVSPYACQRKTTLNNYNKKITDALEIMAENYKFKENLQACLEARRAASVLKSLPFEVTSMKDIQGLPCITDDVRPVIEEIIEVGESSRVKEILNDERYKAFKQFTSVFGVGVKTSEKWYRMGLRTREEAKASKSLKLNKMQKAGFLYYEDLASGVSKEEADAVLDIVKETVRTVSPDALVTIAGGFRRGKPMGHDVDLLITIPGRPTDDELLHKVVDLFKKQGLLLYGDIRERTFVEGQLPNPKPDALDNHQKCFAILKLYRPKVDNSAVGTSKKSDMAEVKDWKAVRVDLVVAPDEQFAYALLGWTGSGMFRRDTRRYAEEERDMLLDNHGLYDLKKGIFLSADSEEEIFGHLDLDYLEPWERNA

SEQ ID NO: 5609 - DNA, 1182 bp, synthetic construct
  misc_feature 1..1182: note = Variant of terminal deoxynucleotidyl transferase
  source 1..1182: mol_type = other DNA
atgcatcaccaccatcatcatgggggttctggtcatccggaaggtaataccccggagaaggaggtgccgagcgttatcgcccgtcatgttagtccgtacgcgtgccagcgcaagaccacgctgaataactacaacaaaaagatcaccgacgcgctggagatcatggccgagaactacaagtttaaagagaacctgcaggcgtgcctggaggcccgtcgcgccgcgagtgtcctgaaaagcctgccgttcgaggttaccagcatgaaagacatccaaggtctgccgtgcattaccgacgacgtacgtcctgtgatcgaagagatcatcgaagtaggcgagagcagccgtgttaaagaaatcctcaatgacgagcgctacaaggcctttaagcagttcaccagcgtgttcggtgtgggcgtcaagacctcggaaaagtggtaccgtatgggcctccgtacgcgcgaagaagcaaaggccagtaagagtctgaagctgaacaagatgcagaaggcgggcttcctgtattacgaggatctggcgagcggtgttagtaaagaagaagccgatgccgttctggatatcgtgaaggaaacggtgcgcactgttagtccggatgcgctggtgaccatcgccggcggtttccgccgtggcaaacctatgggccacgacgttgacctgctgatcacgattccgggccgtcctacggatgacgagctgctccacaaagtgtctgatctgctcaagaagcaaggtctgctgctgtacggggacatccgtgagcgtacgttcgtggaggggcaactgccaaatcctaaacctgacgccctggacaaccatcagaagtgcttcgccattctcaagctgtaccgtccgaaggtggataacagtgcggttgggacgagtaagaaaagtgacatggctgaggttaaggattggaaagcggttcgtgtggatctggtggtcgctccagatgagcagttcgcctatgcgctgctcggttggacgggcagcggcatgtttcgtcgcgatactcgtcgctacgcggaggaagagcgcgacatgctgctcgacaaccatggtctctacgacctgaaaaagggcatctttctgagtgcggacagcgaagaagagattttcggtcatctggacctggattatctggagccgtgggaacgcaacgcg

SEQ ID NO: 5610 - protein, 394 aa, synthetic construct
  REGION 1..394: note = Variant of terminal deoxynucleotidyl transferase
MHHHHHHGGSGHPEGNTPEKEVPSVIARHVSPYACQRKTTLNNYNKKITDALEIMAENYKFKENLQACLEARRAASVLKSLPFEVTSMKDIQGLPCITDDVRPVIEEIIEVGESSRVKEILNDERYKAFKQFTSVFGVGVKTSEKWYRMGLRTREEAKASKSLKLNKMQKAGFLYYEDLASGVSKEEADAVLDIVKETVRTVSPDALVTIAGGFRRGKPMGHDVDLLITIPGRPTDDELLHKVSDLLKKQGLLLYGDIRERTFVEGQLPNPKPDALDNHQKCFAILKLYRPKVDNSAVGTSKKSDMAEVKDWKAVRVDLVVAPDEQFAYALLGWTGSGMFRRDTRRYAEEERDMLLDNHGLYDLKKGIFLSADSEEEIFGHLDLDYLEPWERNA

SEQ ID NO: 5611 - DNA, 1182 bp, synthetic construct
  misc_feature 1..1182: note = Variant of terminal deoxynucleotidyl transferase
  source 1..1182: mol_type = other DNA
atgcatcaccaccatcatcatgggggttctggtcatccggaaggtaataccccggagaaggaggtgccgagcgttatcgcccgtcatgttagtccgtacgcgtgccagcgcaagaccacgctgaataactacaacaaaaagatcaccgacgcgctggagatcatggccgagaactacaagtttaaagagaacctgcaggcgtgcctggaggcccgtcgcgccgcgagtgtcctgaaaagcctgccgttcgaggttaccagcatgaaagacatccaaggtctgccgtgcattaccgacgacgtacgtcctgtgatcgaagagatcatcgaagtaggcgagagcagccgtgttaaagaaatcctcaatgacgagcgctacaaggcctttaagcagttcaccagcgtgttcggtgtgggcgtcaagacctcggaaaagtggtaccgtatgggcctccgtacgcgcgaagaagcaaaggccagtaagagtctgaagctgaacaagatgcagaaggcgggcttcctgtattacgaggatctggcgagcggtgttagtaaagaagaagccgatcaggttctggatatcgtgaaggaaacggtgcgcactgttagtccggatgcgctggtgaccatcgccggcggtttccgccgtggcaaacctatgggccacgacgttgacctgctgatcacgattccgggccgtcctacggatgacgagctgctccacaaagtggttgatctgctcaagaagcaaggtctgctgctgtacggggacatccgtgagcgtacgttcgtggaggggcaactgccaaatcctaaacctgacgccctggacaaccatcagaagtgcttcgccattctcaagctgtaccgtccgaaggtggataacagtgcggttgggacgagtaagaaaagtgacatggctgaggttaaggattggaaagcggttcgtgtggatctggtggtcgctccagatgagcagttcgcctatgcgctgctcggttggacgggcagcggcatgtttcgtcgcgatactcgtcgctacgcggaggaagagcgcgacatgctgctcgacaaccatggtctctacgacctgaaaaagggcatctttctgagtgcggacagcgaagaagagattttcggtcatctggacctggattatctggagccgtgggaacgcaacgcg

SEQ ID NO: 5612 - protein, 394 aa, synthetic construct
  REGION 1..394: note = Variant of terminal deoxynucleotidyl transferase
MHHHHHHGGSGHPEGNTPEKEVPSVIARHVSPYACQRKTTLNNYNKKITDALEIMAENYKFKENLQACLEARRAASVLKSLPFEVTSMKDIQGLPCITDDVRPVIEEIIEVGESSRVKEILNDERYKAFKQFTSVFGVGVKTSEKWYRMGLRTREEAKASKSLKLNKMQKAGFLYYEDLASGVSKEEADQVLDIVKETVRTVSPDALVTIAGGFRRGKPMGHDVDLLITIPGRPTDDELLHKVVDLLKKQGLLLYGDIRERTFVEGQLPNPKPDALDNHQKCFAILKLYRPKVDNSAVGTSKKSDMAEVKDWKAVRVDLVVAPDEQFAYALLGWTGSGMFRRDTRRYAEEERDMLLDNHGLYDLKKGIFLSADSEEEIFGHLDLDYLEPWERNA

SEQ ID NO: 5613 - DNA, 1182 bp, synthetic construct
  misc_feature 1..1182: note = Variant of terminal deoxynucleotidyl transferase
  source 1..1182: mol_type = other DNA
atgcatcaccaccatcatcatgggggttctggtcatccggaaggtaataccccggagaaggaggtgccgagcgttatcgcccgtcatgttagtccgtacgcgtgccagcgcaagaccacgctgaataactacaacaaaaagatcaccgacgcgctggagatcatggccgagaactacaagtttaaagagaacctgcaggcgtgcctggaggcccgtcgcgccgcgagtgtcctgaaaagcctgccgttcgaggttaccagcatgaaagacatccaaggtctgccgtgcattaccgacgacgtacgtcctgtgatcgaagagatcatcgaagtaggcgagagcagccgtgttaaagaaatcctcaatgacgagcgctacaaggcctttaagcagttcaccagcgtgttcggtgtgggcgtcaagacctcggaaaagtggtaccgtatgggcctccgtacgcgcgaagaagcaaaggccagtaagagtctgaagctgaacaagatgcagaaggcgggcttcctgtattacgaggatctggcgagcggtgttagtaaagaagaagccgatgccgttctggatatcgtgaaggaaacggtgcgcactgttagtccggatgcgctggtgaccatcgccggcggtttccgccgtggcaaacctatgggccacgacgttgacctgctgatcgttattccgggccgtcctacggatgacgagctgctccacaaagtggttgatctgctcaagaagcaaggtctgctgctgtacggggacatccgtgagcgtacgttcgtggaggggcaactgccaaatcctaaacctgacgccctggacaaccatcagaagtgcttcgccattctcaagctgtaccgtccgaaggtggataacagtgcggttgggacgagtaagaaaagtgacatggctgaggttaaggattggaaagcggttcgtgtggatctggtggtcgctccagatgagcagttcgcctatgcgctgctcggttggacgggcagcggcatgtttcgtcgcgatactcgtcgctacgcggaggaagagcgcgacatgctgctcgacaaccatggtctctacgacctgaaaaagggcatctttctgagtgcggacagcgaagaagagattttcggtcatctggacctggattatctggagccgtgggaacgcaacgcg

SEQ ID NO: 5614 - protein, 394 aa, synthetic construct
  REGION 1..394: note = Variant of terminal deoxynucleotidyl transferase
MHHHHHHGGSGHPEGNTPEKEVPSVIARHVSPYACQRKTTLNNYNKKITDALEIMAENYKFKENLQACLEARRAASVLKSLPFEVTSMKDIQGLPCITDDVRPVIEEIIEVGESSRVKEILNDERYKAFKQFTSVFGVGVKTSEKWYRMGLRTREEAKASKSLKLNKMQKAGFLYYEDLASGVSKEEADAVLDIVKETVRTVSPDALVTIAGGFRRGKPMGHDVDLLIVIPGRPTDDELLHKVVDLLKKQGLLLYGDIRERTFVEGQLPNPKPDALDNHQKCFAILKLYRPKVDNSAVGTSKKSDMAEVKDWKAVRVDLVVAPDEQFAYALLGWTGSGMFRRDTRRYAEEERDMLLDNHGLYDLKKGIFLSADSEEEIFGHLDLDYLEPWERNA

SEQ ID NO: 5615 - DNA, 1182 bp, synthetic construct
  misc_feature 1..1182: note = Variant of terminal deoxynucleotidyl transferase
  source 1..1182: mol_type = other DNA
atgcatcaccaccatcatcatgggggttctggtcatccggaaggtaataccccggagaaggaggtgccgagcgttatcgcccgtcatgttagtccgtacgcgtgccagcgcaagaccacgctgaataactacaacaaaaagatcaccgacgcgctggagatcatggccgagaactacaagtttaaagagaacctgcaggcgtgcctggaggcccgtcgcgccgcgagtgtcctgaaaagcctgccgttcgaggttaccagcatgaaagacatccaaggtctgccgtgcattaccgacgacgtacgtcctgtgatcgaagagatcatcgaagtaggcgagagcagccgtgttaaagaaatcctcaatgacgagcgctacaaggcctttaagcagttcaccagcgtgttcggtgtgggcgtcaagacctcggaaaagtggtaccgtatgggcctccgtacgcgcgaagaagcaaaggccagtaagagtctgaagctgaacaagatgcagaaggcgggcttcctgtattacgaggatctggcgagcggtgttagtaaagaagaagccgatgccgttctggatatcgtgaaggaaacggtgcgcactgttagtccggatgcgctggtgaccatcgccggcggtttccgccgtggcaaacctatgggccacgacgttgacctgctgatcacgattccgggccgtcctacgcgtgacgagctgctccacaaagtggttgatctgctcaagaagcaaggtctgctgctgtacggggacatccgtgagcgtacgttcgtggaggggcaactgccaaatcctaaacctgacgccctggacaaccatcagaagtgcttcgccattctcaagctgtaccgtccgaaggtggataacagtgcggttgggacgagtaagaaaagtgacatggctgaggttaaggattggaaagcggttcgtgtggatctggtggtcgctccagatgagcagttcgcctatgcgctgctcggttggacgggcagcggcatgtttcgtcgcgatactcgtcgctacgcggaggaagagcgcgacatgctgctcgacaaccatggtctctacgacctgaaaaagggcatctttctgagtgcggacagcgaagaagagattttcggtcatctggacctggattatctggagccgtgggaacgcaacgcg

SEQ ID NO: 5616 - protein, 394 aa, synthetic construct
  REGION 1..394: note = Variant of terminal deoxynucleotidyl transferase
MHHHHHHGGSGHPEGNTPEKEVPSVIARHVSPYACQRKTTLNNYNKKITDALEIMAENYKFKENLQACLEARRAASVLKSLPFEVTSMKDIQGLPCITDDVRPVIEEIIEVGESSRVKEILNDERYKAFKQFTSVFGVGVKTSEKWYRMGLRTREEAKASKSLKLNKMQKAGFLYYEDLASGVSKEEADAVLDIVKETVRTVSPDALVTIAGGFRRGKPMGHDVDLLITIPGRPTRDELLHKVVDLLKKQGLLLYGDIRERTFVEGQLPNPKPDALDNHQKCFAILKLYRPKVDNSAVGTSKKSDMAEVKDWKAVRVDLVVAPDEQFAYALLGWTGSGMFRRDTRRYAEEERDMLLDNHGLYDLKKGIFLSADSEEEIFGHLDLDYLEPWERNA

SEQ ID NO: 5617 - DNA, 1182 bp, synthetic construct
  misc_feature 1..1182: note = Variant of terminal deoxynucleotidyl transferase
  source 1..1182: mol_type = other DNA
atgcatcaccaccatcatcatgggggttctggtcatccggaaggtaataccccggagaaggaggtgccgagcgttatcgcccgtcatgttagtccgtacgcgtgccagcgcaagaccacgctgaataactacaacaaaaagatcaccgacgcgctggagatcatggccgagaactacaagtttaaagagaacctgcaggcgtgcctggaggcccgtcgcgccgcgagtgtcctgaaaagcctgccgttcgaggttaccagcatgaaagacatccaaggtctgccgtgcattaccgacgacgtacgtcctgtgatcgaagagatcatcgaagtaggcgagagcagccgtgttaaagaaatcctcaatgacgagcgctacaaggcctttaagcagttcaccagcgtgttcggtgtgggcgtcaagacctcggaaaagtggtaccgtatgggcctccgtacgcgcgaagaagcaaaggccagtaagagtctgaagctgaacaagatgcagaaggcgggcttcctgtattacgaggatctggcgagcggtgttagtaaagaagaagccgatgccgttctggatatcgtgaagagtacggtgcgcactgttagtccggatgcgctggtgaccatcgccggcggtttccgccgtggcaaacctatgggccacgacgttgacctgctgatcacgattccgggccgtcctacggatgacgagctgctccacaaagtggttgatctgctcaagaagcaaggtctgctgctgtacggggacatccgtgagcgtacgttcgtggaggggcaactgccaaatcctaaacctgacgccctggacaaccatcagaagtgcttcgccattctcaagctgtaccgtccgaaggtggataacagtgcggttgggacgagtaagaaaagtgacatggctgaggttaaggattggaaagcggttcgtgtggatctggtggtcgctccagatgagcagttcgcctatgcgctgctcggttggacgggcagcggcatgtttcgtcgcgatactcgtcgctacgcggaggaagagcgcgacatgctgctcgacaaccatggtctctacgacctgaaaaagggcatctttctgagtgcggacagcgaagaagagattttcggtcatctggacctggattatctggagccgtgggaacgcaacgcg

SEQ ID NO: 5618 - protein, 394 aa, synthetic construct
  REGION 1..394: note = Variant of terminal deoxynucleotidyl transferase
MHHHHHHGGSGHPEGNTPEKEVPSVIARHVSPYACQRKTTLNNYNKKITDALEIMAENYKFKENLQACLEARRAASVLKSLPFEVTSMKDIQGLPCITDDVRPVIEEIIEVGESSRVKEILNDERYKAFKQFTSVFGVGVKTSEKWYRMGLRTREEAKASKSLKLNKMQKAGFLYYEDLASGVSKEEADAVLDIVKSTVRTVSPDALVTIAGGFRRGKPMGHDVDLLITIPGRPTDDELLHKVVDLLKKQGLLLYGDIRERTFVEGQLPNPKPDALDNHQKCFAILKLYRPKVDNSAVGTSKKSDMAEVKDWKAVRVDLVVAPDEQFAYALLGWTGSGMFRRDTRRYAEEERDMLLDNHGLYDLKKGIFLSADSEEEIFGHLDLDYLEPWERNA

SEQ ID NO: 5619 - DNA, 1182 bp, synthetic construct
  misc_feature 1..1182: note = Variant of terminal deoxynucleotidyl transferase
  source 1..1182: mol_type = other DNA
atgcatcaccaccatcatcatgggggttctggtcatccggaaggtaataccccggagaaggaggtgccgagcgttatcgcccgtcatgttagtccgtacgcgtgccagcgcaagaccacgctgaataactacaacaaaaagatcaccgacgcgctggagatcatggccgagaactacaagtttaaagagaacctgcaggcgtgcctggaggcccgtcgcgccgcgagtgtcctgaaaagcctgccgttcgaggttaccagcatgaaagacatccaaggtctgccgtgcattaccgacgacgtacgtcctgtgatcgaagagatcatcgaagtaggcgagagcagccgtgttaaagaaatcctcaatgacgagcgctacaaggcctttaagcagttcaccagcgtgttcggtgtgggcgtcaagacctcggaaaagtggtaccgtatgggcctccgtacgcgcgaagaagcaaaggccagtaagagtctgaagctgaacaagatgcagaaggcgggcttcctgtattacgaggatctggcgagcggtgttagtaaagaagaagccgatgccgttctggatatcgtgaaggaaacggtgcgcactgttagtttggatgcgctggtgaccatcgccggcggtttccgccgtggcaaacctatgggccacgacgttgacctgctgatcacgattccgggccgtcctacggatgacgagctgctccacaaagtggttgatctgctcaagaagcaaggtctgctgctgtacggggacatccgtgagcgtacgttcgtggaggggcaactgccaaatcctaaacctgacgccctggacaaccatcagaagtgcttcgccattctcaagctgtaccgtccgaaggtggataacagtgcggttgggacgagtaagaaaagtgacatggctgaggttaaggattggaaagcggttcgtgtggatctggtggtcgctccagatgagcagttcgcctatgcgctgctcggttggacgggcagcggcatgtttcgtcgcgatactcgtcgctacgcggaggaagagcgcgacatgctgctcgacaaccatggtctctacgacctgaaaaagggcatctttctgagtgcggacagcgaagaagagattttcggtcatctggacctggattatctggagccgtgggaacgcaacgcg

SEQ ID NO: 5620 - protein, 394 aa, synthetic construct
  REGION 1..394: note = Variant of terminal deoxynucleotidyl transferase
MHHHHHHGGSGHPEGNTPEKEVPSVIARHVSPYACQRKTTLNNYNKKITDALEIMAENYKFKENLQACLEARRAASVLKSLPFEVTSMKDIQGLPCITDDVRPVIEEIIEVGESSRVKEILNDERYKAFKQFTSVFGVGVKTSEKWYRMGLRTREEAKASKSLKLNKMQKAGFLYYEDLASGVSKEEADAVLDIVKETVRTVSLDALVTIAGGFRRGKPMGHDVDLLITIPGRPTDDELLHKVVDLLKKQGLLLYGDIRERTFVEGQLPNPKPDALDNHQKCFAILKLYRPKVDNSAVGTSKKSDMAEVKDWKAVRVDLVVAPDEQFAYALLGWTGSGMFRRDTRRYAEEERDMLLDNHGLYDLKKGIFLSADSEEEIFGHLDLDYLEPWERNA

SEQ ID NO: 5621 - DNA, 1182 bp, synthetic construct
  misc_feature 1..1182: note = Variant of terminal deoxynucleotidyl transferase
  source 1..1182: mol_type = other DNA
atgcatcaccaccatcatcatgggggttctggtcatccggaaggtaataccccggagaaggaggtgccgagcgttatcgcccgtcatgttagtccgtacgcgtgccagcgcaagaccacgctgaataactacaacaaaaagatcaccgacgcgctggagatcatggccgagaactacaagtttaaagagaacctgcaggcgtgcctggaggcccgtcgcgccgcgagtgtcctgaaaagcctgccgttcgaggttaccagcatgaaagacatccaaggtctgccgtgcattaccgacgacgtacgtcctgtgatcgaagagatcatcgaagtaggcgagagcagccgtgttaaagaaatcctcaatgacgagcgctacaaggcctttaagcagttcaccagcgtgttcggtgtgggcgtcaagacctcggaaaagtggtaccgtatgggcctccgtacgcgcgaagaagcaaaggccagtaagagtctgaagctgaacaagatgcagaaggcgggcttcctgtattacgaggatctggcgagcggtgttagtaaagaagaagccgatgccgttctggatatcgtgaaggaaacggtgcgcactgttggtccggatgcgctggtgaccatcgccggcggtttccgccgtggcaaacctatgggccacgacgttgacctgctgatcacgattccgggccgtcctacggatgacgagctgctccacaaagtggttgatctgctcaagaagcaaggtctgctgctgtacggggacatccgtgagcgtacgttcgtggaggggcaactgccaaatcctaaacctgacgccctggacaaccatcagaagtgcttcgccattctcaagctgtaccgtccgaaggtggataacagtgcggttgggacgagtaagaaaagtgacatggctgaggttaaggattggaaagcggttcgtgtggatctggtggtcgctccagatgagcagttcgcctatgcgctgctcggttggacgggcagcggcatgtttcgtcgcgatactcgtcgctacgcggaggaagagcgcgacatgctgctcgacaaccatggtctctacgacctgaaaaagggcatctttctgagtgcggacagcgaagaagagattttcggtcatctggacctggattatctggagccgtgggaacgcaacgcg

SEQ ID NO: 5622 - protein, 394 aa, synthetic construct
  REGION 1..394: note = Variant of terminal deoxynucleotidyl transferase
MHHHHHHGGSGHPEGNTPEKEVPSVIARHVSPYACQRKTTLNNYNKKITDALEIMAENYKFKENLQACLEARRAASVLKSLPFEVTSMKDIQGLPCITDDVRPVIEEIIEVGESSRVKEILNDERYKAFKQFTSVFGVGVKTSEKWYRMGLRTREEAKASKSLKLNKMQKAGFLYYEDLASGVSKEEADAVLDIVKETVRTVGPDALVTIAGGFRRGKPMGHDVDLLITIPGRPTDDELLHKVVDLLKKQGLLLYGDIRERTFVEGQLPNPKPDALDNHQKCFAILKLYRPKVDNSAVGTSKKSDMAEVKDWKAVRVDLVVAPDEQFAYALLGWTGSGMFRRDTRRYAEEERDMLLDNHGLYDLKKGIFLSADSEEEIFGHLDLDYLEPWERNA

SEQ ID NO: 5623 - DNA, 1182 bp, synthetic construct
  misc_feature 1..1182: note = Variant of terminal deoxynucleotidyl transferase
  source 1..1182: mol_type = other DNA
atgcatcaccaccatcatcatgggggttctggtcatccggaaggtaataccccggagaaggaggtgccgagcgttatcgcccgtcatgttagtccgtacgcgtgccagcgcaagaccacgctgaataactacaacaaaaagatcaccgacgcgctggagatcatggccgagaactacaagtttaaagagaacctgcaggcgcgtctggaggcccgtcgcgccgcgagtgtcctgaaaagcctgccgttcgaggttaccagcatgaaagacatccaaggtctgccgtgcattaccgacgacgtacgtcctgtgatcgaagagatcatcgaagtaggcgagagcagccgtgttaaagaaatcctcaatgacgagcgctacaaggcctttaagcagttcaccagcgtgttcggtgtgggcgtcaagacctcggaaaagtggtaccgtatgggcctccgtacgcgcgaagaagcaaaggccagtaagagtctgaagctgaacaagatgcagaaggcgggcttcctgtattacgaggatctggcgagcggtgttagtaaagaagaagccgatgccgttctggatatcgtgaaggaaacggtgcgcactgttagtccggatgcgctggtgaccatcgccggcggtttccgccgtggcaaacctatgggccacgacgttgacctgctgatcacgattccgggccgtcctacggatgacgagctgctccacaaagtggttgatctgctcaagaagcaaggtctgctgctgtacggggacatccgtgagcgtacgttcgtggaggggcaactgccaaatcctaaacctgacgccctggacaaccatcagaagtgcttcgccattctcaagctgtaccgtccgaaggtggataacagtgcggttgggacgagtaagaaaagtgacatggctgaggttaaggattggaaagcggttcgtgtggatctggtggtcgctccagatgagcagttcgcctatgcgctgctcggttggacgggcagcggcatgtttcgtcgcgatactcgtcgctacgcggaggaagagcgcgacatgctgctcgacaaccatggtctctacgacctgaaaaagggcatctttctgagtgcggacagcgaagaagagattttcggtcatctggacctggattatctggagccgtgggaacgcaacgcg

SEQ ID NO: 5624 - protein, 394 aa, synthetic construct
  REGION 1..394: note = Variant of terminal deoxynucleotidyl transferase
MHHHHHHGGSGHPEGNTPEKEVPSVIARHVSPYACQRKTTLNNYNKKITDALEIMAENYKFKENLQARLEARRAASVLKSLPFEVTSMKDIQGLPCITDDVRPVIEEIIEVGESSRVKEILNDERYKAFKQFTSVFGVGVKTSEKWYRMGLRTREEAKASKSLKLNKMQKAGFLYYEDLASGVSKEEADAVLDIVKETVRTVSPDALVTIAGGFRRGKPMGHDVDLLITIPGRPTDDELLHKVVDLLKKQGLLLYGDIRERTFVEGQLPNPKPDALDNHQKCFAILKLYRPKVDNSAVGTSKKSDMAEVKDWKAVRVDLVVAPDEQFAYALLGWTGSGMFRRDTRRYAEEERDMLLDNHGLYDLKKGIFLSADSEEEIFGHLDLDYLEPWERNA

SEQ ID NO: 5625 - DNA, 1182 bp, synthetic construct
  misc_feature 1..1182: note = Variant of terminal deoxynucleotidyl transferase
  source 1..1182: mol_type = other DNA
atgcatcaccaccatcatcatgggggttctggtcatccggaaggtaataccccggagaaggaggtgccgagcgttatcgcccgtcatgttagtccgtacgcgtgccagcgcaagaccacgctgaataactacaacaaaaagatcaccgacgcgctggaaatcatggccgagaactacaagtttaaagagaacctgcaggcgcgcctggaggcccgtcgcgccgcgagtgtcctgaaaagcctgccgttcgaggttaccagcatgaaagacatccaaggtctgccgtgcattaccgacgacgtacgtcctgtgatcgaagagatcatcgaagtaggcgagagcagccgtgttaaagaaatcctcaatgacgagcgctacaaggcctttaagcagttcaccagcgtgttcggtgtgggcgtcaagacctcggaaaagtggtaccgtatgggcctccgtacgctggaagaagcaaaggccagtaagagtctgaagctgaacaagatgcagaaggcgggcttcctgtattacgaggatctggcgagcggtgttagtaaagaagaagccgatgccgttctggatatcgtgaaggaaacggtgcgcactgttagtccggatgcgctggtgaccatcgccggcggtttccgccgtggcaaacctcagggccacgacgttgacctgctgatcacgattccgggccgtcctacggatccggagctgctccacaaagtggttgatctgctcaagaagcaaggtctgctgctgtacggggacatccgtgagcgtacgttcgtggaggggcaactgccaaatcctaaacctgaccagctggacaaccatcagaagtgcttcgccattctcaagctgtaccgtccgaaggtggataacagtgcggttgggacgagtaagaaaagtgacatggctgaggttaaggattggaaagcggttcgtgtggatctggtggtcgctccagatgagcagttcgcctatgcgctgctcggttggacgggcagcggcatgtttcgtcgcgatactcgtcgctacgcggaggaagagcgcgacatgctgctcgacaaccatggtctctacgacctgaaaaagggcatctttctgagtgcggacagcgaagaagagattttcggtcatctggacctggattatctggagccgtgggaacgcaacgcg

SEQ ID NO: 5626 - protein, 394 aa, synthetic construct
  REGION 1..394: note = Variant of terminal deoxynucleotidyl transferase
MHHHHHHGGSGHPEGNTPEKEVPSVIARHVSPYACQRKTTLNNYNKKITDALEIMAENYKFKENLQARLEARRAASVLKSLPFEVTSMKDIQGLPCITDDVRPVIEEIIEVGESSRVKEILNDERYKAFKQFTSVFGVGVKTSEKWYRMGLRTLEEAKASKSLKLNKMQKAGFLYYEDLASGVSKEEADAVLDIVKETVRTVSPDALVTIAGGFRRGKPQGHDVDLLITIPGRPTDPELLHKVVDLLKKQGLLLYGDIRERTFVEGQLPNPKPDQLDNHQKCFAILKLYRPKVDNSAVGTSKKSDMAEVKDWKAVRVDLVVAPDEQFAYALLGWTGSGMFRRDTRRYAEEERDMLLDNHGLYDLKKGIFLSADSEEEIFGHLDLDYLEPWERNA

SEQ ID NO: 5627 - DNA, 1182 bp, synthetic construct
  misc_feature 1..1182: note = Variant of terminal deoxynucleotidyl transferase
  source 1..1182: mol_type = other DNA
atgcaccatcatcaccatcacgggggctccggccatccggaaggtaataccccggagaaggaggtgccgagcgttatcgcccgtcatgttagtccgtacgcgtgccagcgcaagaccacgctgaataactacaacaaaaagatcaccgacgcgctggaaatcatggccgagaactacaagtttaaagagaacctgcaggcgcgcctggaggcccgtcgcgccgcgagtgtcctgaaaagcctgccgttcgaggttaccagcatgaaagacatccaaggtctgccgtgcattaccgacgacgtacgtcctgtgatcgaagagatcatcgaagtaggcgagagcagccgtgttaaagaaatcctcaatgacgagcgctacaaggcctttaagcagttcaccagcgtgttcggtgtgggcgtcaagaccgcggaaaagtggtaccgtatgggcctccgtacgctggaagaagcaaaggccagtaagagtctgaagctgaacaagatgcagaaggcgggcttcctgtactacgaggatctggcgagcggtgttagtaaagaagaagccgatgccgttctggatatcgtgaaggaaacggtgcgcactgttagtccggatgcgctggtgaccatcgccggcggtttccgccgtggcaaacctcagggccacgacgttgacctgctgatcacgattccgggccgtcctacggatccggagctgctccacaaagtggttgatctgctcaagaagcaaggtctgctgctgtacggggacatccgtgagcgtacgttcgtggaggggcaactgccaaatcctaaacctgaccagctggacaaccatcagaagtgcttcgccattctcaagctgtaccgtccgaaggtggataacagtgcggttgggacgtcgaagaaagtcgacatggctgaggttaaggattggaaagcggttcgtgtggatctggtggtcgctccagatgagcagttcgcctatgcgctgctcggttggacgggcagcggcatgtttcgtcgcgatactcgtcgctacgcggaggaagagcgcgacatgctgctcgacaaccatggtctctacgacctgaaaaagggcatctttctgagtgcggacagcgaagaagagattttcggtcatctggacctggattatctggagccgtgggaacgcaacgcg

SEQ ID NO: 5628 - protein, 394 aa, synthetic construct
  REGION 1..394: note = Variant of terminal deoxynucleotidyl transferase
MHHHHHHGGSGHPEGNTPEKEVPSVIARHVSPYACQRKTTLNNYNKKITDALEIMAENYKFKENLQARLEARRAASVLKSLPFEVTSMKDIQGLPCITDDVRPVIEEIIEVGESSRVKEILNDERYKAFKQFTSVFGVGVKTAEKWYRMGLRTLEEAKASKSLKLNKMQKAGFLYYEDLASGVSKEEADAVLDIVKETVRTVSPDALVTIAGGFRRGKPQGHDVDLLITIPGRPTDPELLHKVVDLLKKQGLLLYGDIRERTFVEGQLPNPKPDQLDNHQKCFAILKLYRPKVDNSAVGTSKKVDMAEVKDWKAVRVDLVVAPDEQFAYALLGWTGSGMFRRDTRRYAEEERDMLLDNHGLYDLKKGIFLSADSEEEIFGHLDLDYLEPWERNA

SEQ ID NO: 5629 - DNA, 1182 bp, synthetic construct
  misc_feature 1..1182: note = Variant of terminal deoxynucleotidyl transferase
  source 1..1182: mol_type = other DNA
atgcaccatcatcaccatcacgggggctccggccatccggaaggtaataccccggagaaggaggtgccgagcgttatcgcccgtcatgttagtccgtacgcgtgccagcgcaagaccacgctgaataactacaacaaaaagatcaccgacgcgctggaaatcatggccgagaactacaagtttaaagagaacctgcaggcgcgcctggaggcccgtcgcgccgcgagtgtcctgaaaagcctgccgttcgaggttaccagcatgaaagacatccaaggtctgccgtgcattaccgacgacgtacgtcctgtgatcgaagagatcatcgaagtaggcgagagcagccgtgttaaagaaatcctcaatgacgagcgctacaaggcctttaagcagttcaccagcgtgttcggtgtgggcgtcaagaccgcggaaaagtggtaccgtatgggcctccgtacgctggaagaagtaaaggccagtaagttcctgaagctgaacaagatgcagaaggcgggcttcctgtactacgaggatctggcgagcggtgttagtaaagaagaagccgatgccgttctggatatcgtgaaggaaacggtgcgcactgttagtccggatgcgctggtgaccatcgccggcggtttccgccgtggcaaacctcagggccacgacgttgacctgctgatcacgattccgggccgtcctacggatccggagctgctccacaaagtggttgatctgctcaagaagcaaggtctgctgctgtacggggacatccgtgagcgtacgttcgtggaggggcaactgccaaatcctaaacctgaccagctggacaatcatcagaagtgcttcgccattctcaagctgtaccgtccgaaggtggataacagtgcggttgggacgtcgaagaaagtcgacatggctgaggttaaggattggaaagcggttcgtgtggatctggtggtcgctccagatgagcagttcgcctatgcgaaactcggttggacgggcagcggcatgtttcgtcgcgatactcgtcgctacgcggaggaagagcgcgacatgctgctcgacaaccatggtctctacgacctgaaaaagggcatctttctgagtgcggacagcgaagaagagattttcggtcatctggacctggattatctggagccgtgggaacgcaacgcg

SEQ ID NO: 5630 - protein, 394 aa, synthetic construct
  REGION 1..394: note = Variant of terminal deoxynucleotidyl transferase
MHHHHHHGGSGHPEGNTPEKEVPSVIARHVSPYACQRKTTLNNYNKKITDALEIMAENYKFKENLQARLEARRAASVLKSLPFEVTSMKDIQGLPCITDDVRPVIEEIIEVGESSRVKEILNDERYKAFKQFTSVFGVGVKTAEKWYRMGLRTLEEVKASKFLKLNKMQKAGFLYYEDLASGVSKEEADAVLDIVKETVRTVSPDALVTIAGGFRRGKPQGHDVDLLITIPGRPTDPELLHKVVDLLKKQGLLLYGDIRERTFVEGQLPNPKPDQLDNHQKCFAILKLYRPKVDNSAVGTSKKVDMAEVKDWKAVRVDLVVAPDEQFAYAKLGWTGSGMFRRDTRRYAEEERDMLLDNHGLYDLKKGIFLSADSEEEIFGHLDLDYLEPWERNA

SEQ ID NO: 5631 - DNA, 1182 bp, synthetic construct
  misc_feature 1..1182: note = Variant of terminal deoxynucleotidyl transferase
  source 1..1182: mol_type = other DNA
atgcaccatcatcaccatcacgggggctccggccatccggaaggtaataccccggagaaggaggtgccgagcgttatcgcccgtcatgttagtccgtacgcgtgccagcgcaagaccacgctgaataactacaacaaaaagatcaccgacgcgctggagatcatggccgagaactacaagtttaaagagaacctgcaggcgcgcctggaggcccgtcgcgccgcgagtgtcctgaaaagcctgccgttcgaggttaccagcatgaaagacatccaaggtctgccgtgcattaccgacgacgtacgtcctgtgatcgaagagatcatcgaagtaggcgagagcagccgtgttaaagaaatcctcaatgacgagcgctacaaggcctttaagcagttcaccagcgtgttcggtgtgggcgtcaagaccgcggaaaagtggtaccgtatgggcctccgtacgctggaagaagtaaaggccagtaagttcctgaagctgaacaagatgcagaaggcgggcttcctgtactacgaggatctggcgagcggtgttacgaaagaagaaaaagatgccgttctggatatcgtgaaggaaacggtgtggactgttgatccggatgcgctggtgaccatcgtgggcggtttccgccgtggcaaacctcagggccacgacgttgacctgctgatcacgattccgggccgtcctacggatccggagctgctccacaacgtggttgatctgctcaagaagcaaggtctgctgctgtacggggacatccgtgagcgtacgttcgtggaggggcaactgccaaatcctaaacctgaccagctggacaatcatcagaagtgcttcgccattctcaagctgtaccgcccgaaggtggataacagtgcggttgggacgtcgaagaaagtcgacatggctgaggttaaggattggaaagcggttcgtgtggatctggtggtcgctccagatgagcagttcgcctatgcgaaactcggttggacgggcagcggcatgtttcgtcgcgatactcgtcgctacgcggaggaagagcgcgacatgctgctcgacaaccatggtctctacgacctgaaaaagggcatttttctgagtgcggacagcgaagaagagattttcggtcatctggacctggattatctggagccgtgggaacgcaacgcg

SEQ ID NO: 5632 - protein, 394 aa, synthetic construct
  REGION 1..394: note = Variant of terminal deoxynucleotidyl transferase
MHHHHHHGGSGHPEGNTPEKEVPSVIARHVSPYACQRKTTLNNYNKKITDALEIMAENYKFKENLQARLEARRAASVLKSLPFEVTSMKDIQGLPCITDDVRPVIEEIIEVGESSRVKEILNDERYKAFKQFTSVFGVGVKTAEKWYRMGLRTLEEVKASKFLKLNKMQKAGFLYYEDLASGVTKEEKDAVLDIVKETVWTVDPDALVTIVGGFRRGKPQGHDVDLLITIPGRPTDPELLHNVVDLLKKQGLLLYGDIRERTFVEGQLPNPKPDQLDNHQKCFAILKLYRPKVDNSAVGTSKKVDMAEVKDWKAVRVDLVVAPDEQFAYAKLGWTGSGMFRRDTRRYAEEERDMLLDNHGLYDLKKGIFLSADSEEEIFGHLDLDYLEPWERNA

SEQ ID NO: 5633 - DNA, 1182 bp, synthetic construct
  misc_feature 1..1182: note = Variant of terminal deoxynucleotidyl transferase
  source 1..1182: mol_type = other DNA
atgcaccatcatcaccatcacgggggctccggccatccggaaggtaataccccggagaaggaggtgccgagcgttatcgcccgtcatgttagtccgtacgcgtgccagcgcaagaccacgctgaataactacaacaaaaagatcaccgacgcgctggagatcatggccgagaactacaagtttaaagagaacctgcaggcgcgcctggaggcccgtcgcgccgcgagtgtcctgaaaagcctgccgttcgaggttaccagcatgaaagacatccaaggtctgccgtgcattaccgacgacgtacgtcctgtgatcgaagagatcatcgaagtaggcgagagcagccgtgttaaagaaatcctcaatgacgagcgctacaaggcctttaagcagttcaccagcgtgttcggtgtgggcgtcaagaccgcggaaaagtggtaccgtatgggcctccgtacgctggaagaagtaaaggccagtaagttcctgaagctgaacaagatgcagaaggcgggcttcctgtactacgaggatctggcgagcggtgttacgaaagaagaaaaagatgccgttctggatatcgtgaaggaaacggtgtggactgttgatccggatgcgctggtgaccatcgtgggcggtttccgccgtggcaaacctcagggccacgacgttgacctgctgatcacgattccgggccgtcctacggatccggagctgctccacaacgtggttgatctgctcaagaagcaaggtctgctgctgtacggggacatccgtgagcgtacgttcgtggaggggcaactgccaaatcctgcgcctgaccagctggacaatcatcagaagtgcttcgccattctcaagctgtaccgcccgaaggtggataacagtgcggttgggacgtcgaagaaagtcgacatggctgaggttaaggattggaaagcggttcgtgtggatctggtggtcgctccagatgagcagttcgcctatgcgaaactcggttggacgggcagcggcatgtttcgtcgcgatactcgtcgctacgcggaggaagagcgcgacatgctgctcgacaaccatggtctctacgacctgaaaaagggcatttttctgagtgcggacagcgaagaagagattttcggtcatctggacctggattatctggagccgtgggaacgcaacgcg

SEQ ID NO: 5634 - protein, 394 aa, synthetic construct
  REGION 1..394: note = Variant of terminal deoxynucleotidyl transferase
MHHHHHHGGSGHPEGNTPEKEVPSVIARHVSPYACQRKTTLNNYNKKITDALEIMAENYKFKENLQARLEARRAASVLKSLPFEVTSMKDIQGLPCITDDVRPVIEEIIEVGESSRVKEILNDERYKAFKQFTSVFGVGVKTAEKWYRMGLRTLEEVKASKFLKLNKMQKAGFLYYEDLASGVTKEEKDAVLDIVKETVWTVDPDALVTIVGGFRRGKPQGHDVDLLITIPGRPTDPELLHNVVDLLKKQGLLLYGDIRERTFVEGQLPNPAPDQLDNHQKCFAILKLYRPKVDNSAVGTSKKVDMAEVKDWKAVRVDLVVAPDEQFAYAKLGWTGSGMFRRDTRRYAEEERDMLLDNHGLYDLKKGIFLSADSEEEIFGHLDLDYLEPWERNA

SEQ ID NO: 5635 - DNA, 1182 bp, synthetic construct
  misc_feature 1..1182: note = Variant of terminal deoxynucleotidyl transferase
  source 1..1182: mol_type = other DNA
atgcaccatcatcaccatcacgggggctccggccatccggaaggtaataccccggagaaggaggtgccgagcgttatcgcccgtcatgttagtccgtacgcgtgccagcgcaagaccacgctgaataactacaacaaaaagatcaccgacgcgctggagatcatggccgagaactacaagtttaaagagaacctgcaggcgcgcctggaggcccgtcgcgccgcgagtgtcctgaaaagcctgccgttcgaggttaccagcatgaaagacatccaaggtctgccgtgcattaccgacgacgtacgtcctgtgatcgaagagatcatcgaagtaggcgagagcagccgtgttaaagaaatcctcaatgacgagcgctacaaggcctttaagcagttcaccagcgtgttcggtgtgggcgtcaagaccgcggaaaagtggtaccgtatgggcctccgtacgctggaagaagtaaaggccagtaagttcctgaagctgaacaagatgcagaaggcgggcttcctgtactacgaggatctggcgagcggtgttacgaaagaagaaaaagatgccgttctggatatcgtgaaggaaacggtgtggactgttgatccggatgcgctggtgaccatcgtgggcggtttccgccgtcgcaaaccacagggccacgacgttgacctgctgatcacgattccgggccgtcctacggatccggagctgctccacaacgtggttgatctgctcaagaagcaaggtctgctgctgtacggggacatccgtgagcgtacgttcgtggaggggcaactgccaaatcctgcgccggaccagctggacggccatcagaagtgcttcgccattctcaagctgtaccgcccgaaggtggataacagtgcggttgggacgtcgaagaaagtcgacatggctgaggttaaggattggaaagcggttcgtgtggatctggtggtcgctccagatgagcagttcgcctatgcgaaactcggttggacgggcagcggcatgtttcgtcgcgatactcgtcgctacgcggaggaagagcgcgacatgctgctcgacaaccatggtctctacgacctgaaaaagggcatttttctgagtgcggacagcgaagaagagattttcggtcatctggacctggattatctggagccgtggtatcgcaacgcg

SEQ ID NO: 5636 - protein, 394 aa, synthetic construct
  REGION 1..394: note = Variant of terminal deoxynucleotidyl transferase
MHHHHHHGGSGHPEGNTPEKEVPSVIARHVSPYACQRKTTLNNYNKKITDALEIMAENYKFKENLQARLEARRAASVLKSLPFEVTSMKDIQGLPCITDDVRPVIEEIIEVGESSRVKEILNDERYKAFKQFTSVFGVGVKTAEKWYRMGLRTLEEVKASKFLKLNKMQKAGFLYYEDLASGVTKEEKDAVLDIVKETVWTVDPDALVTIVGGFRRRKPQGHDVDLLITIPGRPTDPELLHNVVDLLKKQGLLLYGDIRERTFVEGQLPNPAPDQLDGHQKCFAILKLYRPKVDNSAVGTSKKVDMAEVKDWKAVRVDLVVAPDEQFAYAKLGWTGSGMFRRDTRRYAEEERDMLLDNHGLYDLKKGIFLSADSEEEIFGHLDLDYLEPWYRNA

SEQ ID NO: 5637 - DNA, 1182 bp, synthetic construct
  misc_feature 1..1182: note = Variant of terminal deoxynucleotidyl transferase
  source 1..1182: mol_type = other DNA
atgcaccatcatcaccatcacgggggctccggccatccggaaggtaataccccggagaaggaggtgccgagcgttatcgcccgtcatgttagtccgtacgcgtgccagcgcaagaccacgctgaataactacaacaaaaagatcaccgacgcgctggagatcatggccgagaactacaagtttaaagagaacctgcaggcgcgcctggaggcccgtcgcgccgcgagtgtcctgaaaagcctgccgttcgaggttaccagcatgaaagacatccaaggtctgccgtgcattaccgacgacgtacgtcctgtgatcgaagagatcatcgaagtaggcgagagcagccgtgttaaagaaatcctcaatgacgagcgctacaaggcgtttaagcagttcaccagcgtgttcggtgtgggcgtcaagaccgcggaaaagtggtaccgtatgggcctccgtacgctggaagaagtaaagcgtagtaagttcctgaagctgaacaagatgcagaaggcgggcttcctgtactacgaggatctggcgagcggtgttacgaaagaagaaaaagatgccgttctggatatcgtgaaggaaacggtgtggactgttgatccggatgcgctggtggaaatcgtgggcggtttccgccgtcgcaaaccacagggccacgacgttgacctgctgatcacgattccgggccgtcctacggatccggagctgctccacaacgtggttgatctgctcaagaagcaaggtctgctgctgtacggggacatccgtgagcgtacgttcgtggaggggcaactgccaaatcctgcgccggaccagctggacggccatcagaagtgcttcgccattctcaagctgtaccgcccgaaggtggataacagtgcggttgggacgtcgaagaaagtcgacatggctgaggttaaggattggaaagcggttcgtgtggatctggtggtcgctccagatgagcagttcgcctatgcgaaactcggttggacgggcagcggcatgtttcgtcgcgatactcgtcgctacgcggaggaagagaaaaatatgctgctcgacaaccatggtctctacgacctgaaaaagggcatttttctgagtgcggacagcgaagaagagattttcggtcatctggacctggattatctggagccgtggtatcgcaacgcg

SEQ ID NO: 5638 - protein, 394 aa, synthetic construct
  REGION 1..394: note = Variant of terminal deoxynucleotidyl transferase
MHHHHHHGGSGHPEGNTPEKEVPSVIARHVSPYACQRKTTLNNYNKKITDALEIMAENYKFKENLQARLEARRAASVLKSLPFEVTSMKDIQGLPCITDDVRPVIEEIIEVGESSRVKEILNDERYKAFKQFTSVFGVGVKTAEKWYRMGLRTLEEVKRSKFLKLNKMQKAGFLYYEDLASGVTKEEKDAVLDIVKETVWTVDPDALVEIVGGFRRRKPQGHDVDLLITIPGRPTDPELLHNVVDLLKKQGLLLYGDIRERTFVEGQLPNPAPDQLDGHQKCFAILKLYRPKVDNSAVGTSKKVDMAEVKDWKAVRVDLVVAPDEQFAYAKLGWTGSGMFRRDTRRYAEEEKNMLLDNHGLYDLKKGIFLSADSEEEIFGHLDLDYLEPWYRNA

SEQ ID NO: 5639 - DNA, 1182 bp, synthetic construct
  misc_feature 1..1182: note = Variant of terminal deoxynucleotidyl transferase
  source 1..1182: mol_type = other DNA
atgcaccatcatcaccatcacgggggctccggccatccggaaggtaataccccggagaaggaggtgccgagcgttattgcccgtcatgttagtccgtacgcgtgccagcgcaagaccacgctgaataactacaacaaaaagatcaccgacgcgctggaaatcatggccgagaactacaagtttaaagagaacctgcaggcgcgcctggaggcccgtcgcgccgcgagtgtcctgaaaagcctgccgttcgaggttaccagcatgaaagacatccaaggtctgccgtgcattaccgacgacgtacgtcctgtgatcgaagagatcatcgaagtaggcgagagcagccgtgttaaagaaatcctcaatgacgagcgctacaaggcctttaagcagttcaccagcgtgttcggtgtgggcgtcaagaccgcggaaaagtggtaccgtatgggcctccgtacgctggaagaagcaaaggccagtaagagtctgaagctgaacaagatgcagaaggcgggcttcctgtactacgaggatctggcgagcggtgttagtaaagaagaagccgatgccgttctggatatcgtgaaggaaacggtgtggactgttagtccggatgcgctggtgaccatcgccggcggtttccgccgtggcaaacctcagggccacgacgttgacctgctgatcaccattccgggccgtcctacggatccggagctgctccacaaagtggttgatctgctcaagaagcaaggtctgctgctgtacggggacatccgtgagcgtacgttcgtggaggggcaactgccaaatcctaaacctgaccagctggacaaccatcagaagtgcttcgccattctcaagctgtaccgcccgaaggtggataacagtgcggttgggacgtcgaagaaagtcgacatggctgaggttaaggattggaaagcggttcgtgtggatctggtggtcgctccagatgagcagttcgcctatgcgctgctcggttggacgggcagcggcatgtttcgtcgcgatactcgtcgctacgcggaggaagagcgcgacatgctgctcgacaaccatggtctctacgacctgaaaaagggcatctttctgagtgcggacagcgaagaagagattttcggtcatctggacctggattatctggagccgtgggaacgcaacgcg

SEQ ID NO: 5640 - protein, 394 aa, synthetic construct
  REGION 1..394: note = Variant of terminal deoxynucleotidyl transferase
MHHHHHHGGSGHPEGNTPEKEVPSVIARHVSPYACQRKTTLNNYNKKITDALEIMAENYKFKENLQARLEARRAASVLKSLPFEVTSMKDIQGLPCITDDVRPVIEEIIEVGESSRVKEILNDERYKAFKQFTSVFGVGVKTAEKWYRMGLRTLEEAKASKSLKLNKMQKAGFLYYEDLASGVSKEEADAVLDIVKETVWTVSPDALVTIAGGFRRGKPQGHDVDLLITIPGRPTDPELLHKVVDLLKKQGLLLYGDIRERTFVEGQLPNPKPDQLDNHQKCFAILKLYRPKVDNSAVGTSKKVDMAEVKDWKAVRVDLVVAPDEQFAYALLGWTGSGMFRRDTRRYAEEERDMLLDNHGLYDLKKGIFLSADSEEEIFGHLDLDYLEPWERNA

SEQ ID NO: 5641 - DNA, 1182 bp, synthetic construct
  misc_feature 1..1182: note = Variant of terminal deoxynucleotidyl transferase
  source 1..1182: mol_type = other DNA
atgcaccatcatcaccatcacgggggctccggccatccggaaggtaataccccggagaaggaggtgccgagcgttattgcccgtcatgttagtccgtacgcgtgccagcgcaagaccacgctgaataactacaacaaaaagatcaccgacgcgctggaaatcatggccgagaactaccgttttaaagagaacctgcaggcgcgcctggaggcccgtcgcgccgcgagtgtcctgaaaagcctgccgttcgaggttaccagcatgaaagacatccaaggtctgccgtgcattaccgacgacgtacgtcctgtgatcgaagagatcatcgaagtaggcgagagcagccgtgttaaagaaatcctcaatgacgagcgctacaaggcctttaagcagttcaccagcgtgttcggtgtgggcgtcaagaccgcggaaaagtggtaccgtatgggcctccgtacgctggaagaagcaaaggccagtaagagtctgaagctgaacaagatgcagaaggcgggcttcctgtactacgaggatctggcgagcggtgttagtaaagaagaagccgatgccgttctggatatcgtgaaggaaacggtgtggactgttgacccggatgcgctggtgaccatcgccggcggtttccgccgtggcaaacctcagggccacgacgttgacctgctgatcacgattccgggccgtcctacggatccggagctgctccacaaagtggttgatctgctcaagaagcaaggtctgctgctgtacggggacatccgtgagcgtacgttcgtggaggggcaactgccaaatcctaaacctgaccagctggacaaccatcagaagtgcttcgccattctcaagctgtacaatccgaaggtggataacagtgcggttgggacgtcgaagaaagtcgacatggctgaggttaaggattggaaagcggttcgtgtggatctggtggtcgctccagatgagcagttcgcctatgcgctgctcggttggacgggcagcggcatgtttcgtcgcgatactcgtcgctacgcggaggaagagcgcgacatgctgctcgacaaccatggcctctacgacctgaaaaagggcatctttctgagtgcggacagcgaagaagagattttcggtcatctggacctggattatctggagccgtgggaacgcaacgcg

SEQ ID NO: 5642 - protein, 394 aa, synthetic construct
  REGION 1..394: note = Variant of terminal deoxynucleotidyl transferase
MHHHHHHGGSGHPEGNTPEKEVPSVIARHVSPYACQRKTTLNNYNKKITDALEIMAENYRFKENLQARLEARRAASVLKSLPFEVTSMKDIQGLPCITDDVRPVIEEIIEVGESSRVKEILNDERYKAFKQFTSVFGVGVKTAEKWYRMGLRTLEEAKASKSLKLNKMQKAGFLYYEDLASGVSKEEADAVLDIVKETVWTVDPDALVTIAGGFRRGKPQGHDVDLLITIPGRPTDPELLHKVVDLLKKQGLLLYGDIRERTFVEGQLPNPKPDQLDNHQKCFAILKLYNPKVDNSAVGTSKKVDMAEVKDWKAVRVDLVVAPDEQFAYALLGWTGSGMFRRDTRRYAEEERDMLLDNHGLYDLKKGIFLSADSEEEIFGHLDLDYLEPWERNA

SEQ ID NO: 5643 - DNA, 1182 bp, synthetic construct
  misc_feature 1..1182: note = Variant of terminal deoxynucleotidyl transferase
  source 1..1182: mol_type = other DNA
atgcaccatcatcaccatcacgggggctccggccatccggaaggtaataccccggagaaggaggtgccgagcgttattgcccgtcatgttagtccgtacgcgtgccagcgcaagaccacgctgaataactacaacaaaaagatcaccgacgcgctggaaatcatggccgagaactacaagtttaaagagaacctgcaggcgcgcctggaggcccgtcgcgccgcgagtgtcctgaaaagcctgccgttcgaggttaccagcatgaaagacatccaaggtctgccgtgcattaccgacgacgtacgtcctgtgatcgaagagatcatcgaagtaggcgagagcagccgtgttaaagaaatcctcaatgacgagcgctacaaggcctttaagcagttcaccagcgtgttcggtgtgggcgtcaagaccgcggaaaagtggtaccgtatgggcctccgtacgctggaagaagcaaaggccagtaagagtctgaagctgaacaagatgcagaaggcgggcttcctgtactacgaggatctggcgagcggtgttagtaaagaagaagccgatgccgttctggatatcgtgaaggaaacggtgtggactgttagtccggatccgctggtgaccatcgccggcggtttccgccgtggcaaacctcagggccacgacgttgacctgctgatcacgattccgggccgtcctacggatccggagctgctccacaaagtggttgatctgctcaagaagcaaggtctgctgctgtacggggacatccgtgagcgtacgttcgtggaggggcaactgccaaatcctaaacctgaccagctggacaaccatcagaagtgcttcgccattctcaagctgtaccgcccgaaggtggataacagtgcggttgggacgtcgaagaaagtcgacatggctgaggttaaggattggaaagcggttcgtgtggatctggtggtcgctccagatgagcagttcgcctatgcgctgctcggttggacgggcagcggcatgtttcgtcgcgatactcgtcgctacgcggaggaagagcgcgacatgctgctcgacaaccatggtctctacgacctgaaaaagggcatctttctgagtgcggacagcgaagaagagattttcggtcatctggacctggattatctggagccgtgggaacgcaacgcg

SEQ ID NO: 5644 - protein, 394 aa, synthetic construct
  REGION 1..394: note = Variant of terminal deoxynucleotidyl transferase
MHHHHHHGGSGHPEGNTPEKEVPSVIARHVSPYACQRKTTLNNYNKKITDALEIMAENYKFKENLQARLEARRAASVLKSLPFEVTSMKDIQGLPCITDDVRPVIEEIIEVGESSRVKEILNDERYKAFKQFTSVFGVGVKTAEKWYRMGLRTLEEAKASKSLKLNKMQKAGFLYYEDLASGVSKEEADAVLDIVKETVWTVSPDPLVTIAGGFRRGKPQGHDVDLLITIPGRPTDPELLHKVVDLLKKQGLLLYGDIRERTFVEGQLPNPKPDQLDNHQKCFAILKLYRPKVDNSAVGTSKKVDMAEVKDWKAVRVDLVVAPDEQFAYALLGWTGSGMFRRDTRRYAEEERDMLLDNHGLYDLKKGIFLSADSEEEIFGHLDLDYLEPWERNA

SEQ ID NO: 5645 - DNA, 1182 bp, synthetic construct
  misc_feature 1..1182: note = Variant of terminal deoxynucleotidyl transferase
  source 1..1182: mol_type = other DNA
atgcaccatcatcaccatcacgggggctccggccatccggaaggtaataccccggagaaggaggtgccgagcgttattgcccgtcatgttagtccgtacgcgtgccagcgcaagaccacgctgaataactacaacaaaaagatcaccgacgcgctggaaatcatggccgagaactacaagtttaaagagaacctgcaggcgcgcctggaggcccgtcgcgccgcgagtgtcctgaaaagcctgccgttcgaggttaccagcatgaaagacatccaaggtctgccgtgcattaccgacgacgtacgtcctgtgatcgaagagatcatcgaagtaggcgagagcagccgtgttaaagaaatcctcaatgacgagcgctacaaggcctttaagcagttcaccagcgtgttcggtgtgggcgtcaagaccgcggaaaagtggtaccgtatgggcctccgtacgctggaagaagcaaaggccagtaagagtctgaagctgaacaagatgcagaaggcgggcttcctgtactacgaggatctggcgagcggtgttagtaaagaagaagccgatgccgttctggatatcgtgaaggaaacggtgtggactgttgacccggatgcgctggtgaccatcgccggcggtttccgccgtggcaaacctcagggccacgacgttgacctgctgatccgtattccgggccgtgggacggatccggagctgctccacaaagtggttgatctgctcaagaagcaaggtctgctgctgtacggggacatccgtgagcgtacgttcgtggaggggcaactgccaaatcctaaacctgaccagctggacaaccatcagaagtgcttcgccattctcaagctgtaccgtccgaaggtggataacagtgcggttgggacgtcgaagaaagtcgacatggctgaggttaaggattggaaagcggttcgtgtggatctggtggtcgctccagatgagcagttcgcctatgcgctgctcggttggacgggcagcggcatgtttcgtcgcgatactcgtcgctacgcggaggaagagcgcgacatgctgctcgacaaccatggcctctacgacctgaaaaagggcatctttctgagtgcggacagcgaagaagagattttcggtcatctggacctggattatctggagccgtgggaacgcaacgcg

SEQ ID NO: 5646 - protein, 394 aa, synthetic construct
  REGION 1..394: note = Variant of terminal deoxynucleotidyl transferase
MHHHHHHGGSGHPEGNTPEKEVPSVIARHVSPYACQRKTTLNNYNKKITDALEIMAENYKFKENLQARLEARRAASVLKSLPFEVTSMKDIQGLPCITDDVRPVIEEIIEVGESSRVKEILNDERYKAFKQFTSVFGVGVKTAEKWYRMGLRTLEEAKASKSLKLNKMQKAGFLYYEDLASGVSKEEADAVLDIVKETVWTVDPDALVTIAGGFRRGKPQGHDVDLLIRIPGRGTDPELLHKVVDLLKKQGLLLYGDIRERTFVEGQLPNPKPDQLDNHQKCFAILKLYRPKVDNSAVGTSKKVDMAEVKDWKAVRVDLVVAPDEQFAYALLGWTGSGMFRRDTRRYAEEERDMLLDNHGLYDLKKGIFLSADSEEEIFGHLDLDYLEPWERNA

SEQ ID NO: 5647 - DNA, 1182 bp, synthetic construct
  misc_feature 1..1182: note = Variant of terminal deoxynucleotidyl transferase
  source 1..1182: mol_type = other DNA
atgcaccatcatcaccatcacgggggctccggccatccggaaggtaataccccggagaaggaggtgccgagcgttattgcccgtcatgttagtccgtacgcgtgccagcgcaagaccacgctgaataactacaacaaaaagatcaccgacgcgctggaaatcatggccgagaactacaagtttaaagagaacctgcaggcgcgcctggaggcccgtcgcgccgcgagtgtcctgaaaagcctgccgttcgaggttaccagcatgaaagacatccaaggtctgccgtgcattaccgacgacgtacgtcctgtgatcgaagagatcatcgaagtaggcgagagcagccgtgttaaagaaatcctcaatgacgagcgctacaaggcctttaagcagttcaccagcgtgttcggtgtgggcgtcaagaccgcggaaaagtggtaccgtatgggcctccgtacgctggaagaagcaaaggccagtaagagtctgaagctgaacaagatgcagaaggcgggcttcctgtactacgaggatctggcgagcggtgttagtaaagaagaagccgatgccgttctggatatcgtgaaggaaacggtgtggactgttagtccggatgcgctggtgaccatcgccggcggtttccgccgtggcaaacctcagggccacgacgttgacctgctgatcacgattccgggccgtcctacggatccggagctgctccacaaagtggttgatctgctcaagaagcaaggtctgctgctgtacggggacatccgtgagcgtacgttcgtggaggggcagctgccaaatcctaaacctgaccagctggacaaccatcagaagtgcttcgccattctcaagctgtacaatccgcgcgtggataacagtgcggttgggacgtcgaagaaagtcgacatggctgaggttaaggattggaaagcggttcgtgtggatctggtggtcgctccagatgagcagttcgcctatgcgctgctcggttggacgggcagcggcatgtttcgtcgcgatactcgtcgctacgcggaggaagagcgcgacatgctgctcgacaaccatagcctctacgacctgaaaaagggcatctttctgagtgcggacagcgaagaagagattttcggtcatctggacctggattatctggagccgtgggaacgcaacgcg

SEQ ID NO: 5648 - protein, 394 aa, synthetic construct
  REGION 1..394: note = Variant of terminal deoxynucleotidyl transferase
MHHHHHHGGSGHPEGNTPEKEVPSVIARHVSPYACQRKTTLNNYNKKITDALEIMAENYKFKENLQARLEARRAASVLKSLPFEVTSMKDIQGLPCITDDVRPVIEEIIEVGESSRVKEILNDERYKAFKQFTSVFGVGVKTAEKWYRMGLRTLEEAKASKSLKLNKMQKAGFLYYEDLASGVSKEEADAVLDIVKETVWTVSPDALVTIAGGFRRGKPQGHDVDLLITIPGRPTDPELLHKVVDLLKKQGLLLYGDIRERTFVEGQLPNPKPDQLDNHQKCFAILKLYNPRVDNSAVGTSKKVDMAEVKDWKAVRVDLVVAPDEQFAYALLGWTGSGMFRRDTRRYAEEERDMLLDNHSLYDLKKGIFLSADSEEEIFGHLDLDYLEPWERNA

SEQ ID NO: 5649 - DNA, 1182 bp, synthetic construct
  misc_feature 1..1182: note = Variant of terminal deoxynucleotidyl transferase
  source 1..1182: mol_type = other DNA
atgcaccatcatcaccatcacgggggctccggccatccggaaggtaataccccggagaaggaggtgccgagcgttattgcccgtcatgttagtccgtacgcgtgccagcgcaagaccacgctgaataactacaacaaaaagatcaccgacgcgctggaaatcatggccgagaactaccgttttaaagagaacctgcaggcgcgcctggaggcccgtcgcgccgcgagtgtcctgaaaagcctgccgttcgaggttaccagcatgaaagacatccaaggtctgccgtgcattaccgacgacgtacgtcctgtgatcgaagagatcatcgaagtaggcgagagcagccgtgttaaagaaatcctcaatgacgagcgctacaaggcctttaagcagttcaccagcgtgttcggtgtgggcgtcaagaccgcggaaaagtggtaccgtatgggcctccgtacgctggaagaagcaaaggccagtaagagtctgaagctgaacaagatgcagaaggcgggcttcctgtactacgaggatctggcgagcggtgttagtaaagaagaagccgatgccgttctggatatcgtgaaggaaacggtgcgcactgttagtccggatgcgctggtgaccatcgccggcggtttccgccgtggcaaacctcagggccacgacgttgacctgctgatcacgattccgggccgtcctacggatccggagctgctccacaaagtggttgatctgctcaagaagcaaggtctgctgctgtacggggacatccgtgagcgtacgttcgtggaggggcaactgccaaatcctaaacctgaccagctggacaaccatcagaagtgcttcgccattctcaagctgtaccgtccgaaggtggataacagtgcggttgggacgtcgaagaaagtcgacatggctgaggttaaggattggaaagcggttcgtgtggatctggtggtcgctccagatgagcagttcgcctatgcgctgctcggttggacgggcagcggcatgtttcgtcgcgatactcgtcgctacgcggaggaagagcgcgacatgctgctcgacaaccatggcctctacgacctgaaaaagggcatctttctgagtgcggacagcgaagaagagattttcggtcatctggacctggattatctggagccgtgggaacgcaacgcg

SEQ ID NO: 5650 - protein, 394 aa, synthetic construct
  REGION 1..394: note = Variant of terminal deoxynucleotidyl transferase
MHHHHHHGGSGHPEGNTPEKEVPSVIARHVSPYACQRKTTLNNYNKKITDALEIMAENYRFKENLQARLEARRAASVLKSLPFEVTSMKDIQGLPCITDDVRPVIEEIIEVGESSRVKEILNDERYKAFKQFTSVFGVGVKTAEKWYRMGLRTLEEAKASKSLKLNKMQKAGFLYYEDLASGVSKEEADAVLDIVKETVRTVSPDALVTIAGGFRRGKPQGHDVDLLITIPGRPTDPELLHKVVDLLKKQGLLLYGDIRERTFVEGQLPNPKPDQLDNHQKCFAILKLYRPKVDNSAVGTSKKVDMAEVKDWKAVRVDLVVAPDEQFAYALLGWTGSGMFRRDTRRYAEEERDMLLDNHGLYDLKKGIFLSADSEEEIFGHLDLDYLEPWERNA

SEQ ID NO: 5651 - DNA, 1182 bp, synthetic construct
  misc_feature 1..1182: note = Variant of terminal deoxynucleotidyl transferase
  source 1..1182: mol_type = other DNA
atgcaccatcatcaccatcacgggggctccggccatccggaaggtaataccccggagaaggaggtgccgagcgttattgcccgtcatgttagtccgtacgcgtgccagcgcaagaccacgctgaataactacaacaaaaagatcaccgacgcgctggaaatcatggccgagaactacaagtttaaagagaacctgcaggcgcgcctggaggcccgtcgcgccgcgagtgtcctgaaaagcctgccgttcgaggttaccagcatgaaagacatccaaggtctgccgtgcattaccgacgacgtacgtcctgtgatcgaagagatcatcgaagtaggcgagagcagccgtgttaaagaaatcctcaatgacgagcgctacaaggcctttaagcagttcaccagcgtgttcggtgtgggcgtcaagaccgcggaaaagtggtaccgtatgggcctccgtacgctggaagaagcaaaggccagtaagagtctgaagctgaacaagatgcagaaggcgggcttcctgtactacgaggatctggcgagcggtgttagtaaagaagaagccgatgccgttctggatatcgtgaaggaaacggtgtggactgttagtccggatgcgctggtgaccatcgccggcggtttccgccgtggcaaacctcagggccacgacgttgacctgctgatcaccattccgggccgtgggacggatccggagctgctccacaaagtggttgatctgctcaagaagcaaggtctgctgctgtacggggacatccgtgagcgtacgttcgtggaggggcagctgccaaatcctaaacctgaccagctggacaaccatcagaagtgcttcgccattctcaagctgtacaatccgaaggtggataacagtgcggttgggacgtcgaagaaagtcgacatggctgaggttaaggattggaaagcggttcgtgtggatctggtggtcgctccagatgagcagttcgcctatgcgctgctcggttggacgggcagcggcatgtttcgtcgcgatactcgtcgctacgcggaggaagagcgcgacatgctgctcgacaaccatggtctctacgacctgaaaaagggcatctttctgagtgcggacagcgaagaagagattttcggtcatctggacctggattatctggagccgtgggaacgcaacgcg

SEQ ID NO: 5652 - protein, 394 aa, synthetic construct
  REGION 1..394: note = Variant of terminal deoxynucleotidyl transferase
MHHHHHHGGSGHPEGNTPEKEVPSVIARHVSPYACQRKTTLNNYNKKITDALEIMAENYKFKENLQARLEARRAASVLKSLPFEVTSMKDIQGLPCITDDVRPVIEEIIEVGESSRVKEILNDERYKAFKQFTSVFGVGVKTAEKWYRMGLRTLEEAKASKSLKLNKMQKAGFLYYEDLASGVSKEEADAVLDIVKETVWTVSPDALVTIAGGFRRGKPQGHDVDLLITIPGRGTDPELLHKVVDLLKKQGLLLYGDIRERTFVEGQLPNPKPDQLDNHQKCFAILKLYNPKVDNSAVGTSKKVDMAEVKDWKAVRVDLVVAPDEQFAYALLGWTGSGMFRRDTRRYAEEERDMLLDNHGLYDLKKGIFLSADSEEEIFGHLDLDYLEPWERNA

SEQ ID NO: 5653 - DNA, 1182 bp, synthetic construct
  misc_feature 1..1182: note = Variant of terminal deoxynucleotidyl transferase
  source 1..1182: mol_type = other DNA
atgcaccatcatcaccatcacgggggctccggccatccggaaggtaataccccggagaaggaggtgccgagcgttattgcccgtcatgttagtccgtacgcgtgccagcgcaagaccacgctgaataactacaacaaaaagatcaccgacgcgctggaaatcatggccgagaactacaagtttaaagagaacctgcaggcgcgcctggaggcccgtcgcgccgcgagtgtcctgaaaagcctgccgttcgaggttaccagcatgaaagacatccaaggtctgccgtgcattaccgacgacgtacgtcctgtgatcgaagagatcatcgaagtaggcgagagcagccgtgttaaagaaatcctcaatgacgagcgctacaaggcctttaagcagttcaccagcgtgttcggtgtgggcgtcaagaccgcggaaaagtggtaccgtatgggcctccgtacgctggaagaagcaaaggccagtaagagtctgaagctgaacaagatgcagaaggcgggcttcctgtactacgaggatctggcgagcggtgttagtaaagaagaagccgatgccgttctggatatcgtgaaggaaacggtgtggactgttgacccggatgcgctggtgaccatcgccggcggtttccgccgtggcaaacctcagggccacgacgttgacctgctgatcaccattccgggccgtcctacggatccggagctgctccacaaagtggttgatctgctcaagaagcaaggtctgctgctgtacggggacatccgtgagcgtacgttcgtggaggggcagctgccaaatcctaaacctgaccagctggacaaccatcagaagtgcttcgccattctcaagctgtacaatccgaaggtggataacagtgcggttgggacgtcgaagaaagtcgacatggctgaggttaaggattggaaagcggttcgtgtggatctggtggtcgctccagatgagcagttcgcctatgcgctgctcggttggacgggcagcggcatgtttcgtcgcgatactcgtcgctacgcggaggaagagcgcgacatgctgctcgacaaccatggcctctacgacctgaaaaagggcatctttctgagtgcggacagcgaagaagagattttcggtcatctggacctggattatctggagccgtgggaacgcaacgcg

SEQ ID NO: 5654 - protein, 394 aa, synthetic construct
  REGION 1..394: note = Variant of terminal deoxynucleotidyl transferase
MHHHHHHGGSGHPEGNTPEKEVPSVIARHVSPYACQRKTTLNNYNKKITDALEIMAENYKFKENLQARLEARRAASVLKSLPFEVTSMKDIQGLPCITDDVRPVIEEIIEVGESSRVKEILNDERYKAFKQFTSVFGVGVKTAEKWYRMGLRTLEEAKASKSLKLNKMQKAGFLYYEDLASGVSKEEADAVLDIVKETVWTVDPDALVTIAGGFRRGKPQGHDVDLLITIPGRPTDPELLHKVVDLLKKQGLLLYGDIRERTFVEGQLPNPKPDQLDNHQKCFAILKLYNPKVDNSAVGTSKKVDMAEVKDWKAVRVDLVVAPDEQFAYALLGWTGSGMFRRDTRRYAEEERDMLLDNHGLYDLKKGIFLSADSEEEIFGHLDLDYLEPWERNA

SEQ ID NO: 5655 - DNA, 1182 bp, synthetic construct
  misc_feature 1..1182: note = Variant of terminal deoxynucleotidyl transferase
  source 1..1182: mol_type = other DNA
atgcaccatcatcaccatcacgggggctccggccatccggaaggtaataccccggagaaggaggtgccgagcgttattgcccgtcatgttagtccgtacgcgtgccagcgcaagaccacgctgaataactacaacaaaaagatcaccgacgcgctggaaatcatggccgagaactacaagtttaaagagaacctgcaggcgcgcctggaggcccgtcgcgccgcgagtgtcctgaaaagcctgccgttcgaggttaccagcatgaaagacatccaaggtctgccgtgcattaccgacgacgtacgtcctgtgatcgaagagatcatcgaagtaggcgagagcagccgtgttaaagaaatcctcaatgacgagcgctacaaggcctttaagcagttcaccagcgtgttcggtgtgggcgtcaagaccgcggaaaagtggtaccgtatgggcctccgtacgctggaagaagcaaaggccagtaagagtctgaagctgaacaagatgcagaaggcgggcttcctgtactacgaggatctggcgagcggtgttagtaaagaagaagccgatgccgttctggatatcgtgaaggaaacggtgcgcactgttagtccggatgcgctggtgaccatcgccggcggtttccgccgtggcaaacctcagggccacgacgttgacctgctgatcacgattccgggccgtcctacggatccggagctgctccacaaagtggttgatctgctcaagaagcaaggtctgctgctgtacggggacatccgtgagcgtacgttcgtggaggggcaactgccaaatcctaaacctgaccagctggacaaccatcagaagtgcttcgccattctcaagctgtaccgtccgaaggtggataacagtgcggttgggacgtcgaagaaagtcgacatggctgaggttaaggattggaaagcggttcgtgtggatctggtggtcgctccagatgagcagttcgcctatgcgctgctcggttggacgggcagcggcatgtttcgtcgcgatactcgtcgctacgcggaggaagagcgcgacatgctgctcgacaaccatagcctctacgacctgaaaaagggcatctttctgagtgcggacagcgaagaagagattttcggtcatctggacctggattatctggagccgtgggaacgcaacgcg

SEQ ID NO: 5656 - protein, 394 aa, synthetic construct
  REGION 1..394: note = Variant of terminal deoxynucleotidyl transferase
MHHHHHHGGSGHPEGNTPEKEVPSVIARHVSPYACQRKTTLNNYNKKITDALEIMAENYKFKENLQARLEARRAASVLKSLPFEVTSMKDIQGLPCITDDVRPVIEEIIEVGESSRVKEILNDERYKAFKQFTSVFGVGVKTAEKWYRMGLRTLEEAKASKSLKLNKMQKAGFLYYEDLASGVSKEEADAVLDIVKETVRTVSPDALVTIAGGFRRGKPQGHDVDLLITIPGRPTDPELLHKVVDLLKKQGLLLYGDIRERTFVEGQLPNPKPDQLDNHQKCFAILKLYRPKVDNSAVGTSKKVDMAEVKDWKAVRVDLVVAPDEQFAYALLGWTGSGMFRRDTRRYAEEERDMLLDNHSLYDLKKGIFLSADSEEEIFGHLDLDYLEPWERNA

SEQ ID NO: 5657 - DNA, 1182 bp, synthetic construct
  misc_feature 1..1182: note = Variant of terminal deoxynucleotidyl transferase
  source 1..1182: mol_type = other DNA
atgcaccatcatcaccatcacgggggctccggccatccggaaggtaataccccggagaaggaggtgccgagcgttattgcccgtcatgttagtccgtacgcgtgccagcgcaagaccacgctgaataactacaacaaaaagatcaccgacgcgctggaaatcatggccgagaactacaagtttaaagagaacctgcaggcgcgcctggaggcccgtcgcgccgcgagtgtcctgaaaagcctgccgttcgaggttaccagcatgaaagacatccaaggtctgccgtgcattaccgacgacgtacgtcctgtgatcgaagagatcatcgaagtaggcgagagcagccgtgttaaagaaatcctcaatgacgagcgctacaaggcctttaagcagttcaccagcgtgttcggtgtgggcgtcaagaccgcggaaaagtggtaccgtatgggcctccgtacgctggaagaagcaaaggccagtaagagtctgaagctgaacaagatgcagaaggcgggcttcctgtactacgaggatctggcgagcggtgttagtaaagaagaagccgatgccgttctggatatcgtgaaggaaacggtgcgcactgttgacccggatgcgctggtgaccatcgccggcggtttccgccgtggcaaacctcagggccacgacgttgacctgctgatcacgattccgggccgtcctacggatccggagctgctccacaaagtggttgatctgctcaagaagcaaggtctgctgctgtacggggacatccgtgagcgtacgttcgtggaggggcagctgccaaatcctaaacctgaccagctggacaaccatcagaagtgcttcgccattctcaagctgtaccgtccgaaggtggataacagtgcggttgggacgtcgaagaaagtcgacatggctgaggttaaggattggaaagcggttcgtgtggatctggtggtcgctccagatgagcagttcgcctatgcgctgctcggttggacgggcagcggcatgtttcgtcgcgatactcgtcgctacgcggaggaagagcgcgacatgctgctcgacaaccatggtctctacgacctgaaaaagggcatctttctgagtgcggacagcgaagaagagattttcggtcatctggacctggattatctggagccgtgggaacgcaacgcg

SEQ ID NO: 5658 - protein, 394 aa, synthetic construct
  REGION 1..394: note = Variant of terminal deoxynucleotidyl transferase
MHHHHHHGGSGHPEGNTPEKEVPSVIARHVSPYACQRKTTLNNYNKKITDALEIMAENYKFKENLQARLEARRAASVLKSLPFEVTSMKDIQGLPCITDDVRPVIEEIIEVGESSRVKEILNDERYKAFKQFTSVFGVGVKTAEKWYRMGLRTLEEAKASKSLKLNKMQKAGFLYYEDLASGVSKEEADAVLDIVKETVRTVDPDALVTIAGGFRRGKPQGHDVDLLITIPGRPTDPELLHKVVDLLKKQGLLLYGDIRERTFVEGQLPNPKPDQLDNHQKCFAILKLYRPKVDNSAVGTSKKVDMAEVKDWKAVRVDLVVAPDEQFAYALLGWTGSGMFRRDTRRYAEEERDMLLDNHGLYDLKKGIFLSADSEEEIFGHLDLDYLEPWERNA

SEQ ID NO: 5659 - DNA, 1182 bp, synthetic construct
  misc_feature 1..1182: note = Variant of terminal deoxynucleotidyl transferase
  source 1..1182: mol_type = other DNA
atgcaccatcatcaccatcacgggggctccggccatccggaaggtaataccccggagaaggaggtgccgagcgttattgcccgtcatgttagtccgtacgcgtgccagcgcaagaccacgctgaataactacaacaaaaagatcaccgacgcgctggaaatcatggccgagaactacaagtttaaagagaacctgcaggcgcgcctggaggcccgtcgcgccgcgagtgtcctgaaaagcctgccgttcgaggttaccagcatgaaagacatccaaggtctgccgtgcattaccgacgacgtacgtcctgtgatcgaagagatcatcgaagtaggcgagagcagccgtgttaaagaaatcctcaatgacgagcgctacaaggcctttaagcagttcaccagcgtgttcggtgtgggcgtcaagaccgcggaaaagtggtaccgtatgggcctccgtacgctggaagaagcaaaggccagtaagagtctgaagctgaacaagatgcagaaggcgggcttcctgtactacgaggatctggcgagcggtgttagtaaagaagaagccgatgccgttctggatatcgtgaaggaaacggtgcgcactgttagtccggatgcgctggtgaccatcgccggcggtttccgccgtggcaaacctcagggccacgacgttgacctgctgatccgtattccgggccgtcctacggatccggagctgctccacaaagtggttgatctgctcaagaagcaaggtctgctgctgtacggggacatccgtgagcgtacgttcgtggaggggcaactgccaaatcctaaacctgaccagctggacaaccatcagaagtgcttcgccattctcaagctgtaccgtccgaaggtggataacagtgcggttgggacgtcgaagaaagtcgacatggctgaggttaaggattggaaagcggttcgtgtggatctggtggtcgctccagatgagcagttcgcctatgcgctgctcggttggacgggcagcggcatgtttcgtcgcgatactcgtcgctacgcggaggaagagcgcgacatgctgctcgacaaccatagcctctacgacctgaaaaagggcatctttctgagtgcggacagcgaagaagagattttcggtcatctggacctggattatctggagccgtgggaacgcaacgcg

SEQ ID NO: 5660 - protein, 394 aa, synthetic construct
  REGION 1..394: note = Variant of terminal deoxynucleotidyl transferase
MHHHHHHGGSGHPEGNTPEKEVPSVIARHVSPYACQRKTTLNNYNKKITDALEIMAENYKFKENLQARLEARRAASVLKSLPFEVTSMKDIQGLPCITDDVRPVIEEIIEVGESSRVKEILNDERYKAFKQFTSVFGVGVKTAEKWYRMGLRTLEEAKASKSLKLNKMQKAGFLYYEDLASGVSKEEADAVLDIVKETVRTVSPDALVTIAGGFRRGKPQGHDVDLLIRIPGRPTDPELLHKVVDLLKKQGLLLYGDIRERTFVEGQLPNPKPDQLDNHQKCFAILKLYRPKVDNSAVGTSKKVDMAEVKDWKAVRVDLVVAPDEQFAYALLGWTGSGMFRRDTRRYAEEERDMLLDNHSLYDLKKGIFLSADSEEEIFGHLDLDYLEPWERNA

SEQ ID NO: 5661 - DNA, 1182 bp, synthetic construct
  misc_feature 1..1182: note = Variant of terminal deoxynucleotidyl transferase
  source 1..1182: mol_type = other DNA
atgcaccatcatcaccatcacgggggctccggccatccggaaggtaataccccggagaaggaggtgccgagcgttactgcccgtcatgttagtccgtacgcgtgccagcgcaagaccacgctgaataactacaacaaaaagatcaccgacgcgctggaaatcatggccgagaactacaagtttaaagagaacctgcaggcgcgcctggaggcccgtcgcgccgcgagtgtcctgaaaagcctgccgttcgaggttaccagcatgaaagacatccaaggtctgccgtgcattaccgacgacgtacgtcctgtgatcgaagagatcatcgaagtaggcgagagcagccgtgttaaagaaatcctcaatgacgagcgctacaaggcctttaagcagttcaccagcgtgttcggtgtgggcgtcaagaccgcggaaaagtggtaccgtatgggcctccgtacgctggaagaagcaaaggccagtaagagtctgaagctgaacaagatgcagaaggcgggcttcctgtactacgaggatctggcgagcggtgttagtaaagaagaagccgatgccgttctggatatcgtgaaggaaacggtgtggactgttgacccggatgcgctggtgaccatcgccggcggtttccgccgtggcaaacctcagggccacgacgttgacctgctgatcaccattccgggccgtcctacggatccggagctgctccacaaagtggttgatctgctcaagaagcaaggtctgctgctgtacggggacatccgtgagcgtacgttcgtggaggggcaactgccaaatcctaaacctgaccagctggacaaccatcagaagtgcttcgccattctcaagctgtaccgtccgaaggtggataacagtgcggttgggacgtcgaagaaagtcgacatggctgaggttaaggattggaaagcggttcgtgtggatctggtggtcgctccagatgagcagttcgcctatgcgctgctcggttggacgggcagcggcatgtttcgtcgcgatactcgtcgctacgcggaggaagagcgcgacatgctgctcgacaaccatggcctctacgacctgaaaaagggcatctttctgagtgcggacagcgaagaagagattttcggtcatctggacctggattatctggagccgtgggaacgcaacgcg

SEQ ID NO: 5662 - protein, 394 aa, synthetic construct
  REGION 1..394: note = Variant of terminal deoxynucleotidyl transferase
MHHHHHHGGSGHPEGNTPEKEVPSVTARHVSPYACQRKTTLNNYNKKITDALEIMAENYKFKENLQARLEARRAASVLKSLPFEVTSMKDIQGLPCITDDVRPVIEEIIEVGESSRVKEILNDERYKAFKQFTSVFGVGVKTAEKWYRMGLRTLEEAKASKSLKLNKMQKAGFLYYEDLASGVSKEEADAVLDIVKETVWTVDPDALVTIAGGFRRGKPQGHDVDLLITIPGRPTDPELLHKVVDLLKKQGLLLYGDIRERTFVEGQLPNPKPDQLDNHQKCFAILKLYRPKVDNSAVGTSKKVDMAEVKDWKAVRVDLVVAPDEQFAYALLGWTGSGMFRRDTRRYAEEERDMLLDNHGLYDLKKGIFLSADSEEEIFGHLDLDYLEPWERNA

SEQ ID NO: 5663 - DNA, 1182 bp, synthetic construct
  misc_feature 1..1182: note = Variant of terminal deoxynucleotidyl transferase
  source 1..1182: mol_type = other DNA
atgcaccatcatcaccatcacgggggctccggccatccggaaggtaataccccggagaaggaggtgccgagcgttattgcccgtcatgttagtccgtacgcgtgccagcgcaagaccacgctgaataactacaacaaaaagatcaccgacgcgctggaaatcatggccgagaactaccgttttaaagagaacctgcaggcgcgcctggaggcccgtcgcgccgcgagtgtcctgaaaagcctgccgttcgaggttaccagcatgaaagacatccaaggtctgccgtgcattaccgacgacgtacgtcctgtgatcgaagagatcatcgaagtaggcgagagcagccgtgttaaagaaatcctcaatgacgagcgctacaaggcctttaagcagttcaccagcgtgttcggtgtgggcgtcaagaccgcggaaaagtggtaccgtatgggcctccgtacgctggaagaagcaaaggccagtaagagtctgaagctgaacaagatgcagaaggcgggcttcctgtactacgaggatctggcgagcggtgttagtaaagaagaagccgatgccgttctggatatcgtgaaggaaacggtgcgcactgttgacccggatgcgctggtgaccatcgccggcggtttccgccgtggcaaacctcagggccacgacgttgacctgctgatcacgattccgggccgtcctacggatccggagctgctccacaaagtggttgatctgctcaagaagcaaggtctgctgctgtacggggacatccgtgagcgtacgttcgtggaggggcaactgccaaatcctaaacctgaccagctggacaaccatcagaagtgcttcgccattctcaagctgtaccgtccgaaggtggataacagtgcggttgggacgtcgaagaaagtcgacatggctgaggttaaggattggaaagcggttcgtgtggatctggtggtcgctccagatgagcagttcgcctatgcgctgctcggttggacgggcagcggcatgtttcgtcgcgatactcgtcgctacgcggaggaagagcgcgacatgctgctcgacaaccatggcctctacgacctgaaaaagggcatctttctgagtgcggacagcgaagaagagattttcggtcatctggacctggattatctggagccgtgggaacgcaacgcg

SEQ ID NO: 5664 - protein, 394 aa, synthetic construct
  REGION 1..394: note = Variant of terminal deoxynucleotidyl transferase
MHHHHHHGGSGHPEGNTPEKEVPSVIARHVSPYACQRKTTLNNYNKKITDALEIMAENYRFKENLQARLEARRAASVLKSLPFEVTSMKDIQGLPCITDDVRPVIEEIIEVGESSRVKEILNDERYKAFKQFTSVFGVGVKTAEKWYRMGLRTLEEAKASKSLKLNKMQKAGFLYYEDLASGVSKEEADAVLDIVKETVRTVDPDALVTIAGGFRRGKPQGHDVDLLITIPGRPTDPELLHKVVDLLKKQGLLLYGDIRERTFVEGQLPNPKPDQLDNHQKCFAILKLYRPKVDNSAVGTSKKVDMAEVKDWKAVRVDLVVAPDEQFAYALLGWTGSGMFRRDTRRYAEEERDMLLDNHGLYDLKKGIFLSADSEEEIFGHLDLDYLEPWERNA

SEQ ID NO: 5665 - DNA, 1182 bp, synthetic construct
  misc_feature 1..1182: note = Variant of terminal deoxynucleotidyl transferase
  source 1..1182: mol_type = other DNA
atgcaccatcatcaccatcacgggggctccggccatccggaaggtaataccccggagaaggaggtgccgagcgttactgcccgtcatgttagtccgtacgcgtgccagcgcaagaccacgctgaataactacaacaaaaagatcaccgacgcgctggaaatcatggccgagaactaccgttttaaagagaacctgcaggcgcgcctggaggcccgtcgcgccgcgagtgtcctgaaaagcctgccgttcgaggttaccagcatgaaagacatccaaggtctgccgtgcattaccgacgacgtacgtcctgtgatcgaagagatcatcgaagtaggcgagagcagccgtgttaaagaaatcctcaatgacgagcgctacaaggcctttaagcagttcaccagcgtgttcggtgtgggcgtcaagaccgcggaaaagtggtaccgtatgggcctccgtacgctggaagaagcaaaggccagtaagagtctgaagctgaacaagatgcagaaggcgggcttcctgtactacgaggatctggcgagcggtgttagtaaagaagaagccgatgccgttctggatatcgtgaaggaaacggtgtggactgttgacccggatgcgctggtgaccatcgccggcggtttccgccgtggcaaacctcagggccacgacgttgacctgctgatcaccattccgggccgtcctacggatccggagctgctccacaaagtggttgatctgctcaagaagcaaggtctgctgctgtacggggacatccgtgagcgtacgttcgtggaggggcagctgccaaatcctaaacctgaccagctggacaaccatcagaagtgcttcgccattctcaagctgtaccgcccgcgcgtggataacagtgcggttgggacgtcgaagaaagtcgacatggctgaggttaaggattggaaagcggttcgtgtggatctggtggtcgctccagatgagcagttcgcctatgcgctgctcggttggacgggcagcggcatgtttcgtcgcgatactcgtcgctacgcggaggaagagcgcgacatgctgctcgacaaccatggcctctacgacctgaaaaagggcatctttctgagtgcggacagcgaagaagagattttcggtcatctggacctggattatctggagccgtgggaacgcaacgcg

SEQ ID NO: 5666 - protein, 394 aa, synthetic construct
  REGION 1..394: note = Variant of terminal deoxynucleotidyl transferase
MHHHHHHGGSGHPEGNTPEKEVPSVTARHVSPYACQRKTTLNNYNKKITDALEIMAENYRFKENLQARLEARRAASVLKSLPFEVTSMKDIQGLPCITDDVRPVIEEIIEVGESSRVKEILNDERYKAFKQFTSVFGVGVKTAEKWYRMGLRTLEEAKASKSLKLNKMQKAGFLYYEDLASGVSKEEADAVLDIVKETVWTVDPDALVTIAGGFRRGKPQGHDVDLLITIPGRPTDPELLHKVVDLLKKQGLLLYGDIRERTFVEGQLPNPKPDQLDNHQKCFAILKLYRPRVDNSAVGTSKKVDMAEVKDWKAVRVDLVVAPDEQFAYALLGWTGSGMFRRDTRRYAEEERDMLLDNHGLYDLKKGIFLSADSEEEIFGHLDLDYLEPWERNA

SEQ ID NO: 5667 - DNA, 1182 bp, synthetic construct
  misc_feature 1..1182: note = Variant of terminal deoxynucleotidyl transferase
  source 1..1182: mol_type = other DNA
atgcaccatcatcaccatcacgggggctccggccatccggaaggtaataccccggagaaggaggtgccgagcgttattgcccgtcatgttagtccgtacgcgtgccagcgcaagaccacgctgaataactacaacaaaaagatcaccgacgcgctggaaatcatggccgagaactacaagtttaaagagaacctgcaggcgcgcctggaggcccgtcgcgccgcgagtgtcctgaaaagcctgccgttcgaggttaccagcatgaaagacatccaaggtctgccgtgcattaccgacgacgtacgtcctgtgatcgaagagatcatcgaagtaggcgagagcagccgtgttaaagaaatcctcaatgacgagcgctacaaggcctttaagcagttcaccagcgtgttcggtgtgggcgtcaagaccgcggaaaagtggtaccgtatgggcctccgtacgctggaagaagcaaaggccagtaagagtctgaagctgaacaagatgcagaaggcgggcttcctgtactacgaggatctggcgagcggtgttagtaaagaagaagccgatgccgttctggatatcgtgaaggaaacggtgcgcactgttgacccggatgcgctggtgaccatcgccggcggtttccgccgtggcaaacctcagggccacgacgttgacctgctgatccgtattccgggccgtcctacggatccggagctgctccacaaagtggttgatctgctcaagaagcaaggtctgctgctgtacggggacatccgtgagcgtacgttcgtggaggggcaactgccaaatcctaaacctgaccagctggacaaccatcagaagtgcttcgccattctcaagctgtaccgtccgaaggtggataacagtgcggttgggacgtcgaagaaagtcgacatggctgaggttaaggattggaaagcggttcgtgtggatctggtggtcgctccagatgagcagttcgcctatgcgctgctcggttggacgggcagcggcatgtttcgtcgcgatactcgtcgctacgcggaggaagagcgcgacatgctgctcgacaaccatggtctctacgacctgaaaaagggcatctttctgagtgcggacagcgaagaagagattttcggtcatctggacctggattatctggagccgtgggaacgcaacgcg

SEQ ID NO: 5668 - protein, 394 aa, synthetic construct
  REGION 1..394: note = Variant of terminal deoxynucleotidyl transferase
MHHHHHHGGSGHPEGNTPEKEVPSVIARHVSPYACQRKTTLNNYNKKITDALEIMAENYKFKENLQARLEARRAASVLKSLPFEVTSMKDIQGLPCITDDVRPVIEEIIEVGESSRVKEILNDERYKAFKQFTSVFGVGVKTAEKWYRMGLRTLEEAKASKSLKLNKMQKAGFLYYEDLASGVSKEEADAVLDIVKETVRTVDPDALVTIAGGFRRGKPQGHDVDLLIRIPGRPTDPELLHKVVDLLKKQGLLLYGDIRERTFVEGQLPNPKPDQLDNHQKCFAILKLYRPKVDNSAVGTSKKVDMAEVKDWKAVRVDLVVAPDEQFAYALLGWTGSGMFRRDTRRYAEEERDMLLDNHGLYDLKKGIFLSADSEEEIFGHLDLDYLEPWERNA

SEQ ID NO: 5669 - DNA, 1182 bp, synthetic construct
  misc_feature 1..1182: note = Variant of terminal deoxynucleotidyl transferase
  source 1..1182: mol_type = other DNA
atgcaccatcatcaccatcacgggggctccggccatccggaaggtaataccccggagaaggaggtgccgagcgttactgcccgtcatgttagtccgtacgcgtgccagcgcaagaccacgctgaataactacaacaaaaagatcaccgacgcgctggaaatcatggccgagaactaccgttttaaagagaacctgcaggcgcgcctggaggcccgtcgcgccgcgagtgtcctgaaaagcctgccgttcgaggttaccagcatgaaagacatccaaggtctgccgtgcattaccgacgacgtacgtcctgtgatcgaagagatcatcgaagtaggcgagagcagccgtgttaaagaaatcctcaatgacgagcgctacaaggcctttaagcagttcaccagcgtgttcggtgtgggcgtcaagaccgcggaaaagtggtaccgtatgggcctccgtacgctggaagaagcaaaggccagtaagagtctgaagctgaacaagatgcagaaggcgggcttcctgtactacgaggatctggcgagcggtgttagtaaagaagaagccgatgccgttctggatatcgtgaaggaaacggtgcgcactgttgacccggatgcgctggtgaccatcgccggcggtttccgccgtggcaaacctcagggccacgacgttgacctgctgatccgtattccgggccgtgggacggatccggagctgctccacaaagtggttgatctgctcaagaagcaaggtctgctgctgtacggggacatccgtgagcgtacgttcgtggaggggcagctgccaaatcctaaacctgaccagctggacaaccatcagaagtgcttcgccattctcaagctgtacaatccgaaggtggataacagtgcggttgggacgtcgaagaaagtcgacatggctgaggttaaggattggaaagcggttcgtgtggatctggtggtcgctccagatgagcagttcgcctatgcgctgctcggttggacgggcagcggcatgtttcgtcgcgatactcgtcgctacgcggaggaagagcgcgacatgctgctcgacaaccatggcctctacgacctgaaaaagggcatctttctgagtgcggacagcgaagaagagattttcggtcatctggacctggattatctggagccgtgggaacgcaacgcg

SEQ ID NO: 5670 - protein, 394 aa, synthetic construct
  REGION 1..394: note = Variant of terminal deoxynucleotidyl transferase
MHHHHHHGGSGHPEGNTPEKEVPSVTARHVSPYACQRKTTLNNYNKKITDALEIMAENYRFKENLQARLEARRAASVLKSLPFEVTSMKDIQGLPCITDDVRPVIEEIIEVGESSRVKEILNDERYKAFKQFTSVFGVGVKTAEKWYRMGLRTLEEAKASKSLKLNKMQKAGFLYYEDLASGVSKEEADAVLDIVKETVRTVDPDALVTIAGGFRRGKPQGHDVDLLIRIPGRGTDPELLHKVVDLLKKQGLLLYGDIRERTFVEGQLPNPKPDQLDNHQKCFAILKLYNPKVDNSAVGTSKKVDMAEVKDWKAVRVDLVVAPDEQFAYALLGWTGSGMFRRDTRRYAEEERDMLLDNHGLYDLKKGIFLSADSEEEIFGHLDLDYLEPWERNA

SEQ ID NO: 5671 - DNA, 1182 bp, synthetic construct
  misc_feature 1..1182: note = Variant of terminal deoxynucleotidyl transferase
  source 1..1182: mol_type = other DNA
atgcaccatcatcaccatcacgggggctccggccatccggaaggtaataccccggagaaggaggtgccgagcgttactgcccgtcatgttagtccgtacgcgtgccagcgcaagaccacgctgaataactacaacaaaaagatcaccgacgcgctggaaatcatggccgagaactacaagtttaaagagaacctgcaggcgcgcctggaggcccgtcgcgccgcgagtgtcctgaaaagcctgccgttcgaggttaccagcatgaaagacatccaaggtctgccgtgcattaccgacgacgtacgtcctgtgatcgaagagatcatcgaagtaggcgagagcagccgtgttaaagaaatcctcaatgacgagcgctacaaggcctttaagcagttcaccagcgtgttcggtgtgggcgtcaagaccgcggaaaagtggtaccgtatgggcctccgtacgctggaagaagcaaaggccagtaagagtctgaagctgaacaagatgcagaaggcgggcttcctgtactacgaggatctggcgagcggtgttagtaaagaagaagccgatgccgttctggatatcgtgaaggaaacggtgcgcactgttagtccggatgcgctggtgaccatcgccggcggtttccgccgtggcaaacctcagggccacgacgttgacctgctgatcacgattccgggccgtcctacggatccggagctgctccacaaagtggttgatctgctcaagaagcaaggtctgctgctgtacggggacatccgtgagcgtacgttcgtggaggggcaactgccaaatcctaaacctgaccagctggacaaccatcagaagtgcttcgccattctcaagctgtaccgcccgaaggtggataacagtgcggttgggacgtcgaagaaagtcgacatggctgaggttaaggattggaaagcggttcgtgtggatctggtggtcgctccagatgagcagttcgcctatgcgctgctcggttggacgggcagcggcatgtttcgtcgcgatactcgtcgctacgcggaggaagagcgcgacatgctgctcgacaaccatggtctctacgacctgaaaaagggcatctttctgagtgcggacagcgaagaagagattttcggtcatctggacctggattatctggagccgtgggaacgcaacgcg

SEQ ID NO: 5672 - protein, 394 aa, synthetic construct
  REGION 1..394: note = Variant of terminal deoxynucleotidyl transferase
MHHHHHHGGSGHPEGNTPEKEVPSVTARHVSPYACQRKTTLNNYNKKITDALEIMAENYKFKENLQARLEARRAASVLKSLPFEVTSMKDIQGLPCITDDVRPVIEEIIEVGESSRVKEILNDERYKAFKQFTSVFGVGVKTAEKWYRMGLRTLEEAKASKSLKLNKMQKAGFLYYEDLASGVSKEEADAVLDIVKETVRTVSPDALVTIAGGFRRGKPQGHDVDLLITIPGRPTDPELLHKVVDLLKKQGLLLYGDIRERTFVEGQLPNPKPDQLDNHQKCFAILKLYRPKVDNSAVGTSKKVDMAEVKDWKAVRVDLVVAPDEQFAYALLGWTGSGMFRRDTRRYAEEERDMLLDNHGLYDLKKGIFLSADSEEEIFGHLDLDYLEPWERNA

SEQ ID NO: 5673 - DNA, 1182 bp, synthetic construct
  misc_feature 1..1182: note = Variant of terminal deoxynucleotidyl transferase
  source 1..1182: mol_type = other DNA
atgcaccatcatcaccatcacgggggctccggccatccggaaggtaataccccggagaaggaggtgccgagcgttatcgcccgtcatgttagtccgtacgcgtgccagcgcaagaccacgctgaataactacaacaaaaagatcaccgacgcgctggaaatcatggccgagaactacaagtttaaagagaacctgcaggcgcgcctggaggcccgtcgcgccgcgagtgtcctgaaaagcctgccgttcgaggttaccagcatgaaagacatccaaggtctgccgtgcattaccgacgacgtacgtcctgtgatcgaagagatcatcgaagtaggcgagagcagccgtgttaaagaaatcctcaatgacgagcgctacaaggcctttaagcagttcaccagcgtgttcggtgtgggcgtcaagaccgcggaaaagtggtaccgtatgggcctccgtacgctggaagaagtaaaggccagtaagttcctgaagctgaacaagatgcagaaggcgggcttcctgtactacgaggatctggcgagcggtgttagtaaagaagaagccgatgccgttctggatatcgtgaaggaaacggtgcgcactgttagtccggatgcgctggtgaccatcgccggcggtttccgccgtggcaaacctcagggccacgacgttgacctgctgatcacgattccgggccgtcctacggatccggagctgctccacaaagtggttgatctgctcaagaagcaaggtctgctgctgtacggggacatccgtgagcgtacgttcgtggaggggcaactgccaaatcctaaacctgaccagctggacaaccatcagaagtgcttcgccattctcaagctgtaccgtccgaaggtggataacagtgcggttgggacgtcgaagaaagtcgacatggctgaggttaaggattggaaagcggttcgtgtggatctggtggtcgctccagatgagcagttcgcctatgcgctgctcggttggacgggcagcggcatgtttcgtcgcgatactcgtcgctacgcggaggaagagcgcgacatgctgctcgacaaccatggtctctacgacctgaaaaagggcatctttctgagtgcggacagcgaagaagagattttcggtcatctggacctggattatctggagccgtgggaacgcaacgcg

SEQ ID NO: 5674 - protein, 394 aa, synthetic construct
  REGION 1..394: note = Variant of terminal deoxynucleotidyl transferase
MHHHHHHGGSGHPEGNTPEKEVPSVIARHVSPYACQRKTTLNNYNKKITDALEIMAENYKFKENLQARLEARRAASVLKSLPFEVTSMKDIQGLPCITDDVRPVIEEIIEVGESSRVKEILNDERYKAFKQFTSVFGVGVKTAEKWYRMGLRTLEEVKASKFLKLNKMQKAGFLYYEDLASGVSKEEADAVLDIVKETVRTVSPDALVTIAGGFRRGKPQGHDVDLLITIPGRPTDPELLHKVVDLLKKQGLLLYGDIRERTFVEGQLPNPKPDQLDNHQKCFAILKLYRPKVDNSAVGTSKKVDMAEVKDWKAVRVDLVVAPDEQFAYALLGWTGSGMFRRDTRRYAEEERDMLLDNHGLYDLKKGIFLSADSEEEIFGHLDLDYLEPWERNA

SEQ ID NO: 5675 - DNA, 1182 bp, synthetic construct
  misc_feature 1..1182: note = Variant of terminal deoxynucleotidyl transferase
  source 1..1182: mol_type = other DNA
atgcaccatcatcaccatcacgggggctccggccatccggaaggtaataccccggagaaggaggtgccgagcgttactgcccgtcatgttagtccgtacgcgtgccagcgcaagaccacgctgaataactacaacaaaaagatcaccgacgcgctggaaatcatggccgagaactacaagtttaaagagaacctgcaggcgcgcctggaggcccgtcgcgccgcgagtgtcctgaaaagcctgccgttcgaggttaccagcatgaaagacatccaaggtctgccgtgcattaccgacgacgtacgtcctgtgatcgaagagatcatcgaagtaggcgagagcagccgtgttaaagaaatcctcaatgacgagcgctacaaggcctttaagcagttcaccagcgtgttcggtgtgggcgtcaagaccgcggaaaagtggtaccgtatgggcctccgtacgctggaagaagcaaaggccagtaagagtctgaagctgaacaagatgcagaaggcgggcttcctgtactacgaggatctggcgagcggtgttagtaaagaagaagccgatgccgttctggatatcgtgaaggaaacggtgcgcactgttgacccggatgcgctggtgaccatcgccggcggtttccgccgtggcaaacctcagggccacgacgttgacctgctgatcacgattccgggccgtgggacggatccggagctgctccacaaagtggttgatctgctcaagaagcaaggtctgctgctgtacggggacatccgtgagcgtacgttcgtggaggggcaactgccaaatcctaaacctgaccagctggacaaccatcagaagtgcttcgccattctcaagctgtacaatccgcgcgtggataacagtgcggttgggacgtcgaagaaagtcgacatggctgaggttaaggattggaaagcggttcgtgtggatctggtggtcgctccagatgagcagttcgcctatgcgctgctcggttggacgggcagcggcatgtttcgtcgcgatactcgtcgctacgcggaggaagagcgcgacatgctgctcgacaaccatggtctctacgacctgaaaaagggcatctttctgagtgcggacagcgaagaagagattttcggtcatctggacctggattatctggagccgtgggaacgcaacgcg

SEQ ID NO: 5676 - protein, 394 aa, synthetic construct
  REGION 1..394: note = Variant of terminal deoxynucleotidyl transferase
MHHHHHHGGSGHPEGNTPEKEVPSVTARHVSPYACQRKTTLNNYNKKITDALEIMAENYKFKENLQARLEARRAASVLKSLPFEVTSMKDIQGLPCITDDVRPVIEEIIEVGESSRVKEILNDERYKAFKQFTSVFGVGVKTAEKWYRMGLRTLEEAKASKSLKLNKMQKAGFLYYEDLASGVSKEEADAVLDIVKETVRTVDPDALVTIAGGFRRGKPQGHDVDLLITIPGRGTDPELLHKVVDLLKKQGLLLYGDIRERTFVEGQLPNPKPDQLDNHQKCFAILKLYNPRVDNSAVGTSKKVDMAEVKDWKAVRVDLVVAPDEQFAYALLGWTGSGMFRRDTRRYAEEERDMLLDNHGLYDLKKGIFLSADSEEEIFGHLDLDYLEPWERNA

SEQ ID NO: 5677 - DNA, 1182 bp, synthetic construct
  misc_feature 1..1182: note = Variant of terminal deoxynucleotidyl transferase
  source 1..1182: mol_type = other DNA
atgcaccatcatcaccatcacgggggctccggccatccggaaggtaataccccggagaaggaggtgccgagcgttactgcccgtcatgttagtccgtacgcgtgccagcgcaagaccacgctgaataactacaacaaaaagatcaccgacgcgctggaaatcatggccgagaactacaagtttaaagagaacctgcaggcgcgcctggaggcccgtcgcgccgcgagtgtcctgaaaagcctgccgttcgaggttaccagcatgaaagacatccaaggtctgccgtgcattaccgacgacgtacgtcctgtgatcgaagagatcatcgaagtaggcgagagcagccgtgttaaagaaatcctcaatgacgagcgctacaaggcctttaagcagttcaccagcgtgttcggtgtgggcgtcaagaccgcggaaaagtggtaccgtatgggcctccgtacgctggaagaagcaaaggccagtaagagtctgaagctgaacaagatgcagaaggcgggcttcctgtactacgaggatctggcgagcggtgttagtaaagaagaagccgatgccgttctggatatcgtgaaggaaacggtgtggactgttagtccggatgcgctggtgaccatcgccggcggtttccgccgtggcaaacctcagggccacgacgttgacctgctgatcacgattccgggccgtcctacggatccggagctgctccacaaagtggttgatctgctcaagaagcaaggtctgctgctgtacggggacatccgtgagcgtacgttcgtggaggggcagctgccaaatcctaaacctgaccagctggacaaccatcagaagtgcttcgccattctcaagctgtacaatccgaaggtggataacagtgcggttgggacgtcgaagaaagtcgacatggctgaggttaaggattggaaagcggttcgtgtggatctggtggtcgctccagatgagcagttcgcctatgcgctgctcggttggacgggcagcggcatgtttcgtcgcgatactcgtcgctacgcggaggaagagcgcgacatgctgctcgacaaccatggcctctacgacctgaaaaagggcatctttctgagtgcggacagcgaagaagagattttcggtcatctggacctggattatctggagccgtgggaacgcaacgcg

SEQ ID NO: 5678 - protein, 394 aa, synthetic construct
  REGION 1..394: note = Variant of terminal deoxynucleotidyl transferase
MHHHHHHGGSGHPEGNTPEKEVPSVTARHVSPYACQRKTTLNNYNKKITDALEIMAENYKFKENLQARLEARRAASVLKSLPFEVTSMKDIQGLPCITDDVRPVIEEIIEVGESSRVKEILNDERYKAFKQFTSVFGVGVKTAEKWYRMGLRTLEEAKASKSLKLNKMQKAGFLYYEDLASGVSKEEADAVLDIVKETVWTVSPDALVTIAGGFRRGKPQGHDVDLLITIPGRPTDPELLHKVVDLLKKQGLLLYGDIRERTFVEGQLPNPKPDQLDNHQKCFAILKLYNPKVDNSAVGTSKKVDMAEVKDWKAVRVDLVVAPDEQFAYALLGWTGSGMFRRDTRRYAEEERDMLLDNHGLYDLKKGIFLSADSEEEIFGHLDLDYLEPWERNA

SEQ ID NO: 5679 - DNA, 1182 bp, synthetic construct
  misc_feature 1..1182: note = Variant of terminal deoxynucleotidyl transferase
  source 1..1182: mol_type = other DNA
atgcaccatcatcaccatcacgggggctccggccatccggaaggtaataccccggagaaggaggtgccgagcgttactgcccgtcatgttagtccgtacgcgtgccagcgcaagaccacgctgaataactacaacaaaaagatcaccgacgcgctggaaatcatggccgagaactacaagtttaaagagaacctgcaggcgcgcctggaggcccgtcgcgccgcgagtgtcctgaaaagcctgccgttcgaggttaccagcatgaaagacatccaaggtctgccgtgcattaccgacgacgtacgtcctgtgatcgaagagatcatcgaagtaggcgagagcagccgtgttaaagaaatcctcaatgacgagcgctacaaggcctttaagcagttcaccagcgtgttcggtgtgggcgtcaagaccgcggaaaagtggtaccgtatgggcctccgtacgctggaagaagcaaaggccagtaagagtctgaagctgaacaagatgcagaaggcgggcttcctgtactacgaggatctggcgagcggtgttagtaaagaagaagccgatgccgttctggatatcgtgaaggaaacggtgtggactgttgacccggatgcgctggtgaccatcgccggcggtttccgccgtggcaaacctcagggccacgacgttgacctgctgatccgtattccgggccgtcctacggatccggagctgctccacaaagtggttgatctgctcaagaagcaaggtctgctgctgtacggggacatccgtgagcgtacgttcgtggaggggcagctgccaaatcctaaacctgaccagctggacaaccatcagaagtgcttcgccattctcaagctgtaccgtccgaaggtggataacagtgcggttgggacgtcgaagaaagtcgacatggctgaggttaaggattggaaagcggttcgtgtggatctggtggtcgctccagatgagcagttcgcctatgcgctgctcggttggacgggcagcggcatgtttcgtcgcgatactcgtcgctacgcggaggaagagcgcgacatgctgctcgacaaccatggcctctacgacctgaaaaagggcatctttctgagtgcggacagcgaagaagagattttcggtcatctggacctggattatctggagccgtgggaacgcaacgcg

SEQ ID NO: 5680 - protein, 394 aa, synthetic construct
  REGION 1..394: note = Variant of terminal deoxynucleotidyl transferase
MHHHHHHGGSGHPEGNTPEKEVPSVTARHVSPYACQRKTTLNNYNKKITDALEIMAENYKFKENLQARLEARRAASVLKSLPFEVTSMKDIQGLPCITDDVRPVIEEIIEVGESSRVKEILNDERYKAFKQFTSVFGVGVKTAEKWYRMGLRTLEEAKASKSLKLNKMQKAGFLYYEDLASGVSKEEADAVLDIVKETVWTVDPDALVTIAGGFRRGKPQGHDVDLLIRIPGRPTDPELLHKVVDLLKKQGLLLYGDIRERTFVEGQLPNPKPDQLDNHQKCFAILKLYRPKVDNSAVGTSKKVDMAEVKDWKAVRVDLVVAPDEQFAYALLGWTGSGMFRRDTRRYAEEERDMLLDNHGLYDLKKGIFLSADSEEEIFGHLDLDYLEPWERNA

SEQ ID NO: 5681 - DNA, 1182 bp, synthetic construct
  misc_feature 1..1182: note = Variant of terminal deoxynucleotidyl transferase
  source 1..1182: mol_type = other DNA
atgcaccatcatcaccatcacgggggctccggccatccggaaggtaataccccggagaaggaggtgccgagcgttatcgcccgtcatgttagtccgtacgcgtgccagcgcaagaccacgctgaataactacaacaaaaagatcaccgacgcgctggaaatcatggccgagaactacaagtttaaagagaacctgcaggcgcgcctggaggcccgtcgcgccgcgagtgtcctgaaaagcctgccgttcgaggttaccagcatgaaagacatccaaggtctgccgtgcattaccgacgacgtacgtcctgtgatcgaagagatcatcgaagtaggcgagagcagccgtgttaaagaaatcctcaatgacgagcgctacaaggcctttaagcagttcaccagcgtgttcggtgtgggcgtcaagaccgcggaaaagtggtaccgtatgggcctccgtacgctggaagaagtaaaggccagtaagagcctgaagctgaacaagatgcagaaggcgggcttcctgtactacgaggatctggcgagcggtgttagtaaagaagaagccgatgccgttctggatatcgtgaaggaaacggtgcgcactgttagtccggatgcgctggtgaccatcgccggcggtttccgccgtggcaaacctcagggccacgacgttgacctgctgatcacgattccgggccgtcctacggatccggagctgctccacaaagtggttgatctgctcaagaagcaaggtctgctgctgtacggggacatccgtgagcgtacgttcgtggaggggcaactgccaaatcctaaacctgaccagctggacaaccatcagaagtgcttcgccattctcaagctgtaccgtccgaaggtggataacagtgcggttgggacgtcgaagaaagtcgacatggctgaggttaaggattggaaagcggttcgtgtggatctggtggtcgctccagatgagcagttcgcctatgcgctgctcggttggacgggcagcggcatgtttcgtcgcgatactcgtcgctacgcggaggaagagcgcgacatgctgctcgacaaccatggtctctacgacctgaaaaagggccagtttctgagtgcggacagcgaagaagagattttcggtcatctggacctggattatctggagccgtgggaacgcaacgcg

SEQ ID NO: 5682 - protein, 394 aa, synthetic construct
  REGION 1..394: note = Variant of terminal deoxynucleotidyl transferase
MHHHHHHGGSGHPEGNTPEKEVPSVIARHVSPYACQRKTTLNNYNKKITDALEIMAENYKFKENLQARLEARRAASVLKSLPFEVTSMKDIQGLPCITDDVRPVIEEIIEVGESSRVKEILNDERYKAFKQFTSVFGVGVKTAEKWYRMGLRTLEEVKASKSLKLNKMQKAGFLYYEDLASGVSKEEADAVLDIVKETVRTVSPDALVTIAGGFRRGKPQGHDVDLLITIPGRPTDPELLHKVVDLLKKQGLLLYGDIRERTFVEGQLPNPKPDQLDNHQKCFAILKLYRPKVDNSAVGTSKKVDMAEVKDWKAVRVDLVVAPDEQFAYALLGWTGSGMFRRDTRRYAEEERDMLLDNHGLYDLKKGQFLSADSEEEIFGHLDLDYLEPWERNA

SEQ ID NO: 5683 - DNA, 1182 bp, synthetic construct
  misc_feature 1..1182: note = Variant of terminal deoxynucleotidyl transferase
  source 1..1182: mol_type = other DNA
atgcaccatcatcaccatcacgggggctccggccatccggaaggtaataccccggagaaggaggtgccgagcgttactgcccgtcatgttagtccgtacgcgtgccagcgcaagaccacgctgaataactacaacaaaaagatcaccgacgcgctggaaatcatggccgagaactaccgttttaaagagaacctgcaggcgcgcctggaggcccgtcgcgccgcgagtgtcctgaaaagcctgccgttcgaggttaccagcatgaaagacatccaaggtctgccgtgcattaccgacgacgtacgtcctgtgatcgaagagatcatcgaagtaggcgagagcagccgtgttaaagaaatcctcaatgacgagcgctacaaggcctttaagcagttcaccagcgtgttcggtgtgggcgtcaagaccgcggaaaagtggtaccgtatgggcctccgtacgctggaagaagcaaaggccagtaagagtctgaagctgaacaagatgcagaaggcgggcttcctgtactacgaggatctggcgagcggtgttagtaaagaagaagccgatgccgttctggatatcgtgaaggaaacggtgtggactgttagtccggatgcgctggtgaccatcgccggcggtttccgccgtggcaaacctcagggccacgacgttgacctgctgatcacgattccgggccgtcctacggatccggagctgctccacaaagtggttgatctgctcaagaagcaaggtctgctgctgtacggggacatccgtgagcgtacgttcgtggaggggcaactgccaaatcctaaacctgaccagctggacaaccatcagaagtgcttcgccattctcaagctgtaccgtccgaaggtggataacagtgcggttgggacgtcgaagaaagtcgacatggctgaggttaaggattggaaagcggttcgtgtggatctggtggtcgctccagatgagcagttcgcctatgcgctgctcggttggacgggcagcggcatgtttcgtcgcgatactcgtcgctacgcggaggaagagcgcgacatgctgctcgacaaccatggtctctacgacctgaaaaagggcatctttctgagtgcggacagcgaagaagagattttcggtcatctggacctggattatctggagccgtgggaacgcaacgcg

SEQ ID NO: 5684 - protein, 394 aa, synthetic construct
  REGION 1..394: note = Variant of terminal deoxynucleotidyl transferase
MHHHHHHGGSGHPEGNTPEKEVPSVTARHVSPYACQRKTTLNNYNKKITDALEIMAENYRFKENLQARLEARRAASVLKSLPFEVTSMKDIQGLPCITDDVRPVIEEIIEVGESSRVKEILNDERYKAFKQFTSVFGVGVKTAEKWYRMGLRTLEEAKASKSLKLNKMQKAGFLYYEDLASGVSKEEADAVLDIVKETVWTVSPDALVTIAGGFRRGKPQGHDVDLLITIPGRPTDPELLHKVVDLLKKQGLLLYGDIRERTFVEGQLPNPKPDQLDNHQKCFAILKLYRPKVDNSAVGTSKKVDMAEVKDWKAVRVDLVVAPDEQFAYALLGWTGSGMFRRDTRRYAEEERDMLLDNHGLYDLKKGIFLSADSEEEIFGHLDLDYLEPWERNA

SEQ ID NO: 5685 - DNA, 1182 bp, synthetic construct
  misc_feature 1..1182: note = Variant of terminal deoxynucleotidyl transferase
  source 1..1182: mol_type = other DNA
atgcaccatcatcaccatcacgggggctccggccatccggaaggtaataccccggagaaggaggtgccgagcgttatcgcccgtcatgttagtccgtacgcgtgccagcgcaagaccacgctgaataactacaacaaaaagatcaccgacgcgctggaaatcatggccgagaactacaagtttaaagagaacctgcaggcgcgcctggaggcccgtcgcgccgcgagtgtcctgaaaagcctgccgttcgaggttaccagcatgaaagacatccaaggtctgccgtgcattaccgacgacgtacgtcctgtgatcgaagagatcatcgaagtaggcgagagcagccgtgttaaagaaatcctcaatgacgagcgctacaaggcctttaagcagttcaccagcgtgttcggtgtgggcgtcaagaccgcggaaaagtggtaccgtatgggcctccgtacgctggaagaagcaaaggccagtaagttcctgaagctgaacaagatgcagaaggcgggcttcctgtactacgaggatctggcgagcggtgttagtaaagaagaagccgatgccgttctggatatcgtgaaggaaacggtgcgcactgttagtccggatgcgctggtgaccatcgccggcggtttccgccgtggcaaacctcagggccacgacgttgacctgctgatcacgattccgggccgtcctacggatccggagctgctccacaacgtggttgatctgctcaagaagcaaggtctgctgctgtacggggacatccgtgagcgtacgttcgtggaggggcaactgccaaatcctaaacctgaccagctggacaaccatcagaagtgcttcgccattctcaagctgtaccgtccgaaggtggataacagtgcggttgggacgtcgaagaaagtcgacatggctgaggttaaggattggaaagcggttcgtgtggatctggtggtcgctccagatgagcagttcgcctatgcgctgctcggttggacgggcagcggcatgtttcgtcgcgatactcgtcgctacgcggaggaagagcgcgacatgctgctcgacaaccatggtctctacgacctgaaaaagggcacctttctgagtgcggacagcgaagaagagattttcggtcatctggacctggattatctggagccgtgggaacgcaacgcg

SEQ ID NO: 5686 - protein, 394 aa, synthetic construct
  REGION 1..394: note = Variant of terminal deoxynucleotidyl transferase
MHHHHHHGGSGHPEGNTPEKEVPSVIARHVSPYACQRKTTLNNYNKKITDALEIMAENYKFKENLQARLEARRAASVLKSLPFEVTSMKDIQGLPCITDDVRPVIEEIIEVGESSRVKEILNDERYKAFKQFTSVFGVGVKTAEKWYRMGLRTLEEAKASKFLKLNKMQKAGFLYYEDLASGVSKEEADAVLDIVKETVRTVSPDALVTIAGGFRRGKPQGHDVDLLITIPGRPTDPELLHNVVDLLKKQGLLLYGDIRERTFVEGQLPNPKPDQLDNHQKCFAILKLYRPKVDNSAVGTSKKVDMAEVKDWKAVRVDLVVAPDEQFAYALLGWTGSGMFRRDTRRYAEEERDMLLDNHGLYDLKKGTFLSADSEEEIFGHLDLDYLEPWERNA

SEQ ID NO: 5687 - DNA, 1182 bp, synthetic construct
  misc_feature 1..1182: note = Variant of terminal deoxynucleotidyl transferase
  source 1..1182: mol_type = other DNA
atgcaccatcatcaccatcacgggggctccggccatccggaaggtaataccccggagaaggaggtgccgagcgttatcgcccgtcatgttagtccgtacgcgtgccagcgcaagaccacgctgaataactacaacaaaaagatcaccgacgcgctggaaatcatggccgagaactacaagtttaaagagaacctgcaggcgcgcctggaggcccgtcgcgccgcgagtgtcctgaaaagcctgccgttcgaggttaccagcatgaaagacatccaaggtctgccgtgcattaccgacgacgtacgtcctgtgatcgaagagatcatcgaagtaggcgagagcagccgtgttaaagaaatcctcaatgacgagcgctacaaggcctttaagcagttcaccagcgtgttcggtgtgggcgtcaagaccgcggaaaagtggtaccgtatgggcctccgtacgctggaagaagcaaaggccagtaagagcctgaagctgaacaagatgcagaaggcgggcttcctgtactacgaggatctggcgagcggtgttagtaaagaagaagccgatgccgttctggatatcgtgaaggaaacggtgcgcactgttagtccggatgcgctggtgaccatcgccggcggtttccgccgtggcaaacctcagggccacgacgttgacctgctgatcacgattccgggccgtcctacggatccggagctgctccacaacgtggttgatctgctcaagaagcaaggtctgctgctgtacggggacatccgtgagcgtacgttcgtggaggggcaactgccaaatcctaaacctgaccagctggacaaccatcagaagtgcttcgccattctcaagctgtaccgtccgaaggtggataacagtgcggttgggacgtcgaagaaagtcgacatggctgaggttaaggattggaaagcggttcgtgtggatctggtggtcgctccagatgagcagttcgcctatgcgaaactcggttggacgggcagcggcatgtttcgtcgcgatactcgtcgctacgcggaggaagagcgcgacatgctgctcgacaaccatggtctctacgacctgaaaaagggcatctttctgagtgcggacagcgaagaagagattttcggtcatctggacctggattatctggagccgtgggaacgcaacgcg

SEQ ID NO: 5688 - protein, 394 aa, synthetic construct
  REGION 1..394: note = Variant of terminal deoxynucleotidyl transferase
MHHHHHHGGSGHPEGNTPEKEVPSVIARHVSPYACQRKTTLNNYNKKITDALEIMAENYKFKENLQARLEARRAASVLKSLPFEVTSMKDIQGLPCITDDVRPVIEEIIEVGESSRVKEILNDERYKAFKQFTSVFGVGVKTAEKWYRMGLRTLEEAKASKSLKLNKMQKAGFLYYEDLASGVSKEEADAVLDIVKETVRTVSPDALVTIAGGFRRGKPQGHDVDLLITIPGRPTDPELLHNVVDLLKKQGLLLYGDIRERTFVEGQLPNPKPDQLDNHQKCFAILKLYRPKVDNSAVGTSKKVDMAEVKDWKAVRVDLVVAPDEQFAYAKLGWTGSGMFRRDTRRYAEEERDMLLDNHGLYDLKKGIFLSADSEEEIFGHLDLDYLEPWERNA

SEQ ID NO: 5689 - DNA, 1182 bp, synthetic construct
  misc_feature 1..1182: note = Variant of terminal deoxynucleotidyl transferase
  source 1..1182: mol_type = other DNA
atgcaccatcatcaccatcacgggggctccggccatccggaaggtaataccccggagaaggaggtgccgagcgttactgcccgtcatgttagtccgtacgcgtgccagcgcaagaccacgctgaataactacaacaaaaagatcaccgacgcgctggaaatcatggccgagaactaccgttttaaagagaacctgcaggcgcgcctggaggcccgtcgcgccgcgagtgtcctgaaaagcctgccgttcgaggttaccagcatgaaagacatccaaggtctgccgtgcattaccgacgacgtacgtcctgtgatcgaagagatcatcgaagtaggcgagagcagccgtgttaaagaaatcctcaatgacgagcgctacaaggcctttaagcagttcaccagcgtgttcggtgtgggcgtcaagaccgcggaaaagtggtaccgtatgggcctccgtacgctggaagaagcaaaggccagtaagagtctgaagctgaacaagatgcagaaggcgggcttcctgtactacgaggatctggcgagcggtgttagtaaagaagaagccgatgccgttctggatatcgtgaaggaaacggtgtggactgttagtccggatgcgctggtgaccatcgccggcggtttccgccgtggcaaacctcagggccacgacgttgacctgctgatcaccattccgggccgtgggacggatccggagctgctccacaaagtggttgatctgctcaagaagcaaggtctgctgctgtacggggacatccgtgagcgtacgttcgtggaggggcagctgccaaatcctaaacctgaccagctggacaaccatcagaagtgcttcgccattctcaagctgtacaatccgaaggtggataacagtgcggttgggacgtcgaagaaagtcgacatggctgaggttaaggattggaaagcggttcgtgtggatctggtggtcgctccagatgagcagttcgcctatgcgctgctcggttggacgggcagcggcatgtttcgtcgcgatactcgtcgctacgcggaggaagagcgcgacatgctgctcgacaaccatggtctctacgacctgaaaaagggcatctttctgagtgcggacagcgaagaagagattttcggtcatctggacctggattatctggagccgtgggaacgcaacgcg

SEQ ID NO: 5690 - protein, 394 aa, synthetic construct
  REGION 1..394: note = Variant of terminal deoxynucleotidyl transferase
MHHHHHHGGSGHPEGNTPEKEVPSVTARHVSPYACQRKTTLNNYNKKITDALEIMAENYRFKENLQARLEARRAASVLKSLPFEVTSMKDIQGLPCITDDVRPVIEEIIEVGESSRVKEILNDERYKAFKQFTSVFGVGVKTAEKWYRMGLRTLEEAKASKSLKLNKMQKAGFLYYEDLASGVSKEEADAVLDIVKETVWTVSPDALVTIAGGFRRGKPQGHDVDLLITIPGRGTDPELLHKVVDLLKKQGLLLYGDIRERTFVEGQLPNPKPDQLDNHQKCFAILKLYNPKVDNSAVGTSKKVDMAEVKDWKAVRVDLVVAPDEQFAYALLGWTGSGMFRRDTRRYAEEERDMLLDNHGLYDLKKGIFLSADSEEEIFGHLDLDYLEPWERNA

SEQ ID NO: 5691 - DNA, 1182 bp, synthetic construct
  misc_feature 1..1182: note = Variant of terminal deoxynucleotidyl transferase
  source 1..1182: mol_type = other DNA
atgcaccatcatcaccatcacgggggctccggccatccggaaggtaataccccggagaaggaggtgccgagcgttattgcccgtcatgttagtccgtacgcgtgccagcgcaagaccacgctgaataactacaacaaaaagatcaccgacgcgctggaaatcatggccgagaactaccgttttaaagagaacctgcaggcgcgcctggaggcccgtcgcgccgcgagtgtcctgaaaagcctgccgttcgaggttaccagcatgaaagacatccaaggtctgccgtgcattaccgacgacgtacgtcctgtgatcgaagagatcatcgaagtaggcgagagcagccgtgttaaagaaatcctcaatgacgagcgctacaaggcctttaagcagttcaccagcgtgttcggtgtgggcgtcaagaccgcggaaaagtggtaccgtatgggcctccgtacgctggaagaagcaaaggccagtaagagtctgaagctgaacaagatgcagaaggcgggcttcctgtactacgaggatctggcgagcggtgttagtaaagaagaagccgatgccgttctggatatcgtgaaggaaacggtgcgcactgttagtccggatgcgctggtgaccatcgccggcggtttccgccgtggcaaacctcagggccacgacgttgacctgctgatcacgattccgggccgtcctacggatccggagctgctccacaaagtggttgatctgctcaagaagcaaggtctgctgctgtacggggacatccgtgagcgtacgttcgtggaggggcaactgccaaatcctaaacctgaccagctggacaaccatcagaagtgcttcgccattctcaagctgtaccgtccgaaggtggataacagtgcggttgggacgtcgaagaaagtcgacatggctgaggttaaggattggaaagcggttcgtgtggatctggtggtcgctccagatgagcagttcgcctatgcgctgctcggttggacgggcagcggcatgtttcgtcgcgatactcgtcgctacgcggaggaagagcgcgacatgctgctcgacaaccatggtctctacgacctgaaaaagggcatctttctgagtgcggacagcgaagaagagattttcggtcatctggacctggattatctggagccgtgggaacgcaacgcg

SEQ ID NO: 5692 - protein, 394 aa, synthetic construct; identical to SEQ ID NO: 5650
  REGION 1..394: note = Variant of terminal deoxynucleotidyl transferase

SEQ ID NO: 5693 - DNA, 1182 bp, synthetic construct
  misc_feature 1..1182: note = Variant of terminal deoxynucleotidyl transferase
  source 1..1182: mol_type = other DNA
atgcaccatcatcaccatcacgggggctccggccatccggaaggtaataccccggagaaggaggtgccgagcgttattgcccgtcatgttagtccgtacgcgtgccagcgcaagaccacgctgaataactacaacaaaaagatcaccgacgcgctggaaatcatggccgagaactacaagtttaaagagaacctgcaggcgcgcctggaggcccgtcgcgccgcgagtgtcctgaaaagcctgccgttcgaggttaccagcatgaaagacatccaaggtctgccgtgcattaccgacgacgtacgtcctgtgatcgaagagatcatcgaagtaggcgagagcagccgtgttaaagaaatcctcaatgacgagcgctacaaggcctttaagcagttcaccagcgtgttcggtgtgggcgtcaagaccgcggaaaagtggtaccgtatgggcctccgtacgctggaagaagcaaaggccagtaagagtctgaagctgaacaagatgcagaaggcgggcttcctgtactacgaggatctggcgagcggtgttagtaaagaagaagccgatgccgttctggatatcgtgaaggaaacggtgtggactgttgacccggatgcgctggtgaccatcgccggcggtttccgccgtggcaaacctcagggccacgacgttgacctgctgatccgtattccgggccgtgggacggatccggagctgctccacaaagtggttgatctgctcaagaagcaaggtctgctgctgtacggggacatccgtgagcgtacgttcgtggaggggcaactgccaaatcctaaacctgaccagctggacaaccatcagaagtgcttcgccattctcaagctgtaccgcccgaaggtggataacagtgcggttgggacgtcgaagaaagtcgacatggctgaggttaaggattggaaagcggttcgtgtggatctggtggtcgctccagatgagcagttcgcctatgcgctgctcggttggacgggcagcggcatgtttcgtcgcgatactcgtcgctacgcggaggaagagcgcgacatgctgctcgacaaccatggcctctacgacctgaaaaagggcatctttctgagtgcggacagcgaagaagagattttcggtcatctggacctggattatctggagccgtgggaacgcaacgcg

SEQ ID NO: 5694 - protein, 394 aa, synthetic construct; identical to SEQ ID NO: 5646
  REGION 1..394: note = Variant of terminal deoxynucleotidyl transferase

SEQ ID NO: 5695 - DNA, 1182 bp, synthetic construct
  misc_feature 1..1182: note = Variant of terminal deoxynucleotidyl transferase
  source 1..1182: mol_type = other DNA
atgcaccatcatcaccatcacgggggctccggccatccggaaggtaataccccggagaaggaggtgccgagcgttattgcccgtcatgttagtccgtacgcgtgccagcgcaagaccacgctgaataactacaacaaaaagatcaccgacgcgctggaaatcatggccgagaactaccgttttaaagagaacctgcaggcgcgcctggaggcccgtcgcgccgcgagtgtcctgaaaagcctgccgttcgaggttaccagcatgaaagacatccaaggtctgccgtgcattaccgacgacgtacgtcctgtgatcgaagagatcatcgaagtaggcgagagcagccgtgttaaagaaatcctcaatgacgagcgctacaaggcctttaagcagttcaccagcgtgttcggtgtgggcgtcaagaccgcggaaaagtggtaccgtatgggcctccgtacgctggaagaagcaaaggccagtaagagtctgaagctgaacaagatgcagaaggcgggcttcctgtactacgaggatctggcgagcggtgttagtaaagaagaagccgatgccgttctggatatcgtgaaggaaacggtgtggactgttagtccggatgcgctggtgaccatcgccggcggtttccgccgtggcaaacctcagggccacgacgttgacctgctgatcaccattccgggccgtgggacggatccggagctgctccacaaagtggttgatctgctcaagaagcaaggtctgctgctgtacggggacatccgtgagcgtacgttcgtggaggggcagctgccaaatcctaaacctgaccagctggacaaccatcagaagtgcttcgccattctcaagctgtaccgcccgaaggtggataacagtgcggttgggacgtcgaagaaagtcgacatggctgaggttaaggattggaaagcggttcgtgtggatctggtggtcgctccagatgagcagttcgcctatgcgctgctcggttggacgggcagcggcatgtttcgtcgcgatactcgtcgctacgcggaggaagagcgcgacatgctgctcgacaaccatggcctctacgacctgaaaaagggcatctttctgagtgcggacagcgaagaagagattttcggtcatctggacctggattatctggagccgtgggaacgcaacgcg

SEQ ID NO: 5696 - protein, 394 aa, synthetic construct
  REGION 1..394: note = Variant of terminal deoxynucleotidyl transferase
MHHHHHHGGSGHPEGNTPEKEVPSVIARHVSPYACQRKTTLNNYNKKITDALEIMAENYRFKENLQARLEARRAASVLKSLPFEVTSMKDIQGLPCITDDVRPVIEEIIEVGESSRVKEILNDERYKAFKQFTSVFGVGVKTAEKWYRMGLRTLEEAKASKSLKLNKMQKAGFLYYEDLASGVSKEEADAVLDIVKETVWTVSPDALVTIAGGFRRGKPQGHDVDLLITIPGRGTDPELLHKVVDLLKKQGLLLYGDIRERTFVEGQLPNPKPDQLDNHQKCFAILKLYRPKVDNSAVGTSKKVDMAEVKDWKAVRVDLVVAPDEQFAYALLGWTGSGMFRRDTRRYAEEERDMLLDNHGLYDLKKGIFLSADSEEEIFGHLDLDYLEPWERNA

SEQ ID NO: 5697 - DNA, 1182 bp, synthetic construct
  misc_feature 1..1182: note = Variant of terminal deoxynucleotidyl transferase
  source 1..1182: mol_type = other DNA
atgcaccatcatcaccatcacgggggctccggccatccggaaggtaataccccggagaaggaggtgccgagcgttactgcccgtcatgttagtccgtacgcgtgccagcgcaagaccacgctgaataactacaacaaaaagatcaccgacgcgctggaaatcatggccgagaactaccgttttaaagagaacctgcaggcgcgcctggaggcccgtcgcgccgcgagtgtcctgaaaagcctgccgttcgaggttaccagcatgaaagacatccaaggtctgccgtgcattaccgacgacgtacgtcctgtgatcgaagagatcatcgaagtaggcgagagcagccgtgttaaagaaatcctcaatgacgagcgctacaaggcctttaagcagttcaccagcgtgttcggtgtgggcgtcaagaccgcggaaaagtggtaccgtatgggcctccgtacgctggaagaagcaaaggccagtaagagtctgaagctgaacaagatgcagaaggcgggcttcctgtactacgaggatctggcgagcggtgttagtaaagaagaagccgatgccgttctggatatcgtgaaggaaacggtgtggactgttgacccggatgcgctggtgaccatcgccggcggtttccgccgtggcaaacctcagggccacgacgttgacctgctgatccgtattccgggccgtcctacggatccggagctgctccacaaagtggttgatctgctcaagaagcaaggtctgctgctgtacggggacatccgtgagcgtacgttcgtggaggggaagctgccaaatcctaaacctgaccagctggacaaccatcagaagtgcttcgccattctcaagctgtacaatccgaaggtggataacagtgcggttgggacgtcgaagaaagtcgacatggctgaggttaaggattggaaagcggttcgtgtggatctggtggtcgctccagatgagcagttcgcctatgcgctgctcggttggacgggcagcggcatgtttcgtcgcgatactcgtcgctacgcggaggaagagcgcgacatgctgctcgacaaccatggtctctacgacctgaaaaagggcatctttctgagtgcggacagcgaagaagagattttcggtcatctggacctggattatctggagccgtgggaacgcaacgcg

SEQ ID NO: 5698 - protein, 394 aa, synthetic construct
  REGION 1..394: note = Variant of terminal deoxynucleotidyl transferase
MHHHHHHGGSGHPEGNTPEKEVPSVTARHVSPYACQRKTTLNNYNKKITDALEIMAENYRFKENLQARLEARRAASVLKSLPFEVTSMKDIQGLPCITDDVRPVIEEIIEVGESSRVKEILNDERYKAFKQFTSVFGVGVKTAEKWYRMGLRTLEEAKASKSLKLNKMQKAGFLYYEDLASGVSKEEADAVLDIVKETVWTVDPDALVTIAGGFRRGKPQGHDVDLLIRIPGRPTDPELLHKVVDLLKKQGLLLYGDIRERTFVEGKLPNPKPDQLDNHQKCFAILKLYNPKVDNSAVGTSKKVDMAEVKDWKAVRVDLVVAPDEQFAYALLGWTGSGMFRRDTRRYAEEERDMLLDNHGLYDLKKGIFLSADSEEEIFGHLDLDYLEPWERNA

SEQ ID NO: 5699 - DNA, 1182 bp, synthetic construct
  misc_feature 1..1182: note = Variant of terminal deoxynucleotidyl transferase
  source 1..1182: mol_type = other DNA
atgcaccatcatcaccatcacgggggctccggccatccggaaggtaataccccggagaaggaggtgccgagcgttatcgcccgtcatgttagtccgtacgcgtgccagcgcaagaccacgctgaataactacaacaaaaagatcaccgacgcgctggaaatcatggccgagaactacaagtttaaagagaacctgcaggcgcgcctggaggcccgtcgcgccgcgagtgtcctgaaaagcctgccgttcgaggttaccagcatgaaagacatccaaggtctgccgtgcattaccgacgacgtacgtcctgtgatcgaagagatcatcgaagtaggcgagagcagccgtgttaaagaaatcctcaatgacgagcgctacaaggcctttaagcagttcaccagcgtgttcggtgtgggcgtcaagaccgcggaaaagtggtaccgtatgggcctccgtacgctggaagaagcaaaggccagtaagttcctgaagctgaacaagatgcagaaggcgggcttcctgtactacgaggatctggcgagcggtgttagtaaagaagaagccgatgccgttctggatatcgtgaaggaaacggtgcgcactgttagtccggatgcgctggtgaccatcgccggcggtttccgccgtggcaaacctcagggccacgacgttgacctgctgatcacgattccgggccgtcctacggatccggagctgctcagcaaagtggttgatctgctcaagaagcaaggtctgctgctgtacggggacatccgtgagcgtacgttcgtggaggggcaactgccaaatcctaaacctgaccagctggacaatcatcagaagtgcttcgccattctcaagctgtaccgtccgaaggtggataacagtgcggttgggacgtcgaagaaagtcgacatggctgaggttaaggattggaaagcggttcgtgtggatctggtggtcgctccagatgagcagttcgcctatgcgaaactcggttggacgggcagcggcatgtttcgtcgcgatactcgtcgctacgcggaggaagagcgcgacatgctgctcgacaaccatggtctctacgacctgaaaaagggcatctttctgagtgcggacagcgaagaagagattttcggtcatctggacctggattatctggagccgtgggaacgcaacgcg

SEQ ID NO: 5700 - protein, 394 aa, synthetic construct
  REGION 1..394: note = Variant of terminal deoxynucleotidyl transferase
MHHHHHHGGSGHPEGNTPEKEVPSVIARHVSPYACQRKTTLNNYNKKITDALEIMAENYKFKENLQARLEARRAASVLKSLPFEVTSMKDIQGLPCITDDVRPVIEEIIEVGESSRVKEILNDERYKAFKQFTSVFGVGVKTAEKWYRMGLRTLEEAKASKFLKLNKMQKAGFLYYEDLASGVSKEEADAVLDIVKETVRTVSPDALVTIAGGFRRGKPQGHDVDLLITIPGRPTDPELLSKVVDLLKKQGLLLYGDIRERTFVEGQLPNPKPDQLDNHQKCFAILKLYRPKVDNSAVGTSKKVDMAEVKDWKAVRVDLVVAPDEQFAYAKLGWTGSGMFRRDTRRYAEEERDMLLDNHGLYDLKKGIFLSADSEEEIFGHLDLDYLEPWERNA

SEQ ID NO: 5701 - DNA, 1182 bp, synthetic construct
  misc_feature 1..1182: note = Variant of terminal deoxynucleotidyl transferase
  source 1..1182: mol_type = other DNA
atgcaccatcatcaccatcacgggggctccggccatccggaaggtaataccccggagaaggaggtgccgagcgttactgcccgtcatgttagtccgtacgcgtgccagcgcaagaccacgctgaataactacaacaaaaagatcaccgacgcgctggaaatcatggccgagaactaccgttttaaagagaacctgcaggcgcgcctggaggcccgtcgcgccgcgagtgtcctgaaaagcctgccgttcgaggttaccagcatgaaagacatccaaggtctgccgtgcattaccgacgacgtacgtcctgtgatcgaagagatcatcgaagtaggcgagagcagccgtgttaaagaaatcctcaatgacgagcgctacaaggcctttaagcagttcaccagcgtgttcggtgtgggcgtcaagaccgcggaaaagtggtaccgtatgggcctccgtacgctggaagaagcaaaggccagtaagagtctgaagctgaacaagatgcagaaggcgggcttcctgtactacgaggatctggcgagcggtgttagtaaagaagaagccgatgccgttctggatatcgtgaaggaaacggtgcgcactgttagtccggatgcgctggtgaccatcgccggcggtttccgccgtggcaaacctcagggccacgacgttgacctgctgatccgtattccgggccgtcctacggatccggagctgctccacaaagtggttgatctgctcaagaagcaaggtctgctgctgtacggggacatccgtgagcgtacgttcgtggaggggaagctgccaaatcctaaacctgaccagctggacaaccatcagaagtgcttcgccattctcaagctgtaccgcccgaaggtggataacagtgcggttgggacgtcgaagaaagtcgacatggctgaggttaaggattggaaagcggttcgtgtggatctggtggtcgctccagatgagcagttcgcctatgcgctgctcggttggacgggcagcggcatgtttcgtcgcgatactcgtcgctacgcggaggaagagcgcgacatgctgctcgacaaccatggcctctacgacctgaaaaagggcatctttctgagtgcggacagcgaagaagagattttcggtcatctggacctggattatctggagccgtgggaacgcaacgcg

SEQ ID NO: 5702 - protein, 394 aa, synthetic construct
  REGION 1..394: note = Variant of terminal deoxynucleotidyl transferase
MHHHHHHGGSGHPEGNTPEKEVPSVTARHVSPYACQRKTTLNNYNKKITDALEIMAENYRFKENLQARLEARRAASVLKSLPFEVTSMKDIQGLPCITDDVRPVIEEIIEVGESSRVKEILNDERYKAFKQFTSVFGVGVKTAEKWYRMGLRTLEEAKASKSLKLNKMQKAGFLYYEDLASGVSKEEADAVLDIVKETVRTVSPDALVTIAGGFRRGKPQGHDVDLLIRIPGRPTDPELLHKVVDLLKKQGLLLYGDIRERTFVEGKLPNPKPDQLDNHQKCFAILKLYRPKVDNSAVGTSKKVDMAEVKDWKAVRVDLVVAPDEQFAYALLGWTGSGMFRRDTRRYAEEERDMLLDNHGLYDLKKGIFLSADSEEEIFGHLDLDYLEPWERNA

SEQ ID NO: 5703 - DNA, 1182 bp, synthetic construct
  misc_feature 1..1182: note = Variant of terminal deoxynucleotidyl transferase
  source 1..1182: mol_type = other DNA
atgcaccatcatcaccatcacgggggctccggccatccggaaggtaataccccggagaaggaggtgccgagcgttatcgcccgtcatgttagtccgtacgcgtgccagcgcaagaccacgctgaataactacaacaaaaagatcaccgacgcgctggaaatcatggccgagaactacaagtttaaagagaacctgcaggcgcgcctggaggcccgtcgcgccgcgagtgtcctgaaaagcctgccgttcgaggttaccagcatgaaagacatccaaggtctgccgtgcattaccgacgacgtacgtcctgtgatcgaagagatcatcgaagtaggcgagagcagccgtgttaaagaaatcctcaatgacgagcgctacaaggcctttaagcagttcaccagcgtgttcggtgtgggcgtcaagaccgcggaaaagtggtaccgtatgggcctccgtacgctggaagaagcaaaggccagtaagagcctgaagctgaacaagatgcagaaggcgggcttcctgtactacgaggatctggcgagcggtgttagtaaagaagaagccgatgccgttctggatatcgtgaaggaaacggtgcgcactgttagtccggatgcgctggtgaccatcgccggcggtttccgccgtggcaaacctcagggccacgacgttgacctgctgatcacgattccgggccgtcctacggatccggagctgctccacaaagtggttgatctgctcaagaagcaaggtctgctgctgtacggggacatccgtgagcgtacgttcgtggaggggcaactgccaaatcctaaacctgaccagctggacaaccatcagaagtgcttcgccattctcaagctgtaccgtccgaaggtggataacagtgcggttgggacgtcgaagaaagtcgacatggctgaggttaaggattggaaagcggttcgtgtggatctggtggtcgctccagatgagcagttcgcctatgcgaaactcggttggacgggcagcggcatgtttcgtcgcgatactcgtcgctacgcggaggaagagcgcgacatgctgctcgacaaccatggtctctacgacctgaaaaagggcatctttctgagtgcggacagcgaagaagagattttcggtcatctggacctggattatctggagccgtgggaacgcaacgcg

SEQ ID NO: 5704 - protein, 394 aa, synthetic construct
  REGION 1..394: note = Variant of terminal deoxynucleotidyl transferase
MHHHHHHGGSGHPEGNTPEKEVPSVIARHVSPYACQRKTTLNNYNKKITDALEIMAENYKFKENLQARLEARRAASVLKSLPFEVTSMKDIQGLPCITDDVRPVIEEIIEVGESSRVKEILNDERYKAFKQFTSVFGVGVKTAEKWYRMGLRTLEEAKASKSLKLNKMQKAGFLYYEDLASGVSKEEADAVLDIVKETVRTVSPDALVTIAGGFRRGKPQGHDVDLLITIPGRPTDPELLHKVVDLLKKQGLLLYGDIRERTFVEGQLPNPKPDQLDNHQKCFAILKLYRPKVDNSAVGTSKKVDMAEVKDWKAVRVDLVVAPDEQFAYAKLGWTGSGMFRRDTRRYAEEERDMLLDNHGLYDLKKGIFLSADSEEEIFGHLDLDYLEPWERNA

SEQ ID NO: 5705 - DNA, 1182 bp, synthetic construct
  misc_feature 1..1182: note = Variant of terminal deoxynucleotidyl transferase
  source 1..1182: mol_type = other DNA
atgcaccatcatcaccatcacgggggctccggccatccggaaggtaataccccggagaaggaggtgccgagcgttatcgcccgtcatgttagtccgtacgcgtgccagcgcaagaccacgctgaataactacaacaaaaagatcaccgacgcgctggaaatcatggccgagaactacaagtttaaagagaacctgcaggcgcgcctggaggcccgtcgcgccgcgagtgtcctgaaaagcctgccgttcgaggttaccagcatgaaagacatccaaggtctgccgtgcattaccgacgacgtacgtcctgtgatcgaagagatcatcgaagtaggcgagagcagccgtgttaaagaaatcctcaatgacgagcgctacaaggcctttaagcagttcaccagcgtgttcggtgtgggcgtcaagaccgcggaaaagtggtaccgtatgggcctccgtacgctggaagaagtaaaggccagtaagttcctgaagctgaacaagatgcagaaggcgggcttcctgtactacgaggatctggcgagcggtgttagtaaagaagaagccgatgccgttctggatatcgtgaaggaaacggtgcgcactgttagtccggatgcgctggtgaccatcgccggcggtttccgccgtggcaaacctcagggccacgacgttgacctgctgatcacgattccgggccgtcctacggatccggagctgctccacaacgtggttgatctgctcaagaagcaaggtctgctgctgtacggggacatccgtgcgcgtacgttcgtggaggggcaactgccaaatcctaaacctgaccagctggacaaccatcagaagtgcttcgccattctcaagctgtaccgtccgaaggtggataacagtgcggttgggacgtcgaagaaagtcgacatggctgaggttaaggattggaaagcggttcgtgtggatctggtggtcgctccagatgagcagttcgcctatgcgaaactcggttggacgggcagcggcatgtttcgtcgcgatactcgtcgctacgcggaggaagagcgcgacatgctgctcgacaaccatggtctctacgacctgaaaaagggcatctttctgagtgcggacagcgaagaagagattttcggtcatctggacctggattatctggagccgtgggaacgcaacgcg

SEQ ID NO: 5706 - protein, 394 aa, synthetic construct
  REGION 1..394: note = Variant of terminal deoxynucleotidyl transferase
MHHHHHHGGSGHPEGNTPEKEVPSVIARHVSPYACQRKTTLNNYNKKITDALEIMAENYKFKENLQARLEARRAASVLKSLPFEVTSMKDIQGLPCITDDVRPVIEEIIEVGESSRVKEILNDERYKAFKQFTSVFGVGVKTAEKWYRMGLRTLEEVKASKFLKLNKMQKAGFLYYEDLASGVSKEEADAVLDIVKETVRTVSPDALVTIAGGFRRGKPQGHDVDLLITIPGRPTDPELLHNVVDLLKKQGLLLYGDIRARTFVEGQLPNPKPDQLDNHQKCFAILKLYRPKVDNSAVGTSKKVDMAEVKDWKAVRVDLVVAPDEQFAYAKLGWTGSGMFRRDTRRYAEEERDMLLDNHGLYDLKKGIFLSADSEEEIFGHLDLDYLEPWERNA

SEQ ID NO: 5707 - DNA, 1182 bp, synthetic construct
  misc_feature 1..1182: note = Variant of terminal deoxynucleotidyl transferase
  source 1..1182: mol_type = other DNA
atgcaccatcatcaccatcacgggggctccggccatccggaaggtaataccccggagaaggaggtgccgagcgttattgcccgtcatgttagtccgtacgcgtgccagcgcaagaccacgctgaataactacaacaaaaagatcaccgacgcgctggaaatcatggccgagaactaccgttttaaagagaacctgcaggcgcgcctggaggcccgtcgcgccgcgagtgtcctgaaaagcctgccgttcgaggttaccagcatgaaagacatccaaggtctgccgtgcattaccgacgacgtacgtcctgtgatcgaagagatcatcgaagtaggcgagagcagccgtgttaaagaaatcctcaatgacgagcgctacaaggcctttaagcagttcaccagcgtgttcggtgtgggcgtcaagaccgcggaaaagtggtaccgtatgggcctccgtacgctggaagaagcaaaggccagtaagagtctgaagctgaacaagatgcagaaggcgggcttcctgtactacgaggatctggcgagcggtgttagtaaagaagaagccgatgccgttctggatatcgtgaaggaaacggtgtggactgttagtccggatgcgctggtgaccatcgccggcggtttccgccgtggcaaacctcagggccacgacgttgacctgctgatccgtattccgggccgtgggacggatccggagctgctccacaaagtggttgatctgctcaagaagcaaggtctgctgctgtacggggacatccgtgagcgtacgttcgtggaggggcaactgccaaatcctaaacctgaccagctggacaaccatcagaagtgcttcgccattctcaagctgtaccgtccgaaggtggataacagtgcggttgggacgtcgaagaaagtcgacatggctgaggttaaggattggaaagcggttcgtgtggatctggtggtcgctccagatgagcagttcgcctatgcgctgctcggttggacgggcagcggcatgtttcgtcgcgatactcgtcgctacgcggaggaagagcgcgacatgctgctcgacaaccatggtctctacgacctgaaaaagggcatctttctgagtgcggacagcgaagaagagattttcggtcatctggacctggattatctggagccgtgggaacgcaacgcg

SEQ ID NO: 5708 - protein, 394 aa, synthetic construct
  REGION 1..394: note = Variant of terminal deoxynucleotidyl transferase
MHHHHHHGGSGHPEGNTPEKEVPSVIARHVSPYACQRKTTLNNYNKKITDALEIMAENYRFKENLQARLEARRAASVLKSLPFEVTSMKDIQGLPCITDDVRPVIEEIIEVGESSRVKEILNDERYKAFKQFTSVFGVGVKTAEKWYRMGLRTLEEAKASKSLKLNKMQKAGFLYYEDLASGVSKEEADAVLDIVKETVWTVSPDALVTIAGGFRRGKPQGHDVDLLIRIPGRGTDPELLHKVVDLLKKQGLLLYGDIRERTFVEGQLPNPKPDQLDNHQKCFAILKLYRPKVDNSAVGTSKKVDMAEVKDWKAVRVDLVVAPDEQFAYALLGWTGSGMFRRDTRRYAEEERDMLLDNHGLYDLKKGIFLSADSEEEIFGHLDLDYLEPWERNA

SEQ ID NO: 5709 - DNA, 1182 bp, synthetic construct
  misc_feature 1..1182: note = Variant of terminal deoxynucleotidyl transferase
  source 1..1182: mol_type = other DNA
atgcaccatcatcaccatcacgggggctccggccatccggaaggtaataccccggagaaggaggtgccgagcgttatcgcccgtcatgttagtccgtacgcgtgccagcgcaagaccacgctgaataactacaacaaaaagatcaccgacgcgctggaaatcatggccgagaactacaagtttaaagagaacctgcaggcgcgcctggaggcccgtcgcgccgcgagtgtcctgaaaagcctgccgttcgaggttaccagcatgaaagacatccaaggtctgccgtgcattaccgacgacgtacgtcctgtgatcgaagagatcatcgaagtaggcgagagcagccgtgttaaagaaatcctcaatgacgagcgctacaaggcctttaagcagttcaccagcgtgttcggtgtgggcgtcaagaccgcggaaaagtggtaccgtatgggcctccgtacgctggaagaagtaaaggccagtaagttcctgaagctgaacaagatgcagaaggcgggcttcctgtactacgaggatctggcgagcggtgttagtaaagaagaagccgatgccgttctggatatcgtgaaggaaacggtgcgcactgttagtccggatgcgctggtgaccatcgccggcggtttccgccgtggcaaacctcagggccacgacgttgacctgctgatcacgattccgggccgtcctacggatccggagctgctcagcaaagtggttgatctgctcaagaagcaaggtctgctgctgtacggggacatccgtgagcgtacgttcgtggaggggcaactgccaaatcctaaacctgaccagctggacggtcatcagaagtgcttcgccattctcaagctgtaccgtccgaaggtggataacagtgcggttgggacgtcgaagaaagtcgacatggctgaggttaaggattggaaagcggttcgtgtggatctggtggtcgctccagatgagcagttcgcctatgcgaaactcggttggacgggcagcggcatgtttcgtcgcgatactcgtcgctacgcggaggaagagcgcgacatgctgctcgacaaccatggtctctacgacctgaaaaagggccagtttctgagtgcggacagcgaagaagagattttcggtcatctggacctggattatctggagccgtgggaacgcaacgcg

SEQ ID NO: 5710 - protein, 394 aa, synthetic construct
  REGION 1..394: note = Variant of terminal deoxynucleotidyl transferase
MHHHHHHGGSGHPEGNTPEKEVPSVIARHVSPYACQRKTTLNNYNKKITDALEIMAENYKFKENLQARLEARRAASVLKSLPFEVTSMKDIQGLPCITDDVRPVIEEIIEVGESSRVKEILNDERYKAFKQFTSVFGVGVKTAEKWYRMGLRTLEEVKASKFLKLNKMQKAGFLYYEDLASGVSKEEADAVLDIVKETVRTVSPDALVTIAGGFRRGKPQGHDVDLLITIPGRPTDPELLSKVVDLLKKQGLLLYGDIRERTFVEGQLPNPKPDQLDGHQKCFAILKLYRPKVDNSAVGTSKKVDMAEVKDWKAVRVDLVVAPDEQFAYAKLGWTGSGMFRRDTRRYAEEERDMLLDNHGLYDLKKGQFLSADSEEEIFGHLDLDYLEPWERNA

SEQ ID NO: 5711 - DNA, 1182 bp, synthetic construct
  misc_feature 1..1182: note = Variant of terminal deoxynucleotidyl transferase
  source 1..1182: mol_type = other DNA
atgcaccatcatcaccatcacgggggctccggccatccggaaggtaataccccggagaaggaggtgccgagcgttatcgcccgtcatgttagtccgtacgcgtgccagcgcaagaccacgctgaataactacaacaaaaagatcaccgacgcgctggaaatcatggccgagaactacaagtttaaagagaacctgcaggcgcgcctggaggcccgtcgcgccgcgagtgtcctgaaaagcctgccgttcgaggttaccagcatgaaagacatccaaggtctgccgtgcattaccgacgacgtacgtcctgtgatcgaagagatcatcgaagtaggcgagagcagccgtgttaaagaaatcctcaatgacgagcgctacaaggcctttaagcagttcaccagcgtgttcggtgtgggcgtcaagaccgcggaaaagtggtaccgtatgggcctccgtacgctggaagaactaaaggccagtaagttcctgaagctgaacaagatgcagaaggcgggcttcctgtactacgaggatctggcgagcggtgttagtaaagaagaagccgatgccgttctggatatcgtgaaggaaacggtgcgcactgttagtccggatgcgctggtgaccatcgccggcggtttccgccgtggcaaacctcagggccacgacgttgacctgctgatcacgattccgggccgtcctacggatccggagctgctcagcaaagtggttgatctgctcaagaagcaaggtctgctgctgtacggggacatccgtgagcgtacgttcgtggaggggcaactgccaaatcctaaacctgaccagctggacaaccatcagaagtgcttcgccattctcaagctgtaccgtccgaaggtggataacagtgcggttgggacgtcgaagaaagtcgacatggctgaggttaaggattggaaagcggttcgtgtggatctggtggtcgctccagatgagcagttcgcctatgcgaaactcggttggacgggcagcggcatgtttcgtcgcgatactcgtcgctacgcggaggaagagcgcgacatgctgctcgacaaccatggtctctacgacctgaaaaagggcatctttctgagtgcggacagcgaagaagagattttcggtcatctggacctggattatctggagccgtgggaacgcaacgcg

SEQ ID NO: 5712 - protein, 394 aa, synthetic construct
  REGION 1..394: note = Variant of terminal deoxynucleotidyl transferase
MHHHHHHGGSGHPEGNTPEKEVPSVIARHVSPYACQRKTTLNNYNKKITDALEIMAENYKFKENLQARLEARRAASVLKSLPFEVTSMKDIQGLPCITDDVRPVIEEIIEVGESSRVKEILNDERYKAFKQFTSVFGVGVKTAEKWYRMGLRTLEELKASKFLKLNKMQKAGFLYYEDLASGVSKEEADAVLDIVKETVRTVSPDALVTIAGGFRRGKPQGHDVDLLITIPGRPTDPELLSKVVDLLKKQGLLLYGDIRERTFVEGQLPNPKPDQLDNHQKCFAILKLYRPKVDNSAVGTSKKVDMAEVKDWKAVRVDLVVAPDEQFAYAKLGWTGSGMFRRDTRRYAEEERDMLLDNHGLYDLKKGIFLSADSEEEIFGHLDLDYLEPWERNA

SEQ ID NO: 5713 - DNA, 1182 bp, synthetic construct
  misc_feature 1..1182: note = Variant of terminal deoxynucleotidyl transferase
  source 1..1182: mol_type = other DNA
atgcaccatcatcaccatcacgggggctccggccatccggaaggtaataccccggagaaggaggtgccgagcgttatcgcccgtcatgttagtccgtacgcgtgccagcgcaagaccacgctgaataactacaacaaaaagatcaccgacgcgctggaaatcatggccgagaactacaagtttaaagagaacctgcaggcgcgcctggaggcccgtcgcgccgcgagtgtcctgaaaagcctgccgttcgaggttaccagcatgaaagacatccaaggtctgccgtgcattaccgacgacgtacgtcctgtgatcgaagagatcatcgaagtaggcgagagcagccgtgttaaagaaatcctcaatgacgagcgctacaaggcctttaagcagttcaccagcgtgttcggtgtgggcgtcaagaccgcggaaaagtggtaccgtatgggcctccgtacgctggaagaagcaaaggccagtaagagtctgaagctgaacaagatgcagaaggcgggcttcctgtactacgaggatctggcgagcggtgttagtaaagaagaagccgatgccgttctggatatcgtgaaggaaacggtgcgcactgttagtccggatgcgctggtgaccatcgccggcggtttccgccgtggcaaacctcagggccacgacgttgacctgctgatcacgattccgggccgtcctacggatccggagctgctccacaaagtggttgatctgctcaagaagcaaggtctgctgctgtacggggacatccgtgagcgtacgttcgtggaggggcaactgccaaatcctaaacctgaccagctggacaaccatcagaagtgcttcgccattctcaagctgtaccgtccgaaggtggataacagtgcggttgggacgtcgaagaaagtcgacatggctgaggttaaggattggaaagcggttcgtgtggatctggtggtcgctccagatgagcagttcgcctatgcgctgctcggttggacgggcagcggcatgtttcgtcgcgatactcgtcgctacgcggaggaagagcgcgacatgctgctcgacaaccatggtctctacgacctgaaaaagggccagtttctgagtgcggacagcgaagaagagattttcggtcatctggacctggattatctggagccgtgggaacgcaacgcg

SEQ ID NO: 5714 - protein, 394 aa, synthetic construct
  REGION 1..394: note = Variant of terminal deoxynucleotidyl transferase
MHHHHHHGGSGHPEGNTPEKEVPSVIARHVSPYACQRKTTLNNYNKKITDALEIMAENYKFKENLQARLEARRAASVLKSLPFEVTSMKDIQGLPCITDDVRPVIEEIIEVGESSRVKEILNDERYKAFKQFTSVFGVGVKTAEKWYRMGLRTLEEAKASKSLKLNKMQKAGFLYYEDLASGVSKEEADAVLDIVKETVRTVSPDALVTIAGGFRRGKPQGHDVDLLITIPGRPTDPELLHKVVDLLKKQGLLLYGDIRERTFVEGQLPNPKPDQLDNHQKCFAILKLYRPKVDNSAVGTSKKVDMAEVKDWKAVRVDLVVAPDEQFAYALLGWTGSGMFRRDTRRYAEEERDMLLDNHGLYDLKKGQFLSADSEEEIFGHLDLDYLEPWERNA

SEQ ID NO: 5715 - DNA, 1182 bp, synthetic construct
  misc_feature 1..1182: note = Variant of terminal deoxynucleotidyl transferase
  source 1..1182: mol_type = other DNA
atgcaccatcatcaccatcacgggggctccggccatccggaaggtaataccccggagaaggaggtgccgagcgttactgcccgtcatgttagtccgtacgcgtgccagcgcaagaccacgctgaataactacaacaaaaagatcaccgacgcgctggaaatcatggccgagaactaccgttttaaagagaacctgcaggcgcgcctggaggcccgtcgcgccgcgagtgtcctgaaaagcctgccgttcgaggttaccagcatgaaagacatccaaggtctgccgtgcattaccgacgacgtacgtcctgtgatcgaagagatcatcgaagtaggcgagagcagccgtgttaaagaaatcctcaatgacgagcgctacaaggcctttaagcagttcaccagcgtgttcggtgtgggcgtcaagaccgcggaaaagtggtaccgtatgggcctccgtacgctggaagaagcaaaggccagtaagagtctgaagctgaacaagatgcagaaggcgggcttcctgtactacgaggatctggcgagcggtgttagtaaagaagaagccgatgccgttctggatatcgtgaaggaaacggtgtggactgttgacccggatgcgctggtgaccatcgccggcggtttccgccgtggcaaacctcagggccacgacgttgacctgctgatccgtattccgggccgtgggacggatccggagctgctccacaaagtggttgatctgctcaagaagcaaggtctgctgctgtacggggacatccgtgagcgtacgttcgtggaggggaagctgccaaatcctaaacctgaccagctggacaaccatcagaagtgcttcgccattctcaagctgtaccgtccgaaggtggataacagtgcggttgggacgtcgaagaaagtcgacatggctgaggttaaggattggaaagcggttcgtgtggatctggtggtcgctccagatgagcagttcgcctatgcgctgctcggttggacgggcagcggcatgtttcgtcgcgatactcgtcgctacgcggaggaagagcgcgacatgctgctcgacaaccatggtctctacgacctgaaaaagggcatctttctgagtgcggacagcgaagaagagattttcggtcatctggacctggattatctggagccgtgggaacgcaacgcg

SEQ ID NO: 5716 - protein, 394 aa, synthetic construct
  REGION 1..394: note = Variant of terminal deoxynucleotidyl transferase
MHHHHHHGGSGHPEGNTPEKEVPSVTARHVSPYACQRKTTLNNYNKKITDALEIMAENYRFKENLQARLEARRAASVLKSLPFEVTSMKDIQGLPCITDDVRPVIEEIIEVGESSRVKEILNDERYKAFKQFTSVFGVGVKTAEKWYRMGLRTLEEAKASKSLKLNKMQKAGFLYYEDLASGVSKEEADAVLDIVKETVWTVDPDALVTIAGGFRRGKPQGHDVDLLIRIPGRGTDPELLHKVVDLLKKQGLLLYGDIRERTFVEGKLPNPKPDQLDNHQKCFAILKLYRPKVDNSAVGTSKKVDMAEVKDWKAVRVDLVVAPDEQFAYALLGWTGSGMFRRDTRRYAEEERDMLLDNHGLYDLKKGIFLSADSEEEIFGHLDLDYLEPWERNA

SEQ ID NO: 5717 - DNA, 1182 bp, synthetic construct
  misc_feature 1..1182: note = Variant of terminal deoxynucleotidyl transferase
  source 1..1182: mol_type = other DNA
atgcaccatcatcaccatcacgggggctccggccatccggaaggtaataccccggagaaggaggtgccgagcgttatcgcccgtcatgttagtccgtacgcgtgccagcgcaagaccacgctgaataactacaacaaaaagatcaccgacgcgctggaaatcatggccgagaactacaagtttaaagagaacctgcaggcgcgcctggaggcccgtcgcgccgcgagtgtcctgaaaagcctgccgttcgaggttaccagcatgaaagacatccaaggtctgccgtgcattaccgacgacgtacgtcctgtgatcgaagagatcatcgaagtaggcgagagcagccgtgttaaagaaatcctcaatgacgagcgctacaaggcctttaagcagttcaccagcgtgttcggtgtgggcgtcaagaccgcggaaaagtggtaccgtatgggcctccgtacgctggaagaagtaaaggccagtaagttcctgaagctgaacaagatgcagaaggcgggcttcctgtactacgaggatctggcgagcggtgttagtaaagaagaagccgatgccgttctggatatcgtgaaggaaacggtgcgcactgttagtccggatgcgctggtgaccatcgccggcggtttccgccgtggcaaacctcagggccacgacgttgacctgctgatcacgattccgggccgtcctacggatccggagctgctcagcaacgtggttgatctgctcaagaagcaaggtctgctgctgtacggggacatccgtgagcgtacgttcgtggaggggcaactgccaaatcctaaacctgaccagctggacaaccatcagaagtgcttcgccattctcaagctgtaccgtccgaaggtggataacagtgcggttgggacgtcgaagaaagtcgacatggctgaggttaaggattggaaagcggttcgtgtggatctggtggtcgctccagatgagcagcatgcctatgcgaaactcggttggacgggcagcggcatgtttcgtcgcgatactcgtcgctacgcggaggaagagcgcgacatgctgctcgacaaccatggtctctacgacctgaaaaagggcatctttctgagtgcggacagcgaagaagagattttcggtcatctggacctggattatctggagccgtgggaacgcaacgcg

SEQ ID NO: 5718 - protein, 394 aa, synthetic construct
  REGION 1..394: note = Variant of terminal deoxynucleotidyl transferase
MHHHHHHGGSGHPEGNTPEKEVPSVIARHVSPYACQRKTTLNNYNKKITDALEIMAENYKFKENLQARLEARRAASVLKSLPFEVTSMKDIQGLPCITDDVRPVIEEIIEVGESSRVKEILNDERYKAFKQFTSVFGVGVKTAEKWYRMGLRTLEEVKASKFLKLNKMQKAGFLYYEDLASGVSKEEADAVLDIVKETVRTVSPDALVTIAGGFRRGKPQGHDVDLLITIPGRPTDPELLSNVVDLLKKQGLLLYGDIRERTFVEGQLPNPKPDQLDNHQKCFAILKLYRPKVDNSAVGTSKKVDMAEVKDWKAVRVDLVVAPDEQHAYAKLGWTGSGMFRRDTRRYAEEERDMLLDNHGLYDLKKGIFLSADSEEEIFGHLDLDYLEPWERNA

SEQ ID NO: 5719 - DNA, 1182 bp, synthetic construct
  misc_feature 1..1182: note = Variant of terminal deoxynucleotidyl transferase
  source 1..1182: mol_type = other DNA
atgcaccatcatcaccatcacgggggctccggccatccggaaggtaataccccggagaaggaggtgccgagcgttatcgcccgtcatgttagtccgtacgcgtgccagcgcaagaccacgctgaataactacaacaaaaagatcaccgacgcgctggaaatcatggccgagaactacaagtttaaagagaacctgcaggcgcgcctggaggcccgtcgcgccgcgagtgtcctgaaaagcctgccgttcgaggttaccagcatgaaagacatccaaggtctgccgtgcattaccgacgacgtacgtcctgtgatcgaagagatcatcgaagtaggcgagagcagccgtgttaaagaaatcctcaatgacgagcgctacaaggcctttaagcagttcaccagcgtgttcggtgtgggcgtcaagaccgcggaaaagtggtaccgtatgggcctccgtacgctggaagaagtaaaggccagtaagttcctgaagctgaacaagatgcagaaggcgggcttcctgtactacgaggatctggcgagcggtgttagtaaagaagaagccgatgccgttctggatatcgtgaaggaaacggtgcgcactgttagtccggatgcgctggtgaccatcgccggcggtttccgccgtggcaaacctcagggccacgacgttgacctgctgatcacgattccgggccgtcctacggatccggagctgctcagcaacgtggttgatctgctcaagaagcaaggtctgctgctgtacggggacatccgtgcgcgtacgttcgtggaggggcaactgccaaatcctaaacctgaccagctggacaatcatcagaagtgcttcgccattctcaagctgtaccgtccgaaggtggataacagtgcggttgggacgtcgaagaaagtcgacatggctgaggttaaggattggaaagcggttcgtgtggatctggtggtcgctccagatgagcagttcgcctatgcgctgctcggttggacgggcagcggcatgtttcgtcgcgatactcgtcgctacgcggaggaagagcgcgacatgctgctcgacaaccatggtctctacgacctgaaaaagggcatctttctgagtgcggacagcgaagaagagattttcggtcatctggacctggattatctggagccgtgggaacgcaacgcg

SEQ ID NO: 5720 - protein, 394 aa, synthetic construct
  REGION 1..394: note = Variant of terminal deoxynucleotidyl transferase
MHHHHHHGGSGHPEGNTPEKEVPSVIARHVSPYACQRKTTLNNYNKKITDALEIMAENYKFKENLQARLEARRAASVLKSLPFEVTSMKDIQGLPCITDDVRPVIEEIIEVGESSRVKEILNDERYKAFKQFTSVFGVGVKTAEKWYRMGLRTLEEVKASKFLKLNKMQKAGFLYYEDLASGVSKEEADAVLDIVKETVRTVSPDALVTIAGGFRRGKPQGHDVDLLITIPGRPTDPELLSNVVDLLKKQGLLLYGDIRARTFVEGQLPNPKPDQLDNHQKCFAILKLYRPKVDNSAVGTSKKVDMAEVKDWKAVRVDLVVAPDEQFAYALLGWTGSGMFRRDTRRYAEEERDMLLDNHGLYDLKKGIFLSADSEEEIFGHLDLDYLEPWERNA

SEQ ID NO: 5721 - DNA, 1182 bp, synthetic construct
  misc_feature 1..1182: note = Variant of terminal deoxynucleotidyl transferase
  source 1..1182: mol_type = other DNA
atgcaccatcatcaccatcacgggggctccggccatccggaaggtaataccccggagaaggaggtgccgagcgttatcgcccgtcatgttagtccgtacgcgtgccagcgcaagaccacgctgaataactacaacaaaaagatcaccgacgcgctggaaatcatggccgagaactacaagtttaaagagaacctgcaggcgcgcctggaggcccgtcgcgccgcgagtgtcctgaaaagcctgccgttcgaggttaccagcatgaaagacatccaaggtctgccgtgcattaccgacgacgtacgtcctgtgatcgaagagatcatcgaagtaggcgagagcagccgtgttaaagaaatcctcaatgacgagcgctacaaggcctttaagcagttcaccagcgtgttcggtgtgggcgtcaagaccgcggaaaagtggtaccgtatgggcctccgtacgctggaagaagcaaaggccagtaagagtctgaagctgaacaagatgcagaaggcgggcttcctgtactacgaggatctggcgagcggtgttagtaaagaagaagccgatgccgttctggatatcgtgaaggaaacggtgcgcactgttagtccggatgcgctggtgaccatcgccggcggtttccgccgtggcaaacctcagggccacgacgttgacctgctgatcacgattccgggccgtcctacggatccggagctgctcagcaacgtggttgatctgctcaagaagcaaggtctgctgctgtacggggacatccgtgagcgtacgttcgtggaggggcaactgccaaatcctaaacctgaccagctggacaaccatcagaagtgcttcgccattctcaagctgtaccgtccgaaggtggataacagtgcggttgggacgtcgaagaaagtcgacatggctgaggttaaggattggaaagcggttcgtgtggatctggtggtcgctccagatgagcagttcgcctatgcgctgctcggttggacgggcagcggcatgtttcgtcgcgatactcgtcgctacgcggaggaagagcgcgacatgctgctcgacaaccatggtctctacgacctgaaaaagggccagtttctgagtgcggacagcgaagaagagattttcggtcatctggacctggattatctggagccgtgggaacgcaacgcg

SEQ ID NO: 5722 - protein, 394 aa, synthetic construct
  REGION 1..394: note = Variant of terminal deoxynucleotidyl transferase
MHHHHHHGGSGHPEGNTPEKEVPSVIARHVSPYACQRKTTLNNYNKKITDALEIMAENYKFKENLQARLEARRAASVLKSLPFEVTSMKDIQGLPCITDDVRPVIEEIIEVGESSRVKEILNDERYKAFKQFTSVFGVGVKTAEKWYRMGLRTLEEAKASKSLKLNKMQKAGFLYYEDLASGVSKEEADAVLDIVKETVRTVSPDALVTIAGGFRRGKPQGHDVDLLITIPGRPTDPELLSNVVDLLKKQGLLLYGDIRERTFVEGQLPNPKPDQLDNHQKCFAILKLYRPKVDNSAVGTSKKVDMAEVKDWKAVRVDLVVAPDEQFAYALLGWTGSGMFRRDTRRYAEEERDMLLDNHGLYDLKKGQFLSADSEEEIFGHLDLDYLEPWERNA

SEQ ID NO: 5723 - DNA, 1182 bp, synthetic construct
  misc_feature 1..1182: note = Variant of terminal deoxynucleotidyl transferase
  source 1..1182: mol_type = other DNA
atgcaccatcatcaccatcacgggggctccggccatccggaaggtaataccccggagaaggaggtgccgagcgttactgcccgtcatgttagtccgtacgcgtgccagcgcaagaccacgctgaataactacaacaaaaagatcaccgacgcgctggaaatcatggccgagaactacaagtttaaagagaacctgcaggcgcgcctggaggcccgtcgcgccgcgagtgtcctgaaaagcctgccgttcgaggttaccagcatgaaagacatccaaggtctgccgtgcattaccgacgacgtacgtcctgtgatcgaagagatcatcgaagtaggcgagagcagccgtgttaaagaaatcctcaatgacgagcgctacaaggcctttaagcagttcaccagcgtgttcggtgtgggcgtcaagaccgcggaaaagtggtaccgtatgggcctccgtacgctggaagaagcaaaggccagtaagagtctgaagctgaacaagatgcagaaggcgggcttcctgtactacgaggatctggcgagcggtgttagtaaagaagaagccgatgccgttctggatatcgtgaaggaaacggtgtggactgttgacccggatgcgctggtgaccatcgccggcggtttccgccgtggcaaacctcagggccacgacgttgacctgctgatcaccattccgggccgtcctacggatccggagctgctccacaaagtggttgatctgctcaagaagcaaggtctgctgctgtacggggacatccgtgagcgtacgttcgtggaggggcaactgccaaatcctaaacctgaccagctggacaaccatcagaagtgcttcgccattctcaagctgtaccgtccgaaggtggataacagtgcggttgggacgtcgaagaaagtcgacatggctgaggttaaggattggaaagcggttcgtgtggatctggtggtcgctccagatgagcagttcgcctatgcgctgctcggttggacgggcagcggcatgtttcgtcgcgatactcgtcgctacgcggaggaagagcgcgacatgctgctcgacaaccatggtctctacgacctgaaaaagggcatctttctgagtgcggacagcgaagaagagattttcggtcatctggacctggattatctggagccgtgggaacgcaacgcg

SEQ ID NO: 5724 - protein, 394 aa, synthetic construct; identical to SEQ ID NO: 5662
  REGION 1..394: note = Variant of terminal deoxynucleotidyl transferase

SEQ ID NO: 5725 - DNA, 1182 bp, synthetic construct
  misc_feature 1..1182: note = Variant of terminal deoxynucleotidyl transferase
  source 1..1182: mol_type = other DNA
atgcaccatcatcaccatcacgggggctccggccatccggaaggtaataccccggagaaggaggtgccgagcgttattgcccgtcatgttagtccgtacgcgtgccagcgcaagaccacgctgaataactacaacaaaaagatcaccgacgcgctggaaatcatggccgagaactacaagtttaaagagaacctgcaggcgcgcctggaggcccgtcgcgccgcgagtgtcctgaaaagcctgccgttcgaggttaccagcatgaaagacatccaaggtctgccgtgcattaccgacgacgtacgtcctgtgatcgaagagatcatcgaagtaggcgagagcagccgtgttaaagaaatcctcaatgacgagcgctacaaggcctttaagcagttcaccagcgtgttcggtgtgggcgtcaagaccgcggaaaagtggtaccgtatgggcctccgtacgctggaagaagcaaaggccagtaagagtctgaagctgaacaagatgcagaaggcgggcttcctgtactacgaggatctggcgagcggtgttagtaaagaagaagccgatgccgttctggatatcgtgaaggaaacggtgtggactgttagtccggatgcgctggtgaccatcgccggcggtttccgccgtggcaaacctcagggccacgacgttgacctgctgatcacgattccgggccgtcctacggatccggagctgctccacaaagtggttgatctgctcaagaagcaaggtctgctgctgtacggggacatccgtgagcgtacgttcgtggaggggcaactgccaaatcctaaacctgaccagctggacaaccatcagaagtgcttcgccattctcaagctgtaccgtccgaaggtggataacagtgcggttgggacgtcgaagaaagtcgacatggctgaggttaaggattggaaagcggttcgtgtggatctggtggtcgctccagatgagcagttcgcctatgcgctgctcggttggacgggcagcggcatgtttcgtcgcgatactcgtcgctacgcggaggaagagcgcgacatgctgctcgacaaccatggtctctacgacctgaaaaagggcatctttctgagtgcggacagcgaagaagagattttcggtcatctggacctggattatctggagccgtgggaacgcaacgcg

SEQ ID NO: 5726 - protein, 394 aa, synthetic construct; identical to SEQ ID NO: 5640
  REGION 1..394: note = Variant of terminal deoxynucleotidyl transferase

SEQ ID NO: 5727 - DNA, 1182 bp, synthetic construct
  misc_feature 1..1182: note = Variant of terminal deoxynucleotidyl transferase
  source 1..1182: mol_type = other DNA
atgcaccatcatcaccatcacgggggctccggccatccggaaggtaataccccggagaaggaggtgccgagcgttactgcccgtcatgttagtccgtacgcgtgccagcgcaagaccacgctgaataactacaacaaaaagatcaccgacgcgctggaaatcatggccgagaactacaagtttaaagagaacctgcaggcgcgcctggaggcccgtcgcgccgcgagtgtcctgaaaagcctgccgttcgaggttaccagcatgaaagacatccaaggtctgccgtgcattaccgacgacgtacgtcctgtgatcgaagagatcatcgaagtaggcgagagcagccgtgttaaagaaatcctcaatgacgagcgctacaaggcctttaagcagttcaccagcgtgttcggtgtgggcgtcaagaccgcggaaaagtggtaccgtatgggcctccgtacgctggaagaagcaaaggccagtaagagtctgaagctgaacaagatgcagaaggcgggcttcctgtactacgaggatctggcgagcggtgttagtaaagaagaagccgatgccgttctggatatcgtgaaggaaacggtgcgcactgttagtccggatgcgctggtgaccatcgccggcggtttccgccgtggcaaacctcagggccacgacgttgacctgctgatcacgattccgggccgtcctacggatccggagctgctccacaaagtggttgatctgctcaagaagcaaggtctgctgctgtacggggacatccgtgagcgtacgttcgtggaggggcaactgccaaatcctaaacctgaccagctggacaaccatcagaagtgcttcgccattctcaagctgtaccgtccgaaggtggataacagtgcggttgggacgtcgaagaaagtcgacatggctgaggttaaggattggaaagcggttcgtgtggatctggtggtcgctccagatgagcagttcgcctatgcgctgctcggttggacgggcagcggcatgtttcgtcgcgatactcgtcgctacgcggaggaagagcgcgacatgctgctcgacaaccatggcctctacgacctgaaaaagggcatctttctgagtgcggacagcgaagaagagattttcggtcatctggacctggattatctggagccgtgggaacgcaacgcg

SEQ ID NO: 5728 - protein, 394 aa, synthetic construct; identical to SEQ ID NO: 5672
  REGION 1..394: note = Variant of terminal deoxynucleotidyl transferase

SEQ ID NO: 5729 - DNA, 1182 bp, synthetic construct
  misc_feature 1..1182: note = Variant of terminal deoxynucleotidyl transferase
  source 1..1182: mol_type = other DNA
atgcaccatcatcaccatcacgggggctccggccatccggaaggtaataccccggagaaggaggtgccgagcgttatcgcccgtcatgttagtccgtacgcgtgccagcgcaagaccacgctgaataactacaacaaaaagatcaccgacgcgctggaaatcatggccgagaactacaagtttaaagagaacctgcaggcgcgcctggaggcccgtcgcgccgcgagtgtcctgaaaagcctgccgttcgaggttaccagcatgaaagacatccaaggtctgccgtgcattaccgacgacgtacgtcctgtgatcgaagagatcatcgaagtaggcgagagcagccgtgttaaagaaatcctcaatgacgagcgctacaaggcctttaagcagttcaccagcgtgttcggtgtgggcgtcaagaccgcggaaaagtggtaccgtatgggcctccgtacgctggaagaagcaaaggccagtaagagtctgaagctgaacaagatgcagaaggcgggcttcctgtactacgaggatctggcgagcggtgttagtaaagaagaagccgatgccgttctggatatcgtgaaggaaacggtgcgcactgttagtccggatgcgctggtgaccatcgccggcggtttccgccgtggcaaacctcagggccacgacgttgacctgctgatcacgattccgggccgtcctacggatccggagctgctccacaaagtggttgatctgctcaagaagcaaggtctgctgctgtacggggacatccgtgcgcgtacgttcgtggaggggcaactgccaaatcctaaacctgaccagctggacaaccatcagaagtgcttcgccattctcaagctgtaccgtccgaaggtggataacagtgcggttgggacgtcgaagaaagtcgacatggctgaggttaaggattggaaagcggttcgtgtggatctggtggtcgctccagatgagcagcatgcctatgcgctgctcggttggacgggcagcggcatgtttcgtcgcgatactcgtcgctacgcggaggaagagcgcgacatgctgctcgacaaccatggtctctacgacctgaaaaagggcatctttctgagtgcggacagcgaagaagagattttcggtcatctggacctggattatctggagccgtgggaacgcaacgcg

SEQ ID NO: 5730 - protein, 394 aa, synthetic construct
  REGION 1..394: note = Variant of terminal deoxynucleotidyl transferase
MHHHHHHGGSGHPEGNTPEKEVPSVIARHVSPYACQRKTTLNNYNKKITDALEIMAENYKFKENLQARLEARRAASVLKSLPFEVTSMKDIQGLPCITDDVRPVIEEIIEVGESSRVKEILNDERYKAFKQFTSVFGVGVKTAEKWYRMGLRTLEEAKASKSLKLNKMQKAGFLYYEDLASGVSKEEADAVLDIVKETVRTVSPDALVTIAGGFRRGKPQGHDVDLLITIPGRPTDPELLHKVVDLLKKQGLLLYGDIRARTFVEGQLPNPKPDQLDNHQKCFAILKLYRPKVDNSAVGTSKKVDMAEVKDWKAVRVDLVVAPDEQHAYALLGWTGSGMFRRDTRRYAEEERDMLLDNHGLYDLKKGIFLSADSEEEIFGHLDLDYLEPWERNA

SEQ ID NO: 5731 - DNA, 1182 bp, synthetic construct
  misc_feature 1..1182: note = Variant of terminal deoxynucleotidyl transferase
  source 1..1182: mol_type = other DNA
atgcaccatcatcaccatcacgggggctccggccatccggaaggtaataccccggagaaggaggtgccgagcgttactgcccgtcatgttagtccgtacgcgtgccagcgcaagaccacgctgaataactacaacaaaaagatcaccgacgcgctggaaatcatggccgagaactacaagtttaaagagaacctgcaggcgcgcctggaggcccgtcgcgccgcgagtgtcctgaaaagcctgccgttcgaggttaccagcatgaaagacatccaaggtctgccgtgcattaccgacgacgtacgtcctgtgatcgaagagatcatcgaagtaggcgagagcagccgtgttaaagaaatcctcaatgacgagcgctacaaggcctttaagcagttcaccagcgtgttcggtgtgggcgtcaagaccgcggaaaagtggtaccgtatgggcctccgtacgctggaagaagcaaaggccagtaagagtctgaagctgaacaagatgcagaaggcgggcttcctgtactacgaggatctggcgagcggtgttagtaaagaagaagccgatgccgttctggatatcgtgaaggaaacggtgtggactgttagtccggatgcgctggtgaccatcgccggcggtttccgccgtggcaaacctcagggccacgacgttgacctgctgatcacgattccgggccgtcctacggatccggagctgctccacaaagtggttgatctgctcaagaagcaaggtctgctgctgtacggggacatccgtgagcgtacgttcgtggaggggcaactgccaaatcctaaacctgaccagctggacaaccatcagaagtgcttcgccattctcaagctgtaccgtccgaaggtggataacagtgcggttgggacgtcgaagaaagtcgacatggctgaggttaaggattggaaagcggttcgtgtggatctggtggtcgctccagatgagcagttcgcctatgcgctgctcggttggacgggcagcggcatgtttcgtcgcgatactcgtcgctacgcggaggaagagcgcgacatgctgctcgacaaccatggtctctacgacctgaaaaagggcatctttctgagtgcggacagcgaagaagagattttcggtcatctggacctggattatctggagccgtgggaacgcaacgcg

SEQ ID NO: 5732 - protein, 394 aa, synthetic construct
  REGION 1..394: note = Variant of terminal deoxynucleotidyl transferase
MHHHHHHGGSGHPEGNTPEKEVPSVTARHVSPYACQRKTTLNNYNKKITDALEIMAENYKFKENLQARLEARRAASVLKSLPFEVTSMKDIQGLPCITDDVRPVIEEIIEVGESSRVKEILNDERYKAFKQFTSVFGVGVKTAEKWYRMGLRTLEEAKASKSLKLNKMQKAGFLYYEDLASGVSKEEADAVLDIVKETVWTVSPDALVTIAGGFRRGKPQGHDVDLLITIPGRPTDPELLHKVVDLLKKQGLLLYGDIRERTFVEGQLPNPKPDQLDNHQKCFAILKLYRPKVDNSAVGTSKKVDMAEVKDWKAVRVDLVVAPDEQFAYALLGWTGSGMFRRDTRRYAEEERDMLLDNHGLYDLKKGIFLSADSEEEIFGHLDLDYLEPWERNA

SEQ ID NO: 5733 - DNA, 1182 bp, synthetic construct
  misc_feature 1..1182: note = Variant of terminal deoxynucleotidyl transferase
  source 1..1182: mol_type = other DNA
atgcaccatcatcaccatcacgggggctccggccatccggaaggtaataccccggagaaggaggtgccgagcgttatcgcccgtcatgttagtccgtacgcgtgccagcgcaagaccacgctgaataactacaacaaaaagatcaccgacgcgctggaaatcatggccgagaactacaagtttaaagagaacctgcaggcgcgcctggaggcccgtcgcgccgcgagtgtcctgaaaagcctgccgttcgaggttaccagcatgaaagacatccaaggtctgccgtgcattaccgacgacgtacgtcctgtgatcgaagagatcatcgaagtaggcgagagcagccgtgttaaagaaatcctcaatgacgagcgctacaaggcctttaagcagttcaccagcgtgttcggtgtgggcgtcaagaccgcggaaaagtggtaccgtatgggcctccgtacgctggaagaagcaaaggccagtaagagtctgaagctgaacaagatgcagaaggcgggcttcctgtactacgaggatctggcgagcggtgttagtaaagaagaagccgatgccgttctggatatcgtgaaggaaacggtgcgcactgttagtccggatgcgctggtgaccatcgccggcggtttccgccgtggcaaacctcagggccacgacgttgacctgctgatcacgattccgggccgtcctacggatccggagctgctccacaaagtggttgatctgctcaagaagcaaggtctgctgctgtacggggacatccgtgcgcgtacgttcgtggaggggcaactgccaaatcctaaacctgaccagctggacaaccatcagaagtgcttcgccattctcaagctgtaccgtccgaaggtggataacagtgcggttgggacgtcgaagaaagtcgacatggctgaggttaaggattggaaagcggttcgtgtggatctggtggtcgctccagatgagcagttcgcctatgcgaaactcggttggacgggcagcggcatgtttcgtcgcgatactcgtcgctacgcggaggaagagcgcgacatgctgctcgacaaccatggtctctacgacctgaaaaagggcatctttctgagtgcggacagcgaagaagagattttcggtcatctggacctggattatctggagccgtgggaacgcaacgcg

SEQ ID NO: 5734 - protein, 394 aa, synthetic construct
  REGION 1..394: note = Variant of terminal deoxynucleotidyl transferase
MHHHHHHGGSGHPEGNTPEKEVPSVIARHVSPYACQRKTTLNNYNKKITDALEIMAENYKFKENLQARLEARRAASVLKSLPFEVTSMKDIQGLPCITDDVRPVIEEIIEVGESSRVKEILNDERYKAFKQFTSVFGVGVKTAEKWYRMGLRTLEEAKASKSLKLNKMQKAGFLYYEDLASGVSKEEADAVLDIVKETVRTVSPDALVTIAGGFRRGKPQGHDVDLLITIPGRPTDPELLHKVVDLLKKQGLLLYGDIRARTFVEGQLPNPKPDQLDNHQKCFAILKLYRPKVDNSAVGTSKKVDMAEVKDWKAVRVDLVVAPDEQFAYAKLGWTGSGMFRRDTRRYAEEERDMLLDNHGLYDLKKGIFLSADSEEEIFGHLDLDYLEPWERNA

SEQ ID NO: 5735 - DNA, 1182 bp, synthetic construct
  misc_feature 1..1182: note = Variant of terminal deoxynucleotidyl transferase
  source 1..1182: mol_type = other DNA
atgcaccatcatcaccatcacgggggctccggccatccggaaggtaataccccggagaaggaggtgccgagcgttatcgcccgtcatgttagtccgtacgcgtgccagcgcaagaccacgctgaataactacaacaaaaagatcaccgacgcgctgaccatcatggccgagaactacaagtttaaagagaacctgcaggcgcgcctggaggcccgtcgcgccgcgagtgtcctgaaaagcctgccgttcgaggttaccagcatgaaagacatccaaggtctgccgtgcattaccgacgacgtacgtcctgtgatcgaagagatcatcgaagtaggcgagagcagccgtgttaaagaaatcctcaatgacgagcgctacaaggcctttaagcagttcaccagcgtgttcggtgtgggcgtcaagaccgcggaaaagtggtaccgtatgggcctccgtacgctggaagaagtaaaggccagtaagagcctgaagctgaacaagatgcagaaggcgggcttcctgtactacgaggatctggcgagcggtgttagtaaagaagaagccgatgccgttctggatatcgtgaaggaaacggtgcgcactgttagtccggatgcgctggtgaccatcgccggcggtttccgccgtggcaaacctcagggccacgacgttgacctgctgatcacgattccgggccgtcctacggatccggagctgctccacaaagtggttgatctgctcaagaagcaaggtctgctgctgtacggggacatccgtgagcgtacgttcgtggaggggcaactgccaaatcctaaacctgaccagctggacggtcatcagaagtgcttcgccattctcaagctgtaccgtccgaaggtggataacagtgcggttgggacgtcgaagaaagtcgacatggctgaggttaaggattggaaagcggttcgtgtggatctggtggtcgctccagatgagcagcatgcctatgcgaaactcggttggacgggcagcggcatgtttcgtcgcgatactcgtcgctacgcggaggaagagcgcgacatgctgctcgacaaccatggtctctacgacctgaaaaagggcatctttctgagtgcggacagcgaagaagagattttcggtcatctggacctggattatctggagccgtgggaacgcaacgcg

SEQ ID NO: 5736 - protein, 394 aa, synthetic construct
  REGION 1..394: note = Variant of terminal deoxynucleotidyl transferase
MHHHHHHGGSGHPEGNTPEKEVPSVIARHVSPYACQRKTTLNNYNKKITDALTIMAENYKFKENLQARLEARRAASVLKSLPFEVTSMKDIQGLPCITDDVRPVIEEIIEVGESSRVKEILNDERYKAFKQFTSVFGVGVKTAEKWYRMGLRTLEEVKASKSLKLNKMQKAGFLYYEDLASGVSKEEADAVLDIVKETVRTVSPDALVTIAGGFRRGKPQGHDVDLLITIPGRPTDPELLHKVVDLLKKQGLLLYGDIRERTFVEGQLPNPKPDQLDGHQKCFAILKLYRPKVDNSAVGTSKKVDMAEVKDWKAVRVDLVVAPDEQHAYAKLGWTGSGMFRRDTRRYAEEERDMLLDNHGLYDLKKGIFLSADSEEEIFGHLDLDYLEPWERNA

SEQ ID NO: 5737 - DNA, 1182 bp, synthetic construct
  misc_feature 1..1182: note = Variant of terminal deoxynucleotidyl transferase
  source 1..1182: mol_type = other DNA
atgcaccatcatcaccatcacgggggctccggccatccggaaggtaataccccggagaaggaggtgccgagcgttatcgcccgtcatgttagtccgtacgcgtgccagcgcaagaccacgctgaataactacaacaaaaagatcaccgacgcgctggaaatcatggccgagaactacaagtttaaagagaacctgcaggcgcgcctggaggcccgtcgcgccgcgagtgtcctgaaaagcctgccgttcgaggttaccagcatgaaagacatccaaggtctgccgtgcattaccgacgacgtacgtcctgtgatcgaagagatcatcgaagtaggcgagagcagccgtgttaaagaaatcctcaatgacgagcgctacaaggcctttaagcagttcaccagcgtgttcggtgtgggcgtcaagaccgcggaaaagtggtaccgtatgggcctccgtacgctggaagaagcaaaggccagtaagagtctgaagctgaacaagatgcagaaggcgggcttcctgtactacgaggatctggcgagcggtgttagtaaagaagaagccgatgccgttctggatatcgtgaaggaaacggtgcgcactgttagtccggatgcgctggtgaccactgtgggcggtttccgccgtggcaaacctcagggccacgacgttgacctgctgatcacgattccgggccgtcctacggatccggagctgctccacaacgtggttgatctgctcaagaagcaaggtctgctgctgtacggggacatccgtgagcgtacgttcgtggaggggcaactgccaaatcctaaacctgaccagctggacaaccatcagaagtgcttcgccattctcaagctgtaccgtccgaaggtggataacagtgcggttgggacgtcgaagaaagtcgacatggctgaggttaaggattggaaagcggttcgtgtggatctggtggtcgctccagatgagcagttcgcctatgcgctgctcggttggacgggcagcggcatgtttcgtcgcgatactcgtcgctacgcggaggaagagcgcgacatgctgctcgacaaccatggtctctacgacctgaaaaagggcatctttctgagtgcggacagcgaagaagagattttcggtcatctggacctggattatctggagccgtgggaacgcaacgcg

SEQ ID NO: 5738 - protein, 394 aa, synthetic construct
  REGION 1..394: note = Variant of terminal deoxynucleotidyl transferase
MHHHHHHGGSGHPEGNTPEKEVPSVIARHVSPYACQRKTTLNNYNKKITDALEIMAENYKFKENLQARLEARRAASVLKSLPFEVTSMKDIQGLPCITDDVRPVIEEIIEVGESSRVKEILNDERYKAFKQFTSVFGVGVKTAEKWYRMGLRTLEEAKASKSLKLNKMQKAGFLYYEDLASGVSKEEADAVLDIVKETVRTVSPDALVTTVGGFRRGKPQGHDVDLLITIPGRPTDPELLHNVVDLLKKQGLLLYGDIRERTFVEGQLPNPKPDQLDNHQKCFAILKLYRPKVDNSAVGTSKKVDMAEVKDWKAVRVDLVVAPDEQFAYALLGWTGSGMFRRDTRRYAEEERDMLLDNHGLYDLKKGIFLSADSEEEIFGHLDLDYLEPWERNA

SEQ ID NO: 5739 - DNA, 1182 bp, synthetic construct
  misc_feature 1..1182: note = Variant of terminal deoxynucleotidyl transferase
  source 1..1182: mol_type = other DNA
atgcaccatcatcaccatcacgggggctccggccatccggaaggtaataccccggagaaggaggtgccgagcgttactgcccgtcatgttagtccgtacgcgtgccagcgcaagaccacgctgaataactacaacaaaaagatcaccgacgcgctggaaatcatggccgagaactaccgttttaaagagaacctgcaggcgcgcctggaggcccgtcgcgccgcgagtgtcctgaaaagcctgccgttcgaggttaccagcatgaaagacatccaaggtctgccgtgcattaccgacgacgtacgtcctgtgatcgaagagatcatcgaagtaggcgagagcagccgtgttaaagaaatcctcaatgacgagcgctacaaggcctttaagcagttcaccagcgtgttcggtgtgggcgtcaagaccgcggaaaagtggtaccgtatgggcctccgtacgctggaagaagcaaaggccagtaagagtctgaagctgaacaagatgcagaaggcgggcttcctgtactacgaggatctggcgagcggtgttagtaaagaagaagccgatgccgttctggatatcgtgaaggaaacggtgtggactgttgacccggatgcgctggtgaccatcgccggcggtttccgccgtggcaaacctcagggccacgacgttgacctgctgatccgtattccgggccgtcctacggatccggagctgctccacaaagtggttgatctgctcaagaagcaaggtctgctgctgtacggggacatccgtgagcgtacgttcgtggaggggaagctgccaaatcctaaacctgaccagctggacaaccatcagaagtgcttcgccattctcaagctgtaccgtccgaaggtggataacagtgcggttgggacgtcgaagaaagtcgacatggctgaggttaaggattggaaagcggttcgtgtggatctggtggtcgctccagatgagcagttcgcctatgcgctgctcggttggacgggcagcggcatgtttcgtcgcgatactcgtcgctacgcggaggaagagcgcgacatgctgctcgacaaccatggcctctacgacctgaaaaagggcatctttctgagtgcggacagcgaagaagagattttcggtcatctggacctggattatctggagccgtgggaacgcaacgcg

SEQ ID NO: 5740 - protein, 394 aa, synthetic construct
  REGION 1..394: note = Variant of terminal deoxynucleotidyl transferase
MHHHHHHGGSGHPEGNTPEKEVPSVTARHVSPYACQRKTTLNNYNKKITDALEIMAENYRFKENLQARLEARRAASVLKSLPFEVTSMKDIQGLPCITDDVRPVIEEIIEVGESSRVKEILNDERYKAFKQFTSVFGVGVKTAEKWYRMGLRTLEEAKASKSLKLNKMQKAGFLYYEDLASGVSKEEADAVLDIVKETVWTVDPDALVTIAGGFRRGKPQGHDVDLLIRIPGRPTDPELLHKVVDLLKKQGLLLYGDIRERTFVEGKLPNPKPDQLDNHQKCFAILKLYRPKVDNSAVGTSKKVDMAEVKDWKAVRVDLVVAPDEQFAYALLGWTGSGMFRRDTRRYAEEERDMLLDNHGLYDLKKGIFLSADSEEEIFGHLDLDYLEPWERNA

SEQ ID NO: 5741 - DNA, 1182 bp, synthetic construct
  misc_feature 1..1182: note = Variant of terminal deoxynucleotidyl transferase
  source 1..1182: mol_type = other DNA
atgcaccatcatcaccatcacgggggctccggccatccggaaggtaataccccggagaaggaggtgccgagcgttactgcccgtcatgttagtccgtacgcgtgccagcgcaagaccacgctgaataactacaacaaaaagatcaccgacgcgctggaaatcatggccgagaactacaagtttaaagagaacctgcaggcgcgcctggaggcccgtcgcgccgcgagtgtcctgaaaagcctgccgttcgaggttaccagcatgaaagacatccaaggtctgccgtgcattaccgacgacgtacgtcctgtgatcgaagagatcatcgaagtaggcgagagcagccgtgttaaagaaatcctcaatgacgagcgctacaaggcctttaagcagttcaccagcgtgttcggtgtgggcgtcaagaccgcggaaaagtggtaccgtatgggcctccgtacgctggaagaagcaaaggccagtaagagtctgaagctgaacaagatgcagaaggcgggcttcctgtactacgaggatctggcgagcggtgttagtaaagaagaagccgatgccgttctggatatcgtgaaggaaacggtgcgcactgttagtccggatgcgctggtgaccatcgccggcggtttccgccgtggcaaacctcagggccacgacgttgacctgctgatccgtattccgggccgtgggacggatccggagctgctccacaaagtggttgatctgctcaagaagcaaggtctgctgctgtacggggacatccgtgagcgtacgttcgtggaggggcagctgccaaatcctaaacctgaccagctggacaaccatcagaagtgcttcgccattctcaagctgtaccgcccgaaggtggataacagtgcggttgggacgtcgaagaaagtcgacatggctgaggttaaggattggaaagcggttcgtgtggatctggtggtcgctccagatgagcagttcgcctatgcgctgctcggttggacgggcagcggcatgtttcgtcgcgatactcgtcgctacgcggaggaagagcgcgacatgctgctcgacaaccatagcctctacgacctgaaaaagggcatctttctgagtgcggacagcgaagaagagattttcggtcatctggacctggattatctggagccgtgggaacgcaacgcg

SEQ ID NO: 5742 - protein, 394 aa, synthetic construct
  REGION 1..394: note = Variant of terminal deoxynucleotidyl transferase
MHHHHHHGGSGHPEGNTPEKEVPSVTARHVSPYACQRKTTLNNYNKKITDALEIMAENYKFKENLQARLEARRAASVLKSLPFEVTSMKDIQGLPCITDDVRPVIEEIIEVGESSRVKEILNDERYKAFKQFTSVFGVGVKTAEKWYRMGLRTLEEAKASKSLKLNKMQKAGFLYYEDLASGVSKEEADAVLDIVKETVRTVSPDALVTIAGGFRRGKPQGHDVDLLIRIPGRGTDPELLHKVVDLLKKQGLLLYGDIRERTFVEGQLPNPKPDQLDNHQKCFAILKLYRPKVDNSAVGTSKKVDMAEVKDWKAVRVDLVVAPDEQFAYALLGWTGSGMFRRDTRRYAEEERDMLLDNHSLYDLKKGIFLSADSEEEIFGHLDLDYLEPWERNA

SEQ ID NO: 5743 - DNA, 1182 bp, synthetic construct
  misc_feature 1..1182: note = Variant of terminal deoxynucleotidyl transferase
  source 1..1182: mol_type = other DNA
atgcaccatcatcaccatcacgggggctccggccatccggaaggtaataccccggagaaggaggtgccgagcgttatcgcccgtcatgttagtccgtacgcgtgccagcgcaagaccacgctgaataactacaacaaaaagatcaccgacgcgctggaaatcatggccgagaactacaagtttaaagagaacctgcaggcgcgcctggaggcccgtcgcgccgcgagtgtcctgaaaagcctgccgttcgaggttaccagcatgaaagacatccaaggtctgccgtgcattaccgacgacgtacgtcctgtgatcgaagagatcatcgaagtaggcgagagcagccgtgttaaagaaatcctcaatgacgagcgctacaaggcctttaagcagttcaccagcgtgttcggtgtgggcgtcaagaccgcggaaaagtggtaccgtatgggcctccgtacgctggaagaagtaaaggccagtaagagcctgaagctgaacaagatgcagaaggcgggcttcctgtactacgaggatctggcgagcggtgttagtaaagaagaagccgatgccgttctggatatcgtgaaggaaacggtgcgcactgttagtccggatgcgctggtgaccatcgccggcggtttccgccgtggcaaacctcagggccacgacgttgacctgctgatcacgattccgggccgtcctacggatccggagctgctccacaaagtggttgatctgctcaagaagcaaggtctgctgctgtacggggacatccgtgagcgtacgttcgtggaggggcaactgccaaatcctaaacctgaccagctggacaaccatcagaagtgcttcgccattctcaagctgtaccgtccgaaggtggataacagtgcggttgggacgtcgaagaaagtcgacatggctgaggttaaggattggaaagcggttcgtgtggatctggtggtcgctccagatgagcagcatgcctatgcgaaactcggttggacgggcagcggcatgtttcgtcgcgatactcgtcgctacgcggaggaagagcgcgacatgctgctcgacaaccatggtctctacgacctgaaaaagggcatctttctgagtgcggacagcgaagaagagattttcggtcatctggacctggattatctggagccgtgggaacgcaacgcg

SEQ ID NO: 5744 - protein, 394 aa, synthetic construct
  REGION 1..394: note = Variant of terminal deoxynucleotidyl transferase
MHHHHHHGGSGHPEGNTPEKEVPSVIARHVSPYACQRKTTLNNYNKKITDALEIMAENYKFKENLQARLEARRAASVLKSLPFEVTSMKDIQGLPCITDDVRPVIEEIIEVGESSRVKEILNDERYKAFKQFTSVFGVGVKTAEKWYRMGLRTLEEVKASKSLKLNKMQKAGFLYYEDLASGVSKEEADAVLDIVKETVRTVSPDALVTIAGGFRRGKPQGHDVDLLITIPGRPTDPELLHKVVDLLKKQGLLLYGDIRERTFVEGQLPNPKPDQLDNHQKCFAILKLYRPKVDNSAVGTSKKVDMAEVKDWKAVRVDLVVAPDEQHAYAKLGWTGSGMFRRDTRRYAEEERDMLLDNHGLYDLKKGIFLSADSEEEIFGHLDLDYLEPWERNA

SEQ ID NO: 5745 - DNA, 1182 bp, synthetic construct
  misc_feature 1..1182: note = Variant of terminal deoxynucleotidyl transferase
  source 1..1182: mol_type = other DNA
atgcaccatcatcaccatcacgggggctccggccatccggaaggtaataccccggagaaggaggtgccgagcgttattgcccgtcatgttagtccgtacgcgtgccagcgcaagaccacgctgaataactacaacaaaaagatcaccgacgcgctggaaatcatggccgagaactaccgttttaaagagaacctgcaggcgcgcctggaggcccgtcgcgccgcgagtgtcctgaaaagcctgccgttcgaggttaccagcatgaaagacatccaaggtctgccgtgcattaccgacgacgtacgtcctgtgatcgaagagatcatcgaagtaggcgagagcagccgtgttaaagaaatcctcaatgacgagcgctacaaggcctttaagcagttcaccagcgtgttcggtgtgggcgtcaagaccgcggaaaagtggtaccgtatgggcctccgtacgctggaagaagcaaaggccagtaagagtctgaagctgaacaagatgcagaaggcgggcttcctgtactacgaggatctggcgagcggtgttagtaaagaagaagccgatgccgttctggatatcgtgaaggaaacggtgtggactgttagtccggatgcgctggtgaccatcgccggcggtttccgccgtggcaaacctcagggccacgacgttgacctgctgatcaccattccgggccgtgggacggatccggagctgctccacaaagtggttgatctgctcaagaagcaaggtctgctgctgtacggggacatccgtgagcgtacgttcgtggaggggaagctgccaaatcctaaacctgaccagctggacaaccatcagaagtgcttcgccattctcaagctgtacaatccgcgcgtggataacagtgcggttgggacgtcgaagaaagtcgacatggctgaggttaaggattggaaagcggttcgtgtggatctggtggtcgctccagatgagcagttcgcctatgcgctgctcggttggacgggcagcggcatgtttcgtcgcgatactcgtcgctacgcggaggaagagcgcgacatgctgctcgacaaccatggtctctacgacctgaaaaagggcatctttctgagtgcggacagcgaagaagagattttcggtcatctggacctggattatctggagccgtgggaacgcaacgcg

SEQ ID NO: 5746 - protein, 394 aa, synthetic construct
  REGION 1..394: note = Variant of terminal deoxynucleotidyl transferase
MHHHHHHGGSGHPEGNTPEKEVPSVIARHVSPYACQRKTTLNNYNKKITDALEIMAENYRFKENLQARLEARRAASVLKSLPFEVTSMKDIQGLPCITDDVRPVIEEIIEVGESSRVKEILNDERYKAFKQFTSVFGVGVKTAEKWYRMGLRTLEEAKASKSLKLNKMQKAGFLYYEDLASGVSKEEADAVLDIVKETVWTVSPDALVTIAGGFRRGKPQGHDVDLLITIPGRGTDPELLHKVVDLLKKQGLLLYGDIRERTFVEGKLPNPKPDQLDNHQKCFAILKLYNPRVDNSAVGTSKKVDMAEVKDWKAVRVDLVVAPDEQFAYALLGWTGSGMFRRDTRRYAEEERDMLLDNHGLYDLKKGIFLSADSEEEIFGHLDLDYLEPWERNA

SEQ ID NO: 5747 - DNA, 1182 bp, synthetic construct
  misc_feature 1..1182: note = Variant of terminal deoxynucleotidyl transferase
  source 1..1182: mol_type = other DNA
atgcaccatcatcaccatcacgggggctccggccatccggaaggtaataccccggagaaggaggtgccgagcgttactgcccgtcatgttagtccgtacgcgtgccagcgcaagaccacgctgaataactacaacaaaaagatcaccgacgcgctggaaatcatggccgagaactaccgttttaaagagaacctgcaggcgcgcctggaggcccgtcgcgccgcgagtgtcctgaaaagcctgccgttcgaggttaccagcatgaaagacatccaaggtctgccgtgcattaccgacgacgtacgtcctgtgatcgaagagatcatcgaagtaggcgagagcagccgtgttaaagaaatcctcaatgacgagcgctacaaggcctttaagcagttcaccagcgtgttcggtgtgggcgtcaagaccgcggaaaagtggtaccgtatgggcctccgtacgctggaagaagcaaaggccagtaagagtctgaagctgaacaagatgcagaaggcgggcttcctgtactacgaggatctggcgagcggtgttagtaaagaagaagccgatgccgttctggatatcgtgaaggaaacggtgcgcactgttagtccggatgcgctggtgaccatcgccggcggtttccgccgtggcaaacctcagggccacgacgttgacctgctgatcacgattccgggccgtcctacggatccggagctgctccacaaagtggttgatctgctcaagaagcaaggtctgctgctgtacggggacatccgtgagcgtacgttcgtggaggggcaactgccaaatcctaaacctgaccagctggacaaccatcagaagtgcttcgccattctcaagctgtacaatccgaaggtggataacagtgcggttgggacgtcgaagaaagtcgacatggctgaggttaaggattggaaagcggttcgtgtggatctggtggtcgctccagatgagcagttcgcctatgcgctgctcggttggacgggcagcggcatgtttcgtcgcgatactcgtcgctacgcggaggaagagcgcgacatgctgctcgacaaccatggtctctacgacctgaaaaagggcatctttctgagtgcggacagcgaagaagagattttcggtcatctggacctggattatctggagccgtgggaacgcaacgcg

SEQ ID NO: 5748 - protein, 394 aa, synthetic construct
  REGION 1..394: note = Variant of terminal deoxynucleotidyl transferase
MHHHHHHGGSGHPEGNTPEKEVPSVTARHVSPYACQRKTTLNNYNKKITDALEIMAENYRFKENLQARLEARRAASVLKSLPFEVTSMKDIQGLPCITDDVRPVIEEIIEVGESSRVKEILNDERYKAFKQFTSVFGVGVKTAEKWYRMGLRTLEEAKASKSLKLNKMQKAGFLYYEDLASGVSKEEADAVLDIVKETVRTVSPDALVTIAGGFRRGKPQGHDVDLLITIPGRPTDPELLHKVVDLLKKQGLLLYGDIRERTFVEGQLPNPKPDQLDNHQKCFAILKLYNPKVDNSAVGTSKKVDMAEVKDWKAVRVDLVVAPDEQFAYALLGWTGSGMFRRDTRRYAEEERDMLLDNHGLYDLKKGIFLSADSEEEIFGHLDLDYLEPWERNA

SEQ ID NO: 5749 - DNA, 1182 bp, synthetic construct
  misc_feature 1..1182: note = Variant of terminal deoxynucleotidyl transferase
  source 1..1182: mol_type = other DNA
atgcaccatcatcaccatcacgggggctccggccatccggaaggtaataccccggagaaggaggtgccgagcgttattgcccgtcatgttagtccgtacgcgtgccagcgcaagaccacgctgaataactacaacaaaaagatcaccgacgcgctggaaatcatggccgagaactaccgttttaaagagaacctgcaggcgcgcctggaggcccgtcgcgccgcgagtgtcctgaaaagcctgccgttcgaggttaccagcatgaaagacatccaaggtctgccgtgcattaccgacgacgtacgtcctgtgatcgaagagatcatcgaagtaggcgagagcagccgtgttaaagaaatcctcaatgacgagcgctacaaggcctttaagcagttcaccagcgtgttcggtgtgggcgtcaagaccgcggaaaagtggtaccgtatgggcctccgtacgctggaagaagcaaaggccagtaagagtctgaagctgaacaagatgcagaaggcgggcttcctgtactacgaggatctggcgagcggtgttagtaaagaagaagccgatgccgttctggatatcgtgaaggaaacggtgtggactgttagtccggatgcgctggtgaccatcgccggcggtttccgccgtggcaaacctcagggccacgacgttgacctgctgatcaccattccgggccgtgggacggatccggagctgctccacaaagtggttgatctgctcaagaagcaaggtctgctgctgtacggggacatccgtgagcgtacgttcgtggaggggcaactgccaaatcctaaacctgaccagctggacaaccatcagaagtgcttcgccattctcaagctgtacaatccgaaggtggataacagtgcggttgggacgtcgaagaaagtcgacatggctgaggttaaggattggaaagcggttcgtgtggatctggtggtcgctccagatgagcagttcgcctatgcgctgctcggttggacgggcagcggcatgtttcgtcgcgatactcgtcgctacgcggaggaagagcgcgacatgctgctcgacaaccatggcctctacgacctgaaaaagggcatctttctgagtgcggacagcgaagaagagattttcggtcatctggacctggattatctggagccgtgggaacgcaacgcg

SEQ ID NO: 5750 - protein, 394 aa, synthetic construct
  REGION 1..394: note = Variant of terminal deoxynucleotidyl transferase
MHHHHHHGGSGHPEGNTPEKEVPSVIARHVSPYACQRKTTLNNYNKKITDALEIMAENYRFKENLQARLEARRAASVLKSLPFEVTSMKDIQGLPCITDDVRPVIEEIIEVGESSRVKEILNDERYKAFKQFTSVFGVGVKTAEKWYRMGLRTLEEAKASKSLKLNKMQKAGFLYYEDLASGVSKEEADAVLDIVKETVWTVSPDALVTIAGGFRRGKPQGHDVDLLITIPGRGTDPELLHKVVDLLKKQGLLLYGDIRERTFVEGQLPNPKPDQLDNHQKCFAILKLYNPKVDNSAVGTSKKVDMAEVKDWKAVRVDLVVAPDEQFAYALLGWTGSGMFRRDTRRYAEEERDMLLDNHGLYDLKKGIFLSADSEEEIFGHLDLDYLEPWERNA

SEQ ID NO: 5751 - DNA, 1182 bp, synthetic construct
  misc_feature 1..1182: note = Variant of terminal deoxynucleotidyl transferase
  source 1..1182: mol_type = other DNA
atgcaccatcatcaccatcacgggggctccggccatccggaaggtaataccccggagaaggaggtgccgagcgttattgcccgtcatgttagtccgtacgcgtgccagcgcaagaccacgctgaataactacaacaaaaagatcaccgacgcgctggaaatcatggccgagaactaccgttttaaagagaacctgcaggcgcgcctggaggcccgtcgcgccgcgagtgtcctgaaaagcctgccgttcgaggttaccagcatgaaagacatccaaggtctgccgtgcattaccgacgacgtacgtcctgtgatcgaagagatcatcgaagtaggcgagagcagccgtgttaaagaaatcctcaatgacgagcgctacaaggcctttaagcagttcaccagcgtgttcggtgtgggcgtcaagaccgcggaaaagtggtaccgtatgggcctccgtacgctggaagaagcaaaggccagtaagagtctgaagctgaacaagatgcagaaggcgggcttcctgtactacgaggatctggcgagcggtgttagtaaagaagaagccgatgccgttctggatatcgtgaaggaaacggtgcgcactgttgacccggatgcgctggtgaccatcgccggcggtttccgccgtggcaaacctcagggccacgacgttgacctgctgatcacgattccgggccgtcctacggatccggagctgctccacaaagtggttgatctgctcaagaagcaaggtctgctgctgtacggggacatccgtgagcgtacgttcgtggaggggcaactgccaaatcctaaacctgaccagctggacaaccatcagaagtgcttcgccattctcaagctgtaccgtccgaaggtggataacagtgcggttgggacgtcgaagaaagtcgacatggctgaggttaaggattggaaagcggttcgtgtggatctggtggtcgctccagatgagcagttcgcctatgcgctgctcggttggacgggcagcggcatgtttcgtcgcgatactcgtcgctacgcggaggaagagcgcgacatgctgctcgacaaccatggtctctacgacctgaaaaagggcatctttctgagtgcggacagcgaagaagagattttcggtcatctggacctggattatctggagccgtgggaacgcaacgcg

SEQ ID NO: 5752 - protein, 394 aa, synthetic construct; identical to SEQ ID NO: 5664
  REGION 1..394: note = Variant of terminal deoxynucleotidyl transferase

SEQ ID NO: 5753 - DNA, 1182 bp, synthetic construct
  misc_feature 1..1182: note = Variant of terminal deoxynucleotidyl transferase
  source 1..1182: mol_type = other DNA
atgcaccatcatcaccatcacgggggctccggccatccggaaggtaataccccggagaaggaggtgccgagcgttactgcccgtcatgttagtccgtacgcgtgccagcgcaagaccacgctgaataactacaacaaaaagatcaccgacgcgctggaaatcatggccgagaactaccgttttaaagagaacctgcaggcgcgcctggaggcccgtcgcgccgcgagtgtcctgaaaagcctgccgttcgaggttaccagcatgaaagacatccaaggtctgccgtgcattaccgacgacgtacgtcctgtgatcgaagagatcatcgaagtaggcgagagcagccgtgttaaagaaatcctcaatgacgagcgctacaaggcctttaagcagttcaccagcgtgttcggtgtgggcgtcaagaccgcggaaaagtggtaccgtatgggcctccgtacgctggaagaagcaaaggccagtaagagtctgaagctgaacaagatgcagaaggcgggcttcctgtactacgaggatctggcgagcggtgttagtaaagaagaagccgatgccgttctggatatcgtgaaggaaacggtgtggactgttgacccggatgcgctggtgaccatcgccggcggtttccgccgtggcaaacctcagggccacgacgttgacctgctgatcaccattccgggccgtgggacggatccggagctgctccacaaagtggttgatctgctcaagaagcaaggtctgctgctgtacggggacatccgtgagcgtacgttcgtggaggggaagctgccaaatcctaaacctgaccagctggacaaccatcagaagtgcttcgccattctcaagctgtaccgtccgaaggtggataacagtgcggttgggacgtcgaagaaagtcgacatggctgaggttaaggattggaaagcggttcgtgtggatctggtggtcgctccagatgagcagttcgcctatgcgctgctcggttggacgggcagcggcatgtttcgtcgcgatactcgtcgctacgcggaggaagagcgcgacatgctgctcgacaaccatggcctctacgacctgaaaaagggcatctttctgagtgcggacagcgaagaagagattttcggtcatctggacctggattatctggagccgtgggaacgcaacgcg

SEQ ID NO: 5754 - protein, 394 aa, synthetic construct
  REGION 1..394: note = Variant of terminal deoxynucleotidyl transferase
MHHHHHHGGSGHPEGNTPEKEVPSVTARHVSPYACQRKTTLNNYNKKITDALEIMAENYRFKENLQARLEARRAASVLKSLPFEVTSMKDIQGLPCITDDVRPVIEEIIEVGESSRVKEILNDERYKAFKQFTSVFGVGVKTAEKWYRMGLRTLEEAKASKSLKLNKMQKAGFLYYEDLASGVSKEEADAVLDIVKETVWTVDPDALVTIAGGFRRGKPQGHDVDLLITIPGRGTDPELLHKVVDLLKKQGLLLYGDIRERTFVEGKLPNPKPDQLDNHQKCFAILKLYRPKVDNSAVGTSKKVDMAEVKDWKAVRVDLVVAPDEQFAYALLGWTGSGMFRRDTRRYAEEERDMLLDNHGLYDLKKGIFLSADSEEEIFGHLDLDYLEPWERNA

SEQ ID NO: 5755 - DNA, 1182 bp, synthetic construct
  misc_feature 1..1182: note = Variant of terminal deoxynucleotidyl transferase
  source 1..1182: mol_type = other DNA
atgcaccatcatcaccatcacgggggctccggccatccggaaggtaataccccggagaaggaggtgccgagcgttatcgcccgtcatgttagtccgtacgcgtgccagcgcaagaccacgctgaataactacaacaaaaagatcaccgacgcgctggaaatcatggccgagaactacaagtttaaagagaacctgcaggcgcgcctggaggcccgtcgcgccgcgagtgtcctgaaaagcctgccgttcgaggttaccagcatgaaagacatccaaggtctgccgtgcattaccgacgacgtacgtcctgtgatcgaagagatcatcgaagtaggcgagagcagccgtgttaaagaaatcctcaatgacgagcgctacaaggcctttaagcagttcaccagcgtgttcggtgtgggcgtcaagaccgcggaaaagtggtaccgtatgggcctccgtacgctggaagaagcaaaggccagtaagttcctgaagctgaacaagatgcagaaggcgggcttcctgtactacgaggatctggcgagcggtgttagtaaagaagaagccgatgccgttctggatatcgtgaaggaaacggtgcgcactgttagtccggatgcgctggtgaccatcgccggcggtttccgccgtggcaaacctcagggccacgacgttgacctgctgatcacgattccgggccgtcctacggatccggagctgctcagcaaagtggttgatctgctcaagaagcaaggtctgctgctgtacggggacatccgtgagcgtacgttcgtggaggggcaactgccaaatcctaaacctgaccagctggacggtcatcagaagtgcttcgccattctcaagctgtaccgtccgaaggtggataacagtgcggttgggacgtcgaagaaagtcgacatggctgaggttaaggattggaaagcggttcgtgtggatctggtggtcgctccagatgagcagcatgcctatgcgaaactcggttggacgggcagcggcatgtttcgtcgcgatactcgtcgctacgcggaggaagagcgcgacatgctgctcgacaaccatggtctctacgacctgaaaaagggcatctttctgagtgcggacagcgaagaagagattttcggtcatctggacctggattatctggagccgtgggaacgcaacgcg

SEQ ID NO: 5756 - protein, 394 aa, synthetic construct
  REGION 1..394: note = Variant of terminal deoxynucleotidyl transferase
MHHHHHHGGSGHPEGNTPEKEVPSVIARHVSPYACQRKTTLNNYNKKITDALEIMAENYKFKENLQARLEARRAASVLKSLPFEVTSMKDIQGLPCITDDVRPVIEEIIEVGESSRVKEILNDERYKAFKQFTSVFGVGVKTAEKWYRMGLRTLEEAKASKFLKLNKMQKAGFLYYEDLASGVSKEEADAVLDIVKETVRTVSPDALVTIAGGFRRGKPQGHDVDLLITIPGRPTDPELLSKVVDLLKKQGLLLYGDIRERTFVEGQLPNPKPDQLDGHQKCFAILKLYRPKVDNSAVGTSKKVDMAEVKDWKAVRVDLVVAPDEQHAYAKLGWTGSGMFRRDTRRYAEEERDMLLDNHGLYDLKKGIFLSADSEEEIFGHLDLDYLEPWERNA

SEQ ID NO: 5757 - DNA, 1182 bp, synthetic construct
  misc_feature 1..1182: note = Variant of terminal deoxynucleotidyl transferase
  source 1..1182: mol_type = other DNA
atgcaccatcatcaccatcacgggggctccggccatccggaaggtaataccccggagaaggaggtgccgagcgttatcgcccgtcatgttagtccgtacgcgtgccagcgcaagaccacgctgaataactacaacaaaaagatcaccgacgcgctgaccatcatggccgagaactacaagtttaaagagaacctgcaggcgcgcctggaggcccgtcgcgccgcgagtgtcctgaaaagcctgccgttcgaggttaccagcatgaaagacatccaaggtctgccgtgcattaccgacgacgtacgtcctgtgatcgaagagatcatcgaagtaggcgagagcagccgtgttaaagaaatcctcaatgacgagcgctacaaggcctttaagcagttcaccagcgtgttcggtgtgggcgtcaagaccgcggaaaagtggtaccgtatgggcctccgtacgctggaagaagcaaaggccagtaagttcctgaagctgaacaagatgcagaaggcgggcttcctgtactacgaggatctggcgagcggtgttagtaaagaagaagccgatgccgttctggatatcgtgaaggaaacggtgcgcactgttagtccggatgcgctggtgaccatcgccggcggtttccgccgtggcaaacctcagggccacgacgttgacctgctgatcacgattccgggccgtcctacggatccggagctgctccacaaagtggttgatctgctcaagaagcaaggtctgctgctgtacggggacatccgtgagcgtacgttcgtggaggggcaactgccaaatcctaaacctgaccagctggacaaccatcagaagtgcttcgccattctcaagctgtaccgtccgaaggtggataacagtgcggttgggacgtcgaagaaagtcgacatggctgaggttaaggattggaaagcggttcgtgtggatctggtggtcgctccagatgagcagcatgcctatgcgaatctcggttggacgggcagcggcatgtttcgtcgcgatactcgtcgctacgcggaggaagagcgcgacatgctgctcgacaaccatggtctctacgacctgaaaaagggccagtttctgagtgcggacagcgaagaagagattttcggtcatctggacctggattatctggagccgtgggaacgcaacgcg

SEQ ID NO: 5758 - protein, 394 aa, synthetic construct
  REGION 1..394: note = Variant of terminal deoxynucleotidyl transferase
MHHHHHHGGSGHPEGNTPEKEVPSVIARHVSPYACQRKTTLNNYNKKITDALTIMAENYKFKENLQARLEARRAASVLKSLPFEVTSMKDIQGLPCITDDVRPVIEEIIEVGESSRVKEILNDERYKAFKQFTSVFGVGVKTAEKWYRMGLRTLEEAKASKFLKLNKMQKAGFLYYEDLASGVSKEEADAVLDIVKETVRTVSPDALVTIAGGFRRGKPQGHDVDLLITIPGRPTDPELLHKVVDLLKKQGLLLYGDIRERTFVEGQLPNPKPDQLDNHQKCFAILKLYRPKVDNSAVGTSKKVDMAEVKDWKAVRVDLVVAPDEQHAYANLGWTGSGMFRRDTRRYAEEERDMLLDNHGLYDLKKGQFLSADSEEEIFGHLDLDYLEPWERNA

SEQ ID NO: 5759 - DNA, 1182 bp, synthetic construct
  misc_feature 1..1182: note = Variant of terminal deoxynucleotidyl transferase
  source 1..1182: mol_type = other DNA
atgcaccatcatcaccatcacgggggctccggccatccggaaggtaataccccggagaaggaggtgccgagcgttatcgcccgtcatgttagtccgtacgcgtgccagcgcaagaccacgctgaataactacaacaaaaagatcaccgacgcgctggaaatcatggccgagaactacaagtttaaagagaacctgcaggcgcgcctggaggcccgtcgcgccgcgagtgtcctgaaaagcctgccgttcgaggttaccagcatgaaagacatccaaggtctgccgtgcattaccgacgacgtacgtcctgtgatcgaagagatcatcgaagtaggcgagagcagccgtgttaaagaaatcctcaatgacgagcgctacaaggcctttaagcagttcaccagcgtgttcggtgtgggcgtcaagaccgcggaaaagtggtaccgtatgggcctccgtacgctggaagaagcaaaggccagtaagagcctgaagctgaacaagatgcagaaggcgggcttcctgtactacgaggatctggcgagcggtgttagtaaagaagaagccgatgccgttctggatatcgtgaaggaaacggtgcgcactgttagtccggatgcgctggtgaccatcgccggcggtttccgccgtggcaaacctcagggccacgacgttgacctgctgatcacgattccgggccgtcctacggatccggagctgctccacaaagtggttgatctgctcaagaagcaaggtctgctgctgtacggggacatccgtgcgcgtacgttcgtggaggggcaactgccaaatcctaaacctgaccagctggacaaccatcagaagtgcttcgccattctcaagctgtaccgtccgaaggtggataacagtgcggttgggacgtcgaagaaagtcgacatggctgaggttaaggattggaaagcggttcgtgtggatctggtggtcgctccagatgagcagttcgcctatgcgctgctcggttggacgggcagcggcatgtttcgtcgcgatactcgtcgctacgcggaggaagagcgcgacatgctgctcgacaaccatggtctctacgacctgaaaaagggccagtttctgagtgcggacagcgaagaagagattttcggtcatctggacctggattatctggagccgtgggaacgcaacgcg

SEQ ID NO: 5760 - protein, 394 aa, synthetic construct
  REGION 1..394: note = Variant of terminal deoxynucleotidyl transferase
MHHHHHHGGSGHPEGNTPEKEVPSVIARHVSPYACQRKTTLNNYNKKITDALEIMAENYKFKENLQARLEARRAASVLKSLPFEVTSMKDIQGLPCITDDVRPVIEEIIEVGESSRVKEILNDERYKAFKQFTSVFGVGVKTAEKWYRMGLRTLEEAKASKSLKLNKMQKAGFLYYEDLASGVSKEEADAVLDIVKETVRTVSPDALVTIAGGFRRGKPQGHDVDLLITIPGRPTDPELLHKVVDLLKKQGLLLYGDIRARTFVEGQLPNPKPDQLDNHQKCFAILKLYRPKVDNSAVGTSKKVDMAEVKDWKAVRVDLVVAPDEQFAYALLGWTGSGMFRRDTRRYAEEERDMLLDNHGLYDLKKGQFLSADSEEEIFGHLDLDYLEPWERNA

SEQ ID NO: 5761 - DNA, 1182 bp, synthetic construct
  misc_feature 1..1182: note = Variant of terminal deoxynucleotidyl transferase
  source 1..1182: mol_type = other DNA
atgcaccatcatcaccatcacgggggctccggccatccggaaggtaataccccggagaaggaggtgccgagcgttatcgcccgtcatgttagtccgtacgcgtgccagcgcaagaccacgctgaataactacaacaaaaagatcaccgacgcgctggaaatcatggccgagaactacaagtttaaagagaacctgcaggcgcgcctggaggcccgtcgcgccgcgagtgtcctgaaaagcctgccgttcgaggttaccagcatgaaagacatccaaggtctgccgtgcattaccgacgacgtacgtcctgtgatcgaagagatcatcgaagtaggcgagagcagccgtgttaaagaaatcctcaatgacgagcgctacaaggcctttaagcagttcaccagcgtgttcggtgtgggcgtcaagaccgcggaaaagtggtaccgtatgggcctccgtacgctggaagaagcaaaggccagtaagagtctgaagctgaacaagatgcagaaggcgggcttcctgtactacgaggatctggcgagcggtgttagtaaagaagaagccgatgccgttctggatatcgtgaaggaaacggtgcgcactgttagtccggatgcgctggtgaccatcgccggcggtttccgccgtggcaaacctcagggccacgacgttgacctgctgatcacgattccgggccgtcctacggatccggagctgctccacaaagtggttgatctgctcaagaagcaaggtctgctgctgtacggggacatccgtgagcgtacgttcgtggaggggcaactgccaaatcctaaacctgaccagctggacaaccatcagaagtgcttcgccattctcaagctgtaccgtccgaaggtggataacagtgcggttgggacgtcgaagaaagtcgacatggctgaggttaaggattggaaagcggttcgtgtggatctggtggtcgctccagatgagcagttcgcctatgcgctgctcggttggacgggcagcggcatgtttcgttgggatactcgtcgctacgcggaggaagagcgcgacatgctgctcgacaaccatggtctctacgacctgaaaaagggcatctttctgagtgcggacagcgaagaagagattttcggtcatctggacctggattatctggagccgtgggaacgcaacgcg

SEQ ID NO: 5762 - protein, 394 aa, synthetic construct
  REGION 1..394: note = Variant of terminal deoxynucleotidyl transferase
MHHHHHHGGSGHPEGNTPEKEVPSVIARHVSPYACQRKTTLNNYNKKITDALEIMAENYKFKENLQARLEARRAASVLKSLPFEVTSMKDIQGLPCITDDVRPVIEEIIEVGESSRVKEILNDERYKAFKQFTSVFGVGVKTAEKWYRMGLRTLEEAKASKSLKLNKMQKAGFLYYEDLASGVSKEEADAVLDIVKETVRTVSPDALVTIAGGFRRGKPQGHDVDLLITIPGRPTDPELLHKVVDLLKKQGLLLYGDIRERTFVEGQLPNPKPDQLDNHQKCFAILKLYRPKVDNSAVGTSKKVDMAEVKDWKAVRVDLVVAPDEQFAYALLGWTGSGMFRWDTRRYAEEERDMLLDNHGLYDLKKGIFLSADSEEEIFGHLDLDYLEPWERNA

SEQ ID NO: 5763 - DNA, 1182 bp, synthetic construct
  misc_feature 1..1182: note = Variant of terminal deoxynucleotidyl transferase
  source 1..1182: mol_type = other DNA
atgcaccatcatcaccatcacgggggctccggccatccggaaggtaataccccggagaaggaggtgccgagcgttatcgcccgtcatgttagtccgtacgcgtgccagcgcaagaccacgctgaataactacaacaaaaagatcaccgacgcgctggaaatcatggccgagaactacaagtttaaagagaacctgcaggcgcgcctggaggcccgtcgcgccgcgagtgtcctgaaaagcctgccgttcgaggttaccagcatgaaagacatccaaggtctgccgtgcattaccgacgacgtacgtcctgtgatcgaagagatcatcgaagtaggcgagagcagccgtgttaaagaaatcctcaatgacgagcgctacaaggcctttaagcagttcaccagcgtgttcggtgtgggcgtcaagaccgcggaaaagtggtaccgtatgggcctccgtacgctggaagaagcaaaggccagtaagagtctgaagctgaacaagatgcagaaggcgggcttcctgtactacgaggatctggcgagcggtgttagtaaagaagaagccgatgccgttctggatatcgtgaaggaaacggtgcgcactgttagtccggatgcgctggtgaccatcgccggcggtttccgccgtggcaaacctcagggccacgacgttgacctgctgatcacgattccgggccgtcctacggatccggagctgctccacaaagtggttgatctgctcaagaagcaaggtctgctgctgtacggggacatccgtgagcgtacgttcgtggaggggcaactgccaaatcctaaacctgaccagctggacaaccatcagaagtgcttcgccattctcaagctgtaccgtccgaaggtggataacagtgcggttgggacgtcgaagaaagtcgacatggctgaggttaaggattggaaagcggttcgtgtggatctggtggtcgctccagatgagcagttcgcctatgcgctgctcggttggacgggcagcggcatgtttcgtttggatactcgtcgctacgcggaggaagagcgcgacatgctgctcgacaaccatggtctctacgacctgaaaaagggcatctttctgagtgcggacagcgaagaagagattttcggtcatctggacctggattatctggagccgtgggaacgcaacgcg

SEQ ID NO: 5764 - protein, 394 aa, synthetic construct
  REGION 1..394: note = Variant of terminal deoxynucleotidyl transferase
MHHHHHHGGSGHPEGNTPEKEVPSVIARHVSPYACQRKTTLNNYNKKITDALEIMAENYKFKENLQARLEARRAASVLKSLPFEVTSMKDIQGLPCITDDVRPVIEEIIEVGESSRVKEILNDERYKAFKQFTSVFGVGVKTAEKWYRMGLRTLEEAKASKSLKLNKMQKAGFLYYEDLASGVSKEEADAVLDIVKETVRTVSPDALVTIAGGFRRGKPQGHDVDLLITIPGRPTDPELLHKVVDLLKKQGLLLYGDIRERTFVEGQLPNPKPDQLDNHQKCFAILKLYRPKVDNSAVGTSKKVDMAEVKDWKAVRVDLVVAPDEQFAYALLGWTGSGMFRLDTRRYAEEERDMLLDNHGLYDLKKGIFLSADSEEEIFGHLDLDYLEPWERNA

SEQ ID NO: 5765 - DNA, 1182 bp, synthetic construct
  misc_feature 1..1182: note = Variant of terminal deoxynucleotidyl transferase
  source 1..1182: mol_type = other DNA
atgcaccatcatcaccatcacgggggctccggccatccggaaggtaataccccggagaaggaggtgccgagcgttatcgcccgtcatgttagtccgtacgcgtgccagcgcaagaccacgctgaataactacaacaaaaagatcaccgacgcgctggaaatcatggccgagaactacaagtttaaagagaacctgcaggcgcgcctggaggcccgtcgcgccgcgagtgtcctgaaaagcctgccgttcgaggttaccagcatgaaagacatccaaggtctgccgtgcattaccgacgacgtacgtcctgtgatcgaagagatcatcgaagtaggcgagagcagccgtgttaaagaaatcctcaatgacgagcgctacaaggcctttaagcagttcaccagcgtgttcggtgtgggcgtcaagaccgcggaaaagtggtaccgtatgggcctccgtacgctggaagaagcaaaggccagtaagagtctgaagctgaacaagatgcagaaggcgggcttcctgtactacgaggatctggcgagcggtgttagtaaagaagaagccgatgccgttctggatatcgtgaaggaaacggtgcgcactgttagtccggatgcgctggtgaccatcgccggcggtttccgccgtggcaaacctcagggccacgacgttgacctgctgatcacgattccgggccgtcctacggatccggagctgctccacaaagtggttgatctgctcaagaagcaaggtctgctgctgtacggggacatccgtgagcgtacgttcgtggaggggcaactgccaaatcctaaacctgaccagctggacaaccatcagaagtgcttcgccattctcaagctgtaccgtccgaaggtggataacagtgcggttgggacgtcgaagaaagtcgacatggctgaggttaaggattggaaagcggttcgtgtggatctggtggtcgctccagatgagcagttcgcctatgcgctgctcggttggacgggcagcggcatgtttcgtcgcgatactcgtcgctacgcggaggaagagcgcgacatgctgctcgacaaccatggtctctacgacctgaaaaagggcatctttctgagtgcggacagcgaagaagagattttcgtgcatctggacctggattatctggagccgtgggaacgcaacgcg

SEQ ID NO: 5766 - protein, 394 aa, synthetic construct
  REGION 1..394: note = Variant of terminal deoxynucleotidyl transferase
MHHHHHHGGSGHPEGNTPEKEVPSVIARHVSPYACQRKTTLNNYNKKITDALEIMAENYKFKENLQARLEARRAASVLKSLPFEVTSMKDIQGLPCITDDVRPVIEEIIEVGESSRVKEILNDERYKAFKQFTSVFGVGVKTAEKWYRMGLRTLEEAKASKSLKLNKMQKAGFLYYEDLASGVSKEEADAVLDIVKETVRTVSPDALVTIAGGFRRGKPQGHDVDLLITIPGRPTDPELLHKVVDLLKKQGLLLYGDIRERTFVEGQLPNPKPDQLDNHQKCFAILKLYRPKVDNSAVGTSKKVDMAEVKDWKAVRVDLVVAPDEQFAYALLGWTGSGMFRRDTRRYAEEERDMLLDNHGLYDLKKGIFLSADSEEEIFVHLDLDYLEPWERNA

SEQ ID NO: 5767 - DNA, 1182 bp, synthetic construct
  misc_feature 1..1182: note = Variant of terminal deoxynucleotidyl transferase
  source 1..1182: mol_type = other DNA
atgcaccatcatcaccatcacgggggctccggccatccggaaggtaataccccggagaaggaggtgccgagcgttatcgcccgtcatgttagtccgtacgcgtgccagcgcaagaccacgctgaataactacaacaaaaagatcaccgacgcgctggaaatcatggccgagaactacaagtttaaagagaacctgcaggcgcgcctggaggcccgtcgcgccgcgagtgtcctgaaaagcctgccgttcgaggttaccagcatgaaagacatccaaggtctgccgtgcattaccgacgacgtacgtcctgtgatcgaagagatcatcgaagtaggcgagagcagccgtgttaaagaaatcctcaatgacgagcgctacaaggcctttaagcagttcaccagcgtgttcggtgtgggcgtcaagaccgcggaaaagtggtaccgtatgggcctccgtacgctggaagaagcaaaggccagtaagagtctgaagctgaacaagatgcagaaggcgggcttcctgtactacgaggatctggcgagcggtgttagtaaagaagaagccgatgccgttctggatatcgtgaaggaaacggtgcgcactgttagtccggatgcgctggtgaccatcgccggcggtttccgccgtggcaaacctcagggccacgacgttgacctgctgatcacgattccgggccgtcctacggatccggagctgctccacaaagtggttgatctgctcaagaagcaaggtctgctgctgtacggggacatccgtgagcgtacgttcgtggaggggcaactgccaaatcctaaacctgaccagctggacaaccatcagaagtgcttcgccattctcaagctgtaccgtccgaaggtggataacagtgcggttgggacgtcgaagaaagtcgacatggctgaggttaaggattggaaagcggttcgtgtggatctggtggtcgctccagatgagcagttcgcctatgcgctgctcggttggacgggcagcggcatgtttcgtcgcgatactcgtacttacgcggaggaagagcgcgacatgctgctcgacaaccatggtctctacgacctgaaaaagggcatctttctgagtgcggacagcgaagaagagattttcggtcatctggacctggattatctggagccgtgggaacgcaacgcg

SEQ ID NO: 5768 - protein, 394 aa, synthetic construct
  REGION 1..394: note = Variant of terminal deoxynucleotidyl transferase
MHHHHHHGGSGHPEGNTPEKEVPSVIARHVSPYACQRKTTLNNYNKKITDALEIMAENYKFKENLQARLEARRAASVLKSLPFEVTSMKDIQGLPCITDDVRPVIEEIIEVGESSRVKEILNDERYKAFKQFTSVFGVGVKTAEKWYRMGLRTLEEAKASKSLKLNKMQKAGFLYYEDLASGVSKEEADAVLDIVKETVRTVSPDALVTIAGGFRRGKPQGHDVDLLITIPGRPTDPELLHKVVDLLKKQGLLLYGDIRERTFVEGQLPNPKPDQLDNHQKCFAILKLYRPKVDNSAVGTSKKVDMAEVKDWKAVRVDLVVAPDEQFAYALLGWTGSGMFRRDTRTYAEEERDMLLDNHGLYDLKKGIFLSADSEEEIFGHLDLDYLEPWERNA

SEQ ID NO: 5769 - DNA, 1182 bp, synthetic construct
  misc_feature 1..1182: note = Variant of terminal deoxynucleotidyl transferase
  source 1..1182: mol_type = other DNA
atgcaccatcatcaccatcacgggggctccggccatccggaaggtaataccccggagaaggaggtgccgagcgttatcgcccgtcatgttagtccgtacgcgtgccagcgcaagaccacgctgaataactacaacaaaaagatcaccgacgcgctggaaatcatggccgagaactacaagtttaaagagaacctgcaggcgcgcctggaggcccgtcgcgccgcgagtgtcctgaaaagcctgccgttcgaggttaccagcatgaaagacatccaaggtctgccgtgcattaccgacgacgtacgtcctgtgatcgaagagatcatcgaagtaggcgagagcagccgtgttaaagaaatcctcaatgacgagcgctacaaggcctttaagcagttcaccagcgtgttcggtgtgggcgtcaagaccgcggaaaagtggtaccgtatgggcctccgtacgctggaagaagcaaaggccagtaagagtctgaagctgaacaagatgcagaaggcgggcttcctgtactacgaggatctggcgagcggtgttagtaaagaagaagccgatgccgttctggatatcgtgaaggaaacggtgcgcactgttagtccggatgcgctggtgaccatcgccggcggtttccgccgtggcaaacctcagggccacgacgttgacctgctgatcacgattccgggccgtcctacggatccggagctgctccacaaagtggttgatctgctcaagaagcaaggtctgctgctgtacggggacatccgtgagcgtacgttcgtggaggggcaactgccaaatcctaaacctgaccagctggacaaccatcagaagtgcttcgccattctcaagctgtaccgtccgaaggtggataacagtgcggttgggacgtcgaagaaagtcgacatggctgaggttaaggattggaaagcggttcgtgtggatctggtggtcgctccagatgagcagttcgcctatgcgctgctcggttggacgggcagcggcatgtttcgttgtgatactcgtcgctacgcggaggaagagcgcgacatgctgctcgacaaccatggtctctacgacctgaaaaagggcatctttctgagtgcggacagcgaagaagagattttcggtcatctggacctggattatctggagccgtgggaacgcaacgcg

SEQ ID NO: 5770 - protein, 394 aa, synthetic construct
  REGION 1..394: note = Variant of terminal deoxynucleotidyl transferase
MHHHHHHGGSGHPEGNTPEKEVPSVIARHVSPYACQRKTTLNNYNKKITDALEIMAENYKFKENLQARLEARRAASVLKSLPFEVTSMKDIQGLPCITDDVRPVIEEIIEVGESSRVKEILNDERYKAFKQFTSVFGVGVKTAEKWYRMGLRTLEEAKASKSLKLNKMQKAGFLYYEDLASGVSKEEADAVLDIVKETVRTVSPDALVTIAGGFRRGKPQGHDVDLLITIPGRPTDPELLHKVVDLLKKQGLLLYGDIRERTFVEGQLPNPKPDQLDNHQKCFAILKLYRPKVDNSAVGTSKKVDMAEVKDWKAVRVDLVVAPDEQFAYALLGWTGSGMFRCDTRRYAEEERDMLLDNHGLYDLKKGIFLSADSEEEIFGHLDLDYLEPWERNA

SEQ ID NO: 5771 - DNA, 1182 bp, synthetic construct
  misc_feature 1..1182: note = Variant of terminal deoxynucleotidyl transferase
  source 1..1182: mol_type = other DNA
atgcaccatcatcaccatcacgggggctccggccatccggaaggtaataccccggagaaggaggtgccgagcgttatcgcccgtcatgttagtccgtacgcgtgccagcgcaagaccacgctgaataactacaacaaaaagatcaccgacgcgctggaaatcatggccgagaactacaagtttaaagagaacctgcaggcgcgcctggaggcccgtcgcgccgcgagtgtcctgaaaagcctgccgttcgaggttaccagcatgaaagacatccaaggtctgccgtgcattaccgacgacgtacgtcctgtgatcgaagagatcatcgaagtaggcgagagcagccgtgttaaagaaatcctcaatgacgagcgctacaaggcctttaagcagttcaccagcgtgttcggtgtgggcgtcaagaccgcggaaaagtggtaccgtatgggcctccgtacgctggaagaagcaaaggccagtaagagtctgaagctgaacaagatgcagaaggcgggcttcctgtactacgaggatctggcgagcggtgttagtaaagaagaagccgatgccgttctggatatcgtgaaggaaacggtgcgcactgttagtccggatgcgctggtgaccatcgccggcggtttccgccgtggcaaacctcagggccacgacgttgacctgctgatcacgattccgggccgtcctacggatccggagctgctccacaaagtggttgatctgctcaagaagcaaggtctgctgctgtacggggacatccgtgagcgtacgttcgtggaggggcaactgccaaatcctaaacctgaccagctggacaaccatcagaagtgcttcgccattctcaagctgtaccgtccgaaggtggataacagtgcggttgggacgtcgaagaaagtcgacatggctgaggttaaggattggaaagcggttcgtgtggatctggtggtcgctccagatgagcagttcgcctatgcgctgctcggttggacgggcagcggcatgtttcgtcgcgatactcgtcgctacgcggaggaagagcgcgacatgctgctcgacaaccatggtctctacgacctgaaaaagggcatctttctgagtgcggacagggaagaagagattttcggtcatctggacctggattatctggagccgtgggaacgcaacgcg

SEQ ID NO: 5772 - protein, 394 aa, synthetic construct
  REGION 1..394: note = Variant of terminal deoxynucleotidyl transferase
MHHHHHHGGSGHPEGNTPEKEVPSVIARHVSPYACQRKTTLNNYNKKITDALEIMAENYKFKENLQARLEARRAASVLKSLPFEVTSMKDIQGLPCITDDVRPVIEEIIEVGESSRVKEILNDERYKAFKQFTSVFGVGVKTAEKWYRMGLRTLEEAKASKSLKLNKMQKAGFLYYEDLASGVSKEEADAVLDIVKETVRTVSPDALVTIAGGFRRGKPQGHDVDLLITIPGRPTDPELLHKVVDLLKKQGLLLYGDIRERTFVEGQLPNPKPDQLDNHQKCFAILKLYRPKVDNSAVGTSKKVDMAEVKDWKAVRVDLVVAPDEQFAYALLGWTGSGMFRRDTRRYAEEERDMLLDNHGLYDLKKGIFLSADREEEIFGHLDLDYLEPWERNA

SEQ ID NO: 5773 - DNA, 1182 bp, synthetic construct
  misc_feature 1..1182: note = Variant of terminal deoxynucleotidyl transferase
  source 1..1182: mol_type = other DNA
atgcaccatcatcaccatcacgggggctccggccatccggaaggtaataccccggagaaggaggtgccgagcgttatcgcccgtcatgttagtccgtacgcgtgccagcgcaagaccacgctgaataactacaacaaaaagatcaccgacgcgctggaaatcatggccgagaactacaagtttaaagagaacctgcaggcgcgcctggaggcccgtcgcgccgcgagtgtcctgaaaagcctgccgttcgaggttaccagcatgaaagacatccaaggtctgccgtgcattaccgacgacgtacgtcctgtgatcgaagagatcatcgaagtaggcgagagcagccgtgttaaagaaatcctcaatgacgagcgctacaaggcctttaagcagttcaccagcgtgttcggtgtgggcgtcaagaccgcggaaaagtggtaccgtatgggcctccgtacgctggaagaagcaaaggccagtaagagtctgaagctgaacaagatgcagaaggcgggcttcctgtactacgaggatctggcgagcggtgttagtaaagaagaagccgatgccgttctggatatcgtgaaggaaacggtgcgcactgttagtccggatgcgctggtgaccatcgccggcggtttccgccgtggcaaacctcagggccacgacgttgacctgctgatcacgattccgggccgtcctacggatccggagctgctccacaaagtggttgatctgctcaagaagcaaggtctgctgctgtacggggacatccgtgagcgtacgttcgtggaggggcaactgccaaatcctaaacctgaccagctggacaaccatcagaagtgcttcgccattctcaagctgtaccgtccgaaggtggataacagtgcggttgggacgtcgaagaaagtcgacatggctgaggttaaggattggaaagcggttcgtgtggatctggtggtcgctccagatgagcagttcgcctatgcgctgctcggttggacgggcagcggcatgtttcgttatgatactcgtcgctacgcggaggaagagcgcgacatgctgctcgacaaccatggtctctacgacctgaaaaagggcatctttctgagtgcggacagcgaagaagagattttcggtcatctggacctggattatctggagccgtgggaacgcaacgcg

SEQ ID NO: 5774 - protein, 394 aa, synthetic construct
  REGION 1..394: note = Variant of terminal deoxynucleotidyl transferase
MHHHHHHGGSGHPEGNTPEKEVPSVIARHVSPYACQRKTTLNNYNKKITDALEIMAENYKFKENLQARLEARRAASVLKSLPFEVTSMKDIQGLPCITDDVRPVIEEIIEVGESSRVKEILNDERYKAFKQFTSVFGVGVKTAEKWYRMGLRTLEEAKASKSLKLNKMQKAGFLYYEDLASGVSKEEADAVLDIVKETVRTVSPDALVTIAGGFRRGKPQGHDVDLLITIPGRPTDPELLHKVVDLLKKQGLLLYGDIRERTFVEGQLPNPKPDQLDNHQKCFAILKLYRPKVDNSAVGTSKKVDMAEVKDWKAVRVDLVVAPDEQFAYALLGWTGSGMFRYDTRRYAEEERDMLLDNHGLYDLKKGIFLSADSEEEIFGHLDLDYLEPWERNA

SEQ ID NO: 5775 - DNA, 1182 bp, synthetic construct
  misc_feature 1..1182: note = Variant of terminal deoxynucleotidyl transferase
  source 1..1182: mol_type = other DNA
atgcaccatcatcaccatcacgggggctccggccatccggaaggtaataccccggagaaggaggtgccgagcgttatcgcccgtcatgttagtccgtacgcgtgccagcgcaagaccacgctgaataactacaacaaaaagatcaccgacgcgctggaaatcatggccgagaactacaagtttaaagagaacctgcaggcgcgcctggaggcccgtcgcgccgcgagtgtcctgaaaagcctgccgttcgaggttaccagcatgaaagacatccaaggtctgccgtgcattaccgacgacgtacgtcctgtgatcgaagagatcatcgaagtaggcgagagcagccgtgttaaagaaatcctcaatgacgagcgctacaaggcctttaagcagttcaccagcgtgttcggtgtgggcgtcaagaccgcggaaaagtggtaccgtatgggcctccgtacgctggaagaagcaaaggccagtaagagtctgaagctgaacaagatgcagaaggcgggcttcctgtactacgaggatctggcgagcggtgttagtaaagaagaagccgatgccgttctggatatcgtgaaggaaacggtgcgcactgttagtccggatgcgctggtgaccatcgccggcggtttccgccgtggcaaacctcagggccacgacgttgacctgctgatcacgattccgggccgtcctacggatccggagctgctccacaaagtggttgatctgctcaagaagcaaggtctgctgctgtacggggacatccgtgagcgtacgttcgtggaggggcaactgccaaatcctaaacctgaccagctggacaaccatcagaagtgcttcgccattctcaagctgtaccgtccgaaggtggataacagtgcggttgggacgtcgaagaaagtcgacatggctgaggttaaggattggaaagcggttcgtgtggatctggtggtcgctccagatgagcagttcgcctatgcgctgctcggttggacgggcagcggcatgtttcgtcgcgatactcgtcgctacgcggaggaagagcgcgacatgctgctcgacaaccatggtctctacgacctgaaaaagggcatctttctgagtgcggacagcgaagaagagattttcggtcatctgcagctggattatctggagccgtgggaacgcaacgcg

SEQ ID NO: 5776 - protein, 394 aa, synthetic construct
  REGION 1..394: note = Variant of terminal deoxynucleotidyl transferase
MHHHHHHGGSGHPEGNTPEKEVPSVIARHVSPYACQRKTTLNNYNKKITDALEIMAENYKFKENLQARLEARRAASVLKSLPFEVTSMKDIQGLPCITDDVRPVIEEIIEVGESSRVKEILNDERYKAFKQFTSVFGVGVKTAEKWYRMGLRTLEEAKASKSLKLNKMQKAGFLYYEDLASGVSKEEADAVLDIVKETVRTVSPDALVTIAGGFRRGKPQGHDVDLLITIPGRPTDPELLHKVVDLLKKQGLLLYGDIRERTFVEGQLPNPKPDQLDNHQKCFAILKLYRPKVDNSAVGTSKKVDMAEVKDWKAVRVDLVVAPDEQFAYALLGWTGSGMFRRDTRRYAEEERDMLLDNHGLYDLKKGIFLSADSEEEIFGHLQLDYLEPWERNA

SEQ ID NO: 5777 - DNA, 1182 bp, synthetic construct
  misc_feature 1..1182: note = Variant of terminal deoxynucleotidyl transferase
  source 1..1182: mol_type = other DNA
atgcaccatcatcaccatcacgggggctccggccatccggaaggtaataccccggagaaggaggtgccgagcgttatcgcccgtcatgttagtccgtacgcgtgccagcgcaagaccacgctgaataactacaacaaaaagatcaccgacgcgctggaaatcatggccgagaactacaagtttaaagagaacctgcaggcgcgcctggaggcccgtcgcgccgcgagtgtcctgaaaagcctgccgttcgaggttaccagcatgaaagacatccaaggtctgccgtgcattaccgacgacgtacgtcctgtgatcgaagagatcatcgaagtaggcgagagcagccgtgttaaagaaatcctcaatgacgagcgctacaaggcctttaagcagttcaccagcgtgttcggtgtgggcgtcaagaccgcggaaaagtggtaccgtatgggcctccgtacgctggaagaagcaaaggccagtaagagtctgaagctgaacaagatgcagaaggcgggcttcctgtactacgaggatctggcgagcggtgttagtaaagaagaagccgatgccgttctggatatcgtgaaggaaacggtgcgcactgttagtccggatgcgctggtgaccatcgccggcggtttccgccgtggcaaacctcagggccacgacgttgacctgctgatcacgattccgggccgtcctacggatccggagctgctccacaaagtggttgatctgctcaagaagcaaggtctgctgctgtacggggacatccgtgagcgtacgttcgtggaggggcaactgccaaatcctaaacctgaccagctggacaaccatcagaagtgcttcgccattctcaagctgtaccgtccgaaggtggataacagtgcggttgggacgtcgaagaaagtcgacatggctgaggttaaggattggaaagcggttcgtgtggatctggtggtcgctccagatgagcagttcgcctatgcgctgctcggttggacgggcagcggcatgtttcgtcgcgatacttggcgctacgcggaggaagagcgcgacatgctgctcgacaaccatggtctctacgacctgaaaaagggcatctttctgagtgcggacagcgaagaagagattttcggtcatctggacctggattatctggagccgtgggaacgcaacgcg

SEQ ID NO: 5778 - protein, 394 aa, synthetic construct
  REGION 1..394: note = Variant of terminal deoxynucleotidyl transferase
MHHHHHHGGSGHPEGNTPEKEVPSVIARHVSPYACQRKTTLNNYNKKITDALEIMAENYKFKENLQARLEARRAASVLKSLPFEVTSMKDIQGLPCITDDVRPVIEEIIEVGESSRVKEILNDERYKAFKQFTSVFGVGVKTAEKWYRMGLRTLEEAKASKSLKLNKMQKAGFLYYEDLASGVSKEEADAVLDIVKETVRTVSPDALVTIAGGFRRGKPQGHDVDLLITIPGRPTDPELLHKVVDLLKKQGLLLYGDIRERTFVEGQLPNPKPDQLDNHQKCFAILKLYRPKVDNSAVGTSKKVDMAEVKDWKAVRVDLVVAPDEQFAYALLGWTGSGMFRRDTWRYAEEERDMLLDNHGLYDLKKGIFLSADSEEEIFGHLDLDYLEPWERNA

SEQ ID NO: 5779 - DNA, 1182 bp, synthetic construct
  misc_feature 1..1182: note = Variant of terminal deoxynucleotidyl transferase
  source 1..1182: mol_type = other DNA
atgcaccatcatcaccatcacgggggctccggccatccggaaggtaataccccggagaaggaggtgccgagcgttatcgcccgtcatgttagtccgtacgcgtgccagcgcaagaccacgctgaataactacaacaaaaagatcaccgacgcgctggaaatcatggccgagaactacaagtttaaagagaacctgcaggcgcgcctggaggcccgtcgcgccgcgagtgtcctgaaaagcctgccgttcgaggttaccagcatgaaagacatccaaggtctgccgtgcattaccgacgacgtacgtcctgtgatcgaagagatcatcgaagtaggcgagagcagccgtgttaaagaaatcctcaatgacgagcgctacaaggcctttaagcagttcaccagcgtgttcggtgtgggcgtcaagaccgcggaaaagtggtaccgtatgggcctccgtacgctggaagaagcaaaggccagtaagagtctgaagctgaacaagatgcagaaggcgggcttcctgtactacgaggatctggcgagcggtgttagtaaagaagaagccgatgccgttctggatatcgtgaaggaaacggtgcgcactgttagtccggatgcgctggtgaccatcgccggcggtttccgccgtggcaaacctcagggccacgacgttgacctgctgatcacgattccgggccgtcctacggatccggagctgctccacaaagtggttgatctgctcaagaagcaaggtctgctgctgtacggggacatccgtgagcgtacgttcgtggaggggcaactgccaaatcctaaacctgaccagctggacaaccatcagaagtgcttcgccattctcaagctgtaccgtccgaaggtggataacagtgcggttgggacgtcgaagaaagtcgacatggctgaggttaaggattggaaagcggttcgtgtggatctggtggtcgctccagatacgcagttcgcctatgcgctgctcggttggacgggcagcggcatgtttcgtcgcgatactcgtcgctacgcggaggaagagcgcgacatgctgctcgacaaccatggtctctacgacctgaaaaagggcatctttctgagtgcggacagcgaagaagagattttcggtcatctggacctggattatctggagccgtgggaacgcaacgcg

SEQ ID NO: 5780 - protein, 394 aa, synthetic construct
  REGION 1..394: note = Variant of terminal deoxynucleotidyl transferase
MHHHHHHGGSGHPEGNTPEKEVPSVIARHVSPYACQRKTTLNNYNKKITDALEIMAENYKFKENLQARLEARRAASVLKSLPFEVTSMKDIQGLPCITDDVRPVIEEIIEVGESSRVKEILNDERYKAFKQFTSVFGVGVKTAEKWYRMGLRTLEEAKASKSLKLNKMQKAGFLYYEDLASGVSKEEADAVLDIVKETVRTVSPDALVTIAGGFRRGKPQGHDVDLLITIPGRPTDPELLHKVVDLLKKQGLLLYGDIRERTFVEGQLPNPKPDQLDNHQKCFAILKLYRPKVDNSAVGTSKKVDMAEVKDWKAVRVDLVVAPDTQFAYALLGWTGSGMFRRDTRRYAEEERDMLLDNHGLYDLKKGIFLSADSEEEIFGHLDLDYLEPWERNA

SEQ ID NO: 5781 - DNA, 1182 bp, synthetic construct
  misc_feature 1..1182: note = Variant of terminal deoxynucleotidyl transferase
  source 1..1182: mol_type = other DNA
atgcaccatcatcaccatcacgggggctccggccatccggaaggtaataccccggagaaggaggtgccgagcgttatcgcccgtcatgttagtccgtacgcgtgccagcgcaagaccacgctgaataactacaacaaaaagatcaccgacgcgctggaaatcatggccgagaactacaagtttaaagagaacctgcaggcgcgcctggaggcccgtcgcgccgcgagtgtcctgaaaagcctgccgttcgaggttaccagcatgaaagacatccaaggtctgccgtgcattaccgacgacgtacgtcctgtgatcgaagagatcatcgaagtaggcgagagcagccgtgttaaagaaatcctcaatgacgagcgctacaaggcctttaagcagttcaccagcgtgttcggtgtgggcgtcaagaccgcggaaaagtggtaccgtatgggcctccgtacgctggaagaagcaaaggccagtaagagtctgaagctgaacaagatgcagaaggcgggcttcctgtactacgaggatctggcgagcggtgttagtaaagaagaagccgatgccgttctggatatcgtgaaggaaacggtgcgcactgttagtccggatgcgctggtgaccatcgccggcggtttccgccgtggcaaacctcagggccacgacgttgacctgctgatcacgattccgggccgtcctacggatccggagctgctccacaaagtggttgatctgctcaagaagcaaggtctgctgctgtacggggacatccgtgagcgtacgttcgtggaggggcaactgccaaatcctaaacctgaccagctggacaaccatcagaagtgcttcgccattctcaagctgtaccgtccgaaggtggataacagtgcggttgggacgtcgaagaaagtcgacatggctgaggttaaggattggaaagcggttcgtgtggatctggtggtcgctccagatgagcagttcgcctatgcgctgctcggttggacgggcagcggcatgtttcgtcgcgatactcgttggtacgcggaggaagagcgcgacatgctgctcgacaaccatggtctctacgacctgaaaaagggcatctttctgagtgcggacagcgaagaagagattttcggtcatctggacctggattatctggagccgtgggaacgcaacgcg

SEQ ID NO: 5782 - protein, 394 aa, synthetic construct
  REGION 1..394: note = Variant of terminal deoxynucleotidyl transferase
MHHHHHHGGSGHPEGNTPEKEVPSVIARHVSPYACQRKTTLNNYNKKITDALEIMAENYKFKENLQARLEARRAASVLKSLPFEVTSMKDIQGLPCITDDVRPVIEEIIEVGESSRVKEILNDERYKAFKQFTSVFGVGVKTAEKWYRMGLRTLEEAKASKSLKLNKMQKAGFLYYEDLASGVSKEEADAVLDIVKETVRTVSPDALVTIAGGFRRGKPQGHDVDLLITIPGRPTDPELLHKVVDLLKKQGLLLYGDIRERTFVEGQLPNPKPDQLDNHQKCFAILKLYRPKVDNSAVGTSKKVDMAEVKDWKAVRVDLVVAPDEQFAYALLGWTGSGMFRRDTRWYAEEERDMLLDNHGLYDLKKGIFLSADSEEEIFGHLDLDYLEPWERNA

SEQ ID NO: 5783 - DNA, 1182 bp, synthetic construct
  misc_feature 1..1182: note = Variant of terminal deoxynucleotidyl transferase
  source 1..1182: mol_type = other DNA
atgcaccatcatcaccatcacgggggctccggccatccggaaggtaataccccggagaaggaggtgccgagcgttatcgcccgtcatgttagtccgtacgcgtgccagcgcaagaccacgctgaataactacaacaaaaagatcaccgacgcgctggaaatcatggccgagaactacaagtttaaagagaacctgcaggcgcgcctggaggcccgtcgcgccgcgagtgtcctgaaaagcctgccgttcgaggttaccagcatgaaagacatccaaggtctgccgtgcattaccgacgacgtacgtcctgtgatcgaagagatcatcgaagtaggcgagagcagccgtgttaaagaaatcctcaatgacgagcgctacaaggcctttaagcagttcaccagcgtgttcggtgtgggcgtcaagaccgcggaaaagtggtaccgtatgggcctccgtacgctggaagaagcaaaggccagtaagagtctgaagctgaacaagatgcagaaggcgggcttcctgtactacgaggatctggcgagcggtgttagtaaagaagaagccgatgccgttctggatatcgtgaaggaaacggtgcgcactgttagtccggatgcgctggtgaccatcgccggcggtttccgccgtggcaaacctcagggccacgacgttgacctgctgatcacgattccgggccgtcctacggatccggagctgctccacaaagtggttgatctgctcaagaagcaaggtctgctgctgtacggggacatccgtgagcgtacgttcgtggaggggcaactgccaaatcctaaacctgaccagctggacaaccatcagaagtgcttcgccattctcaagctgtaccgtccgaaggtggataacagtgcggttgggacgtcgaagaaagtcgacatggctgaggttaaggattggaaagcggttcgtgtggatctggtggtcgctccagatgagcagttcgcctatgcgctgctcggttggacgggcagcggcatgtttcgtcgcgatactcgtcgctacgcggaggaagagcgcgacatgctgctcgacaaccatggtctctacgacctgaaaaagggcatctttctgagtgcggacagcgaaatggagattttcggtcatctggacctggattatctggagccgtgggaacgcaacgcg

SEQ ID NO: 5784 - protein, 394 aa, synthetic construct
  REGION 1..394: note = Variant of terminal deoxynucleotidyl transferase
MHHHHHHGGSGHPEGNTPEKEVPSVIARHVSPYACQRKTTLNNYNKKITDALEIMAENYKFKENLQARLEARRAASVLKSLPFEVTSMKDIQGLPCITDDVRPVIEEIIEVGESSRVKEILNDERYKAFKQFTSVFGVGVKTAEKWYRMGLRTLEEAKASKSLKLNKMQKAGFLYYEDLASGVSKEEADAVLDIVKETVRTVSPDALVTIAGGFRRGKPQGHDVDLLITIPGRPTDPELLHKVVDLLKKQGLLLYGDIRERTFVEGQLPNPKPDQLDNHQKCFAILKLYRPKVDNSAVGTSKKVDMAEVKDWKAVRVDLVVAPDEQFAYALLGWTGSGMFRRDTRRYAEEERDMLLDNHGLYDLKKGIFLSADSEMEIFGHLDLDYLEPWERNA

SEQ ID NO: 5785 - DNA, 1182 bp, synthetic construct
  misc_feature 1..1182: note = Variant of terminal deoxynucleotidyl transferase
  source 1..1182: mol_type = other DNA
atgcaccatcatcaccatcacgggggctccggccatccggaaggtaataccccggagaaggaggtgccgagcgttatcgcccgtcatgttagtccgtacgcgtgccagcgcaagaccacgctgaataactacaacaaaaagatcaccgacgcgctggaaatcatggccgagaactacaagtttaaagagaacctgcaggcgcgcctggaggcccgtcgcgccgcgagtgtcctgaaaagcctgccgttcgaggttaccagcatgaaagacatccaaggtctgccgtgcattaccgacgacgtacgtcctgtgatcgaagagatcatcgaagtaggcgagagcagccgtgttaaagaaatcctcaatgacgagcgctacaaggcctttaagcagttcaccagcgtgttcggtgtgggcgtcaagaccgcggaaaagtggtaccgtatgggcctccgtacgctggaagaagcaaaggccagtaagagtctgaagctgaacaagatgcagaaggcgggcttcctgtactacgaggatctggcgagcggtgttagtaaagaagaagccgatgccgttctggatatcgtgaaggaaacggtgcgcactgttagtccggatgcgctggtgaccatcgccggcggtttccgccgtggcaaacctcagggccacgacgttgacctgctgatcacgattccgggccgtcctacggatccggagctgctccacaaagtggttgatctgctcaagaagcaaggtctgctgctgtacggggacatccgtgagcgtacgttcgtggaggggcaactgccaaatcctaaacctgaccagctggacaaccatcagaagtgcttcgccattctcaagctgtaccgtccgaaggtggataacagtgcggttgggacgtcgaagaaagtcgacatggctgaggttaaggattggaaagcggttcgtgtggatctggtggtcgctccagatgagcagttcgcctatgcgctgctcggttggacgggcagcggcatgtttcgtactgatactcgtcgctacgcggaggaagagcgcgacatgctgctcgacaaccatggtctctacgacctgaaaaagggcatctttctgagtgcggacagcgaagaagagattttcggtcatctggacctggattatctggagccgtgggaacgcaacgcg

SEQ ID NO: 5786 - protein, 394 aa, synthetic construct
  REGION 1..394: note = Variant of terminal deoxynucleotidyl transferase
MHHHHHHGGSGHPEGNTPEKEVPSVIARHVSPYACQRKTTLNNYNKKITDALEIMAENYKFKENLQARLEARRAASVLKSLPFEVTSMKDIQGLPCITDDVRPVIEEIIEVGESSRVKEILNDERYKAFKQFTSVFGVGVKTAEKWYRMGLRTLEEAKASKSLKLNKMQKAGFLYYEDLASGVSKEEADAVLDIVKETVRTVSPDALVTIAGGFRRGKPQGHDVDLLITIPGRPTDPELLHKVVDLLKKQGLLLYGDIRERTFVEGQLPNPKPDQLDNHQKCFAILKLYRPKVDNSAVGTSKKVDMAEVKDWKAVRVDLVVAPDEQFAYALLGWTGSGMFRTDTRRYAEEERDMLLDNHGLYDLKKGIFLSADSEEEIFGHLDLDYLEPWERNA

SEQ ID NO: 5787 - DNA, 1182 bp, synthetic construct
  misc_feature 1..1182: note = Variant of terminal deoxynucleotidyl transferase
  source 1..1182: mol_type = other DNA
atgcaccatcatcaccatcacgggggctccggccatccggaaggtaataccccggagaaggaggtgccgagcgttatcgcccgtcatgttagtccgtacgcgtgccagcgcaagaccacgctgaataactacaacaaaaagatcaccgacgcgctggaaatcatggccgagaactacaagtttaaagagaacctgcaggcgcgcctggaggcccgtcgcgccgcgagtgtcctgaaaagcctgccgttcgaggttaccagcatgaaagacatccaaggtctgccgtgcattaccgacgacgtacgtcctgtgatcgaagagatcatcgaagtaggcgagagcagccgtgttaaagaaatcctcaatgacgagcgctacaaggcctttaagcagttcaccagcgtgttcggtgtgggcgtcaagaccgcggaaaagtggtaccgtatgggcctccgtacgctggaagaagcaaaggccagtaagagtctgaagctgaacaagatgcagaaggcgggcttcctgtactacgaggatctggcgagcggtgttagtaaagaagaagccgatgccgttctggatatcgtgaaggaaacggtgcgcactgttagtccggatgcgctggtgaccatcgccggcggtttccgccgtggcaaacctcagggccacgacgttgacctgctgatcacgattccgggccgtcctacggatccggagctgctccacaaagtggttgatctgctcaagaagcaaggtctgctgctgtacggggacatccgtgagcgtacgttcgtggaggggcaactgccaaatcctaaacctgaccagctggacaaccatcagaagtgcttcgccattctcaagctgtaccgtccgaaggtggataacagtgcggttgggacgtcgaagaaagtcgacatggctgaggttaaggattggaaagcggttcgtgtggatctggtggtcgctccagatgagcagttcgcctatgcgctgctcggttggacgggcagcggcatgtttcgttctgatactcgtcgctacgcggaggaagagcgcgacatgctgctcgacaaccatggtctctacgacctgaaaaagggcatctttctgagtgcggacagcgaagaagagattttcggtcatctggacctggattatctggagccgtgggaacgcaacgcg

SEQ ID NO: 5788 - protein, 394 aa, synthetic construct
  REGION 1..394: note = Variant of terminal deoxynucleotidyl transferase
MHHHHHHGGSGHPEGNTPEKEVPSVIARHVSPYACQRKTTLNNYNKKITDALEIMAENYKFKENLQARLEARRAASVLKSLPFEVTSMKDIQGLPCITDDVRPVIEEIIEVGESSRVKEILNDERYKAFKQFTSVFGVGVKTAEKWYRMGLRTLEEAKASKSLKLNKMQKAGFLYYEDLASGVSKEEADAVLDIVKETVRTVSPDALVTIAGGFRRGKPQGHDVDLLITIPGRPTDPELLHKVVDLLKKQGLLLYGDIRERTFVEGQLPNPKPDQLDNHQKCFAILKLYRPKVDNSAVGTSKKVDMAEVKDWKAVRVDLVVAPDEQFAYALLGWTGSGMFRSDTRRYAEEERDMLLDNHGLYDLKKGIFLSADSEEEIFGHLDLDYLEPWERNA

SEQ ID NO: 5789 - DNA, 1182 bp, synthetic construct
  misc_feature 1..1182: note = Variant of terminal deoxynucleotidyl transferase
  source 1..1182: mol_type = other DNA
atgcaccatcatcaccatcacgggggctccggccatccggaaggtaataccccggagaaggaggtgccgagcgttatcgcccgtcatgttagtccgtacgcgtgccagcgcaagaccacgctgaataactacaacaaaaagatcaccgacgcgctggaaatcatggccgagaactacaagtttaaagagaacctgcaggcgcgcctggaggcccgtcgcgccgcgagtgtcctgaaaagcctgccgttcgaggttaccagcatgaaagacatccaaggtctgccgtgcattaccgacgacgtacgtcctgtgatcgaagagatcatcgaagtaggcgagagcagccgtgttaaagaaatcctcaatgacgagcgctacaaggcctttaagcagttcaccagcgtgttcggtgtgggcgtcaagaccgcggaaaagtggtaccgtatgggcctccgtacgctggaagaagcaaaggccagtaagagtctgaagctgaacaagatgcagaaggcgggcttcctgtactacgaggatctggcgagcggtgttagtaaagaagaagccgatgccgttctggatatcgtgaaggaaacggtgcgcactgttagtccggatgcgctggtgaccatcgccggcggtttccgccgtggcaaacctcagggccacgacgttgacctgctgatcacgattccgggccgtcctacggatccggagctgctccacaaagtggttgatctgctcaagaagcaaggtctgctgctgtacggggacatccgtgagcgtacgttcgtggaggggcaactgccaaatcctaaacctgaccagctggacaaccatcagaagtgcttcgccattctcaagctgtaccgtccgaaggtggataacagtgcggttgggacgtcgaagaaagtcgacatggctgaggttaaggattggaaagcggttcgtgtggatctggtggtcgctccagatgagcagttcgcctatgcgctgctcggttggacgggcagcggcatgtttcgtcgcgatactcgtcgctacgcggaggaagagaaggacatgctgctcgacaaccatggtctctacgacctgaaaaagggcatctttctgagtgcggacagcgaagaagagattttcggtcatctggacctggattatctggagccgtgggaacgcaacgcg

SEQ ID NO: 5790 - protein, 394 aa, synthetic construct
  REGION 1..394: note = Variant of terminal deoxynucleotidyl transferase
MHHHHHHGGSGHPEGNTPEKEVPSVIARHVSPYACQRKTTLNNYNKKITDALEIMAENYKFKENLQARLEARRAASVLKSLPFEVTSMKDIQGLPCITDDVRPVIEEIIEVGESSRVKEILNDERYKAFKQFTSVFGVGVKTAEKWYRMGLRTLEEAKASKSLKLNKMQKAGFLYYEDLASGVSKEEADAVLDIVKETVRTVSPDALVTIAGGFRRGKPQGHDVDLLITIPGRPTDPELLHKVVDLLKKQGLLLYGDIRERTFVEGQLPNPKPDQLDNHQKCFAILKLYRPKVDNSAVGTSKKVDMAEVKDWKAVRVDLVVAPDEQFAYALLGWTGSGMFRRDTRRYAEEEKDMLLDNHGLYDLKKGIFLSADSEEEIFGHLDLDYLEPWERNA

SEQ ID NO: 5791 - DNA, 1182 bp, synthetic construct
  misc_feature 1..1182: note = Variant of terminal deoxynucleotidyl transferase
  source 1..1182: mol_type = other DNA
atgcaccatcatcaccatcacgggggctccggccatccggaaggtaataccccggagaaggaggtgccgagcgttatcgcccgtcatgttagtccgtacgcgtgccagcgcaagaccacgctgaataactacaacaaaaagatcaccgacgcgctggaaatcatggccgagaactacaagtttaaagagaacctgcaggcgcgcctggaggcccgtcgcgccgcgagtgtcctgaaaagcctgccgttcgaggttaccagcatgaaagacatccaaggtctgccgtgcattaccgacgacgtacgtcctgtgatcgaagagatcatcgaagtaggcgagagcagccgtgttaaagaaatcctcaatgacgagcgctacaaggcctttaagcagttcaccagcgtgttcggtgtgggcgtcaagaccgcggaaaagtggtaccgtatgggcctccgtacgctggaagaagcaaaggccagtaagagtctgaagctgaacaagatgcagaaggcgggcttcctgtactacgaggatctggcgagcggtgttagtaaagaagaagccgatgccgttctggatatcgtgaaggaaacggtgcgcactgttagtccggatgcgctggtgaccatcgccggcggtttccgccgtggcaaacctcagggccacgacgttgacctgctgatcacgattccgggccgtcctacggatccggagctgctccacaaagtggttgatctgctcaagaagcaaggtctgctgctgtacggggacatccgtgagcgtacgttcgaggaggggcaactgccaaatcctaaacctgaccagctggacaaccatcagaagtgcttcgccattctcaagctgtaccgtccgaaggtggataacagtgcggttgggacgtcgaagaaagtcgacatggctgaggttaaggattggaaagcggttcgtgtggatctggtggtcgctccagatgagcagttcgcctatgcgctgctcggttggacgggcagcggcatgtttcgtcgcgatactcgtcgctacgcggaggaagagcgcgacatgctgctcgacaaccatggtctctacgacctgaaaaagggcatctttctgagtgcggacagcgaagaagagattttcggtcatctggacctggattatctggagccgtgggaacgcaacgcg

SEQ ID NO: 5792 - protein, 394 aa, synthetic construct
  REGION 1..394: note = Variant of terminal deoxynucleotidyl transferase
MHHHHHHGGSGHPEGNTPEKEVPSVIARHVSPYACQRKTTLNNYNKKITDALEIMAENYKFKENLQARLEARRAASVLKSLPFEVTSMKDIQGLPCITDDVRPVIEEIIEVGESSRVKEILNDERYKAFKQFTSVFGVGVKTAEKWYRMGLRTLEEAKASKSLKLNKMQKAGFLYYEDLASGVSKEEADAVLDIVKETVRTVSPDALVTIAGGFRRGKPQGHDVDLLITIPGRPTDPELLHKVVDLLKKQGLLLYGDIRERTFEEGQLPNPKPDQLDNHQKCFAILKLYRPKVDNSAVGTSKKVDMAEVKDWKAVRVDLVVAPDEQFAYALLGWTGSGMFRRDTRRYAEEERDMLLDNHGLYDLKKGIFLSADSEEEIFGHLDLDYLEPWERNA

SEQ ID NO: 5793 - DNA, 1182 bp, synthetic construct
  misc_feature 1..1182: note = Variant of terminal deoxynucleotidyl transferase
  source 1..1182: mol_type = other DNA
atgcaccatcatcaccatcacgggggctccggccatccggaaggtaataccccggagaaggaggtgccgagcgttatcgcccgtcatgttagtccgtacgcgtgccagcgcaagaccacgctgaataactacaacaaaaagatcaccgacgcgctggaaatcatggccgagaactacaagtttaaagagaacctgcaggcgcgcctggaggcccgtcgcgccgcgagtgtcctgaaaagcctgccgttcgaggttaccagcatgaaagacatccaaggtctgccgtgcattaccgacgacgtacgtcctgtgatcgaagagatcatcgaagtaggcgagagcagccgtgttaaagaaatcctcaatgacgagcgctacaaggcctttaagcagttcaccagcgtgttcggtgtgggcgtcaagaccgcggaaaagtggtaccgtatgggcctccgtacgctggaagaagcaaaggccagtaagagtctgaagctgaacaagatgcagaaggcgggcttcctgtactacgaggatctggcgagcggtgttagtaaagaagaagccgatgccgttctggatatcgtgaaggaaacggtgcgcactgttagtccggatgcgctggtgaccatcgccggcggtttccgccgtggcaaacctcagggccacgacgttgacctgctgatcacgattccgggccgtcctacggatccggagctgctccacaaagtggttgatctgctcaagaagcaaggtctgctgctgtacggggacatccgtgagcgtacgttcgtggaggggcaactgccaaatcctaaacctgaccagctggacaaccatcagaagtgcttcgccattctcaagctgtaccgtccgaaggtggataacagtgcggttgggacgtcgaagaaagtcgacatggctgaggttaaggattggaaagcggttcgtgtggatctggtggtcgctccagatgagcagttcgcctatgcgctgctcggttggacgggcagcggcatgtttcgtcgcgatactcgtcgctacgcggaggaaatgcgcgacatgctgctcgacaaccatggtctctacgacctgaaaaagggcatctttctgagtgcggacagcgaagaagagattttcggtcatctggacctggattatctggagccgtgggaacgcaacgcg

SEQ ID NO: 5794 - protein, 394 aa, synthetic construct
  REGION 1..394: note = Variant of terminal deoxynucleotidyl transferase
MHHHHHHGGSGHPEGNTPEKEVPSVIARHVSPYACQRKTTLNNYNKKITDALEIMAENYKFKENLQARLEARRAASVLKSLPFEVTSMKDIQGLPCITDDVRPVIEEIIEVGESSRVKEILNDERYKAFKQFTSVFGVGVKTAEKWYRMGLRTLEEAKASKSLKLNKMQKAGFLYYEDLASGVSKEEADAVLDIVKETVRTVSPDALVTIAGGFRRGKPQGHDVDLLITIPGRPTDPELLHKVVDLLKKQGLLLYGDIRERTFVEGQLPNPKPDQLDNHQKCFAILKLYRPKVDNSAVGTSKKVDMAEVKDWKAVRVDLVVAPDEQFAYALLGWTGSGMFRRDTRRYAEEMRDMLLDNHGLYDLKKGIFLSADSEEEIFGHLDLDYLEPWERNA

SEQ ID NO: 5795 - DNA, 1182 bp, synthetic construct
  misc_feature 1..1182: note = Variant of terminal deoxynucleotidyl transferase
  source 1..1182: mol_type = other DNA
atgcaccatcatcaccatcacgggggctccggccatccggaaggtaataccccggagaaggaggtgccgagcgttatcgcccgtcatgttagtccgtacgcgtgccagcgcaagaccacgctgaataactacaacaaaaagatcaccgacgcgctggaaatcatggccgagaactacaagtttaaagagaacctgcaggcgcgcctggaggcccgtcgcgccgcgagtgtcctgaaaagcctgccgttcgaggttaccagcatgaaagacatccaaggtctgccgtgcattaccgacgacgtacgtcctgtgatcgaagagatcatcgaagtaggcgagagcagccgtgttaaagaaatcctcaatgacgagcgctacaaggcctttaagcagttcaccagcgtgttcggtgtgggcgtcaagaccgcggaaaagtggtaccgtatgggcctccgtacgctggaagaagcaaaggccagtaagagtctgaagctgaacaagatgcagaaggcgggcttcctgtactacgaggatctggcgagcggtgttagtaaagaagaagccgatgccgttctggatatcgtgaaggaaacggtgcgcactgttagtccggatgcgctggtgaccatcgccggcggtttccgccgtggcaaacctcagggccacgacgttgacctgctgatcacgattccgggccgtcctacggatccggagctgctccacaaagtggttgatctgctcaagaagcaaggtctgctgctgtacggggacatccgtgagcgtacgttcgtggaggggcaactgccaaatcctaaacctgaccagctggacaaccatcagaagtgcttcgccattctcaagctgtaccgtccgaaggtggataacagtgcggttgggacgtcgaagaaagtcgacatggctgaggttaaggattggaaagcggttcgtgtggatctggtggtcgctccagatgagcagttcgcctatgcgctgctcggttggacgggcagcggcatgtttcgttgcgatactcgtcgctacgcggaggaagagcgcgacatgctgctcgacaaccatggtctctacagtctgaaaaagggcatctttctgagtgcggacagcgaagaagagattttcggtcatctggacctggattatctggagccgtgggaacgcaacgcg

SEQ ID NO: 5796 - protein, 394 aa, synthetic construct
  REGION 1..394: note = Variant of terminal deoxynucleotidyl transferase
MHHHHHHGGSGHPEGNTPEKEVPSVIARHVSPYACQRKTTLNNYNKKITDALEIMAENYKFKENLQARLEARRAASVLKSLPFEVTSMKDIQGLPCITDDVRPVIEEIIEVGESSRVKEILNDERYKAFKQFTSVFGVGVKTAEKWYRMGLRTLEEAKASKSLKLNKMQKAGFLYYEDLASGVSKEEADAVLDIVKETVRTVSPDALVTIAGGFRRGKPQGHDVDLLITIPGRPTDPELLHKVVDLLKKQGLLLYGDIRERTFVEGQLPNPKPDQLDNHQKCFAILKLYRPKVDNSAVGTSKKVDMAEVKDWKAVRVDLVVAPDEQFAYALLGWTGSGMFRCDTRRYAEEERDMLLDNHGLYSLKKGIFLSADSEEEIFGHLDLDYLEPWERNA

SEQ ID NO: 5797 - DNA, 1182 bp, synthetic construct
  misc_feature 1..1182: note = Variant of terminal deoxynucleotidyl transferase
  source 1..1182: mol_type = other DNA
atgcaccatcatcaccatcacgggggctccggccatccggaaggtaataccccggagaaggaggtgccgagcgttatcgcccgtcatgttagtccgtacgcgtgccagcgcaagaccacgctgaataactacaacaaaaagatcaccgacgcgctggaaatcatggccgagaactacaagtttaaagagaacctgcaggcgcgcctggaggcccgtcgcgccgcgagtgtcctgaaaagcctgccgttcgaggttaccagcatgaaagacatccaaggtctgccgtgcattaccgacgacgtacgtcctgtgatcgaagagatcatcgaagtaggcgagagcagccgtgttaaagaaatcctcaatgacgagcgctacaaggcctttaagcagttcaccagcgtgttcggtgtgggcgtcaagaccgcggaaaagtggtaccgtatgggcctccgtacgctggaagaagcaaaggccagtaagagtctgaagctgaacaagatgcagaaggcgggcttcctgtactacgaggatctggcgagcggtgttagtaaagaagaagccgatgccgttctggatatcgtgaaggaaacggtgcgcactgttagtccggatgcgctggtgaccatcgccggcggtttccgccgtggcaaacctcagggccacgacgttgacctgctgatcacgattccgggccgtcctacggatccggagctgctccacaaagtggttgatctgctcaagaagcaaggtctgctgctgtacggggacatccgtgagcgtacgttcgtggaggggcaactgccaaatcctaaacctgaccagctggacaaccatcagaagtgcttcgccattctcaagctgtaccgtccgaaggtggataacagtgcggttgggacgtcgaagaaagtcgacatggctgaggttaaggattggaaagcggcgcgtgtggatctggtggtcgctccagatgagcagttcgcctatgcgctgctcggttggacgggcagcggcatgtttcgtcgcgatactcgtcgctacgcggaggaagagcgcgacatgctgctcgacaaccatggtctctacgacctgaaaaagggcatctttctgagtgcggacagcgaagaagagattttcggtcatctggacctggattatctggagccgtgggaacgcaacgcg

SEQ ID NO: 5798 - protein, 394 aa, synthetic construct
  REGION 1..394: note = Variant of terminal deoxynucleotidyl transferase
MHHHHHHGGSGHPEGNTPEKEVPSVIARHVSPYACQRKTTLNNYNKKITDALEIMAENYKFKENLQARLEARRAASVLKSLPFEVTSMKDIQGLPCITDDVRPVIEEIIEVGESSRVKEILNDERYKAFKQFTSVFGVGVKTAEKWYRMGLRTLEEAKASKSLKLNKMQKAGFLYYEDLASGVSKEEADAVLDIVKETVRTVSPDALVTIAGGFRRGKPQGHDVDLLITIPGRPTDPELLHKVVDLLKKQGLLLYGDIRERTFVEGQLPNPKPDQLDNHQKCFAILKLYRPKVDNSAVGTSKKVDMAEVKDWKAARVDLVVAPDEQFAYALLGWTGSGMFRRDTRRYAEEERDMLLDNHGLYDLKKGIFLSADSEEEIFGHLDLDYLEPWERNA

SEQ ID NO: 5799 - DNA, 1182 bp, synthetic construct
  misc_feature 1..1182: note = Variant of terminal deoxynucleotidyl transferase
  source 1..1182: mol_type = other DNA
atgcaccatcatcaccatcacgggggctccggccatccggaaggtaataccccggagaaggaggtgccgagcgttatcgcccgtcatgttagtccgtacgcgtgccagcgcaagaccacgctgaataactacaacaaaaagatcaccgacgcgctggaaatcatggccgagaactacaagtttaaagagaacctgcaggcgcgcctggaggcccgtcgcgccgcgagtgtcctgaaaagcctgccgttcgaggttaccagcatgaaagacatccaaggtctgccgtgcattaccgacgacgtacgtcctgtgatcgaagagatcatcgaagtaggcgagagcagccgtgttaaagaaatcctcaatgacgagcgctacaaggcctttaagcagttcaccagcgtgttcggtgtgggcgtcaagaccgcggaaaagtggtaccgtatgggcctccgtacgctggaagaagcaaaggccagtaagagtctgaagctgaacaagatgcagaaggcgggcttcctgtactacgaggatctggcgagcggtgttagtaaagaagaagccgatgccgttctggatatcgtgaaggaaacggtgcgcactgttagtccggatgcgctggtgaccatcgccggcggtttccgccgtggcaaacctcagggccacgacgttgacctgctgatcacgattccgggccgtcctacggatccggagctgctccacaaagtggttgatctgctcaagaagcaaggtctgctgctgtacggggacatccgtgagcgtacgttcgtggaggggcaactgccaaatcctaaacctgaccagctggacaaccatcagaagtgcttcgccattctcaagctgtaccgtccgaaggtggataacagtgcggttgggacgtcgaagaaagtcgacatggctgaggttaaggattggaaagcggttcgtgtggatctggtggtcgctccagatgagcagttcgcctatgcgctgctcggttggacgggcagcggcatgtttcgtcgcgatactcgtcgctacgcggaggaagagcgcaatatgctgctcgacaaccatggtctctacgacctgaaaaagggcatctttctgagtgcggacagcgaagaagagattttcggtcatctggacctggattatctggagccgtgggaacgcaacgcg

SEQ ID NO: 5800 - protein, 394 aa, synthetic construct
  REGION 1..394: note = Variant of terminal deoxynucleotidyl transferase
MHHHHHHGGSGHPEGNTPEKEVPSVIARHVSPYACQRKTTLNNYNKKITDALEIMAENYKFKENLQARLEARRAASVLKSLPFEVTSMKDIQGLPCITDDVRPVIEEIIEVGESSRVKEILNDERYKAFKQFTSVFGVGVKTAEKWYRMGLRTLEEAKASKSLKLNKMQKAGFLYYEDLASGVSKEEADAVLDIVKETVRTVSPDALVTIAGGFRRGKPQGHDVDLLITIPGRPTDPELLHKVVDLLKKQGLLLYGDIRERTFVEGQLPNPKPDQLDNHQKCFAILKLYRPKVDNSAVGTSKKVDMAEVKDWKAVRVDLVVAPDEQFAYALLGWTGSGMFRRDTRRYAEEERNMLLDNHGLYDLKKGIFLSADSEEEIFGHLDLDYLEPWERNA

SEQ ID NO: 5801 - DNA, 1182 bp, synthetic construct
  misc_feature 1..1182: note = Variant of terminal deoxynucleotidyl transferase
  source 1..1182: mol_type = other DNA
atgcaccatcatcaccatcacgggggctccggccatccggaaggtaataccccggagaaggaggtgccgagcgttatcgcccgtcatgttagtccgtacgcgtgccagcgcaagaccacgctgaataactacaacaaaaagatcaccgacgcgctggaaatcatggccgagaactacaagtttaaagagaacctgcaggcgcgcctggaggcccgtcgcgccgcgagtgtcctgaaaagcctgccgttcgaggttaccagcatgaaagacatccaaggtctgccgtgcattaccgacgacgtacgtcctgtgatcgaagagatcatcgaagtaggcgagagcagccgtgttaaagaaatcctcaatgacgagcgctacaaggcctttaagcagttcaccagcgtgttcggtgtgggcgtcaagaccgcggaaaagtggtaccgtatgggcctccgtacgctggaagaagcaaaggccagtaagagtctgaagctgaacaagatgcagaaggcgggcttcctgtactacgaggatctggcgagcggtgttagtaaagaagaagccgatgccgttctggatatcgtgaaggaaacggtgcgcactgttagtccggatgcgctggtgaccatcgccggcggtttccgccgtggcaaacctcagggccacgacgttgacctgctgatcacgattccgggccgtcctacggatccggagctgctccacaaagtggttgatctgctcaagaagcaaggtctgctgctgtacggggacatccgtgagcgtacgttcgtggaggggcaactgccaaatcctaaacctgaccagctggacaaccatcagaagtgcttcgccattctcaagctgtaccgtccgaaggtggataacagtgcggttgggacgtcgaagaaagtcgacatggctgaggttaaggattggaaagcggttcgtgtggatctggtggtcgctccagatgagcagttcgcctatgcgctgctcggttggacgggcagcggcatgtttcgtcgcgatattcgtcgctacgcggaggaagagcgcgacatgctgctcgacaaccatggtctctacgacctgaaaaagggcatctttctgagtgcggacagcgaagaagagattttcggtcatctggacctggattatctggagccgtgggaacgcaacgcg

SEQ ID NO: 5802 - protein, 394 aa, synthetic construct
  REGION 1..394: note = Variant of terminal deoxynucleotidyl transferase
MHHHHHHGGSGHPEGNTPEKEVPSVIARHVSPYACQRKTTLNNYNKKITDALEIMAENYKFKENLQARLEARRAASVLKSLPFEVTSMKDIQGLPCITDDVRPVIEEIIEVGESSRVKEILNDERYKAFKQFTSVFGVGVKTAEKWYRMGLRTLEEAKASKSLKLNKMQKAGFLYYEDLASGVSKEEADAVLDIVKETVRTVSPDALVTIAGGFRRGKPQGHDVDLLITIPGRPTDPELLHKVVDLLKKQGLLLYGDIRERTFVEGQLPNPKPDQLDNHQKCFAILKLYRPKVDNSAVGTSKKVDMAEVKDWKAVRVDLVVAPDEQFAYALLGWTGSGMFRRDIRRYAEEERDMLLDNHGLYDLKKGIFLSADSEEEIFGHLDLDYLEPWERNA

SEQ ID NO: 5803 - DNA, 1182 bp, synthetic construct
  misc_feature 1..1182: note = Variant of terminal deoxynucleotidyl transferase
  source 1..1182: mol_type = other DNA
atgcaccatcatcaccatcacgggggctccggccatccggaaggtaataccccggagaaggaggtgccgagcgttatcgcccgtcatgttagtccgtacgcgtgccagcgcaagaccacgctgaataactacaacaaaaagatcaccgacgcgctggaaatcatggccgagaactacaagtttaaagagaacctgcaggcgcgcctggaggcccgtcgcgccgcgagtgtcctgaaaagcctgccgttcgaggttaccagcatgaaagacatccaaggtctgccgtgcattaccgacgacgtacgtcctgtgatcgaagagatcatcgaagtaggcgagagcagccgtgttaaagaaatcctcaatgacgagcgctacaaggcctttaagcagttcaccagcgtgttcggtgtgggcgtcaagaccgcggaaaagtggtaccgtatgggcctccgtacgctggaagaagcaaaggccagtaagagtctgaagctgaacaagatgcagaaggcgggcttcctgtactacgaggatctggcgagcggtgttagtaaagaagaagccgatgccgttctggatatcgtgaaggaaacggtgcgcactgttagtccggatgcgctggtgaccatcgccggcggtttccgccgtggcaaacctcagggccacgacgttgacctgctgatcacgattccgggccgtcctacggatccggagctgctccacaaagtggttgatctgctcaagaagcaaggtctgctgctgtacggggacatccgtgagcgtacgttcgtggaggggcaactgccaaatcctaaacctgaccagctggacaaccatcagaagtgcttcgccattctcaagctgtaccgtccgaaggtggataacagtgcggttgggacgtcgaagaaagtcgacatggctgaggttaaggattggaaagcggttcgtgtggatctggtggtcgctccagatgagcagttcgcctatgcgctgctcggttggacgggcagcggcatgtttcgtcgcgatactcgtcgctacgcggaggaagagcgcgacatgctgctcgacaaccatggtctctacgacctgtcgaagggcatctttctgagtgcggacagcgaagaagagattttcggtcatctggacctggattatctggagccgtgggaacgcaacgcg

SEQ ID NO: 5804 - protein, 394 aa, synthetic construct
  REGION 1..394: note = Variant of terminal deoxynucleotidyl transferase
MHHHHHHGGSGHPEGNTPEKEVPSVIARHVSPYACQRKTTLNNYNKKITDALEIMAENYKFKENLQARLEARRAASVLKSLPFEVTSMKDIQGLPCITDDVRPVIEEIIEVGESSRVKEILNDERYKAFKQFTSVFGVGVKTAEKWYRMGLRTLEEAKASKSLKLNKMQKAGFLYYEDLASGVSKEEADAVLDIVKETVRTVSPDALVTIAGGFRRGKPQGHDVDLLITIPGRPTDPELLHKVVDLLKKQGLLLYGDIRERTFVEGQLPNPKPDQLDNHQKCFAILKLYRPKVDNSAVGTSKKVDMAEVKDWKAVRVDLVVAPDEQFAYALLGWTGSGMFRRDTRRYAEEERDMLLDNHGLYDLSKGIFLSADSEEEIFGHLDLDYLEPWERNA

SEQ ID NO: 5805 - DNA, 1182 bp, synthetic construct
  misc_feature 1..1182: note = Variant of terminal deoxynucleotidyl transferase
  source 1..1182: mol_type = other DNA
atgcaccatcatcaccatcacgggggctccggccatccggaaggtaataccccggagaaggaggtgccgagcgttatcgcccgtcatgttagtccgtacgcgtgccagcgcaagaccacgctgaataactacaacaaaaagatcaccgacgcgctggaaatcatggccgagaactacaagtttaaagagaacctgcaggcgcgcctggaggcccgtcgcgccgcgagtgtcctgaaaagcctgccgttcgaggttaccagcatgaaagacatccaaggtctgccgtgcattaccgacgacgtacgtcctgtgatcgaagagatcatcgaagtaggcgagagcagccgtgttaaagaaatcctcaatgacgagcgctacaaggcctttaagcagttcaccagcgtgttcggtgtgggcgtcaagaccgcggaaaagtggtaccgtatgggcctccgtacgctggaagaagcaaaggccagtaagagtctgaagctgaacaagatgcagaaggcgggcttcctgtactacgaggatctggcgagcggtgttagtaaagaagaagccgatgccgttctggatatcgtgaaggaaacggtgcgcactgttagtccggatgcgctggtgaccatcgccggcggtttccgccgtggcaaacctcagggccacgacgttgacctgctgatcacgattccgggccgtcctacggatccggagctgctccacaaagtggttgatctgctcaagaagcaaggtctgctgctgtacggggacatccgtgagcgtacgttcgtggaggggcaactgccaaatcctaaacctgaccagctggacaaccatcagaagtgcttcgccattctcaagctgtaccgtccgaaggtggataacagtgcggttgggacgtcgaagaaagtcgacatggctgaggttaaggattggaaagcggttcgtgtggatctggtggtcgctccagatgagcagttcgcctatgcgctgctcggttggacgggcagcggcatgtttcgtcgcgatactcgtgtgtacgcggaggaagagcgcgacatgctgctcgacaaccatggtctctacgacctgaaaaagggcatctttctgagtgcggacagcgaagaagagattttcggtcatctggacctggattatctggagccgtgggaacgcaacgcg

SEQ ID NO: 5806 - protein, 394 aa, synthetic construct
  REGION 1..394: note = Variant of terminal deoxynucleotidyl transferase
MHHHHHHGGSGHPEGNTPEKEVPSVIARHVSPYACQRKTTLNNYNKKITDALEIMAENYKFKENLQARLEARRAASVLKSLPFEVTSMKDIQGLPCITDDVRPVIEEIIEVGESSRVKEILNDERYKAFKQFTSVFGVGVKTAEKWYRMGLRTLEEAKASKSLKLNKMQKAGFLYYEDLASGVSKEEADAVLDIVKETVRTVSPDALVTIAGGFRRGKPQGHDVDLLITIPGRPTDPELLHKVVDLLKKQGLLLYGDIRERTFVEGQLPNPKPDQLDNHQKCFAILKLYRPKVDNSAVGTSKKVDMAEVKDWKAVRVDLVVAPDEQFAYALLGWTGSGMFRRDTRVYAEEERDMLLDNHGLYDLKKGIFLSADSEEEIFGHLDLDYLEPWERNA

SEQ ID NO: 5807 - DNA, 1182 bp, synthetic construct
  misc_feature 1..1182: note = Variant of terminal deoxynucleotidyl transferase
  source 1..1182: mol_type = other DNA
atgcaccatcatcaccatcacgggggctccggccatccggaaggtaataccccggagaaggaggtgccgagcgttatcgcccgtcatgttagtccgtacgcgtgccagcgcaagaccacgctgaataactacaacaaaaagatcaccgacgcgctggaaatcatggccgagaactacaagtttaaagagaacctgcaggcgcgcctggaggcccgtcgcgccgcgagtgtcctgaaaagcctgccgttcgaggttaccagcatgaaagacatccaaggtctgccgtgcattaccgacgacgtacgtcctgtgatcgaagagatcatcgaagtaggcgagagcagccgtgttaaagaaatcctcaatgacgagcgctacaaggcctttaagcagttcaccagcgtgttcggtgtgggcgtcaagaccgcggaaaagtggtaccgtatgggcctccgtacgctggaagaagcaaaggccagtaagagtctgaagctgaacaagatgcagaaggcgggcttcctgtactacgaggatctggcgagcggtgttagtaaagaagaagccgatgccgttctggatatcgtgaaggaaacggtgcgcactgttagtccggatgcgctggtgaccatcgccggcggtttccgccgtggcaaacctcagggccacgacgttgacctgctgatcacgattccgggccgtcctacggatccggagctgctccacaaagtggttgatctgctcaagaagcaaggtctgctgctgtacggggacatccgtgagcgtacgttcgtggaggggcaactgccaaatcctaaacctgacgagctggacaaccatcagaagtgcttcgccattctcaagctgtaccgtccgaaggtggataacagtgcggttgggacgtcgaagaaagtcgacatggctgaggttaaggattggaaagcggttcgtgtggatctggtggtcgctccagatgagcagttcgcctatgcgctgctcggttggacgggcagcggcatgtttcgtcgcgatactcgtcgctacgcggaggaagagcgcgacatgctgctcgacaaccatggtctctacgacctgaaaaagggcatctttctgagtgcggacagcgaagaagagattttcggtcatctggacctggattatctggagccgtgggaacgcaacgcg

SEQ ID NO: 5808 - protein, 394 aa, synthetic construct
  REGION 1..394: note = Variant of terminal deoxynucleotidyl transferase
MHHHHHHGGSGHPEGNTPEKEVPSVIARHVSPYACQRKTTLNNYNKKITDALEIMAENYKFKENLQARLEARRAASVLKSLPFEVTSMKDIQGLPCITDDVRPVIEEIIEVGESSRVKEILNDERYKAFKQFTSVFGVGVKTAEKWYRMGLRTLEEAKASKSLKLNKMQKAGFLYYEDLASGVSKEEADAVLDIVKETVRTVSPDALVTIAGGFRRGKPQGHDVDLLITIPGRPTDPELLHKVVDLLKKQGLLLYGDIRERTFVEGQLPNPKPDELDNHQKCFAILKLYRPKVDNSAVGTSKKVDMAEVKDWKAVRVDLVVAPDEQFAYALLGWTGSGMFRRDTRRYAEEERDMLLDNHGLYDLKKGIFLSADSEEEIFGHLDLDYLEPWERNA

SEQ ID NO: 5809 - DNA, 1182 bp, synthetic construct
  misc_feature 1..1182: note = Variant of terminal deoxynucleotidyl transferase
  source 1..1182: mol_type = other DNA
atgcaccatcatcaccatcacgggggctccggccatccggaaggtaataccccggagaaggaggtgccgagcgttatcgcccgtcatgttagtccgtacgcgtgccagcgcaagaccacgctgaataactacaacaaaaagatcaccgacgcgctggaaatcatggccgagaactacaagtttaaagagaacctgcaggcgcgcctggaggcccgtcgcgccgcgagtgtcctgaaaagcctgccgttcgaggttaccagcatgaaagacatccaaggtctgccgtgcattaccgacgacgtacgtcctgtgatcgaagagatcatcgaagtaggcgagagcagccgtgttaaagaaatcctcaatgacgagcgctacaaggcctttaagcagttcaccagcgtgttcggtgtgggcgtcaagaccgcggaaaagtggtaccgtatgggcctccgtacgctggaagaagcaaaggccagtaagagtctgaagctgaacaagatgcagaaggcgggcttcctgtactacgaggatctggcgagcggtgttagtaaagaagaagccgatgccgttctggatatcgtgaaggaaacggtgcgcactgttagtccggatgcgctggtgaccatcgccggcggtttccgccgtggcaaacctcagggccacgacgttgacctgctgatcacgattccgggccgtcctacggatccggagctgctccacaaagtggttgatctgctcaagaagcaaggtctgctgctgtacggggacatccgtgagcgtacgttcgtggaggggcaactgccaaatcctaaacctgaccagctggacaaccatcagaagtgcttcgccattctcaagctgtaccgtccgaaggtggataacagtgcggttgggacgtcgaagaaagtcgacatggctgaggttaaggattggaaagcggttcgtgtggatctggtggtcgctccagatgagcagttcgcctatgcgctgctcggttggacgggcagcggcatgtttcgtaatgatactcgtcgctacgcggaggaagagcgcgacatgctgctcgacaaccatggtctctacgacctgaaaaagggcatctttctgagtgcggacagcgaagaagagattttcggtcatctggacctggattatctggagccgtgggaacgcaacgcg

SEQ ID NO: 5810 - protein, 394 aa, synthetic construct
  REGION 1..394: note = Variant of terminal deoxynucleotidyl transferase
MHHHHHHGGSGHPEGNTPEKEVPSVIARHVSPYACQRKTTLNNYNKKITDALEIMAENYKFKENLQARLEARRAASVLKSLPFEVTSMKDIQGLPCITDDVRPVIEEIIEVGESSRVKEILNDERYKAFKQFTSVFGVGVKTAEKWYRMGLRTLEEAKASKSLKLNKMQKAGFLYYEDLASGVSKEEADAVLDIVKETVRTVSPDALVTIAGGFRRGKPQGHDVDLLITIPGRPTDPELLHKVVDLLKKQGLLLYGDIRERTFVEGQLPNPKPDQLDNHQKCFAILKLYRPKVDNSAVGTSKKVDMAEVKDWKAVRVDLVVAPDEQFAYALLGWTGSGMFRNDTRRYAEEERDMLLDNHGLYDLKKGIFLSADSEEEIFGHLDLDYLEPWERNA

SEQ ID NO: 5811 - DNA, 1182 bp, synthetic construct
  misc_feature 1..1182: note = Variant of terminal deoxynucleotidyl transferase
  source 1..1182: mol_type = other DNA
atgcaccatcatcaccatcacgggggctccggccatccggaaggtaataccccggagaaggaggtgccgagcgttatcgcccgtcatgttagtccgtacgcgtgccagcgcaagaccacgctgaataactacaacaaaaagatcaccgacgcgctggaaatcatggccgagaactacaagtttaaagagaacctgcaggcgcgcctggaggcccgtcgcgccgcgagtgtcctgaaaagcctgccgttcgaggttaccagcatgaaagacatccaaggtctgccgtgcattaccgacgacgtacgtcctgtgatcgaagagatcatcgaagtaggcgagagcagccgtgttaaagaaatcctcaatgacgagcgctacaaggcctttaagcagttcaccagcgtgttcggtgtgggcgtcaagaccgcggaaaagtggtaccgtatgggcctccgtacgctggaagaagcaaaggccagtaagagtctgaagctgaacaagatgcagaaggcgggcttcctgtactacgaggatctggcgagcggtgttagtaaagaagaagccgatgccgttctggatatcgtgaaggaaacggtgcgcactgttagtccggatgcgctggtgaccatcgccggcggtttccgccgtggcaaacctcagggccacgacgttgacctgctgatcacgattccgggccgtcctacggatccggagctgctccacaaagtggttgatctgctcaagaagcaaggtctgctgctgtacggggacatccgtgagcgtacgttccttgaggggcaactgccaaatcctaaacctgaccagctggacaaccatcagaagtgcttcgccattctcaagctgtaccgtccgaaggtggataacagtgcggttgggacgtcgaagaaagtcgacatggctgaggttaaggattggaaagcggttcgtgtggatctggtggtcgctccagatgagcagttcgcctatgcgctgctcggttggacgggcagcggcatgtttcgtcgcgatactcgtcgctacgcggaggaagagcgcgacatgctgctcgacaaccatggtctctacgacctgaaaaagggcatctttctgagtgcggacagcgaagaagagattttcggtcatctggacctggattatctggagccgtgggaacgcaacgcg

SEQ ID NO: 5812 - protein, 394 aa, synthetic construct
  REGION 1..394: note = Variant of terminal deoxynucleotidyl transferase
MHHHHHHGGSGHPEGNTPEKEVPSVIARHVSPYACQRKTTLNNYNKKITDALEIMAENYKFKENLQARLEARRAASVLKSLPFEVTSMKDIQGLPCITDDVRPVIEEIIEVGESSRVKEILNDERYKAFKQFTSVFGVGVKTAEKWYRMGLRTLEEAKASKSLKLNKMQKAGFLYYEDLASGVSKEEADAVLDIVKETVRTVSPDALVTIAGGFRRGKPQGHDVDLLITIPGRPTDPELLHKVVDLLKKQGLLLYGDIRERTFLEGQLPNPKPDQLDNHQKCFAILKLYRPKVDNSAVGTSKKVDMAEVKDWKAVRVDLVVAPDEQFAYALLGWTGSGMFRRDTRRYAEEERDMLLDNHGLYDLKKGIFLSADSEEEIFGHLDLDYLEPWERNA

SEQ ID NO: 5813 - DNA, 1182 bp, synthetic construct
  misc_feature 1..1182: note = Variant of terminal deoxynucleotidyl transferase
  source 1..1182: mol_type = other DNA
atgcaccatcatcaccatcacgggggctccggccatccggaaggtaataccccggagaaggaggtgccgagcgttatcgcccgtcatgttagtccgtacgcgtgccagcgcaagaccacgctgaataactacaacaaaaagatcaccgacgcgctggaaatcatggccgagaactacaagtttaaagagaacctgcaggcgcgcctggaggcccgtcgcgccgcgagtgtcctgaaaagcctgccgttcgaggttaccagcatgaaagacatccaaggtctgccgtgcattaccgacgacgtacgtcctgtgatcgaagagatcatcgaagtaggcgagagcagccgtgttaaagaaatcctcaatgacgagcgctacaaggcctttaagcagttcaccagcgtgttcggtgtgggcgtcaagaccgcggaaaagtggtaccgtatgggcctccgtacgctggaagaagcaaaggccagtaagagtctgaagctgaacaagatgcagaaggcgggcttcctgtactacgaggatctggcgagcggtgttagtaaagaagaagccgatgccgttctggatatcgtgaaggaaacggtgcgcactgttagtccggatgcgctggtgaccatcgccggcggtttccgccgtggcaaacctcagggccacgacgttgacctgctgatcacgattccgggccgtcctacggatccggagctgctccacaaagtggttgatctgctcaagaagcaaggtctgctgctgtacggggacatccgtgagcgtacgttcgtggaggggcaactgccaaatcctaaacctgaccagctggacaaccatcagaagtgcttcgccattctcaagctgtaccgtccgaaggtggataacagtgcggttgggacgtcgaagaaagtcgacatggctgaggttaaggattggaaagcggttcgtgtggatctggtggtcgctccagatgagcagttccattatgcgctgctcggttggacgggcagcggcatgtttcgtcgcgatactcgtcgctacgcggaggaagagcgcgacatgctgctcgacaaccatggtctctacgacctgaaaaagggcatctttctgagtgcggacagcgaagaagagattttcggtcatctggacctggattatctggagccgtgggaacgcaacgcg

SEQ ID NO: 5814 - protein, 394 aa, synthetic construct
  REGION 1..394: note = Variant of terminal deoxynucleotidyl transferase
MHHHHHHGGSGHPEGNTPEKEVPSVIARHVSPYACQRKTTLNNYNKKITDALEIMAENYKFKENLQARLEARRAASVLKSLPFEVTSMKDIQGLPCITDDVRPVIEEIIEVGESSRVKEILNDERYKAFKQFTSVFGVGVKTAEKWYRMGLRTLEEAKASKSLKLNKMQKAGFLYYEDLASGVSKEEADAVLDIVKETVRTVSPDALVTIAGGFRRGKPQGHDVDLLITIPGRPTDPELLHKVVDLLKKQGLLLYGDIRERTFVEGQLPNPKPDQLDNHQKCFAILKLYRPKVDNSAVGTSKKVDMAEVKDWKAVRVDLVVAPDEQFHYALLGWTGSGMFRRDTRRYAEEERDMLLDNHGLYDLKKGIFLSADSEEEIFGHLDLDYLEPWERNA

SEQ ID NO: 5815 - DNA, 1182 bp, synthetic construct
  misc_feature 1..1182: note = Variant of terminal deoxynucleotidyl transferase
  source 1..1182: mol_type = other DNA
atgcaccatcatcaccatcacgggggctccggccatccggaaggtaataccccggagaaggaggtgccgagcgttatcgcccgtcatgttagtccgtacgcgtgccagcgcaagaccacgctgaataactacaacaaaaagatcaccgacgcgctggaaatcatggccgagaactacaagtttaaagagaacctgcaggcgcgcctggaggcccgtcgcgccgcgagtgtcctgaaaagcctgccgttcgaggttaccagcatgaaagacatccaaggtctgccgtgcattaccgacgacgtacgtcctgtgatcgaagagatcatcgaagtaggcgagagcagccgtgttaaagaaatcctcaatgacgagcgctacaaggcctttaagcagttcaccagcgtgttcggtgtgggcgtcaagaccgcggaaaagtggtaccgtatgggcctccgtacgctggaagaagcaaaggccagtaagagtctgaagctgaacaagatgcagaaggcgggcttcctgtactacgaggatctggcgagcggtgttagtaaagaagaagccgatgccgttctggatatcgtgaaggaaacggtgcgcactgttagtccggatgcgctggtgaccatcgccggcggtttccgccgtggcaaacctcagggccacgacgttgacctgctgatcacgattccgggccgtcctacggatccggagctgctccacaaagtggttgatctgctcaagaagcaaggtctgctgctgtacggggacatccgtgagcgtacgttcgtggaggggcaactgccaaatcctaaacctgaccagctggacaaccatcagaagtgcttcgccattctcaagctgtaccgtccgaaggtggataacagtgcggttgggacgtcgaagaaagtcgacatggctgaggttaaggattggaaagcggttcgtgtggatctggtggtcgctccagatgagcagttcgcctatgcgctgctcggttggacgggcagcggcatgtttcgtcgcgatactcgtcgctacgcggaggaagagcgcgacatgctgctcgacaaccatggtctctacgacctgaaaaatggcatctttctgagtgcggacagcgaagaagagattttcggtcatctggacctggattatctggagccgtgggaacgcaacgcg

SEQ ID NO: 5816 - protein, 394 aa, synthetic construct
  REGION 1..394: note = Variant of terminal deoxynucleotidyl transferase
MHHHHHHGGSGHPEGNTPEKEVPSVIARHVSPYACQRKTTLNNYNKKITDALEIMAENYKFKENLQARLEARRAASVLKSLPFEVTSMKDIQGLPCITDDVRPVIEEIIEVGESSRVKEILNDERYKAFKQFTSVFGVGVKTAEKWYRMGLRTLEEAKASKSLKLNKMQKAGFLYYEDLASGVSKEEADAVLDIVKETVRTVSPDALVTIAGGFRRGKPQGHDVDLLITIPGRPTDPELLHKVVDLLKKQGLLLYGDIRERTFVEGQLPNPKPDQLDNHQKCFAILKLYRPKVDNSAVGTSKKVDMAEVKDWKAVRVDLVVAPDEQFAYALLGWTGSGMFRRDTRRYAEEERDMLLDNHGLYDLKNGIFLSADSEEEIFGHLDLDYLEPWERNA

SEQ ID NO: 5817 - DNA, 1182 bp, synthetic construct
  misc_feature 1..1182: note = Variant of terminal deoxynucleotidyl transferase
  source 1..1182: mol_type = other DNA
atgcaccatcatcaccatcacgggggctccggccatccggaaggtaataccccggagaaggaggtgccgagcgttatcgcccgtcatgttagtccgtacgcgtgccagcgcaagaccacgctgaataactacaacaaaaagatcaccgacgcgctggaaatcatggccgagaactacaagtttaaagagaacctgcaggcgcgcctggaggcccgtcgcgccgcgagtgtcctgaaaagcctgccgttcgaggttaccagcatgaaagacatccaaggtctgccgtgcattaccgacgacgtacgtcctgtgatcgaagagatcatcgaagtaggcgagagcagccgtgttaaagaaatcctcaatgacgagcgctacaaggcctttaagcagttcaccagcgtgttcggtgtgggcgtcaagaccgcggaaaagtggtaccgtatgggcctccgtacgctggaagaagcaaaggccagtaagagtctgaagctgaacaagatgcagaaggcgggcttcctgtactacgaggatctggcgagcggtgttagtaaagaagaagccgatgccgttctggatatcgtgaaggaaacggtgcgcactgttagtccggatgcgctggtgaccatcgccggcggtttccgccgtggcaaacctcagggccacgacgttgacctgctgatcacgattccgggccgtcctacggatccggagctgctccacaaagtggttgatctgctcaagaagcaaggtctgctgctgtacggggacatccgtgagcgtacgttcgtggaggggcaactgccaaatcctaaacctgaccagctggacaaccatcagaagtgcttcgccattctcaagctgtaccgtccgaaggtggataacagtgcggttgggacgtcgaagaaagtcgacatggctgaggttaaggattggaaagcggttcgtgtggatctggtggtcgctccagatgagcagttcgcctatgcgctgctcggttggacgggcagcggcatgtttcgtcgcgatactcgtcgctacgcggaggaagagcgcgacatgctgctcgacaaccatggtatgtacgacctgaaaaagggcatctttctgagtgcggacagcgaagaagagattttcggtcatctggacctggattatctggagccgtgggaacgcaacgcg

SEQ ID NO: 5818 - protein, 394 aa, synthetic construct
  REGION 1..394: note = Variant of terminal deoxynucleotidyl transferase
MHHHHHHGGSGHPEGNTPEKEVPSVIARHVSPYACQRKTTLNNYNKKITDALEIMAENYKFKENLQARLEARRAASVLKSLPFEVTSMKDIQGLPCITDDVRPVIEEIIEVGESSRVKEILNDERYKAFKQFTSVFGVGVKTAEKWYRMGLRTLEEAKASKSLKLNKMQKAGFLYYEDLASGVSKEEADAVLDIVKETVRTVSPDALVTIAGGFRRGKPQGHDVDLLITIPGRPTDPELLHKVVDLLKKQGLLLYGDIRERTFVEGQLPNPKPDQLDNHQKCFAILKLYRPKVDNSAVGTSKKVDMAEVKDWKAVRVDLVVAPDEQFAYALLGWTGSGMFRRDTRRYAEEERDMLLDNHGMYDLKKGIFLSADSEEEIFGHLDLDYLEPWERNA

SEQ ID NO: 5819 - DNA, 1182 bp, synthetic construct
  misc_feature 1..1182: note = Variant of terminal deoxynucleotidyl transferase
  source 1..1182: mol_type = other DNA
atgcaccatcatcaccatcacgggggctccggccatccggaaggtaataccccggagaaggaggtgccgagcgttatcgcccgtcatgttagtccgtacgcgtgccagcgcaagaccacgctgaataactacaacaaaaagatcaccgacgcgctggaaatcatggccgagaactacaagtttaaagagaacctgcaggcgcgcctggaggcccgtcgcgccgcgagtgtcctgaaaagcctgccgttcgaggttaccagcatgaaagacatccaaggtctgccgtgcattaccgacgacgtacgtcctgtgatcgaagagatcatcgaagtaggcgagagcagccgtgttaaagaaatcctcaatgacgagcgctacaaggcctttaagcagttcaccagcgtgttcggtgtgggcgtcaagaccgcggaaaagtggtaccgtatgggcctccgtacgctggaagaagcaaaggccagtaagagtctgaagctgaacaagatgcagaaggcgggcttcctgtactacgaggatctggcgagcggtgttagtaaagaagaagccgatgccgttctggatatcgtgaaggaaacggtgcgcactgttagtccggatgcgctggtgaccatcgccggcggtttccgccgtcttaaacctcagggccacgacgttgacctgctgatcacgattccgggccgtcctacggatccggagctgctccacaaagtggttgatctgctcaagaagcaaggtctgctgctgtacggggacatccgtgagcgtacgttcgtggaggggcaactgccaaatcctaaacctgaccagctggacaaccatcagaagtgcttcgccattctcaagctgtaccgtccgaaggtggataacagtgcggttgggacgtcgaagaaagtcgacatggctgaggttaaggattggaaagcggttcgtgtggatctggtggtcgctccagatgagcagttcgcctatgcgctgctcggttggacgggcagcggcatgtttcgtcgcgatactcgtcgctacgcggaggaagagcgcgacatgctgctcgacaaccatggtctctacgacctgaaaaagggcatctttctgagtgcggacagcgaagaagagattttcggtcatctggacctggattatctggagccgtgggaacgcaacgcg

SEQ ID NO: 5820 - protein, 394 aa, synthetic construct
  REGION 1..394: note = Variant of terminal deoxynucleotidyl transferase
MHHHHHHGGSGHPEGNTPEKEVPSVIARHVSPYACQRKTTLNNYNKKITDALEIMAENYKFKENLQARLEARRAASVLKSLPFEVTSMKDIQGLPCITDDVRPVIEEIIEVGESSRVKEILNDERYKAFKQFTSVFGVGVKTAEKWYRMGLRTLEEAKASKSLKLNKMQKAGFLYYEDLASGVSKEEADAVLDIVKETVRTVSPDALVTIAGGFRRLKPQGHDVDLLITIPGRPTDPELLHKVVDLLKKQGLLLYGDIRERTFVEGQLPNPKPDQLDNHQKCFAILKLYRPKVDNSAVGTSKKVDMAEVKDWKAVRVDLVVAPDEQFAYALLGWTGSGMFRRDTRRYAEEERDMLLDNHGLYDLKKGIFLSADSEEEIFGHLDLDYLEPWERNA

SEQ ID NO: 5821 - DNA, 1182 bp, synthetic construct
  misc_feature 1..1182: note = Variant of terminal deoxynucleotidyl transferase
  source 1..1182: mol_type = other DNA
atgcaccatcatcaccatcacgggggctccggccatccggaaggtaataccccggagaaggaggtgccgagcgttatcgcccgtcatgttagtccgtacgcgtgccagcgcaagaccacgctgaataactacaacaaaaagatcaccgacgcgctggaaatcatggccgagaactacaagtttaaagagaacctgcaggcgcgcctggaggcccgtcgcgccgcgagtgtcctgaaaagcctgccgttcgaggttaccagcatgaaagacatccaaggtctgccgtgcattaccgacgacgtacgtcctgtgatcgaagagatcatcgaagtaggcgagagcagccgtgttaaagaaatcctcaatgacgagcgctacaaggcctttaagcagttcaccagcgtgttcggtgtgggcgtcaagaccgcggaaaagtggtaccgtatgggcctccgtacgctggaagaagcaaaggccagtaagagtctgaagctgaacaagatgcagaaggcgggcttcctgtactacgaggatctggcgagcggtgttagtaaagaagaagccgatgccgttctggatatcgtgaaggaaacggtgcgcactgttagtccggatgcgctggtgaccatcgccggcggtttccgccgtggcaaacctcagggccacgacgttgacctgctgatcacgattccgggccgtcctacggatccggagctgctccacaaagtggttgatctgctcaagaagcaaggtctgctgctgtacggggacatccgtgagcgtacgttcgtggaggggcaactgccaaatcctaaaagtgaccagctggacaaccatcagaagtgcttcgccattctcaagctgtaccgtccgaaggtggataacagtgcggttgggacgtcgaagaaagtcgacatggctgaggttaaggattggaaagcggttcgtgtggatctggtggtcgctccagatgagcagttcgcctatgcgctgctcggttggacgggcagcggcatgtttcgtcgcgatactcgtcgctacgcggaggaagagcgcgacatgctgctcgacaaccatggtctctacgacctgaaaaagggcatctttctgagtgcggacagcgaagaagagattttcggtcatctggacctggattatctggagccgtgggaacgcaacgcg

SEQ ID NO: 5822 - protein, 394 aa, synthetic construct
  REGION 1..394: note = Variant of terminal deoxynucleotidyl transferase
MHHHHHHGGSGHPEGNTPEKEVPSVIARHVSPYACQRKTTLNNYNKKITDALEIMAENYKFKENLQARLEARRAASVLKSLPFEVTSMKDIQGLPCITDDVRPVIEEIIEVGESSRVKEILNDERYKAFKQFTSVFGVGVKTAEKWYRMGLRTLEEAKASKSLKLNKMQKAGFLYYEDLASGVSKEEADAVLDIVKETVRTVSPDALVTIAGGFRRGKPQGHDVDLLITIPGRPTDPELLHKVVDLLKKQGLLLYGDIRERTFVEGQLPNPKSDQLDNHQKCFAILKLYRPKVDNSAVGTSKKVDMAEVKDWKAVRVDLVVAPDEQFAYALLGWTGSGMFRRDTRRYAEEERDMLLDNHGLYDLKKGIFLSADSEEEIFGHLDLDYLEPWERNA

SEQ ID NO: 5823 - DNA, 1182 bp, synthetic construct
  misc_feature 1..1182: note = Variant of terminal deoxynucleotidyl transferase
  source 1..1182: mol_type = other DNA
atgcaccatcatcaccatcacgggggctccggccatccggaaggtaataccccggagaaggaggtgccgagcgttatcgcccgtcatgttagtccgtacgcgtgccagcgcaagaccacgctgaataactacaacaaaaagatcaccgacgcgctggaaatcatggccgagaactacaagtttaaagagaacctgcaggcgcgcctggaggcccgtcgcgccgcgagtgtcctgaaaagcctgccgttcgaggttaccagcatgaaagacatccaaggtctgccgtgcattaccgacgacgtacgtcctgtgatcgaagagatcatcgaagtaggcgagagcagccgtgttaaagaaatcctcaatgacgagcgctacaaggcctttaagcagttcaccagcgtgttcggtgtgggcgtcaagaccgcggaaaagtggtaccgtatgggcctccgtacgctggaagaagcaaaggccagtaagagtctgaagctgaacaagatgcagaaggcgggcttcctgtactacgaggatctggcgagcggtgttagtaaagaagaagccgatgccgttctggatatcgtgaaggaaacggtgcgcactgttagtccggatgcgctggtgaccatcgccggcggtttccgccgtggcaaacctcagggccacgacgttgacctgctgatcacgattccgggccgtcctacggatccggagctgctccacaaagtggttgatctgctcaagaagcaaggtctgctgctgtacggggacatccgtgagcgtacgttcgtggaggggcaactgccaaatcctaaacctgaccagctggacaaccatcagaagtgcttcgccattctcaagctgtaccgtccgaaggtggataacagtgcggttgggacgtcgaagaaagtcgacatggctgaggttaaggattggaaagcggttcgtgtggatctggtggtcgctccagatgagcagttcgcctatgcgctgctcggttggacgggcagcggcatgtttcgtcgcgatactcgtcgctacgcggaggaagagcgcgacatgctgctcgacaaccatggtctctacgacctgaaaaagggcatctttctgagtgcggacagcgaactggagattttcggtcatctggacctggattatctggagccgtgggaacgcaacgcg

SEQ ID NO: 5824 - protein, 394 aa, synthetic construct
  REGION 1..394: note = Variant of terminal deoxynucleotidyl transferase
MHHHHHHGGSGHPEGNTPEKEVPSVIARHVSPYACQRKTTLNNYNKKITDALEIMAENYKFKENLQARLEARRAASVLKSLPFEVTSMKDIQGLPCITDDVRPVIEEIIEVGESSRVKEILNDERYKAFKQFTSVFGVGVKTAEKWYRMGLRTLEEAKASKSLKLNKMQKAGFLYYEDLASGVSKEEADAVLDIVKETVRTVSPDALVTIAGGFRRGKPQGHDVDLLITIPGRPTDPELLHKVVDLLKKQGLLLYGDIRERTFVEGQLPNPKPDQLDNHQKCFAILKLYRPKVDNSAVGTSKKVDMAEVKDWKAVRVDLVVAPDEQFAYALLGWTGSGMFRRDTRRYAEEERDMLLDNHGLYDLKKGIFLSADSELEIFGHLDLDYLEPWERNA

SEQ ID NO: 5825 - DNA, 1182 bp, synthetic construct
  misc_feature 1..1182: note = Variant of terminal deoxynucleotidyl transferase
  source 1..1182: mol_type = other DNA
atgcaccatcatcaccatcacgggggctccggccatccggaaggtaataccccggagaaggaggtgccgagcgttatcgcccgtcatgttagtccgtacgcgtgccagcgcaagaccacgctgaataactacaacaaaaagatcaccgacgcgctggaaatcatggccgagaactacaagtttaaagagaacctgcaggcgcgcctggaggcccgtcgcgccgcgagtgtcctgaaaagcctgccgttcgaggttaccagcatgaaagacatccaaggtctgccgtgcattaccgacgacgtacgtcctgtgatcgaagagatcatcgaagtaggcgagagcagccgtgttaaagaaatcctcaatgacgagcgctacaaggcctttaagcagttcaccagcgtgttcggtgtgggcgtcaagaccgcggaaaagtggtaccgtatgggcctccgtacgctggaagaagcaaaggccagtaagagtctgaagctgaacaagatgcagaaggcgggcttcctgtactacgaggatctggcgagcggtgttagtaaagaagaagccgatgccgttctggatatcgtgaaggaaacggtgcgcactgttagtccggatgcgctggtgaccatcgccggcggtttccgccgtggcaaacctcagggccacgacgttgacctgctgatcacgattccgggccgtcctacggatccggagctgctccacaaagtggttgatctgctcaagaagcaaggtctgctgctgtacggggacatccgtgagcgtacgttcgtggaggggcaactgccaaatcctaaacctgaccagctggacaaccatcagaagtgcttcgccattctcaagctgtaccgtccgaaggtggataacagtgcggttgggacgtcgaagaaagtcgacatggctgaggttaaggattggaaagcggttcgtgtggatctggtggtcgctccagatgagcagttcgcctatgcgctgctcggttggacgggcagcggcatgtttcgtcgcgatactcgtcgctacgcggaggaagagcaggacatgctgctcgacaaccatggtctctacgacctgaaaaagggcatctttctgagtgcggacagcgaagaagagattttcggtcatctggacctggattatctggagccgtgggaacgcaacgcg

SEQ ID NO: 5826 - protein, 394 aa, synthetic construct
  REGION 1..394: note = Variant of terminal deoxynucleotidyl transferase
MHHHHHHGGSGHPEGNTPEKEVPSVIARHVSPYACQRKTTLNNYNKKITDALEIMAENYKFKENLQARLEARRAASVLKSLPFEVTSMKDIQGLPCITDDVRPVIEEIIEVGESSRVKEILNDERYKAFKQFTSVFGVGVKTAEKWYRMGLRTLEEAKASKSLKLNKMQKAGFLYYEDLASGVSKEEADAVLDIVKETVRTVSPDALVTIAGGFRRGKPQGHDVDLLITIPGRPTDPELLHKVVDLLKKQGLLLYGDIRERTFVEGQLPNPKPDQLDNHQKCFAILKLYRPKVDNSAVGTSKKVDMAEVKDWKAVRVDLVVAPDEQFAYALLGWTGSGMFRRDTRRYAEEEQDMLLDNHGLYDLKKGIFLSADSEEEIFGHLDLDYLEPWERNA

SEQ ID NO: 5827 - DNA, 1182 bp, synthetic construct
  misc_feature 1..1182: note = Variant of terminal deoxynucleotidyl transferase
  source 1..1182: mol_type = other DNA
atgcaccatcatcaccatcacgggggctccggccatccggaaggtaataccccggagaaggaggtgccgagcgttatcgcccgtcatgttagtccgtacgcgtgccagcgcaagaccacgctgaataactacaacaaaaagatcaccgacgcgctggaaatcatggccgagaactacaagtttaaagagaacctgcaggcgcgcctggaggcccgtcgcgccgcgagtgtcctgaaaagcctgccgttcgaggttaccagcatgaaagacatccaaggtctgccgtgcattaccgacgacgtacgtcctgtgatcgaagagatcatcgaagtaggcgagagcagccgtgttaaagaaatcctcaatgacgagcgctacaaggcctttaagcagttcaccagcgtgttcggtgtgggcgtcaagaccgcggaaaagtggtaccgtatgggcctccgtacgctggaagaagcaaaggccagtaagagtctgaagctgaacaagatgcagaaggcgggcttcctgtactacgaggatctggcgagcggtgttagtaaagaagaagccgatgccgttctggatatcgtgaaggaaacggtgcgcactgttagtccggatgcgctggtgaccatcgccggcggtttccgccgtggcaaacctcagggccacgacgttgacctgctgatcacgattccgggccgtcctacggatccggagctgctccacaaagtggttgatctgctcaagaagcaaggtctgctgctgtacggggacatccgtgagcgtacgttcgtggaggggcaactgccaaatcctaaacctgaccagctggacaaccatcagaagtgcttcgccattctcaagctgtaccgtccgaaggtggataacagtgcggttgggacgtcgaagaaagtcgacatggctgaggttaaggattggaaagcggttcgtgtggatctggtggtcgctccagatgagcagttcgcctatgcgctgctcggttggacgggcagcggcatgtttcgtcgcgatactcgtcgctacgcggaggaagagcgcgacatgctgctcgacaaccatggtctctaccatctgaaaaagggcatctttctgagtgcggacagcgaagaagagattttcggtcatctggacctggattatctggagccgtgggaacgcaacgcg

SEQ ID NO: 5828 - protein, 394 aa, synthetic construct
  REGION 1..394: note = Variant of terminal deoxynucleotidyl transferase
MHHHHHHGGSGHPEGNTPEKEVPSVIARHVSPYACQRKTTLNNYNKKITDALEIMAENYKFKENLQARLEARRAASVLKSLPFEVTSMKDIQGLPCITDDVRPVIEEIIEVGESSRVKEILNDERYKAFKQFTSVFGVGVKTAEKWYRMGLRTLEEAKASKSLKLNKMQKAGFLYYEDLASGVSKEEADAVLDIVKETVRTVSPDALVTIAGGFRRGKPQGHDVDLLITIPGRPTDPELLHKVVDLLKKQGLLLYGDIRERTFVEGQLPNPKPDQLDNHQKCFAILKLYRPKVDNSAVGTSKKVDMAEVKDWKAVRVDLVVAPDEQFAYALLGWTGSGMFRRDTRRYAEEERDMLLDNHGLYHLKKGIFLSADSEEEIFGHLDLDYLEPWERNA

SEQ ID NO: 5829 - DNA, 1182 bp, synthetic construct
  misc_feature 1..1182: note = Variant of terminal deoxynucleotidyl transferase
  source 1..1182: mol_type = other DNA
atgcaccatcatcaccatcacgggggctccggccatccggaaggtaataccccggagaaggaggtgccgagcgttatcgcccgtcatgttagtccgtacgcgtgccagcgcaagaccacgctgaataactacaacaaaaagatcaccgacgcgctggaaatcatggccgagaactacaagtttaaagagaacctgcaggcgcgcctggaggcccgtcgcgccgcgagtgtcctgaaaagcctgccgttcgaggttaccagcatgaaagacatccaaggtctgccgtgcattaccgacgacgtacgtcctgtgatcgaagagatcatcgaagtaggcgagagcagccgtgttaaagaaatcctcaatgacgagcgctacaaggcctttaagcagttcaccagcgtgttcggtgtgggcgtcaagaccgcggaaaagtggtaccgtatgggcctccgtacgctggaagaagcaaaggccagtaagagtctgaagctgaacaagatgcagaaggcgggcttcctgtactacgaggatctggcgagcggtgttagtaaagaagaagccgatgccgttctggatatcgtgaaggaaacggtgcgcactgttagtccggatgcgctggtgaccatcgccggcggtttccgccgtggcaaacctcagggccacgacgttgacctgctgatcacgattccgggccgtcctacggatccggagctgctccacaaagtggttgatctgctcaagaagcaaggtctgctgctgtacggggacatccgtgagcgtacgttcgtggaggggcaactgccaaatcctaaacctgaccagctggacaaccatcagaagtgcttcgccattctcaagctgtaccgtccgaaggtggataacagtgcggttgggacgtcgaagaaagtcgacatggctgaggttaaggattggaaagcggttcgtgtggatctggtggtcgctccagatgagcagttcgcctatgcgctgctcggttggacgggcagcggcatgtttcgtcgcgatactcgtcgctacgcggaggaagagcgctgtatgctgctcgacaaccatggtctctacgacctgaaaaagggcatctttctgagtgcggacagcgaagaagagattttcggtcatctggacctggattatctggagccgtgggaacgcaacgcg

SEQ ID NO: 5830 - protein, 394 aa, synthetic construct
  REGION 1..394: note = Variant of terminal deoxynucleotidyl transferase
MHHHHHHGGSGHPEGNTPEKEVPSVIARHVSPYACQRKTTLNNYNKKITDALEIMAENYKFKENLQARLEARRAASVLKSLPFEVTSMKDIQGLPCITDDVRPVIEEIIEVGESSRVKEILNDERYKAFKQFTSVFGVGVKTAEKWYRMGLRTLEEAKASKSLKLNKMQKAGFLYYEDLASGVSKEEADAVLDIVKETVRTVSPDALVTIAGGFRRGKPQGHDVDLLITIPGRPTDPELLHKVVDLLKKQGLLLYGDIRERTFVEGQLPNPKPDQLDNHQKCFAILKLYRPKVDNSAVGTSKKVDMAEVKDWKAVRVDLVVAPDEQFAYALLGWTGSGMFRRDTRRYAEEERCMLLDNHGLYDLKKGIFLSADSEEEIFGHLDLDYLEPWERNA

SEQ ID NO: 5831 - DNA, 1182 bp, synthetic construct
  misc_feature 1..1182: note = Variant of terminal deoxynucleotidyl transferase
  source 1..1182: mol_type = other DNA
atgcaccatcatcaccatcacgggggctccggccatccggaaggtaataccccggagaaggaggtgccgagcgttatcgcccgtcatgttagtccgtacgcgtgccagcgcaagaccacgctgaataactacaacaaaaagatcaccgacgcgctggaaatcatggccgagaactacaagtttaaagagaacctgcaggcgcgcctggaggcccgtcgcgccgcgagtgtcctgaaaagcctgccgttcgaggttaccagcatgaaagacatccaaggtctgccgtgcattaccgacgacgtacgtcctgtgatcgaagagatcatcgaagtaggcgagagcagccgtgttaaagaaatcctcaatgacgagcgctacaaggcctttaagcagttcaccagcgtgttcggtgtgggcgtcaagaccgcggaaaagtggtaccgtatgggcctccgtacgctggaagaagcaaaggccagtaagagtctgaagctgaacaagatgcagaaggcgggcttcctgtactacgaggatctggcgagcggtgttagtaaagaagaagccgatgccgttctggatatcgtgaaggaaacggtgcgcactgttagtccggatgcgctggtgaccatcgccggcggtttccgccgtggcaaacctcagggccacgacgttgacctgctgatcacgattccgggccgtcctacggatccggagctgctccacaaagtggttgatctgctcaagaagcaaggtctgctgctgtacggggacatccgtgagcgtacgttcgtggaggggcaactgccaaatcctaaacctgaccagctggacaaccatcagaagtgcttcgccattctcaagctgtaccgtccgaaggtggataacagtgcggttgggacgtcgaagaaagtcgacatggctgaggttaaggattggaaagcggttcgtgtggatctggtggtcgctccagatgagcagttcgcctatgcgctgctcggttggacgggcagcggcatgtttcgtcgcgatactcgtcgctacgcggaggaagagcgcgacatgctgctcgacaaccatggtctctacgacctgaaaaagggcatctttctgagtgcggacagcgaagaagagattttcaggcatctggacctggattatctggagccgtgggaacgcaacgcg

SEQ ID NO: 5832 - protein, 394 aa, synthetic construct
  REGION 1..394: note = Variant of terminal deoxynucleotidyl transferase
MHHHHHHGGSGHPEGNTPEKEVPSVIARHVSPYACQRKTTLNNYNKKITDALEIMAENYKFKENLQARLEARRAASVLKSLPFEVTSMKDIQGLPCITDDVRPVIEEIIEVGESSRVKEILNDERYKAFKQFTSVFGVGVKTAEKWYRMGLRTLEEAKASKSLKLNKMQKAGFLYYEDLASGVSKEEADAVLDIVKETVRTVSPDALVTIAGGFRRGKPQGHDVDLLITIPGRPTDPELLHKVVDLLKKQGLLLYGDIRERTFVEGQLPNPKPDQLDNHQKCFAILKLYRPKVDNSAVGTSKKVDMAEVKDWKAVRVDLVVAPDEQFAYALLGWTGSGMFRRDTRRYAEEERDMLLDNHGLYDLKKGIFLSADSEEEIFRHLDLDYLEPWERNA

SEQ ID NO: 5833 - DNA, 1182 bp, synthetic construct
  misc_feature 1..1182: note = Variant of terminal deoxynucleotidyl transferase
  source 1..1182: mol_type = other DNA
atgcaccatcatcaccatcacgggggctccggccatccggaaggtaataccccggagaaggaggtgccgagcgttatcgcccgtcatgttagtccgtacgcgtgccagcgcaagaccacgctgaataactacaacaaaaagatcaccgacgcgctggaaatcatggccgagaactacaagtttaaagagaacctgcaggcgcgcctggaggcccgtcgcgccgcgagtgtcctgaaaagcctgccgttcgaggttaccagcatgaaagacatccaaggtctgccgtgcattaccgacgacgtacgtcctgtgatcgaagagatcatcgaagtaggcgagagcagccgtgttaaagaaatcctcaatgacgagcgctacaaggcctttaagcagttcaccagcgtgttcggtgtgggcgtcaagaccgcggaaaagtggtaccgtatgggcctccgtacgctggaagaagcaaaggccagtaagagtctgaagctgaacaagatgcagaaggcgggcttcctgtactacgaggatctggcgagcggtgttagtaaagaagaagccgatgccgttctggatatcgtgaaggaaacggtgcgcactgttagtccggatgcgctggtgaccatcgccggcggtttccgccgtggcaaacctcagggccacgacgttgacctgctgatcacgattccgggccgtcctacggatccggagctgctccacaaagtggttgatctgctcaagaagcaaggtctgctgctgtacggggacatccgtgagcgtacgttcgtggaggggcaactgccaaatcctaaacctgaccagctggacaaccatcagaagtgcttcgccattctcaagctgtaccgtccgaaggtggataacagtgcggttgggacgtcgaagaaagtcgacatggctgaggttaaggattggaaagcggttcgtgtggatctggtggtcgctccagatgagcagttcgcctatgcgctgctcggttggacgggcagcggcatgtttcgtcgcgatactcgtcgctacgcggaggaaattcgcgacatgctgctcgacaaccatggtctctacgacctgaaaaagggcatctttctgagtgcggacagcgaagaagagattttcggtcatctggacctggattatctggagccgtgggaacgcaacgcg

SEQ ID NO: 5834 - protein, 394 aa, synthetic construct
  REGION 1..394: note = Variant of terminal deoxynucleotidyl transferase
MHHHHHHGGSGHPEGNTPEKEVPSVIARHVSPYACQRKTTLNNYNKKITDALEIMAENYKFKENLQARLEARRAASVLKSLPFEVTSMKDIQGLPCITDDVRPVIEEIIEVGESSRVKEILNDERYKAFKQFTSVFGVGVKTAEKWYRMGLRTLEEAKASKSLKLNKMQKAGFLYYEDLASGVSKEEADAVLDIVKETVRTVSPDALVTIAGGFRRGKPQGHDVDLLITIPGRPTDPELLHKVVDLLKKQGLLLYGDIRERTFVEGQLPNPKPDQLDNHQKCFAILKLYRPKVDNSAVGTSKKVDMAEVKDWKAVRVDLVVAPDEQFAYALLGWTGSGMFRRDTRRYAEEIRDMLLDNHGLYDLKKGIFLSADSEEEIFGHLDLDYLEPWERNA

SEQ ID NO: 5835 - DNA, 1182 bp, synthetic construct
  misc_feature 1..1182: note = Variant of terminal deoxynucleotidyl transferase
  source 1..1182: mol_type = other DNA
atgcaccatcatcaccatcacgggggctccggccatccggaaggtaataccccggagaaggaggtgccgagcgttatcgcccgtcatgttagtccgtacgcgtgccagcgcaagaccacgctgaataactacaacaaaaagatcaccgacgcgctggaaatcatggccgagaactacaagtttaaagagaacctgcaggcgcgcctggaggcccgtcgcgccgcgagtgtcctgaaaagcctgccgttcgaggttaccagcatgaaagacatccaaggtctgccgtgcattaccgacgacgtacgtcctgtgatcgaagagatcatcgaagtaggcgagagcagccgtgttaaagaaatcctcaatgacgagcgctacaaggcctttaagcagttcaccagcgtgttcggtgtgggcgtcaagaccgcggaaaagtggtaccgtatgggcctccgtacgctggaagaagcaaaggccagtaagagtctgaagctgaacaagatgcagaaggcgggcttcctgtactacgaggatctggcgagcggtgttagtaaagaagaagccgatgccgttctggatatcgtgaaggaaacggtgcgcactgttagtccggatgcgctggtgaccatcgccggcggtttccgccgtggcaaacctcagggccacgacgttgacctgctgatcacgattccgggccgtcctacggatccggagctgctccacaaagtggttgatctgctcaagaagcaaggtctgctgctgtacggggacatccgtgagcgtacgttcgtggaggggcaactgccaaatcctaaacctgaccagctggacaaccatcagaagtgcttcgccattctcaagctgtaccgtccgaaggtggataacagtgcggttgggacgtcgaagaaagtcgacatggctgaggttaaggattggaaagcggttcgtgtggatctggtggtcgctccagatgagcagttcgcctatgcgctgctcggttggacgggcagcggcatgtttcgtcgcgatactcgtcgctacgcggaggaagagcgcgacatgctgctcgacaaccatggtctctacgacctgaaaaagggcatctttctgagtgcggacagcgaagaagagattttcggtcatctggacctggattatctgcagccgtgggaacgcaacgcg

SEQ ID NO: 5836 - protein, 394 aa, synthetic construct
  REGION 1..394: note = Variant of terminal deoxynucleotidyl transferase
MHHHHHHGGSGHPEGNTPEKEVPSVIARHVSPYACQRKTTLNNYNKKITDALEIMAENYKFKENLQARLEARRAASVLKSLPFEVTSMKDIQGLPCITDDVRPVIEEIIEVGESSRVKEILNDERYKAFKQFTSVFGVGVKTAEKWYRMGLRTLEEAKASKSLKLNKMQKAGFLYYEDLASGVSKEEADAVLDIVKETVRTVSPDALVTIAGGFRRGKPQGHDVDLLITIPGRPTDPELLHKVVDLLKKQGLLLYGDIRERTFVEGQLPNPKPDQLDNHQKCFAILKLYRPKVDNSAVGTSKKVDMAEVKDWKAVRVDLVVAPDEQFAYALLGWTGSGMFRRDTRRYAEEERDMLLDNHGLYDLKKGIFLSADSEEEIFGHLDLDYLQPWERNA

SEQ ID NO: 5837 - DNA, 1182 bp, synthetic construct
  misc_feature 1..1182: note = Variant of terminal deoxynucleotidyl transferase
  source 1..1182: mol_type = other DNA
atgcaccatcatcaccatcacgggggctccggccatccggaaggtaataccccggagaaggaggtgccgagcgttatcgcccgtcatgttagtccgtacgcgtgccagcgcaagaccacgctgaataactacaacaaaaagatcaccgacgcgctggaaatcatggccgagaactacaagtttaaagagaacctgcaggcgcgcctggaggcccgtcgcgccgcgagtgtcctgaaaagcctgccgttcgaggttaccagcatgaaagacatccaaggtctgccgtgcattaccgacgacgtacgtcctgtgatcgaagagatcatcgaagtaggcgagagcagccgtgttaaagaaatcctcaatgacgagcgctacaaggcctttaagcagttcaccagcgtgttcggtgtgggcgtcaagaccgcggaaaagtggtaccgtatgggcctccgtacgctggaagaagcaaaggccagtaagagtctgaagctgaacaagatgcagaaggcgggcttcctgtactacgaggatctggcgagcggtgttagtaaagaagaagccgatgccgttctggatatcgtgaaggaaacggtgcgcactgttagtccggatgcgctggtgaccatcgccggcggtttccgccgtggcaaacctcagggccacgacgttgacctgctgatcacgattccgggccgtcctacggatccggagctgctccacaaagtggttgatctgctcaagaagcaaggtctgctgctgtacggggacatccgtgagcgtacgttcgtggaggggcaactgccaaatcctaaacctgaccagctggacaaccatcagaagtgcttcgccattctcaagctgtaccgtccgaaggtggataacagtgcggttgggacgtcgaagaaagtcgacatggctgaggttaaggattggaaagcggttcgtgtggatctggtggtcgctccagatgagcagttcgcctatgcgctgctcggttggacgggcagcggcatgtttcgtcgcgatactcgtcgctacgcggaggaagagcgcgacatgctgctcgacaaccatggtctctacgacctgaaaaagtatatctttctgagtgcggacagcgaagaagagattttcggtcatctggacctggattatctggagccgtgggaacgcaacgcg

SEQ ID NO: 5838 - protein, 394 aa, synthetic construct
  REGION 1..394: note = Variant of terminal deoxynucleotidyl transferase
MHHHHHHGGSGHPEGNTPEKEVPSVIARHVSPYACQRKTTLNNYNKKITDALEIMAENYKFKENLQARLEARRAASVLKSLPFEVTSMKDIQGLPCITDDVRPVIEEIIEVGESSRVKEILNDERYKAFKQFTSVFGVGVKTAEKWYRMGLRTLEEAKASKSLKLNKMQKAGFLYYEDLASGVSKEEADAVLDIVKETVRTVSPDALVTIAGGFRRGKPQGHDVDLLITIPGRPTDPELLHKVVDLLKKQGLLLYGDIRERTFVEGQLPNPKPDQLDNHQKCFAILKLYRPKVDNSAVGTSKKVDMAEVKDWKAVRVDLVVAPDEQFAYALLGWTGSGMFRRDTRRYAEEERDMLLDNHGLYDLKKYIFLSADSEEEIFGHLDLDYLEPWERNA

SEQ ID NO: 5839 - DNA, 1182 bp, synthetic construct
  misc_feature 1..1182: note = Variant of terminal deoxynucleotidyl transferase
  source 1..1182: mol_type = other DNA
atgcaccatcatcaccatcacgggggctccggccatccggaaggtaataccccggagaaggaggtgccgagcgttatcgcccgtcatgttagtccgtacgcgtgccagcgcaagaccacgctgaataactacaacaaaaagatcaccgacgcgctggaaatcatggccgagaactacaagtttaaagagaacctgcaggcgcgcctggaggcccgtcgcgccgcgagtgtcctgaaaagcctgccgttcgaggttaccagcatgaaagacatccaaggtctgccgtgcattaccgacgacgtacgtcctgtgatcgaagagatcatcgaagtaggcgagagcagccgtgttaaagaaatcctcaatgacgagcgctacaaggcctttaagcagttcaccagcgtgttcggtgtgggcgtcaagaccgcggaaaagtggtaccgtatgggcctccgtacgctggaagaagcaaaggccagtaagagtctgaagctgaacaagatgcagaaggcgggcttcctgtactacgaggatctggcgagcggtgttagtaaagaagaagccgatgccgttctggatatcgtgaaggaaacggtgcgcactgttagtccggatgcgctggtgaccatcgccggcggtttccgccgtggcaaacctcagggccacgacgttgacctgctgatcacgattccgggccgtcctacggatccggagctgctccacaaagtggttgatctgctcaagaagcaaggtctgctgctgtacggggacatccgtgagcgtacgttcgtggaggggcaactgccaaatcctaaacctgaccagctggacaaccatcagaagtgcttcgccattctcaagctgtaccgtccgaaggtggataacagtgcggttgggacgtcgaagaaagtcgacatggctgaggttaaggattggaaagcggttcgtgtggatctggtggtcgctccagatgagcagttcgcctatgcgctgctcggttggacgggcagcggcatgtttcgtcgcgatactcgtcgctacgcggaggaagagcgcgacatgctgctcgacaaccatggtctctacgacctgaaaaagggcatctttctgtgtgcggacagcgaagaagagattttcggtcatctggacctggattatctggagccgtgggaacgcaacgcg

SEQ ID NO: 5840 - protein, 394 aa, synthetic construct
  REGION 1..394: note = Variant of terminal deoxynucleotidyl transferase
MHHHHHHGGSGHPEGNTPEKEVPSVIARHVSPYACQRKTTLNNYNKKITDALEIMAENYKFKENLQARLEARRAASVLKSLPFEVTSMKDIQGLPCITDDVRPVIEEIIEVGESSRVKEILNDERYKAFKQFTSVFGVGVKTAEKWYRMGLRTLEEAKASKSLKLNKMQKAGFLYYEDLASGVSKEEADAVLDIVKETVRTVSPDALVTIAGGFRRGKPQGHDVDLLITIPGRPTDPELLHKVVDLLKKQGLLLYGDIRERTFVEGQLPNPKPDQLDNHQKCFAILKLYRPKVDNSAVGTSKKVDMAEVKDWKAVRVDLVVAPDEQFAYALLGWTGSGMFRRDTRRYAEEERDMLLDNHGLYDLKKGIFLCADSEEEIFGHLDLDYLEPWERNA

SEQ ID NO: 5841 - DNA, 1182 bp, synthetic construct
  misc_feature 1..1182: note = Variant of terminal deoxynucleotidyl transferase
  source 1..1182: mol_type = other DNA
atgcaccatcatcaccatcacgggggctccggccatccggaaggtaataccccggagaaggaggtgccgagcgttatcgcccgtcatgttagtccgtacgcgtgccagcgcaagaccacgctgaataactacaacaaaaagatcaccgacgcgctggaaatcatggccgagaactacaagtttaaagagaacctgcaggcgcgcctggaggcccgtcgcgccgcgagtgtcctgaaaagcctgccgttcgaggttaccagcatgaaagacatccaaggtctgccgtgcattaccgacgacgtacgtcctgtgatcgaagagatcatcgaagtaggcgagagcagccgtgttaaagaaatcctcaatgacgagcgctacaaggcctttaagcagttcaccagcgtgttcggtgtgggcgtcaagaccgcggaaaagtggtaccgtatgggcctccgtacgctggaagaagcaaaggccagtaagagtctgaagctgaacaagatgcagaaggcgggcttcctgtactacgaggatctggcgagcggtgttagtaaagaagaagccgatgccgttctggatatcgtgaaggaaacggtgcgcactgttagtccggatgcgctggtgaccatcgccggcggtttccgccgtggcaaacctcagggccacgacgttgacctgctgatcacgattccgggccgtcctacggatccggagctgctccacaaagtggttgatctgctcaagaagcaaggtctgctgctgtacggggacatccgtgagcgtacgttcgtggaggggcaactgccaaatcctaaacctgaccagctggacaaccatcagaagtgcttcgccattctcaagctgtaccgtccgaaggtggataacagtgcggttgggacgtcgaagaaagtcgacatggctgaggttaaggattggaaagcggttcgtgtggatctggtggtcgctccagatgagcagttcgcctatgcgctgctcggttggacgggcagcggcatgtttcgtcgcgatactcgtcgctacgcggaggaagagcgcgacatgctgctcgacaaccatggtctctacgacctgaaaaagggcatctttctgagtgcggacgctgaagaagagattttcggtcatctggacctggattatctggagccgtgggaacgcaacgcg

SEQ ID NO: 5842 - protein, 394 aa, synthetic construct
  REGION 1..394: note = Variant of terminal deoxynucleotidyl transferase
MHHHHHHGGSGHPEGNTPEKEVPSVIARHVSPYACQRKTTLNNYNKKITDALEIMAENYKFKENLQARLEARRAASVLKSLPFEVTSMKDIQGLPCITDDVRPVIEEIIEVGESSRVKEILNDERYKAFKQFTSVFGVGVKTAEKWYRMGLRTLEEAKASKSLKLNKMQKAGFLYYEDLASGVSKEEADAVLDIVKETVRTVSPDALVTIAGGFRRGKPQGHDVDLLITIPGRPTDPELLHKVVDLLKKQGLLLYGDIRERTFVEGQLPNPKPDQLDNHQKCFAILKLYRPKVDNSAVGTSKKVDMAEVKDWKAVRVDLVVAPDEQFAYALLGWTGSGMFRRDTRRYAEEERDMLLDNHGLYDLKKGIFLSADAEEEIFGHLDLDYLEPWERNA

SEQ ID NO: 5843 - DNA, 1182 bp, synthetic construct
  misc_feature 1..1182: note = Variant of terminal deoxynucleotidyl transferase
  source 1..1182: mol_type = other DNA
atgcaccatcatcaccatcacgggggctccggccatccggaaggtaataccccggagaaggaggtgccgagcgttatcgcccgtcatgttagtccgtacgcgtgccagcgcaagaccacgctgaataactacaacaaaaagatcaccgacgcgctggaaatcatggccgagaactacaagtttaaagagaacctgcaggcgcgcctggaggcccgtcgcgccgcgagtgtcctgaaaagcctgccgttcgaggttaccagcatgaaagacatccaaggtctgccgtgcattaccgacgacgtacgtcctgtgatcgaagagatcatcgaagtaggcgagagcagccgtgttaaagaaatcctcaatgacgagcgctacaaggcctttaagcagttcaccagcgtgttcggtgtgggcgtcaagaccgcggaaaagtggtaccgtatgggcctccgtacgctggaagaagcaaaggccagtaagagtctgaagctgaacaagatgcagaaggcgggcttcctgtactacgaggatctggcgagcggtgttagtaaagaagaagccgatgccgttctggatatcgtgaaggaaacggtgcgcactgttagtccggatgcgctggtgaccatcgccggcggtttccgccgtggcaaacctcagggccacgacgttgacctgctgatcacgattccgggccgtcctacggatccggagctgctccacaaagtggttgatctgctcaagaagcaaggtctgctgctgtacggggacatccgtgagcgtacgttcgtggaggggcaactgccaaatcctaaacctgaccagctggacaaccatcagaagtgcttcgccattctcaagctgtaccgtccgaaggtggataacagtgcggttgggacgtcgaagaaagtcgacatggctgaggttaaggattggaaagcggttcgtgtggatctggtggtcgctccagatgagcagttcgcctatgcgctgctcggttggacgggcagcggcatgtttcgtggggatactcgtcgctacgcggaggaagagcgcgacatgctgctcgacaaccatggtctctacgacctgaaaaagggcatctttctgagtgcggacagcgaagaagagattttcggtcatctggacctggattatctggagccgtgggaacgcaacgcg

SEQ ID NO: 5844 - protein, 394 aa, synthetic construct
  REGION 1..394: note = Variant of terminal deoxynucleotidyl transferase
MHHHHHHGGSGHPEGNTPEKEVPSVIARHVSPYACQRKTTLNNYNKKITDALEIMAENYKFKENLQARLEARRAASVLKSLPFEVTSMKDIQGLPCITDDVRPVIEEIIEVGESSRVKEILNDERYKAFKQFTSVFGVGVKTAEKWYRMGLRTLEEAKASKSLKLNKMQKAGFLYYEDLASGVSKEEADAVLDIVKETVRTVSPDALVTIAGGFRRGKPQGHDVDLLITIPGRPTDPELLHKVVDLLKKQGLLLYGDIRERTFVEGQLPNPKPDQLDNHQKCFAILKLYRPKVDNSAVGTSKKVDMAEVKDWKAVRVDLVVAPDEQFAYALLGWTGSGMFRGDTRRYAEEERDMLLDNHGLYDLKKGIFLSADSEEEIFGHLDLDYLEPWERNA

SEQ ID NO: 5845 - DNA, 1182 bp, synthetic construct
  misc_feature 1..1182: note = Variant of terminal deoxynucleotidyl transferase
  source 1..1182: mol_type = other DNA
atgcaccatcatcaccatcacgggggctccggccatccggaaggtaataccccggagaaggaggtgccgagcgttatcgcccgtcatgttagtccgtacgcgtgccagcgcaagaccacgctgaataactacaacaaaaagatcaccgacgcgctggaaatcatggccgagaactacaagtttaaagagaacctgcaggcgcgcctggaggcccgtcgcgccgcgagtgtcctgaaaagcctgccgttcgaggttaccagcatgaaagacatccaaggtctgccgtgcattaccgacgacgtacgtcctgtgatcgaagagatcatcgaagtaggcgagagcagccgtgttaaagaaatcctcaatgacgagcgctacaaggcctttaagcagttcaccagcgtgttcggtgtgggcgtcaagaccgcggaaaagtggtaccgtatgggcctccgtacgctggaagaagcaaaggccagtaagagtctgaagctgaacaagatgcagaaggcgggcttcctgtactacgaggatctggcgagcggtgttagtaaagaagaagccgatgccgttctggatatcgtgaaggaaacggtgcgcactgttagtccggatgcgctggtgaccatcgccggcggtttccgccgtggcaaacctcagggccacgacgttgacctgctgatcacgattccgggccgtcctacggatccggagctgctccacaaagtggttgatctgctcaagaagcaaggtctgctgctgtacggggacatccgtgagcgtacgttcatggaggggcaactgccaaatcctaaacctgaccagctggacaaccatcagaagtgcttcgccattctcaagctgtaccgtccgaaggtggataacagtgcggttgggacgtcgaagaaagtcgacatggctgaggttaaggattggaaagcggttcgtgtggatctggtggtcgctccagatgagcagttcgcctatgcgctgctcggttggacgggcagcggcatgtttcgtcgcgatactcgtcgctacgcggaggaagagcgcgacatgctgctcgacaaccatggtctctacgacctgaaaaagggcatctttctgagtgcggacagcgaagaagagattttcggtcatctggacctggattatctggagccgtgggaacgcaacgcg

SEQ ID NO: 5846 - protein, 394 aa, synthetic construct
  REGION 1..394: note = Variant of terminal deoxynucleotidyl transferase
MHHHHHHGGSGHPEGNTPEKEVPSVIARHVSPYACQRKTTLNNYNKKITDALEIMAENYKFKENLQARLEARRAASVLKSLPFEVTSMKDIQGLPCITDDVRPVIEEIIEVGESSRVKEILNDERYKAFKQFTSVFGVGVKTAEKWYRMGLRTLEEAKASKSLKLNKMQKAGFLYYEDLASGVSKEEADAVLDIVKETVRTVSPDALVTIAGGFRRGKPQGHDVDLLITIPGRPTDPELLHKVVDLLKKQGLLLYGDIRERTFMEGQLPNPKPDQLDNHQKCFAILKLYRPKVDNSAVGTSKKVDMAEVKDWKAVRVDLVVAPDEQFAYALLGWTGSGMFRRDTRRYAEEERDMLLDNHGLYDLKKGIFLSADSEEEIFGHLDLDYLEPWERNA

SEQ ID NO: 5847 - DNA, 1182 bp, synthetic construct
  misc_feature 1..1182: note = Variant of terminal deoxynucleotidyl transferase
  source 1..1182: mol_type = other DNA
atgcaccatcatcaccatcacgggggctccggccatccggaaggtaataccccggagaaggaggtgccgagcgttatcgcccgtcatgttagtccgtacgcgtgccagcgcaagaccacgctgaataactacaacaaaaagatcaccgacgcgctggaaatcatggccgagaactacaagtttaaagagaacctgcaggcgcgcctggaggcccgtcgcgccgcgagtgtcctgaaaagcctgccgttcgaggttaccagcatgaaagacatccaaggtctgccgtgcattaccgacgacgtacgtcctgtgatcgaagagatcatcgaagtaggcgagagcagccgtgttaaagaaatcctcaatgacgagcgctacaaggcctttaagcagttcaccagcgtgttcggtgtgggcgtcaagaccgcggaaaagtggtaccgtatgggcctccgtacgctggaagaagcaaaggccagtaagagtctgaagctgaacaagatgcagaaggcgggcttcctgtactacgaggatctggcgagcggtgttagtaaagaagaagccgatgccgttctggatatcgtgaaggaaacggtgcgcactgttagtccggatgcgctggtgaccatcgccggcggtttccgccgtggcaaacctcagggccacgacgttgacctgctgatcacgattccgggccgtcctacggatccggagctgctccacaaagtggttgatctgctcaagaagcaaggtctgctgctgtacggggacatccgtgagcgtacgttcgtggaggggcaactgccaaatcctaaacctgaccgtctggacaaccatcagaagtgcttcgccattctcaagctgtaccgtccgaaggtggataacagtgcggttgggacgtcgaagaaagtcgacatggctgaggttaaggattggaaagcggttcgtgtggatctggtggtcgctccagatgagcagttcgcctatgcgctgctcggttggacgggcagcggcatgtttcgtcgcgatactcgtcgctacgcggaggaagagcgcgacatgctgctcgacaaccatggtctctacgacctgaaaaagggcatctttctgagtgcggacagcgaagaagagattttcggtcatctggacctggattatctggagccgtgggaacgcaacgcg

SEQ ID NO: 5848 - protein, 394 aa, synthetic construct
  REGION 1..394: note = Variant of terminal deoxynucleotidyl transferase
MHHHHHHGGSGHPEGNTPEKEVPSVIARHVSPYACQRKTTLNNYNKKITDALEIMAENYKFKENLQARLEARRAASVLKSLPFEVTSMKDIQGLPCITDDVRPVIEEIIEVGESSRVKEILNDERYKAFKQFTSVFGVGVKTAEKWYRMGLRTLEEAKASKSLKLNKMQKAGFLYYEDLASGVSKEEADAVLDIVKETVRTVSPDALVTIAGGFRRGKPQGHDVDLLITIPGRPTDPELLHKVVDLLKKQGLLLYGDIRERTFVEGQLPNPKPDRLDNHQKCFAILKLYRPKVDNSAVGTSKKVDMAEVKDWKAVRVDLVVAPDEQFAYALLGWTGSGMFRRDTRRYAEEERDMLLDNHGLYDLKKGIFLSADSEEEIFGHLDLDYLEPWERNA

SEQ ID NO: 5849 - DNA, 1182 bp, synthetic construct
  misc_feature 1..1182: note = Variant of terminal deoxynucleotidyl transferase
  source 1..1182: mol_type = other DNA
atgcaccatcatcaccatcacgggggctccggccatccggaaggtaataccccggagaaggaggtgccgagcgttatcgcccgtcatgttagtccgtacgcgtgccagcgcaagaccacgctgaataactacaacaaaaagatcaccgacgcgctggaaatcatggccgagaactacaagtttaaagagaacctgcaggcgcgcctggaggcccgtcgcgccgcgagtgtcctgaaaagcctgccgttcgaggttaccagcatgaaagacatccaaggtctgccgtgcattaccgacgacgtacgtcctgtgatcgaagagatcatcgaagtaggcgagagcagccgtgttaaagaaatcctcaatgacgagcgctacaaggcctttaagcagttcaccagcgtgttcggtgtgggcgtcaagaccgcggaaaagtggtaccgtatgggcctccgtacgctggaagaagcaaaggccagtaagagtctgaagctgaacaagatgcagaaggcgggcttcctgtactacgaggatctggcgagcggtgttagtaaagaagaagccgatgccgttctggatatcgtgaaggaaacggtgcgcactgttagtccggatgcgctggtgaccatcgccggcggtttccgccgtggcaaacctcagggccacgacgttgacctgctgatcacgattccgggccgtcctacggatccggagctgctccacaaagtggttgatctgctcaagaagcaaggtctgctgctgtacggggacatccgtgagcgtacgttcgtggaggggcaactgccaaatcctaaacctgaccagctggacaaccatcagaagtgcttcgccattctcaagctgtaccgtccgaaggtggataacagtgcggttgggacgtcgaagaaagtcgacatggctgaggttaaggattggaaagcggttcgtgtggatctggtggtcgctccagatgagcagttcgcctatgcgctgctcggttggacgggcagcggcatgtttcgtcgcgatactcgtcgctacgcggaggaagtgcgcgacatgctgctcgacaaccatggtctctacgacctgaaaaagggcatctttctgagtgcggacagcgaagaagagattttcggtcatctggacctggattatctggagccgtgggaacgcaacgcg

SEQ ID NO: 5850 - protein, 394 aa, synthetic construct
  REGION 1..394: note = Variant of terminal deoxynucleotidyl transferase
MHHHHHHGGSGHPEGNTPEKEVPSVIARHVSPYACQRKTTLNNYNKKITDALEIMAENYKFKENLQARLEARRAASVLKSLPFEVTSMKDIQGLPCITDDVRPVIEEIIEVGESSRVKEILNDERYKAFKQFTSVFGVGVKTAEKWYRMGLRTLEEAKASKSLKLNKMQKAGFLYYEDLASGVSKEEADAVLDIVKETVRTVSPDALVTIAGGFRRGKPQGHDVDLLITIPGRPTDPELLHKVVDLLKKQGLLLYGDIRERTFVEGQLPNPKPDQLDNHQKCFAILKLYRPKVDNSAVGTSKKVDMAEVKDWKAVRVDLVVAPDEQFAYALLGWTGSGMFRRDTRRYAEEVRDMLLDNHGLYDLKKGIFLSADSEEEIFGHLDLDYLEPWERNA

SEQ ID NO: 5851 - DNA, 1182 bp, synthetic construct
  misc_feature 1..1182: note = Variant of terminal deoxynucleotidyl transferase
  source 1..1182: mol_type = other DNA
atgcaccatcatcaccatcacgggggctccggccatccggaaggtaataccccggagaaggaggtgccgagcgttatcgcccgtcatgttagtccgtacgcgtgccagcgcaagaccacgctgaataactacaacaaaaagatcaccgacgcgctggaaatcatggccgagaactacaagtttaaagagaacctgcaggcgcgcctggaggcccgtcgcgccgcgagtgtcctgaaaagcctgccgttcgaggttaccagcatgaaagacatccaaggtctgccgtgcattaccgacgacgtacgtcctgtgatcgaagagatcatcgaagtaggcgagagcagccgtgttaaagaaatcctcaatgacgagcgctacaaggcctttaagcagttcaccagcgtgttcggtgtgggcgtcaagaccgcggaaaagtggtaccgtatgggcctccgtacgctggaagaagcaaaggccagtaagagtctgaagctgaacaagatgcagaaggcgggcttcctgtactacgaggatctggcgagcggtgttagtaaagaagaagccgatgccgttctggatatcgtgaaggaaacggtgcgcactgttagtccggatgcgctggtgaccatcgccggcggtttccgccgtggcaaacctcagggccacgacgttgacctgctgatcacgattccgggccgtcctacggatccggagctgctccacaaagtggttgatctgctcaagaagcaaggtctgctgctgtacggggacatccgtgagcgtacgttcgtggaggggcaactgccaaatcctaaacctgaccagctggacaaccatcagaagtgcttcgccattctcaagctgtaccgtccgaaggtggataacagtgcggttgggacgtcgaagaaagtcgacatggctgaggttaaggattggaaagcggttcgtgtggatctggtggtcgctccagatgagcagttcgcctatgcgctgctcggttggacgggcagcggcatgtttcgtgcggatactcgtcgctacgcggaggaagagcgcgacatgctgctcgacaaccatggtctctacgacctgaaaaagggcatctttctgagtgcggacagcgaagaagagattttcggtcatctggacctggattatctggagccgtgggaacgcaacgcg

SEQ ID NO: 5852 - protein, 394 aa, synthetic construct
  REGION 1..394: note = Variant of terminal deoxynucleotidyl transferase
MHHHHHHGGSGHPEGNTPEKEVPSVIARHVSPYACQRKTTLNNYNKKITDALEIMAENYKFKENLQARLEARRAASVLKSLPFEVTSMKDIQGLPCITDDVRPVIEEIIEVGESSRVKEILNDERYKAFKQFTSVFGVGVKTAEKWYRMGLRTLEEAKASKSLKLNKMQKAGFLYYEDLASGVSKEEADAVLDIVKETVRTVSPDALVTIAGGFRRGKPQGHDVDLLITIPGRPTDPELLHKVVDLLKKQGLLLYGDIRERTFVEGQLPNPKPDQLDNHQKCFAILKLYRPKVDNSAVGTSKKVDMAEVKDWKAVRVDLVVAPDEQFAYALLGWTGSGMFRADTRRYAEEERDMLLDNHGLYDLKKGIFLSADSEEEIFGHLDLDYLEPWERNA

SEQ ID NO: 5853 - DNA, 1182 bp, synthetic construct
  misc_feature 1..1182: note = Variant of terminal deoxynucleotidyl transferase
  source 1..1182: mol_type = other DNA
atgcaccatcatcaccatcacgggggctccggccatccggaaggtaataccccggagaaggaggtgccgagcgttatcgcccgtcatgttagtccgtacgcgtgccagcgcaagaccacgctgaataactacaacaaaaagatcaccgacgcgctggaaatcatggccgagaactacaagtttaaagagaacctgcaggcgcgcctggaggcccgtcgcgccgcgagtgtcctgaaaagcctgccgttcgaggttaccagcatgaaagacatccaaggtctgccgtgcattaccgacgacgtacgtcctgtgatcgaagagatcatcgaagtaggcgagagcagccgtgttaaagaaatcctcaatgacgagcgctacaaggcctttaagcagttcaccagcgtgttcggtgtgggcgtcaagaccgcggaaaagtggtaccgtatgggcctccgtacgctggaagaagcaaaggccagtaagagtctgaagctgaacaagatgcagaaggcgggcttcctgtactacgaggatctggcgagcggtgttagtaaagaagaagccgatgccgttctggatatcgtgaaggaaacggtgcgcactgttagtccggatgcgctggtgaccatcgccggcggtttccgccgtggcaaacctcagggccacgacgttgacctgctgatcacgattccgggccgtcctacggatccggagctgctccacaaagtggttgatctgctcaagaagcaaggtctgctgctgtacagtgacatccgtgagcgtacgttcgtggaggggcaactgccaaatcctaaacctgaccagctggacaaccatcagaagtgcttcgccattctcaagctgtaccgtccgaaggtggataacagtgcggttgggacgtcgaagaaagtcgacatggctgaggttaaggattggaaagcggttcgtgtggatctggtggtcgctccagatgagcagttcgcctatgcgctgctcggttggacgggcagcggcatgtttcgtcgcgatactcgtcgctacgcggaggaagagcgcgacatgctgctcgacaaccatggtctctacgacctgaaaaagggcatctttctgagtgcggacagcgaagaagagattttcggtcatctggacctggattatctggagccgtgggaacgcaacgcg

SEQ ID NO: 5854 - protein, 394 aa, synthetic construct
  REGION 1..394: note = Variant of terminal deoxynucleotidyl transferase
MHHHHHHGGSGHPEGNTPEKEVPSVIARHVSPYACQRKTTLNNYNKKITDALEIMAENYKFKENLQARLEARRAASVLKSLPFEVTSMKDIQGLPCITDDVRPVIEEIIEVGESSRVKEILNDERYKAFKQFTSVFGVGVKTAEKWYRMGLRTLEEAKASKSLKLNKMQKAGFLYYEDLASGVSKEEADAVLDIVKETVRTVSPDALVTIAGGFRRGKPQGHDVDLLITIPGRPTDPELLHKVVDLLKKQGLLLYSDIRERTFVEGQLPNPKPDQLDNHQKCFAILKLYRPKVDNSAVGTSKKVDMAEVKDWKAVRVDLVVAPDEQFAYALLGWTGSGMFRRDTRRYAEEERDMLLDNHGLYDLKKGIFLSADSEEEIFGHLDLDYLEPWERNA

SEQ ID NO: 5855 - DNA, 1182 bp, synthetic construct
  misc_feature 1..1182: note = Variant of terminal deoxynucleotidyl transferase
  source 1..1182: mol_type = other DNA
atgcaccatcatcaccatcacgggggctccggccatccggaaggtaataccccggagaaggaggtgccgagcgttatcgcccgtcatgttagtccgtacgcgtgccagcgcaagaccacgctgaataactacaacaaaaagatcaccgacgcgctggaaatcatggccgagaactacaagtttaaagagaacctgcaggcgcgcctggaggcccgtcgcgccgcgagtgtcctgaaaagcctgccgttcgaggttaccagcatgaaagacatccaaggtctgccgtgcattaccgacgacgtacgtcctgtgatcgaagagatcatcgaagtaggcgagagcagccgtgttaaagaaatcctcaatgacgagcgctacaaggcctttaagcagttcaccagcgtgttcggtgtgggcgtcaagaccgcggaaaagtggtaccgtatgggcctccgtacgctggaagaagcaaaggccagtaagagtctgaagctgaacaagatgcagaaggcgggcttcctgtactacgaggatctggcgagcggtgttagtaaagaagaagccgatgccgttctggatatcgtgaaggaaacggtgcgcactgttagtccggatgcgctggtgaccatcgccggcggtttccgccgtggcaaacctcagggccacgacgttgacctgctgatcacgattccgggccgtcctacggatccggagctgctccacaaagtggttgatctgctcaagaagcaaggtctgctgctgtacggggacatccgtgagcgtacgttcgtggaggggcaactgccaaatcctaaacctgaccagctggacaaccatcagaagtgcttcgccattctcaagctgtaccgtccgaaggtggataacagtgcggttgggacgtcgaagaaagtcgacatggctgaggttaaggattggaaagcggttcgtgtggatctggtggtcgctccagatgagcagttcgcctatgcgctgctcggttggacgggcagcggcatgtttcgtcgcgatactcgtcgctacgcggaggaagagcgcgacatgctgctcgacaaccatggtctctacgacctgaaaaagaagatctttctgagtgcggacagcgaagaagagattttcggtcatctggacctggattatctggagccgtgggaacgcaacgcg

SEQ ID NO: 5856 - protein, 394 aa, synthetic construct
  REGION 1..394: note = Variant of terminal deoxynucleotidyl transferase
MHHHHHHGGSGHPEGNTPEKEVPSVIARHVSPYACQRKTTLNNYNKKITDALEIMAENYKFKENLQARLEARRAASVLKSLPFEVTSMKDIQGLPCITDDVRPVIEEIIEVGESSRVKEILNDERYKAFKQFTSVFGVGVKTAEKWYRMGLRTLEEAKASKSLKLNKMQKAGFLYYEDLASGVSKEEADAVLDIVKETVRTVSPDALVTIAGGFRRGKPQGHDVDLLITIPGRPTDPELLHKVVDLLKKQGLLLYGDIRERTFVEGQLPNPKPDQLDNHQKCFAILKLYRPKVDNSAVGTSKKVDMAEVKDWKAVRVDLVVAPDEQFAYALLGWTGSGMFRRDTRRYAEEERDMLLDNHGLYDLKKKIFLSADSEEEIFGHLDLDYLEPWERNA

SEQ ID NO: 5857 - DNA, 1182 bp, synthetic construct
  misc_feature 1..1182: note = Variant of terminal deoxynucleotidyl transferase
  source 1..1182: mol_type = other DNA
atgcaccatcatcaccatcacgggggctccggccatccggaaggtaataccccggagaaggaggtgccgagcgttatcgcccgtcatgttagtccgtacgcgtgccagcgcaagaccacgctgaataactacaacaaaaagatcaccgacgcgctggaaatcatggccgagaactacaagtttaaagagaacctgcaggcgcgcctggaggcccgtcgcgccgcgagtgtcctgaaaagcctgccgttcgaggttaccagcatgaaagacatccaaggtctgccgtgcattaccgacgacgtacgtcctgtgatcgaagagatcatcgaagtaggcgagagcagccgtgttaaagaaatcctcaatgacgagcgctacaaggcctttaagcagttcaccagcgtgttcggtgtgggcgtcaagaccgcggaaaagtggtaccgtatgggcctccgtacgctggaagaagcaaaggccagtaagagtctgaagctgaacaagatgcagaaggcgggcttcctgtactacgaggatctggcgagcggtgttagtaaagaagaagccgatgccgttctggatatcgtgaaggaaacggtgcgcactgttagtccggatgcgctggtgaccatcgccggcggtttccgccgtggcaaacctcagggccacgacgttgacctgctgatcacgattccgggccgtcctacggatccggagctgctccacaaagtggttgatctgctcaagaagcaaggtctgctgctgtacggggacatccgtgagcgtacgttcgtggaggggcaactgccaaatcctaaacctgacgttctggacaaccatcagaagtgcttcgccattctcaagctgtaccgtccgaaggtggataacagtgcggttgggacgtcgaagaaagtcgacatggctgaggttaaggattggaaagcggttcgtgtggatctggtggtcgctccagatgagcagttcgcctatgcgctgctcggttggacgggcagcggcatgtttcgtcgcgatactcgtcgctacgcggaggaagagcgcgacatgctgctcgacaaccatggtctctacgacctgaaaaagggcatctttctgagtgcggacagcgaagaagagattttcggtcatctggacctggattatctggagccgtgggaacgcaacgcg

SEQ ID NO: 5858 - protein, 394 aa, synthetic construct
  REGION 1..394: note = Variant of terminal deoxynucleotidyl transferase
MHHHHHHGGSGHPEGNTPEKEVPSVIARHVSPYACQRKTTLNNYNKKITDALEIMAENYKFKENLQARLEARRAASVLKSLPFEVTSMKDIQGLPCITDDVRPVIEEIIEVGESSRVKEILNDERYKAFKQFTSVFGVGVKTAEKWYRMGLRTLEEAKASKSLKLNKMQKAGFLYYEDLASGVSKEEADAVLDIVKETVRTVSPDALVTIAGGFRRGKPQGHDVDLLITIPGRPTDPELLHKVVDLLKKQGLLLYGDIRERTFVEGQLPNPKPDVLDNHQKCFAILKLYRPKVDNSAVGTSKKVDMAEVKDWKAVRVDLVVAPDEQFAYALLGWTGSGMFRRDTRRYAEEERDMLLDNHGLYDLKKGIFLSADSEEEIFGHLDLDYLEPWERNA

SEQ ID NO: 5859 - DNA, 1182 bp, synthetic construct
  misc_feature 1..1182: note = Variant of terminal deoxynucleotidyl transferase
  source 1..1182: mol_type = other DNA
atgcaccatcatcaccatcacgggggctccggccatccggaaggtaataccccggagaaggaggtgccgagcgttatcgcccgtcatgttagtccgtacgcgtgccagcgcaagaccacgctgaataactacaacaaaaagatcaccgacgcgctggaaatcatggccgagaactacaagtttaaagagaacctgcaggcgcgcctggaggcccgtcgcgccgcgagtgtcctgaaaagcctgccgttcgaggttaccagcatgaaagacatccaaggtctgccgtgcattaccgacgacgtacgtcctgtgatcgaagagatcatcgaagtaggcgagagcagccgtgttaaagaaatcctcaatgacgagcgctacaaggcctttaagcagttcaccagcgtgttcggtgtgggcgtcaagaccgcggaaaagtggtaccgtatgggcctccgtacgctggaagaagcaaaggccagtaagagtctgaagctgaacaagatgcagaaggcgggcttcctgtactacgaggatctggcgagcggtgttagtaaagaagaagccgatgccgttctggatatcgtgaaggaaacggtgcgcactgttagtccggatgcgctggtgaccatcgccggcggtttccgccgtggcaaacctcagggccacgacgttgacctgctgatcacgattccgggccgtcctacggatccggagctgctccacaaagtggttgatctgctcaagaagcaaggtctgctgctgtacggggacatccgtgagcgtacgttcgtggaggggcaactgccaaatcctaaacctgaccagctggacaaccatcagaagtgcttcgccattctcaagctgtaccgtccgaaggtggataacagtgcggttgggacgtcgaagaaagtcgacatggctgaggttaaggattggaaagcggttcgtgtggatctggtggtcgctccagatgagcagttcgcctatgcgctgctcggttggacgggcagcggcatgtttcgtcgcgatactcgtcgctacgcggaggaagagcgcatgatgctgctcgacaaccatggtctctacgacctgaaaaagggcatctttctgagtgcggacagcgaagaagagattttcggtcatctggacctggattatctggagccgtgggaacgcaacgcg

SEQ ID NO: 5860 - protein, 394 aa, synthetic construct
  REGION 1..394: note = Variant of terminal deoxynucleotidyl transferase
MHHHHHHGGSGHPEGNTPEKEVPSVIARHVSPYACQRKTTLNNYNKKITDALEIMAENYKFKENLQARLEARRAASVLKSLPFEVTSMKDIQGLPCITDDVRPVIEEIIEVGESSRVKEILNDERYKAFKQFTSVFGVGVKTAEKWYRMGLRTLEEAKASKSLKLNKMQKAGFLYYEDLASGVSKEEADAVLDIVKETVRTVSPDALVTIAGGFRRGKPQGHDVDLLITIPGRPTDPELLHKVVDLLKKQGLLLYGDIRERTFVEGQLPNPKPDQLDNHQKCFAILKLYRPKVDNSAVGTSKKVDMAEVKDWKAVRVDLVVAPDEQFAYALLGWTGSGMFRRDTRRYAEEERMMLLDNHGLYDLKKGIFLSADSEEEIFGHLDLDYLEPWERNA

SEQ ID NO: 5861 - DNA, 1182 bp, synthetic construct
  misc_feature 1..1182: note = Variant of terminal deoxynucleotidyl transferase
  source 1..1182: mol_type = other DNA
atgcaccatcatcaccatcacgggggctccggccatccggaaggtaataccccggagaaggaggtgccgagcgttatcgcccgtcatgttagtccgtacgcgtgccagcgcaagaccacgctgaataactacaacaaaaagatcaccgacgcgctggaaatcatggccgagaactacaagtttaaagagaacctgcaggcgcgcctggaggcccgtcgcgccgcgagtgtcctgaaaagcctgccgttcgaggttaccagcatgaaagacatccaaggtctgccgtgcattaccgacgacgtacgtcctgtgatcgaagagatcatcgaagtaggcgagagcagccgtgttaaagaaatcctcaatgacgagcgctacaaggcctttaagcagttcaccagcgtgttcggtgtgggcgtcaagaccgcggaaaagtggtaccgtatgggcctccgtacgctggaagaagcaaaggccagtaagagtctgaagctgaacaagatgcagaaggcgggcttcctgtactacgaggatctggcgagcggtgttagtaaagaagaagccgatgccgttctggatatcgtgaaggaaacggtgcgcactgttagtccggatgcgctggtgaccatcgccggcggtttccgccgtggcaaacctcagggccacgacgttgacctgctgatcacgattccgggccgtcctacggatccggagctgctccacaaagtggttgatctgctcaagaagcaaggtctgctgctgtacggggacatccgtgagcgtacgttcgtggaggggcaactgccaaatcctaaacctgaccagctggacaaccatcagaagtgcttcgccattctcaagctgtaccgtccgaaggtggataacagtgcggttgggacgtcgaagaaagtcgacatggctgaggttaaggattggaaagcggttcgtgtggatctggtggtcgctccagataatcagttcgcctatgcgctgctcggttggacgggcagcggcatgtttcgtcgcgatactcgtcgctacgcggaggaagagcgcgacatgctgctcgacaaccatggtctctacgacctgaaaaagggcatctttctgagtgcggacagcgaagaagagattttcggtcatctggacctggattatctggagccgtgggaacgcaacgcg

SEQ ID NO: 5862 - protein, 394 aa, synthetic construct
  REGION 1..394: note = Variant of terminal deoxynucleotidyl transferase
MHHHHHHGGSGHPEGNTPEKEVPSVIARHVSPYACQRKTTLNNYNKKITDALEIMAENYKFKENLQARLEARRAASVLKSLPFEVTSMKDIQGLPCITDDVRPVIEEIIEVGESSRVKEILNDERYKAFKQFTSVFGVGVKTAEKWYRMGLRTLEEAKASKSLKLNKMQKAGFLYYEDLASGVSKEEADAVLDIVKETVRTVSPDALVTIAGGFRRGKPQGHDVDLLITIPGRPTDPELLHKVVDLLKKQGLLLYGDIRERTFVEGQLPNPKPDQLDNHQKCFAILKLYRPKVDNSAVGTSKKVDMAEVKDWKAVRVDLVVAPDNQFAYALLGWTGSGMFRRDTRRYAEEERDMLLDNHGLYDLKKGIFLSADSEEEIFGHLDLDYLEPWERNA

SEQ ID NO: 5863 - DNA, 1182 bp, synthetic construct
  misc_feature 1..1182: note = Variant of terminal deoxynucleotidyl transferase
  source 1..1182: mol_type = other DNA
atgcaccatcatcaccatcacgggggctccggccatccggaaggtaataccccggagaaggaggtgccgagcgttatcgcccgtcatgttagtccgtacgcgtgccagcgcaagaccacgctgaataactacaacaaaaagatcaccgacgcgctggaaatcatggccgagaactacaagtttaaagagaacctgcaggcgcgcctggaggcccgtcgcgccgcgagtgtcctgaaaagcctgccgttcgaggttaccagcatgaaagacatccaaggtctgccgtgcattaccgacgacgtacgtcctgtgatcgaagagatcatcgaagtaggcgagagcagccgtgttaaagaaatcctcaatgacgagcgctacaaggcctttaagcagttcaccagcgtgttcggtgtgggcgtcaagaccgcggaaaagtggtaccgtatgggcctccgtacgctggaagaagcaaaggccagtaagagtctgaagctgaacaagatgcagaaggcgggcttcctgtactacgaggatctggcgagcggtgttagtaaagaagaagccgatgccgttctggatatcgtgaaggaaacggtgcgcactgttagtccggatgcgctggtgaccatcgccggcggtttccgccgtggcaaacctcagggccacgacgttgacctgctgatcacgattccgggccgtcctacggatccggagctgctccacaaagtggttgatctgctcaagaagcaaggtctgctgctgtacggggacatccgtgagcgtacgttcgtggaggggcaactgccaaatcctaaacctgaccagctggacaaccatcagaagtgcttcgccattctcaagctgtaccgtccgaaggtggataacagtgcggttgggacgtcgaagaaagtcgacatggctgaggttaaggattggaaagcggttcgtgtggatctggtggtcgctccagatgagcagttcgcctatgcgctgctcggttggacgggcagcggcatgtttcgtcgcgatactcgtcgctacgcggagcaggagcgcgacatgctgctcgacaaccatggtctctacgacctgaaaaagggcatctttctgagtgcggacagcgaagaagagattttcggtcatctggacctggattatctggagccgtgggaacgcaacgcg

SEQ ID NO: 5864 - protein, 394 aa, synthetic construct
  REGION 1..394: note = Variant of terminal deoxynucleotidyl transferase
MHHHHHHGGSGHPEGNTPEKEVPSVIARHVSPYACQRKTTLNNYNKKITDALEIMAENYKFKENLQARLEARRAASVLKSLPFEVTSMKDIQGLPCITDDVRPVIEEIIEVGESSRVKEILNDERYKAFKQFTSVFGVGVKTAEKWYRMGLRTLEEAKASKSLKLNKMQKAGFLYYEDLASGVSKEEADAVLDIVKETVRTVSPDALVTIAGGFRRGKPQGHDVDLLITIPGRPTDPELLHKVVDLLKKQGLLLYGDIRERTFVEGQLPNPKPDQLDNHQKCFAILKLYRPKVDNSAVGTSKKVDMAEVKDWKAVRVDLVVAPDEQFAYALLGWTGSGMFRRDTRRYAEQERDMLLDNHGLYDLKKGIFLSADSEEEIFGHLDLDYLEPWERNA

SEQ ID NO: 5865 - DNA, 1182 bp, synthetic construct
  misc_feature 1..1182: note = Variant of terminal deoxynucleotidyl transferase
  source 1..1182: mol_type = other DNA
atgcaccatcatcaccatcacgggggctccggccatccggaaggtaataccccggagaaggaggtgccgagcgttatcgcccgtcatgttagtccgtacgcgtgccagcgcaagaccacgctgaataactacaacaaaaagatcaccgacgcgctggaaatcatggccgagaactacaagtttaaagagaacctgcaggcgcgcctggaggcccgtcgcgccgcgagtgtcctgaaaagcctgccgttcgaggttaccagcatgaaagacatccaaggtctgccgtgcattaccgacgacgtacgtcctgtgatcgaagagatcatcgaagtaggcgagagcagccgtgttaaagaaatcctcaatgacgagcgctacaaggcctttaagcagttcaccagcgtgttcggtgtgggcgtcaagaccgcggaaaagtggtaccgtatgggcctccgtacgctggaagaagcaaaggccagtaagagtctgaagctgaacaagatgcagaaggcgggcttcctgtactacgaggatctggcgagcggtgttagtaaagaagaagccgatgccgttctggatatcgtgaaggaaacggtgcgcactgttagtccggatgcgctggtgaccatcgccggcggtttccgccgtggcaaacctcagggccacgacgttgacctgctgatcacgattccgggccgtcctacggatccggagctgctccacaaagtggttgatctgctcaagaagcaaggtctgctgctgtacggggacatccgtgagcgtacgttcgtggaggggcaactgccaaatcctaaacctgaccagctggacaaccatcagaagtgcttcgccattctcaagctgtaccgtccgaaggtggataacagtgcggttgggacgtcgaagaaagtcgacatggctgaggttaaggattggaaagcggttcgtgtggatctggtggtcgctccagatgagcagttcgcctatgcgctgctcggttggacgggcagcggcttttttcgtcgcgatactcgtcgctacgcggaggaagagcgcgacatgctgctcgacaaccatggtctctacgacctgaaaaagggcatctttctgagtgcggacagcgaagaagagattttcggtcatctggacctggattatctggagccgtgggaacgcaacgcg

SEQ ID NO: 5866 - protein, 394 aa, synthetic construct
  REGION 1..394: note = Variant of terminal deoxynucleotidyl transferase
MHHHHHHGGSGHPEGNTPEKEVPSVIARHVSPYACQRKTTLNNYNKKITDALEIMAENYKFKENLQARLEARRAASVLKSLPFEVTSMKDIQGLPCITDDVRPVIEEIIEVGESSRVKEILNDERYKAFKQFTSVFGVGVKTAEKWYRMGLRTLEEAKASKSLKLNKMQKAGFLYYEDLASGVSKEEADAVLDIVKETVRTVSPDALVTIAGGFRRGKPQGHDVDLLITIPGRPTDPELLHKVVDLLKKQGLLLYGDIRERTFVEGQLPNPKPDQLDNHQKCFAILKLYRPKVDNSAVGTSKKVDMAEVKDWKAVRVDLVVAPDEQFAYALLGWTGSGFFRRDTRRYAEEERDMLLDNHGLYDLKKGIFLSADSEEEIFGHLDLDYLEPWERNA

SEQ ID NO: 5867 - DNA, 1182 bp, synthetic construct
  misc_feature 1..1182: note = Variant of terminal deoxynucleotidyl transferase
  source 1..1182: mol_type = other DNA
atgcaccatcatcaccatcacgggggctccggccatccggaaggtaataccccggagaaggaggtgccgagcgttatcgcccgtcatgttagtccgtacgcgtgccagcgcaagaccacgctgaataactacaacaaaaagatcaccgacgcgctggaaatcatggccgagaactacaagtttaaagagaacctgcaggcgcgcctggaggcccgtcgcgccgcgagtgtcctgaaaagcctgccgttcgaggttaccagcatgaaagacatccaaggtctgccgtgcattaccgacgacgtacgtcctgtgatcgaagagatcatcgaagtaggcgagagcagccgtgttaaagaaatcctcaatgacgagcgctacaaggcctttaagcagttcaccagcgtgttcggtgtgggcgtcaagaccgcggaaaagtggtaccgtatgggcctccgtacgctggaagaagcaaaggccagtaagagtctgaagctgaacaagatgcagaaggcgggcttcctgtactacgaggatctggcgagcggtgttagtaaagaagaagccgatgccgttctggatatcgtgaaggaaacggtgcgcactgttagtccggatgcgctggtgaccatcgccggcggtttccgccgtggcaaacctcagggccacgacgttgacatgctgatcacgattccgggccgtcctacggatccggagctgctccacaaagtggttgatctgctcaagaagcaaggtctgctgctgtacggggacatccgtgagcgtacgttcgtggaggggcaactgccaaatcctaaacctgaccagctggacaaccatcagaagtgcttcgccattctcaagctgtaccgtccgaaggtggataacagtgcggttgggacgtcgaagaaagtcgacatggctgaggttaaggattggaaagcggttcgtgtggatctggtggtcgctccagatgagcagttcgcctatgcgctgctcggttggacgggcagcggcatgtttcgtcgcgatactcgtcgctacgcggaggaagagcgcgacatgctgctcgacaaccatggtctctacgacctgaaaaagggcatctttctgagtgcggacagcgaagaagagattttcggtcatctggacctggattatctggagccgtgggaacgcaacgcg

SEQ ID NO: 5868 - protein, 394 aa, synthetic construct
  REGION 1..394: note = Variant of terminal deoxynucleotidyl transferase
MHHHHHHGGSGHPEGNTPEKEVPSVIARHVSPYACQRKTTLNNYNKKITDALEIMAENYKFKENLQARLEARRAASVLKSLPFEVTSMKDIQGLPCITDDVRPVIEEIIEVGESSRVKEILNDERYKAFKQFTSVFGVGVKTAEKWYRMGLRTLEEAKASKSLKLNKMQKAGFLYYEDLASGVSKEEADAVLDIVKETVRTVSPDALVTIAGGFRRGKPQGHDVDMLITIPGRPTDPELLHKVVDLLKKQGLLLYGDIRERTFVEGQLPNPKPDQLDNHQKCFAILKLYRPKVDNSAVGTSKKVDMAEVKDWKAVRVDLVVAPDEQFAYALLGWTGSGMFRRDTRRYAEEERDMLLDNHGLYDLKKGIFLSADSEEEIFGHLDLDYLEPWERNA

SEQ ID NO: 5869 - DNA, 1182 bp, synthetic construct
  misc_feature 1..1182: note = Variant of terminal deoxynucleotidyl transferase
  source 1..1182: mol_type = other DNA
atgcaccatcatcaccatcacgggggctccggccatccggaaggtaataccccggagaaggaggtgccgagcgttatcgcccgtcatgttagtccgtacgcgtgccagcgcaagaccacgctgaataactacaacaaaaagatcaccgacgcgctggaaatcatggccgagaactacaagtttaaagagaacctgcaggcgcgcctggaggcccgtcgcgccgcgagtgtcctgaaaagcctgccgttcgaggttaccagcatgaaagacatccaaggtctgccgtgcattaccgacgacgtacgtcctgtgatcgaagagatcatcgaagtaggcgagagcagccgtgttaaagaaatcctcaatgacgagcgctacaaggcctttaagcagttcaccagcgtgttcggtgtgggcgtcaagaccgcggaaaagtggtaccgtatgggcctccgtacgctggaagaagcaaaggccagtaagagtctgaagctgaacaagatgcagaaggcgggcttcctgtactacgaggatctggcgagcggtgttagtaaagaagaagccgatgccgttctggatatcgtgaaggaaacggtgcgcactgttagtccggatgcgctggtgaccatcgccggcggtttccgccgtggcaaacctcagggccacgacgttgacctgctgatcacgattccgggccgtcctacggatccggagaagctccacaaagtggttgatctgctcaagaagcaaggtctgctgctgtacggggacatccgtgagcgtacgttcgtggaggggcaactgccaaatcctaaacctgaccagctggacaaccatcagaagtgcttcgccattctcaagctgtaccgtccgaaggtggataacagtgcggttgggacgtcgaagaaagtcgacatggctgaggttaaggattggaaagcggttcgtgtggatctggtggtcgctccagatgagcagttcgcctatgcgctgctcggttggacgggcagcggcatgtttcgtcgcgatactcgtcgctacgcggaggaagagcgcgacatgctgctcgacaaccatggtctctacgacctgaaaaagggcatctttctgagtgcggacagcgaagaagagattttcggtcatctggacctggattatctggagccgtgggaacgcaacgcg

SEQ ID NO: 5870 - protein, 394 aa, synthetic construct
  REGION 1..394: note = Variant of terminal deoxynucleotidyl transferase
MHHHHHHGGSGHPEGNTPEKEVPSVIARHVSPYACQRKTTLNNYNKKITDALEIMAENYKFKENLQARLEARRAASVLKSLPFEVTSMKDIQGLPCITDDVRPVIEEIIEVGESSRVKEILNDERYKAFKQFTSVFGVGVKTAEKWYRMGLRTLEEAKASKSLKLNKMQKAGFLYYEDLASGVSKEEADAVLDIVKETVRTVSPDALVTIAGGFRRGKPQGHDVDLLITIPGRPTDPEKLHKVVDLLKKQGLLLYGDIRERTFVEGQLPNPKPDQLDNHQKCFAILKLYRPKVDNSAVGTSKKVDMAEVKDWKAVRVDLVVAPDEQFAYALLGWTGSGMFRRDTRRYAEEERDMLLDNHGLYDLKKGIFLSADSEEEIFGHLDLDYLEPWERNA

SEQ ID NO: 5871 - DNA, 1182 bp, synthetic construct
  misc_feature 1..1182: note = Variant of terminal deoxynucleotidyl transferase
  source 1..1182: mol_type = other DNA
atgcaccatcatcaccatcacgggggctccggccatccggaaggtaataccccggagaaggaggtgccgagcgttatcgcccgtcatgttagtccgtacgcgtgccagcgcaagaccacgctgaataactacaacaaaaagatcaccgacgcgctggaaatcatggccgagaactacaagtttaaagagaacctgcaggcgcgcctggaggcccgtcgcgccgcgagtgtcctgaaaagcctgccgttcgaggttaccagcatgaaagacatccaaggtctgccgtgcattaccgacgacgtacgtcctgtgatcgaagagatcatcgaagtaggcgagagcagccgtgttaaagaaatcctcaatgacgagcgctacaaggcctttaagcagttcaccagcgtgttcggtgtgggcgtcaagaccgcggaaaagtggtaccgtatgggcctccgtacgctggaagaagcaaaggccagtaagagtctgaagctgaacaagatgcagaaggcgggcttcctgtactacgaggatctggcgagcggtgttagtaaagaagaagccgatgccgttctggatatcgtgaaggaaacggtgcgcactgttagtccggatgcgctggtgaccatcgccggcggtttccgccgtggcaaacctcagggccacgacgttgacacgctgatcacgattccgggccgtcctacggatccggagctgctccacaaagtggttgatctgctcaagaagcaaggtctgctgctgtacggggacatccgtgagcgtacgttcgtggaggggcaactgccaaatcctaaacctgaccagctggacaaccatcagaagtgcttcgccattctcaagctgtaccgtccgaaggtggataacagtgcggttgggacgtcgaagaaagtcgacatggctgaggttaaggattggaaagcggttcgtgtggatctggtggtcgctccagatgagcagttcgcctatgcgctgctcggttggacgggcagcggcatgtttcgtcgcgatactcgtcgctacgcggaggaagagcgcgacatgctgctcgacaaccatggtctctacgacctgaaaaagggcatctttctgagtgcggacagcgaagaagagattttcggtcatctggacctggattatctggagccgtgggaacgcaacgcg

SEQ ID NO: 5872 - protein, 394 aa, synthetic construct
  REGION 1..394: note = Variant of terminal deoxynucleotidyl transferase
MHHHHHHGGSGHPEGNTPEKEVPSVIARHVSPYACQRKTTLNNYNKKITDALEIMAENYKFKENLQARLEARRAASVLKSLPFEVTSMKDIQGLPCITDDVRPVIEEIIEVGESSRVKEILNDERYKAFKQFTSVFGVGVKTAEKWYRMGLRTLEEAKASKSLKLNKMQKAGFLYYEDLASGVSKEEADAVLDIVKETVRTVSPDALVTIAGGFRRGKPQGHDVDTLITIPGRPTDPELLHKVVDLLKKQGLLLYGDIRERTFVEGQLPNPKPDQLDNHQKCFAILKLYRPKVDNSAVGTSKKVDMAEVKDWKAVRVDLVVAPDEQFAYALLGWTGSGMFRRDTRRYAEEERDMLLDNHGLYDLKKGIFLSADSEEEIFGHLDLDYLEPWERNA

SEQ ID NO: 5873 - DNA, 1182 bp, synthetic construct
  misc_feature 1..1182: note = Variant of terminal deoxynucleotidyl transferase
  source 1..1182: mol_type = other DNA
atgcaccatcatcaccatcacgggggctccggccatccggaaggtaataccccggagaaggaggtgccgagcgttatcgcccgtcatgttagtccgtacgcgtgccagcgcaagaccacgctgaataactacaacaaaaagatcaccgacgcgctggaaatcatggccgagaactacaagtttaaagagaacctgcaggcgcgcctggaggcccgtcgcgccgcgagtgtcctgaaaagcctgccgttcgaggttaccagcatgaaagacatccaaggtctgccgtgcattaccgacgacgtacgtcctgtgatcgaagagatcatcgaagtaggcgagagcagccgtgttaaagaaatcctcaatgacgagcgctacaaggcctttaagcagttcaccagcgtgttcggtgtgggcgtcaagaccgcggaaaagtggtaccgtatgggcctccgtacgctggaagaagcaaaggccagtaagagtctgaagctgaacaagatgcagaaggcgggcttcctgtactacgaggatctggcgagcggtgttagtaaagaagaagccgatgccgttctggatatcgtgaaggaaacggtgcgcactgttagtccggatgcgctggtgaccatcgccggcggtttccgccgtggcaaacctcagggccacgacgttgacctgctgatcacgattccgggccgtcctacggatccggagctgctccacaaagtggttgatctgctcaagaagcaaggtctgctgctgtacggggacatccgtgagcgtacgttcgtggaggggcaactgccaaatcctaaacctgaccagctggacaaccatcagaagtgcttcgccattctcaagctgtaccgtccgaaggtggataacagtgcggttgggacgtcgaagaaagtcgacatggctgaggttaaggattggaaagcggttcgtgtggatctggtggtcgctccagatgagcagttcgcctatgcgctgctcggttggacgggcagcggcatgtttcgtcgcgatactcgtcgctacgcggaggaagagcgcgacatgctgctcgacaaccatggtctctacgacctgaaaaagggcatctttctgagtgcggacagcgaagaagagattttctctcatctggacctggattatctggagccgtgggaacgcaacgcg

SEQ ID NO: 5874 - protein, 394 aa, synthetic construct
  REGION 1..394: note = Variant of terminal deoxynucleotidyl transferase
MHHHHHHGGSGHPEGNTPEKEVPSVIARHVSPYACQRKTTLNNYNKKITDALEIMAENYKFKENLQARLEARRAASVLKSLPFEVTSMKDIQGLPCITDDVRPVIEEIIEVGESSRVKEILNDERYKAFKQFTSVFGVGVKTAEKWYRMGLRTLEEAKASKSLKLNKMQKAGFLYYEDLASGVSKEEADAVLDIVKETVRTVSPDALVTIAGGFRRGKPQGHDVDLLITIPGRPTDPELLHKVVDLLKKQGLLLYGDIRERTFVEGQLPNPKPDQLDNHQKCFAILKLYRPKVDNSAVGTSKKVDMAEVKDWKAVRVDLVVAPDEQFAYALLGWTGSGMFRRDTRRYAEEERDMLLDNHGLYDLKKGIFLSADSEEEIFSHLDLDYLEPWERNA

SEQ ID NO: 5875 - DNA, 1182 bp, synthetic construct
  misc_feature 1..1182: note = Variant of terminal deoxynucleotidyl transferase
  source 1..1182: mol_type = other DNA
atgcaccatcatcaccatcacgggggctccggccatccggaaggtaataccccggagaaggaggtgccgagcgttatcgcccgtcatgttagtccgtacgcgtgccagcgcaagaccacgctgaataactacaacaaaaagatcaccgacgcgctggaaatcatggccgagaactacaagtttaaagagaacctgcaggcgcgcctggaggcccgtcgcgccgcgagtgtcctgaaaagcctgccgttcgaggttaccagcatgaaagacatccaaggtctgccgtgcattaccgacgacgtacgtcctgtgatcgaagagatcatcgaagtaggcgagagcagccgtgttaaagaaatcctcaatgacgagcgctacaaggcctttaagcagttcaccagcgtgttcggtgtgggcgtcaagaccgcggaaaagtggtaccgtatgggcctccgtacgctggaagaagcaaaggccagtaagagtctgaagctgaacaagatgcagaaggcgggcttcctgtactacgaggatctggcgagcggtgttagtaaagaagaagccgatgccgttctggatatcgtgaaggaaacggtgcgcactgttagtccggatgcgctggtgaccatcgccggcggtttccgccgtggcaaacctcagggccacgacgttgacctgctgatcacgattccgggccgtcctacggatccggagctgctccacaaagtggttgatctgctcaagaagcaaggtctgctgctgtacggggacatccgtgagcgtacgttcgtggaggggcaactgccaaatcctaaacctgaccagctggacaaccatcagaagtgcttcgccattctcaagctgtaccgtccgaaggtggataacagtgcggttgggacgtcgaagaaagtcgacatggctgaggttaaggattggaaagcggttcgtgtggatctggtggtcgctccagatgagcagttcgcctatgcgctgctcggttggacgggcagcggcatgtttcgtcgcgatactcgtcgctacgcggaggaagagcgcgacatgctgctcgacaaccatggtctctacgacgtgaaaaagggcatctttctgagtgcggacagcgaagaagagattttcggtcatctggacctggattatctggagccgtgggaacgcaacgcg

SEQ ID NO: 5876 - protein, 394 aa, synthetic construct
  REGION 1..394: note = Variant of terminal deoxynucleotidyl transferase
MHHHHHHGGSGHPEGNTPEKEVPSVIARHVSPYACQRKTTLNNYNKKITDALEIMAENYKFKENLQARLEARRAASVLKSLPFEVTSMKDIQGLPCITDDVRPVIEEIIEVGESSRVKEILNDERYKAFKQFTSVFGVGVKTAEKWYRMGLRTLEEAKASKSLKLNKMQKAGFLYYEDLASGVSKEEADAVLDIVKETVRTVSPDALVTIAGGFRRGKPQGHDVDLLITIPGRPTDPELLHKVVDLLKKQGLLLYGDIRERTFVEGQLPNPKPDQLDNHQKCFAILKLYRPKVDNSAVGTSKKVDMAEVKDWKAVRVDLVVAPDEQFAYALLGWTGSGMFRRDTRRYAEEERDMLLDNHGLYDVKKGIFLSADSEEEIFGHLDLDYLEPWERNA

SEQ ID NO: 5877 - DNA, 1182 bp, synthetic construct
  misc_feature 1..1182: note = Variant of terminal deoxynucleotidyl transferase
  source 1..1182: mol_type = other DNA
atgcaccatcatcaccatcacgggggctccggccatccggaaggtaataccccggagaaggaggtgccgagcgttatcgcccgtcatgttagtccgtacgcgtgccagcgcaagaccacgctgaataactacaacaaaaagatcaccgacgcgctggaaatcatggccgagaactacaagtttaaagagaacctgcaggcgcgcctggaggcccgtcgcgccgcgagtgtcctgaaaagcctgccgttcgaggttaccagcatgaaagacatccaaggtctgccgtgcattaccgacgacgtacgtcctgtgatcgaagagatcatcgaagtaggcgagagcagccgtgttaaagaaatcctcaatgacgagcgctacaaggcctttaagcagttcaccagcgtgttcggtgtgggcgtcaagaccgcggaaaagtggtaccgtatgggcctccgtacgctggaagaagcaaaggccagtaagagtctgaagctgaacaagatgcagaaggcgggcttcctgtactacgaggatctggcgagcggtgttagtaaagaagaagccgatgccgttctggatatcgtgaaggaaacggtgcgcactgttagtccggatgcgctggtgaccatcgccggcggtttccgccgtggcaaacctcagggccacgacgttgacagtctgatcacgattccgggccgtcccacggatccggagctgctccacaaagtggttgatctgctcaagaagcaaggtctgctgctgtacggggacatccgtgagcgtacgttcgtggaggggcaactgccaaatcctaaacctgaccagctggacaaccatcagaagtgcttcgccattctcaagctgtaccgtccgaaggtggataacagtgcggttgggacgtcgaagaaagtcgacatggctgaggttaaggattggaaagcggttcgtgtggatctggtggtcgctccagatgagcagttcgcctatgcgctgctcggttggacgggcagcggcatgtttcgtcgcgatactcgtcgctacgcggaggaagagcgcgacatgctgctcgacaaccatggtctctacgacctgaaaaagggcatctttctgagtgcggacagcgaagaagagattttcggtcatctggacctggattatctggagccgtgggaacgcaacgcg

SEQ ID NO: 5878 - protein, 394 aa, synthetic construct
  REGION 1..394: note = Variant of terminal deoxynucleotidyl transferase
MHHHHHHGGSGHPEGNTPEKEVPSVIARHVSPYACQRKTTLNNYNKKITDALEIMAENYKFKENLQARLEARRAASVLKSLPFEVTSMKDIQGLPCITDDVRPVIEEIIEVGESSRVKEILNDERYKAFKQFTSVFGVGVKTAEKWYRMGLRTLEEAKASKSLKLNKMQKAGFLYYEDLASGVSKEEADAVLDIVKETVRTVSPDALVTIAGGFRRGKPQGHDVDSLITIPGRPTDPELLHKVVDLLKKQGLLLYGDIRERTFVEGQLPNPKPDQLDNHQKCFAILKLYRPKVDNSAVGTSKKVDMAEVKDWKAVRVDLVVAPDEQFAYALLGWTGSGMFRRDTRRYAEEERDMLLDNHGLYDLKKGIFLSADSEEEIFGHLDLDYLEPWERNA

SEQ ID NO: 5879 - DNA, 1182 bp, synthetic construct
  misc_feature 1..1182: note = Variant of terminal deoxynucleotidyl transferase
  source 1..1182: mol_type = other DNA
atgcaccatcatcaccatcacgggggctccggccatccggaaggtaataccccggagaaggaggtgccgagcgttatcgcccgtcatgttagtccgtacgcgtgccagcgcaagaccacgctgaataactacaacaaaaagatcaccgacgcgctggaaatcatggccgagaactacaagtttaaagagaacctgcaggcgcgcctggaggcccgtcgcgccgcgagtgtcctgaaaagcctgccgttcgaggttaccagcatgaaagacatccaaggtctgccgtgcattaccgacgacgtacgtcctgtgatcgaagagatcatcgaagtaggcgagagcagccgtgttaaagaaatcctcaatgacgagcgctacaaggcctttaagcagttcaccagcgtgttcggtgtgggcgtcaagaccgcggaaaagtggtaccgtatgggcctccgtacgctggaagaagcaaaggccagtaagagtctgaagctgaacaagatgcagaaggcgggcttcctgtactacgaggatctggcgagcggtgttagtaaagaagaagccgatgccgttctggatatcgtgaaggaaacggtgcgcactgttagtccggatgcgctggtgaccatcgccggcggtttccgccgtggcaaacctcagggccacgacgttgacctgctgatcacgattccgggccgtcctacggatccggagctgctccacaaagtggttgatctgctcaagaagcaaggtctgctgctgtacggggacatccgtgagcgtacgttcgtggaggggcaactgccaaatcctaaacctgaccagctggacaaccatcagaagtgcttcgccattctcaagctgtaccgtccgaaggtggataacagtgcggttgggacgtcgaagaaagtcgacatggctgaggttaaggattggaaagcggttcgtgtggatctggtggtcgctccagatgagcagttcgcctatgcgctgctcggttggacgggcagcggcggttttcgtcgcgatactcgtcgctacgcggaggaagagcgcgacatgctgctcgacaaccatggtctctacgacctgaaaaagggcatctttctgagtgcggacagcgaagaagagattttcggtcatctggacctggattatctggagccgtgggaacgcaacgcg

SEQ ID NO: 5880 - protein, 394 aa, synthetic construct
  REGION 1..394: note = Variant of terminal deoxynucleotidyl transferase
MHHHHHHGGSGHPEGNTPEKEVPSVIARHVSPYACQRKTTLNNYNKKITDALEIMAENYKFKENLQARLEARRAASVLKSLPFEVTSMKDIQGLPCITDDVRPVIEEIIEVGESSRVKEILNDERYKAFKQFTSVFGVGVKTAEKWYRMGLRTLEEAKASKSLKLNKMQKAGFLYYEDLASGVSKEEADAVLDIVKETVRTVSPDALVTIAGGFRRGKPQGHDVDLLITIPGRPTDPELLHKVVDLLKKQGLLLYGDIRERTFVEGQLPNPKPDQLDNHQKCFAILKLYRPKVDNSAVGTSKKVDMAEVKDWKAVRVDLVVAPDEQFAYALLGWTGSGGFRRDTRRYAEEERDMLLDNHGLYDLKKGIFLSADSEEEIFGHLDLDYLEPWERNA

SEQ ID NO: 5881 - DNA, 1182 bp, synthetic construct
  misc_feature 1..1182: note = Variant of terminal deoxynucleotidyl transferase
  source 1..1182: mol_type = other DNA
atgcaccatcatcaccatcacgggggctccggccatccggaaggtaataccccggagaaggaggtgccgagcgttatcgcccgtcatgttagtccgtacgcgtgccagcgcaagaccacgctgaataactacaacaaaaagatcaccgacgcgctggaaatcatggccgagaactacaagtttaaagagaacctgcaggcgcgcctggaggcccgtcgcgccgcgagtgtcctgaaaagcctgccgttcgaggttaccagcatgaaagacatccaaggtctgccgtgcattaccgacgacgtacgtcctgtgatcgaagagatcatcgaagtaggcgagagcagccgtgttaaagaaatcctcaatgacgagcgctacaaggcctttaagcagttcaccagcgtgttcggtgtgggcgtcaagaccgcggaaaagtggtaccgtatgggcctccgtacgctggaagaagcaaaggccagtaagagtctgaagctgaacaagatgcagaaggcgggcttcctgtactacgaggatctggcgagcggtgttagtaaagaagaagccgatgccgttctggatatcgtgaaggaaacggtgcgcactgttagtccggatgcgctggtgaccatcgccggcggtttccgccgtggcaaacctcagggccacgacgttgacctgctgatcacgattccgggccgtcctacggatccggagctgctccacaaagtggttgatctgctcaagaagcaaggtctgctgctgtacggggacatccgtgagcgtacgttcgtggaggggcaactgccaaatcctaaacctgaccagctggacaaccatcagaagtgcttcgccattctcaagctgtaccgtccgaaggtggataacagtgcggttgggacgtcgaagaaagtcgacatggctgaggttaaggattggaaagcggttcgtgtggatctggtggtcgctccagatgagcagttcgcctatgcgctgctcggttggacgggcagcggcatgtttcgtcgcgatactcgtcgctacgcggaggaagagcgcgacatgctgctcgacaaccatggtctctacgacctgaaaaagggcatctttctgagtgcggacagcgaagaagagattttcggtcatctggacgttgattatctggagccgtgggaacgcaacgcg

SEQ ID NO: 5882 - protein, 394 aa, synthetic construct
  REGION 1..394: note = Variant of terminal deoxynucleotidyl transferase
MHHHHHHGGSGHPEGNTPEKEVPSVIARHVSPYACQRKTTLNNYNKKITDALEIMAENYKFKENLQARLEARRAASVLKSLPFEVTSMKDIQGLPCITDDVRPVIEEIIEVGESSRVKEILNDERYKAFKQFTSVFGVGVKTAEKWYRMGLRTLEEAKASKSLKLNKMQKAGFLYYEDLASGVSKEEADAVLDIVKETVRTVSPDALVTIAGGFRRGKPQGHDVDLLITIPGRPTDPELLHKVVDLLKKQGLLLYGDIRERTFVEGQLPNPKPDQLDNHQKCFAILKLYRPKVDNSAVGTSKKVDMAEVKDWKAVRVDLVVAPDEQFAYALLGWTGSGMFRRDTRRYAEEERDMLLDNHGLYDLKKGIFLSADSEEEIFGHLDVDYLEPWERNA

SEQ ID NO: 5883 - DNA, 1182 bp, synthetic construct
  misc_feature 1..1182: note = Variant of terminal deoxynucleotidyl transferase
  source 1..1182: mol_type = other DNA
atgcaccatcatcaccatcacgggggctccggccatccggaaggtaataccccggagaaggaggtgccgagcgttatcgcccgtcatgttagtccgtacgcgtgccagcgcaagaccacgctgaataactacaacaaaaagatcaccgacgcgctggaaatcatggccgagaactacaagtttaaagagaacctgcaggcgcgcctggaggcccgtcgcgccgcgagtgtcctgaaaagcctgccgttcgaggttaccagcatgaaagacatccaaggtctgccgtgcattaccgacgacgtacgtcctgtgatcgaagagatcatcgaagtaggcgagagcagccgtgttaaagaaatcctcaatgacgagcgctacaaggcctttaagcagttcaccagcgtgttcggtgtgggcgtcaagaccgcggaaaagtggtaccgtatgggcctccgtacgctggaagaagcaaaggccagtaagagtctgaagctgaacaagatgcagaaggcgggcttcctgtactacgaggatctggcgagcggtgttagtaaagaagaagccgatgccgttctggatatcgtgaaggaaacggtgcgcactgttagtccggatgcgctggtgaccatcgccggcggtttccgccgtggcaaacctcagggccacgacgttgacctgctgatcacgattccgggccgtcctacggatccggagctgctccacaaagtggttgatctgctcaagaagcaaggtctgctgctgtacggggacatccgtgagcgtacgttcgtggaggggcaactgccaaatcctaaacctgaccagctggacaaccatcagaagtgcttcgccattctcaagctgtaccgtccgaaggtggataacagtgcggttgggacgtcgaagaaagtcgacatggctgaggttaaggattggaaagcggttcgtgtggatctggtggtcgctccagatgagcagttcgcctatgcgctgctcggttggacgggcagcggcatgtttcgtcgcgatactcgtcgctacgcggaggaaacgcgcgacatgctgctcgacaaccatggtctctacgacctgaaaaagggcatctttctgagtgcggacagcgaagaagagattttcggtcatctggacctggattatctggagccgtgggaacgcaacgcg

SEQ ID NO: 5884 - protein, 394 aa, synthetic construct
  REGION 1..394: note = Variant of terminal deoxynucleotidyl transferase
MHHHHHHGGSGHPEGNTPEKEVPSVIARHVSPYACQRKTTLNNYNKKITDALEIMAENYKFKENLQARLEARRAASVLKSLPFEVTSMKDIQGLPCITDDVRPVIEEIIEVGESSRVKEILNDERYKAFKQFTSVFGVGVKTAEKWYRMGLRTLEEAKASKSLKLNKMQKAGFLYYEDLASGVSKEEADAVLDIVKETVRTVSPDALVTIAGGFRRGKPQGHDVDLLITIPGRPTDPELLHKVVDLLKKQGLLLYGDIRERTFVEGQLPNPKPDQLDNHQKCFAILKLYRPKVDNSAVGTSKKVDMAEVKDWKAVRVDLVVAPDEQFAYALLGWTGSGMFRRDTRRYAEETRDMLLDNHGLYDLKKGIFLSADSEEEIFGHLDLDYLEPWERNA

SEQ ID NO: 5885 - DNA, 1182 bp, synthetic construct
  misc_feature 1..1182: note = Variant of terminal deoxynucleotidyl transferase
  source 1..1182: mol_type = other DNA
atgcaccatcatcaccatcacgggggctccggccatccggaaggtaataccccggagaaggaggtgccgagcgttatcgcccgtcatgttagtccgtacgcgtgccagcgcaagaccacgctgaataactacaacaaaaagatcaccgacgcgctggaaatcatggccgagaactacaagtttaaagagaacctgcaggcgcgcctggaggcccgtcgcgccgcgagtgtcctgaaaagcctgccgttcgaggttaccagcatgaaagacatccaaggtctgccgtgcattaccgacgacgtacgtcctgtgatcgaagagatcatcgaagtaggcgagagcagccgtgttaaagaaatcctcaatgacgagcgctacaaggcctttaagcagttcaccagcgtgttcggtgtgggcgtcaagaccgcggaaaagtggtaccgtatgggcctccgtacgctggaagaagcaaaggccagtaagagtctgaagctgaacaagatgcagaaggcgggcttcctgtactacgaggatctggcgagcggtgttagtaaagaagaagccgatgccgttctggatatcgtgaaggaaacggtgcgcactgttagtccggatgcgctggtgaccatcgccggcggtttccgccgtggcaaacctcagggccacgacgttgacctgctgatcacgattccgggccgtcctacggatccggagctgctccacaaagtggttgatctgctcaagaagcaaggtctgctgctgtacggggacatccgtgagcgtacgttcgtggaggggcaactgccaaatcctaaacctgaccagctggacaaccatcagaagtgcttcgccattctcaagctgtaccgtccgaaggtggataacagtgcggttgggacgtcgaagaaagtcgacatggctgaggttaaggattggaaagcggttcgtgtggatctggtggtcgctccagatgagcagttcgcctatgcgctgctcggttggacgggcagcggcatgtttcgtcgcgatactcgtcgctacgcggaggaagagcgcgacatgctgctcgacaaccatggtctctacgacctgaaaaagggcatctttctgagtgcggacagcgaagaagagattttcggtcatctggactgtgattatctggagccgtgggaacgcaacgcg

SEQ ID NO: 5886 - protein, 394 aa, synthetic construct
  REGION 1..394: note = Variant of terminal deoxynucleotidyl transferase
MHHHHHHGGSGHPEGNTPEKEVPSVIARHVSPYACQRKTTLNNYNKKITDALEIMAENYKFKENLQARLEARRAASVLKSLPFEVTSMKDIQGLPCITDDVRPVIEEIIEVGESSRVKEILNDERYKAFKQFTSVFGVGVKTAEKWYRMGLRTLEEAKASKSLKLNKMQKAGFLYYEDLASGVSKEEADAVLDIVKETVRTVSPDALVTIAGGFRRGKPQGHDVDLLITIPGRPTDPELLHKVVDLLKKQGLLLYGDIRERTFVEGQLPNPKPDQLDNHQKCFAILKLYRPKVDNSAVGTSKKVDMAEVKDWKAVRVDLVVAPDEQFAYALLGWTGSGMFRRDTRRYAEEERDMLLDNHGLYDLKKGIFLSADSEEEIFGHLDCDYLEPWERNA

SEQ ID NO: 5887 - DNA, 1182 bp, synthetic construct
  misc_feature 1..1182: note = Variant of terminal deoxynucleotidyl transferase
  source 1..1182: mol_type = other DNA
atgcaccatcatcaccatcacgggggctccggccatccggaaggtaataccccggagaaggaggtgccgagcgttatcgcccgtcatgttagtccgtacgcgtgccagcgcaagaccacgctgaataactacaacaaaaagatcaccgacgcgctggaaatcatggccgagaactacaagtttaaagagaacctgcaggcgcgcctggaggcccgtcgcgccgcgagtgtcctgaaaagcctgccgttcgaggttaccagcatgaaagacatccaaggtctgccgtgcattaccgacgacgtacgtcctgtgatcgaagagatcatcgaagtaggcgagagcagccgtgttaaagaaatcctcaatgacgagcgctacaaggcctttaagcagttcaccagcgtgttcggtgtgggcgtcaagaccgcggaaaagtggtaccgtatgggcctccgtacgctggaagaagcaaaggccagtaagagtctgaagctgaacaagatgcagaaggcgggcttcctgtactacgaggatctggcgagcggtgttagtaaagaagaagccgatgccgttctggatatcgtgaaggaaacggtgcgcactgttagtccggatgcgctggtgaccatcgccggcggtttccgccgtggcaaacctcagggccacgacgttgacctgctgatcacgattccgggccgtcctacggatccggagctgctccacaaagtggttgatctgctcaagaagcaaggtctgctgctgtacggggacatccgtgagcgtacgttcgtggaggggcaactgccaaatcctaaacctgaccagctggacaaccatcagaagtgcttcgccattctcaagctgtaccgtccgaaggtggataacagtgcggttgggacgtcgaagaaagtcgacatggctgaggttaaggattggaaagcggttcgtgtggatctggtggtcgctccagatgagcagttcgcctatgcgctgctcggttggacgggcagcggcatgtttcgtcgcgatactcgtcgctacgcggaggaagagcgcgacatgctgctcgacaaccatggtctctacgacctgcttaagggcatctttctgagtgcggacagcgaagaagagattttcggtcatctggacctggattatctggagccgtgggaacgcaacgcg

SEQ ID NO: 5888 - protein, 394 aa, synthetic construct
  REGION 1..394: note = Variant of terminal deoxynucleotidyl transferase
MHHHHHHGGSGHPEGNTPEKEVPSVIARHVSPYACQRKTTLNNYNKKITDALEIMAENYKFKENLQARLEARRAASVLKSLPFEVTSMKDIQGLPCITDDVRPVIEEIIEVGESSRVKEILNDERYKAFKQFTSVFGVGVKTAEKWYRMGLRTLEEAKASKSLKLNKMQKAGFLYYEDLASGVSKEEADAVLDIVKETVRTVSPDALVTIAGGFRRGKPQGHDVDLLITIPGRPTDPELLHKVVDLLKKQGLLLYGDIRERTFVEGQLPNPKPDQLDNHQKCFAILKLYRPKVDNSAVGTSKKVDMAEVKDWKAVRVDLVVAPDEQFAYALLGWTGSGMFRRDTRRYAEEERDMLLDNHGLYDLLKGIFLSADSEEEIFGHLDLDYLEPWERNA

SEQ ID NO: 5889 - DNA, 1182 bp, synthetic construct
  misc_feature 1..1182: note = Variant of terminal deoxynucleotidyl transferase
  source 1..1182: mol_type = other DNA
atgcaccatcatcaccatcacgggggctccggccatccggaaggtaataccccggagaaggaggtgccgagcgttatcgcccgtcatgttagtccgtacgcgtgccagcgcaagaccacgctgaataactacaacaaaaagatcaccgacgcgctggaaatcatggccgagaactacaagtttaaagagaacctgcaggcgcgcctggaggcccgtcgcgccgcgagtgtcctgaaaagcctgccgttcgaggttaccagcatgaaagacatccaaggtctgccgtgcattaccgacgacgtacgtcctgtgatcgaagagatcatcgaagtaggcgagagcagccgtgttaaagaaatcctcaatgacgagcgctacaaggcctttaagcagttcaccagcgtgttcggtgtgggcgtcaagaccgcggaaaagtggtaccgtatgggcctccgtacgctggaagaagcaaaggccagtaagagtctgaagctgaacaagatgcagaaggcgggcttcctgtactacgaggatctggcgagcggtgttagtaaagaagaagccgatgccgttctggatatcgtgaaggaaacggtgcgcactgttagtccggatgcgctggtgaccatcgccggcggtttccgccgtggcaaacctcagggccacgacgttgacctgctgatcacgattccgggccgtcctacggatccggagctgctccacaaagtggttgatctgctcaagaagcaaggtctgctgctgtacggggacatccgtgagcgtacgttcgtggaggggcaactgccaaatcctaaacctgaccagctggacaaccatcagaagtgcttcgccattctcaagctgtaccgtccgaaggtggataacagtgcggttgggacgtcgaagaaagtcgacatggctgaggttaaggattggaaagcggttcgtgtggatctggtggtcgctccagatgagcagttcgcctatgcgctgctcggttggacgggcagcggcatgtttcgtcgcgatactcgtcgctacgcggaggaagagcgcgacatgctgctcgacaaccatggtctctacgaccctaaaaagggcatctttctgagtgcggacagcgaagaagagattttcggtcatctggacctggattatctggagccgtgggaacgcaacgcg

SEQ ID NO: 5890 - protein, 394 aa, synthetic construct
  REGION 1..394: note = Variant of terminal deoxynucleotidyl transferase
MHHHHHHGGSGHPEGNTPEKEVPSVIARHVSPYACQRKTTLNNYNKKITDALEIMAENYKFKENLQARLEARRAASVLKSLPFEVTSMKDIQGLPCITDDVRPVIEEIIEVGESSRVKEILNDERYKAFKQFTSVFGVGVKTAEKWYRMGLRTLEEAKASKSLKLNKMQKAGFLYYEDLASGVSKEEADAVLDIVKETVRTVSPDALVTIAGGFRRGKPQGHDVDLLITIPGRPTDPELLHKVVDLLKKQGLLLYGDIRERTFVEGQLPNPKPDQLDNHQKCFAILKLYRPKVDNSAVGTSKKVDMAEVKDWKAVRVDLVVAPDEQFAYALLGWTGSGMFRRDTRRYAEEERDMLLDNHGLYDPKKGIFLSADSEEEIFGHLDLDYLEPWERNA

SEQ ID NO: 5891 - DNA, 1182 bp, synthetic construct
  misc_feature 1..1182: note = Variant of terminal deoxynucleotidyl transferase
  source 1..1182: mol_type = other DNA
atgcaccatcatcaccatcacgggggctccggccatccggaaggtaataccccggagaaggaggtgccgagcgttatcgcccgtcatgttagtccgtacgcgtgccagcgcaagaccacgctgaataactacaacaaaaagatcaccgacgcgctggaaatcatggccgagaactacaagtttaaagagaacctgcaggcgcgcctggaggcccgtcgcgccgcgagtgtcctgaaaagcctgccgttcgaggttaccagcatgaaagacatccaaggtctgccgtgcattaccgacgacgtacgtcctgtgatcgaagagatcatcgaagtaggcgagagcagccgtgttaaagaaatcctcaatgacgagcgctacaaggcctttaagcagttcaccagcgtgttcggtgtgggcgtcaagaccgcggaaaagtggtaccgtatgggcctccgtacgctggaagaagcaaaggccagtaagagtctgaagctgaacaagatgcagaaggcgggcttcctgtactacgaggatctggcgagcggtgttagtaaagaagaagccgatgccgttctggatatcgtgaaggaaacggtgcgcactgttagtccggatgcgctggtgaccatcgccggcggtttccgccgtggcaaacctcagggccacgacgttgacctgctgatcacgattccgggccgtcctacggatccggagctgctccacaaagtggttgatctgctcaagaagcaaggtctgctgctgtacggggacatccgtgagcgtacgttcgtggaggggcaactgccaaatcctaaacctgaccagctggacaaccatcagaagtgcttcgccattctcaagctgtaccgtccgaaggtggataacagtgcggttgggacgtcgaagaaagtcgacatggctgaggttaaggattggaaagcggttcgtgtggatctggtggtcgctccagatgagcagttcgcctatgcgctgctcggttggacgggcagcggcatgtttcgtcgcgatactcgtcgctacgcggaggaagagcgcgacatgctgctcgacaaccatggtctctacgacctgaaaaagggcatctttctgagtgcggacagcgaagaagagattttcggtcatctggacctggattatctggagccgtggcttcgcaacgcg

SEQ ID NO: 5892 - protein, 394 aa, synthetic construct
  REGION 1..394: note = Variant of terminal deoxynucleotidyl transferase
MHHHHHHGGSGHPEGNTPEKEVPSVIARHVSPYACQRKTTLNNYNKKITDALEIMAENYKFKENLQARLEARRAASVLKSLPFEVTSMKDIQGLPCITDDVRPVIEEIIEVGESSRVKEILNDERYKAFKQFTSVFGVGVKTAEKWYRMGLRTLEEAKASKSLKLNKMQKAGFLYYEDLASGVSKEEADAVLDIVKETVRTVSPDALVTIAGGFRRGKPQGHDVDLLITIPGRPTDPELLHKVVDLLKKQGLLLYGDIRERTFVEGQLPNPKPDQLDNHQKCFAILKLYRPKVDNSAVGTSKKVDMAEVKDWKAVRVDLVVAPDEQFAYALLGWTGSGMFRRDTRRYAEEERDMLLDNHGLYDLKKGIFLSADSEEEIFGHLDLDYLEPWLRNA

SEQ ID NO: 5893 - DNA, 1182 bp, synthetic construct
  misc_feature 1..1182: note = Variant of terminal deoxynucleotidyl transferase
  source 1..1182: mol_type = other DNA
atgcaccatcatcaccatcacgggggctccggccatccggaaggtaataccccggagaaggaggtgccgagcgttatcgcccgtcatgttagtccgtacgcgtgccagcgcaagaccacgctgaataactacaacaaaaagatcaccgacgcgctggaaatcatggccgagaactacaagtttaaagagaacctgcaggcgcgcctggaggcccgtcgcgccgcgagtgtcctgaaaagcctgccgttcgaggttaccagcatgaaagacatccaaggtctgccgtgcattaccgacgacgtacgtcctgtgatcgaagagatcatcgaagtaggcgagagcagccgtgttaaagaaatcctcaatgacgagcgctacaaggcctttaagcagttcaccagcgtgttcggtgtgggcgtcaagaccgcggaaaagtggtaccgtatgggcctccgtacgctggaagaagcaaaggccagtaagagtctgaagctgaacaagatgcagaaggcgggcttcctgtactacgaggatctggcgagcggtgttagtaaagaagaagccgatgccgttctggatatcgtgaaggaaacggtgcgcactgttagtccggatgcgctggtgaccatcgccggcggtttccgccgtggcaaacctcagggccacgacgttgacctgctgatcacgattccgggccgtcctacggatccggagctgctccacaaagtggttgatctgctcaagaagcaaggtctgctgctgtacggggacatccgtgagcgtacgttcgtggaggggcaactgccaaatcctaaacctgaccagctggacaaccatcagaagtgcttcgccattctcaagctgtaccgtccgaaggtggataacagtgcggttgggacgtcgaagaaagtcgacatggctgaggttaaggattggaaagcggttcgtgtggatctggtggtcgctccagatgagcagttcgcctatgcgctgctcggttggacgggcagcggcatgtttcgtcgcgatactcgtcgctacgcggaggaagagcgcgacatgctgctcgacaaccatggtctctacgacctgaaaaagggcatctttctgagtgcggacagcgaagaagagattttcggtcatctggttctggattatctggagccgtgggaacgcaacgcg

SEQ ID NO: 5894 - protein, 394 aa, synthetic construct
  REGION 1..394: note = Variant of terminal deoxynucleotidyl transferase
MHHHHHHGGSGHPEGNTPEKEVPSVIARHVSPYACQRKTTLNNYNKKITDALEIMAENYKFKENLQARLEARRAASVLKSLPFEVTSMKDIQGLPCITDDVRPVIEEIIEVGESSRVKEILNDERYKAFKQFTSVFGVGVKTAEKWYRMGLRTLEEAKASKSLKLNKMQKAGFLYYEDLASGVSKEEADAVLDIVKETVRTVSPDALVTIAGGFRRGKPQGHDVDLLITIPGRPTDPELLHKVVDLLKKQGLLLYGDIRERTFVEGQLPNPKPDQLDNHQKCFAILKLYRPKVDNSAVGTSKKVDMAEVKDWKAVRVDLVVAPDEQFAYALLGWTGSGMFRRDTRRYAEEERDMLLDNHGLYDLKKGIFLSADSEEEIFGHLVLDYLEPWERNA

SEQ ID NO: 5895 - DNA, 1182 bp, synthetic construct
  misc_feature 1..1182: note = Variant of terminal deoxynucleotidyl transferase
  source 1..1182: mol_type = other DNA
atgcaccatcatcaccatcacgggggctccggccatccggaaggtaataccccggagaaggaggtgccgagcgttatcgcccgtcatgttagtccgtacgcgtgccagcgcaagaccacgctgaataactacaacaaaaagatcaccgacgcgctggaaatcatggccgagaactacaagtttaaagagaacctgcaggcgcgcctggaggcccgtcgcgccgcgagtgtcctgaaaagcctgccgttcgaggttaccagcatgaaagacatccaaggtctgccgtgcattaccgacgacgtacgtcctgtgatcgaagagatcatcgaagtaggcgagagcagccgtgttaaagaaatcctcaatgacgagcgctacaaggcctttaagcagttcaccagcgtgttcggtgtgggcgtcaagaccgcggaaaagtggtaccgtatgggcctccgtacgctggaagaagcaaaggccagtaagagtctgaagctgaacaagatgcagaaggcgggcttcctgtactacgaggatctggcgagcggtgttagtaaagaagaagccgatgccgttctggatatcgtgaaggaaacggtgcgcactgttagtccggatgcgctggtgaccatcgccggcggtttccgccgtggcaaacctcagggccacgacgttgacctgctgatcacgattccgggccgtcctacggatccggagctgctccacaaagtggttgatctgctcaagaagcaaggtctgctgctgtacggggacatccgtgagcgtacgttcgtggaggggcaactgccaaatcctaaacctgaccagctggacaaccatcagaagtgcttcgccattctcaagctgtaccgtccgaaggtggataacagtgcggttgggacgtcgaagaaagtcgacatggctgaggttaaggattggaaagcggttcgtgtggatctggtggtcgctccagatgagcagttcgcctatgcgctgctcggttggacgggcagcggcatgtttcgtcgcgatactcgtcgctacgcggaggaagagcgcgacatgctgctcgacaaccatggtctctacgacctgaaaagtggcatctttctgagtgcggacagcgaagaagagattttcggtcatctggacctggattatctggagccgtgggaacgcaacgcg

SEQ ID NO: 5896 - protein, 394 aa, synthetic construct
  REGION 1..394: note = Variant of terminal deoxynucleotidyl transferase
MHHHHHHGGSGHPEGNTPEKEVPSVIARHVSPYACQRKTTLNNYNKKITDALEIMAENYKFKENLQARLEARRAASVLKSLPFEVTSMKDIQGLPCITDDVRPVIEEIIEVGESSRVKEILNDERYKAFKQFTSVFGVGVKTAEKWYRMGLRTLEEAKASKSLKLNKMQKAGFLYYEDLASGVSKEEADAVLDIVKETVRTVSPDALVTIAGGFRRGKPQGHDVDLLITIPGRPTDPELLHKVVDLLKKQGLLLYGDIRERTFVEGQLPNPKPDQLDNHQKCFAILKLYRPKVDNSAVGTSKKVDMAEVKDWKAVRVDLVVAPDEQFAYALLGWTGSGMFRRDTRRYAEEERDMLLDNHGLYDLKSGIFLSADSEEEIFGHLDLDYLEPWERNA

SEQ ID NO: 5897 - DNA, 1182 bp, synthetic construct
  misc_feature 1..1182: note = Variant of terminal deoxynucleotidyl transferase
  source 1..1182: mol_type = other DNA
atgcaccatcatcaccatcacgggggctccggccatccggaaggtaataccccggagaaggaggtgccgagcgttatcgcccgtcatgttagtccgtacgcgtgccagcgcaagaccacgctgaataactacaacaaaaagatcaccgacgcgctggaaatcatggccgagaactacaagtttaaagagaacctgcaggcgcgcctggaggcccgtcgcgccgcgagtgtcctgaaaagcctgccgttcgaggttaccagcatgaaagacatccaaggtctgccgtgcattaccgacgacgtacgtcctgtgatcgaagagatcatcgaagtaggcgagagcagccgtgttaaagaaatcctcaatgacgagcgctacaaggcctttaagcagttcaccagcgtgttcggtgtgggcgtcaagaccgcggaaaagtggtaccgtatgggcctccgtacgctggaagaagcaaaggccagtaagagtctgaagctgaacaagatgcagaaggcgggcttcctgtactacgaggatctggcgagcggtgttagtaaagaagaagccgatgccgttctggatatcgtgaaggaaacggtgcgcactgttagtccggatgcgctggtgaccatcgccggcggtttccgccgtggcaaacctcagggccacgacgttgacctgctgatcacgattccgggccgtcctacggatccggagctgctccacaaagtggttgatctgctcaagaagcaaggtctgctgctgtacggggacatccgtgagcgtacgttcgtggaggggcaactgccaaatcctaaacctgaccagctggacaaccatcagaagtgcttcgccattctcaagctgtaccgtccgaaggtggataacagtgcggttgggacgtcgaagaaagtcgacatggctgaggttaaggattggaaagcggttcgtgtggatctggtggtcgctccagatgagcagttcgcctatgcgctgctcggttggacgggcagcggcatgtttcgtcgcgatactcgtcgctacgcggaggaagagcgcgacatgctgctcgacaaccatggtctctacgacctgaaaaagggcatctttctgagtgcggacagcgaagaagagattttcggtcatctgtatctggattatctggagccgtgggaacgcaacgcg

SEQ ID NO: 5898 - protein, 394 aa, synthetic construct
  REGION 1..394: note = Variant of terminal deoxynucleotidyl transferase
MHHHHHHGGSGHPEGNTPEKEVPSVIARHVSPYACQRKTTLNNYNKKITDALEIMAENYKFKENLQARLEARRAASVLKSLPFEVTSMKDIQGLPCITDDVRPVIEEIIEVGESSRVKEILNDERYKAFKQFTSVFGVGVKTAEKWYRMGLRTLEEAKASKSLKLNKMQKAGFLYYEDLASGVSKEEADAVLDIVKETVRTVSPDALVTIAGGFRRGKPQGHDVDLLITIPGRPTDPELLHKVVDLLKKQGLLLYGDIRERTFVEGQLPNPKPDQLDNHQKCFAILKLYRPKVDNSAVGTSKKVDMAEVKDWKAVRVDLVVAPDEQFAYALLGWTGSGMFRRDTRRYAEEERDMLLDNHGLYDLKKGIFLSADSEEEIFGHLYLDYLEPWERNA

SEQ ID NO: 5899 - DNA, 1182 bp, synthetic construct
  misc_feature 1..1182: note = Variant of terminal deoxynucleotidyl transferase
  source 1..1182: mol_type = other DNA
atgcaccatcatcaccatcacgggggctccggccatccggaaggtaataccccggagaaggaggtgccgagcgttatcgcccgtcatgttagtccgtacgcgtgccagcgcaagaccacgctgaataactacaacaaaaagatcaccgacgcgctggaaatcatggccgagaactacaagtttaaagagaacctgcaggcgcgcctggaggcccgtcgcgccgcgagtgtcctgaaaagcctgccgttcgaggttaccagcatgaaagacatccaaggtctgccgtgcattaccgacgacgtacgtcctgtgatcgaagagatcatcgaagtaggcgagagcagccgtgttaaagaaatcctcaatgacgagcgctacaaggcctttaagcagttcaccagcgtgttcggtgtgggcgtcaagaccgcggaaaagtggtaccgtatgggcctccgtacgctggaagaagcaaaggccagtaagagtctgaagctgaacaagatgcagaaggcgggcttcctgtactacgaggatctggcgagcggtgttagtaaagaagaagccgatgccgttctggatatcgtgaaggaaacggtgcgcactgttagtccggatgcgctggtgaccatcgccggcggtttccgccgtggcaaacctcagggccacgacgttgacctgctgatcacgattccgggccgtcctacggatccggagctgctccacaaagtggttgatctgctcaagaagcaaggtctgctgctgtacggggacatccgtgagcgtacgttcgtggaggggcaactgccaaatcctaaacctgaccagctggacaaccatcagaagtgcttcgccattctcaagctgtaccgtccgaaggtggataacagtgcggttgggacgtcgaagaaagtcgacatggctgaggttaaggattggaaagcggttcgtgtggatctggtggtcgctccagatgagcagttcgcctatgcgctgctcggttggacgggcagcggcatgtttcgtcgcgatactcgtcgctacgcggaggaagagcgcgacatgctgctcgacaaccatggtctctacgacctgaaaaagggcatctttctgagtgcggacagcgaaggggagattttcggtcatctggacctggattatctggagccgtgggaacgcaacgcg

SEQ ID NO: 5900 - protein, 394 aa, synthetic construct
  REGION 1..394: note = Variant of terminal deoxynucleotidyl transferase
MHHHHHHGGSGHPEGNTPEKEVPSVIARHVSPYACQRKTTLNNYNKKITDALEIMAENYKFKENLQARLEARRAASVLKSLPFEVTSMKDIQGLPCITDDVRPVIEEIIEVGESSRVKEILNDERYKAFKQFTSVFGVGVKTAEKWYRMGLRTLEEAKASKSLKLNKMQKAGFLYYEDLASGVSKEEADAVLDIVKETVRTVSPDALVTIAGGFRRGKPQGHDVDLLITIPGRPTDPELLHKVVDLLKKQGLLLYGDIRERTFVEGQLPNPKPDQLDNHQKCFAILKLYRPKVDNSAVGTSKKVDMAEVKDWKAVRVDLVVAPDEQFAYALLGWTGSGMFRRDTRRYAEEERDMLLDNHGLYDLKKGIFLSADSEGEIFGHLDLDYLEPWERNA

SEQ ID NO: 5901 - DNA, 1182 bp, synthetic construct
  misc_feature 1..1182: note = Variant of terminal deoxynucleotidyl transferase
  source 1..1182: mol_type = other DNA
atgcaccatcatcaccatcacgggggctccggccatccggaaggtaataccccggagaaggaggtgccgagcgttatcgcccgtcatgttagtccgtacgcgtgccagcgcaagaccacgctgaataactacaacaaaaagatcaccgacgcgctggaaatcatggccgagaactacaagtttaaagagaacctgcaggcgcgcctggaggcccgtcgcgccgcgagtgtcctgaaaagcctgccgttcgaggttaccagcatgaaagacatccaaggtctgccgtgcattaccgacgacgtacgtcctgtgatcgaagagatcatcgaagtaggcgagagcagccgtgttaaagaaatcctcaatgacgagcgctacaaggcctttaagcagttcaccagcgtgttcggtgtgggcgtcaagaccgcggaaaagtggtaccgtatgggcctccgtacgctggaagaagcaaaggccagtaagagtctgaagctgaacaagatgcagaaggcgggcttcctgtactacgaggatctggcgagcggtgttagtaaagaagaagccgatgccgttctggatatcgtgaaggaaacggtgcgcactgttagtccggatgcgctggtgaccatcgccggcggtttccgccgtggcaaacctcagggccacgacgttgacctgctgatcacgattccgggccgtcctacggatccggagctgctccacaaagtggttgatctgctcaagaagcaaggtctgctgctgtacggggacatccgtgagcgtacgttcgtggaggggcaactgccaaatcctaaacctgaccagctggacaaccatcagaagtgcttcgccattctcaagctgtaccgtccgaaggtggataacagtgcggttgggacgtcgaagaaagtcgacatggctgaggttaaggattggaaagcggttcgtgtggatctggtggtcgctccagatgagcagttcgcctatgcgctgctcggttggacgggcagcggcatgtttcgtcgcgatactcgtcgctacgcggaggaagagactgacatgctgctcgacaaccatggtctctacgacctgaaaaagggcatctttctgagtgcggacagcgaagaagagattttcggtcatctggacctggattatctggagccgtgggaacgcaacgcg

SEQ ID NO: 5902 - protein, 394 aa, synthetic construct
  REGION 1..394: note = Variant of terminal deoxynucleotidyl transferase
MHHHHHHGGSGHPEGNTPEKEVPSVIARHVSPYACQRKTTLNNYNKKITDALEIMAENYKFKENLQARLEARRAASVLKSLPFEVTSMKDIQGLPCITDDVRPVIEEIIEVGESSRVKEILNDERYKAFKQFTSVFGVGVKTAEKWYRMGLRTLEEAKASKSLKLNKMQKAGFLYYEDLASGVSKEEADAVLDIVKETVRTVSPDALVTIAGGFRRGKPQGHDVDLLITIPGRPTDPELLHKVVDLLKKQGLLLYGDIRERTFVEGQLPNPKPDQLDNHQKCFAILKLYRPKVDNSAVGTSKKVDMAEVKDWKAVRVDLVVAPDEQFAYALLGWTGSGMFRRDTRRYAEEETDMLLDNHGLYDLKKGIFLSADSEEEIFGHLDLDYLEPWERNA

SEQ ID NO: 5903 - DNA, 1182 bp, synthetic construct
  misc_feature 1..1182: note = Variant of terminal deoxynucleotidyl transferase
  source 1..1182: mol_type = other DNA
atgcaccatcatcaccatcacgggggctccggccatccggaaggtaataccccggagaaggaggtgccgagcgttatcgcccgtcatgttagtccgtacgcgtgccagcgcaagaccacgctgaataactacaacaaaaagatcaccgacgcgctggaaatcatggccgagaactacaagtttaaagagaacctgcaggcgcgcctggaggcccgtcgcgccgcgagtgtcctgaaaagcctgccgttcgaggttaccagcatgaaagacatccaaggtctgccgtgcattaccgacgacgtacgtcctgtgatcgaagagatcatcgaagtaggcgagagcagccgtgttaaagaaatcctcaatgacgagcgctacaaggcctttaagcagttcaccagcgtgttcggtgtgggcgtcaagaccgcggaaaagtggtaccgtatgggcctccgtacgctggaagaagcaaaggccagtaagagtctgaagctgaacaagatgcagaaggcgggcttcctgtactacgaggatctggcgagcggtgttagtaaagaagaagccgatgccgttctggatatcgtgaaggaaacggtgcgcactgttagtccggatgcgctggtgaccatcgccggcggtttccgccgtggcaaacctcagggccacgacgttgacctgctgatcacgattccgggccgtcctacggatccggagctgctccacaaagtggttgatctgctcaagaagcaaggtctgctgctgtacggggacatccgtgagcgtacgttcgtggaggggcaactgccaaatcctaaacctgaccagctggacaaccatcagaagtgcttcgccattctcaagctgtaccgtccgaaggtggataacagtgcggttgggacgtcgaagaaagtcgacatggctgaggttaaggattggaaagcggttcgtgtggatctggtggtcgctccagatgagcagttcgcctatgcgctgctcggttggacgggcagcggcatgtttcgtcgcgatactcgtcgctacgcggaggaagagcgctatatgctgctcgacaaccatggtctctacgacctgaaaaagggcatctttctgagtgcggacagcgaagaagagattttcggtcatctggacctggattatctggagccgtgggaacgcaacgcg

SEQ ID NO: 5904 - protein, 394 aa, synthetic construct
  REGION 1..394: note = Variant of terminal deoxynucleotidyl transferase
MHHHHHHGGSGHPEGNTPEKEVPSVIARHVSPYACQRKTTLNNYNKKITDALEIMAENYKFKENLQARLEARRAASVLKSLPFEVTSMKDIQGLPCITDDVRPVIEEIIEVGESSRVKEILNDERYKAFKQFTSVFGVGVKTAEKWYRMGLRTLEEAKASKSLKLNKMQKAGFLYYEDLASGVSKEEADAVLDIVKETVRTVSPDALVTIAGGFRRGKPQGHDVDLLITIPGRPTDPELLHKVVDLLKKQGLLLYGDIRERTFVEGQLPNPKPDQLDNHQKCFAILKLYRPKVDNSAVGTSKKVDMAEVKDWKAVRVDLVVAPDEQFAYALLGWTGSGMFRRDTRRYAEEERYMLLDNHGLYDLKKGIFLSADSEEEIFGHLDLDYLEPWERNA

SEQ ID NO: 5905 - DNA, 1182 bp, synthetic construct
  misc_feature 1..1182: note = Variant of terminal deoxynucleotidyl transferase
  source 1..1182: mol_type = other DNA
atgcaccatcatcaccatcacgggggctccggccatccggaaggtaataccccggagaaggaggtgccgagcgttatcgcccgtcatgttagtccgtacgcgtgccagcgcaagaccacgctgaataactacaacaaaaagatcaccgacgcgctggaaatcatggccgagaactacaagtttaaagagaacctgcaggcgcgcctggaggcccgtcgcgccgcgagtgtcctgaaaagcctgccgttcgaggttaccagcatgaaagacatccaaggtctgccgtgcattaccgacgacgtacgtcctgtgatcgaagagatcatcgaagtaggcgagagcagccgtgttaaagaaatcctcaatgacgagcgctacaaggcctttaagcagttcaccagcgtgttcggtgtgggcgtcaagaccgcggaaaagtggtaccgtatgggcctccgtacgctggaagaagcaaaggccagtaagagtctgaagctgaacaagatgcagaaggcgggcttcctgtactacgaggatctggcgagcggtgttagtaaagaagaagccgatgccgttctggatatcgtgaaggaaacggtgcgcactgttagtccggatgcgctggtgaccatcgccggcggtttccgccgtggcaaacctcagggccacgacgttgacctgctgatcacgattccgggccgtcctacggatccggagctgctccacaaagtggttgatctgctcaagaagcaaggtctgctgctgtacggggacatccgtgagcgtacgttcgtggaggggcaactgccaaatcctaaacctgaccagctggacaaccatcagaagtgcttcgccattctcaagctgtaccgtccgaaggtggataacagtgcggttgggacgtcgaagaaagtcgacatggctgaggttaaggattggaaagcggttcgtgtggatctggtggtcgctccagatgagcagttcgcctatgcgctgctcggttggacgggcagcggcatgtttcgtcgcgatactcgtcgctacgcggaggaagagcgcgacatgctgctcgacaaccatggtctctacgacctgtataagggcatctttctgagtgcggacagcgaagaagagattttcggtcatctggacctggattatctggagccgtgggaacgcaacgcg

SEQ ID NO: 5906 - protein, 394 aa, synthetic construct
  REGION 1..394: note = Variant of terminal deoxynucleotidyl transferase
MHHHHHHGGSGHPEGNTPEKEVPSVIARHVSPYACQRKTTLNNYNKKITDALEIMAENYKFKENLQARLEARRAASVLKSLPFEVTSMKDIQGLPCITDDVRPVIEEIIEVGESSRVKEILNDERYKAFKQFTSVFGVGVKTAEKWYRMGLRTLEEAKASKSLKLNKMQKAGFLYYEDLASGVSKEEADAVLDIVKETVRTVSPDALVTIAGGFRRGKPQGHDVDLLITIPGRPTDPELLHKVVDLLKKQGLLLYGDIRERTFVEGQLPNPKPDQLDNHQKCFAILKLYRPKVDNSAVGTSKKVDMAEVKDWKAVRVDLVVAPDEQFAYALLGWTGSGMFRRDTRRYAEEERDMLLDNHGLYDLYKGIFLSADSEEEIFGHLDLDYLEPWERNA

SEQ ID NO: 5907 - DNA, 1182 bp, synthetic construct
  misc_feature 1..1182: note = Variant of terminal deoxynucleotidyl transferase
  source 1..1182: mol_type = other DNA
atgcaccatcatcaccatcacgggggctccggccatccggaaggtaataccccggagaaggaggtgccgagcgttatcgcccgtcatgttagtccgtacgcgtgccagcgcaagaccacgctgaataactacaacaaaaagatcaccgacgcgctggaaatcatggccgagaactacaagtttaaagagaacctgcaggcgcgcctggaggcccgtcgcgccgcgagtgtcctgaaaagcctgccgttcgaggttaccagcatgaaagacatccaaggtctgccgtgcattaccgacgacgtacgtcctgtgatcgaagagatcatcgaagtaggcgagagcagccgtgttaaagaaatcctcaatgacgagcgctacaaggcctttaagcagttcaccagcgtgttcggtgtgggcgtcaagaccgcggaaaagtggtaccgtatgggcctccgtacgctggaagaagcaaaggccagtaagagtctgaagctgaacaagatgcagaaggcgggcttcctgtactacgaggatctggcgagcggtgttagtaaagaagaagccgatgccgttctggatatcgtgaaggaaacggtgcgcactgttagtccggatgcgctggtgaccatcgccggcggtttccgccgtggcaaacctcagggccacgacgttgacctgctgatcacgattccgggccgtcctacggatccggagctgctccacaaagtggttgatctgctcaagaagcaaggtctgctgctgtacggggacatccgtgagcgtacgttcgtggaggggcaactgccaaatcctaaacctgaccagctggacaaccatcagaagtgcttcgccattctcaagctgtaccgtccgaaggtggataacagtgcggttgggacgtcgaagaaagtcgacatggctgaggttaaggattggaaagcggttcgtgtggatctggtggtcgctccagatgagcagttcgcctatgcgctgctcggttggacgggcagcggcatgtttcgtcgcgatactcgtcgctacgcggaggaagagcgcgacatgctgctcgacaaccatggtctctacgacctgaaaaagggcatctttctgagtgcggaccttgaagaagagattttcggtcatctggacctggattatctggagccgtgggaacgcaacgcg

SEQ ID NO: 5908 - protein, 394 aa, synthetic construct
  REGION 1..394: note = Variant of terminal deoxynucleotidyl transferase
MHHHHHHGGSGHPEGNTPEKEVPSVIARHVSPYACQRKTTLNNYNKKITDALEIMAENYKFKENLQARLEARRAASVLKSLPFEVTSMKDIQGLPCITDDVRPVIEEIIEVGESSRVKEILNDERYKAFKQFTSVFGVGVKTAEKWYRMGLRTLEEAKASKSLKLNKMQKAGFLYYEDLASGVSKEEADAVLDIVKETVRTVSPDALVTIAGGFRRGKPQGHDVDLLITIPGRPTDPELLHKVVDLLKKQGLLLYGDIRERTFVEGQLPNPKPDQLDNHQKCFAILKLYRPKVDNSAVGTSKKVDMAEVKDWKAVRVDLVVAPDEQFAYALLGWTGSGMFRRDTRRYAEEERDMLLDNHGLYDLKKGIFLSADLEEEIFGHLDLDYLEPWERNA

SEQ ID NO: 5909 - DNA, 1182 bp, synthetic construct
  misc_feature 1..1182: note = Variant of terminal deoxynucleotidyl transferase
  source 1..1182: mol_type = other DNA
atgcaccatcatcaccatcacgggggctccggccatccggaaggtaataccccggagaaggaggtgccgagcgttatcgcccgtcatgttagtccgtacgcgtgccagcgcaagaccacgctgaataactacaacaaaaagatcaccgacgcgctggaaatcatggccgagaactacaagtttaaagagaacctgcaggcgcgcctggaggcccgtcgcgccgcgagtgtcctgaaaagcctgccgttcgaggttaccagcatgaaagacatccaaggtctgccgtgcattaccgacgacgtacgtcctgtgatcgaagagatcatcgaagtaggcgagagcagccgtgttaaagaaatcctcaatgacgagcgctacaaggcctttaagcagttcaccagcgtgttcggtgtgggcgtcaagaccgcggaaaagtggtaccgtatgggcctccgtacgctggaagaagcaaaggccagtaagagtctgaagctgaacaagatgcagaaggcgggcttcctgtactacgaggatctggcgagcggtgttagtaaagaagaagccgatgccgttctggatatcgtgaaggaaacggtgcgcactgttagtccggatgcgctggtgaccatcgccggcggtttccgccgtggcaaacctcagggccacgacgttgacctgctgatcacgattccgggccgtcctacggatccggagctgctccacaaagtggttgatctgctcaagaagcaaggtctgctgctgtacggggacatccgtgagcgtacgttcgtggaggggcaactgccaaatcctaaacctgaccagctggacaaccatcagaagtgcttcgccattctcaagctgtaccgtccgaaggtggataacagtgcggttgggacgtcgaagaaagtcgacatggctgaggttaaggattggaaagcggttcgtgtggatctggtggtcgctccagatgagcagttcgcctatgcgctgctcggttggacgggcagcggcatgtttcgtcgcgatactcgtcgctacgcggaggaagagcgcgacatgctgctcgacaaccatggtctctacgacctggagaagggcatctttctgagtgcggacagcgaagaagagattttcggtcatctggacctggattatctggagccgtgggaacgcaacgcg

SEQ ID NO: 5910 - protein, 394 aa, synthetic construct
  REGION 1..394: note = Variant of terminal deoxynucleotidyl transferase
MHHHHHHGGSGHPEGNTPEKEVPSVIARHVSPYACQRKTTLNNYNKKITDALEIMAENYKFKENLQARLEARRAASVLKSLPFEVTSMKDIQGLPCITDDVRPVIEEIIEVGESSRVKEILNDERYKAFKQFTSVFGVGVKTAEKWYRMGLRTLEEAKASKSLKLNKMQKAGFLYYEDLASGVSKEEADAVLDIVKETVRTVSPDALVTIAGGFRRGKPQGHDVDLLITIPGRPTDPELLHKVVDLLKKQGLLLYGDIRERTFVEGQLPNPKPDQLDNHQKCFAILKLYRPKVDNSAVGTSKKVDMAEVKDWKAVRVDLVVAPDEQFAYALLGWTGSGMFRRDTRRYAEEERDMLLDNHGLYDLEKGIFLSADSEEEIFGHLDLDYLEPWERNA

SEQ ID NO: 5911 - DNA, 1182 bp, synthetic construct
  misc_feature 1..1182: note = Variant of terminal deoxynucleotidyl transferase
  source 1..1182: mol_type = other DNA
atgcaccatcatcaccatcacgggggctccggccatccggaaggtaataccccggagaaggaggtgccgagcgttatcgcccgtcatgttagtccgtacgcgtgccagcgcaagaccacgctgaataactacaacaaaaagatcaccgacgcgctggaaatcatggccgagaactacaagtttaaagagaacctgcaggcgcgcctggaggcccgtcgcgccgcgagtgtcctgaaaagcctgccgttcgaggttaccagcatgaaagacatccaaggtctgccgtgcattaccgacgacgtacgtcctgtgatcgaagagatcatcgaagtaggcgagagcagccgtgttaaagaaatcctcaatgacgagcgctacaaggcctttaagcagttcaccagcgtgttcggtgtgggcgtcaagaccgcggaaaagtggtaccgtatgggcctccgtacgctggaagaagcaaaggccagtaagagtctgaagctgaacaagatgcagaaggcgggcttcctgtactacgaggatctggcgagcggtgttagtaaagaagaagccgatgccgttctggatatcgtgaaggaaacggtgcgcactgttagtccggatgcgctggtgaccatcgccggcggtttccgccgtggcaaacctcagggccacgacgttgacctgctgatcacgattccgggccgtcctacggatccggagctgctccacaaagtggttgatctgctcaagaagcaaggtctgctgctgtacggggacatccgtgagcgtacgttcgtggaggggcaactgccaaatcctaaacctgaccagctggacaaccatcagaagtgcttcgccattctcaagctgtaccgtccgaaggtggataacagtgcggttgggacgtcgaagaaagtcgacatggctgaggttaaggattggaaagcggttcgtgtggatctggtggtcgctccagatgagcagttcgcctatgcgctgctcggttggacgggcagcggcatgtttcgtcgcgatactcgtcgctacgcggaggaagagcgcgacatgctgctcgacaaccatggtctctacgacctgaaaaagggcatctttctgagtgcggacagcgaagaagagattttcggtcatctggacctgaggtatctggagccgtgggaacgcaacgcg

SEQ ID NO: 5912 - protein, 394 aa, synthetic construct
  REGION 1..394: note = Variant of terminal deoxynucleotidyl transferase
MHHHHHHGGSGHPEGNTPEKEVPSVIARHVSPYACQRKTTLNNYNKKITDALEIMAENYKFKENLQARLEARRAASVLKSLPFEVTSMKDIQGLPCITDDVRPVIEEIIEVGESSRVKEILNDERYKAFKQFTSVFGVGVKTAEKWYRMGLRTLEEAKASKSLKLNKMQKAGFLYYEDLASGVSKEEADAVLDIVKETVRTVSPDALVTIAGGFRRGKPQGHDVDLLITIPGRPTDPELLHKVVDLLKKQGLLLYGDIRERTFVEGQLPNPKPDQLDNHQKCFAILKLYRPKVDNSAVGTSKKVDMAEVKDWKAVRVDLVVAPDEQFAYALLGWTGSGMFRRDTRRYAEEERDMLLDNHGLYDLKKGIFLSADSEEEIFGHLDLRYLEPWERNA

SEQ ID NO: 5913 - DNA, 1182 bp, synthetic construct
  misc_feature 1..1182: note = Variant of terminal deoxynucleotidyl transferase
  source 1..1182: mol_type = other DNA
atgcaccatcatcaccatcacgggggctccggccatccggaaggtaataccccggagaaggaggtgccgagcgttatcgcccgtcatgttagtccgtacgcgtgccagcgcaagaccacgctgaataactacaacaaaaagatcaccgacgcgctggaaatcatggccgagaactacaagtttaaagagaacctgcaggcgcgcctggaggcccgtcgcgccgcgagtgtcctgaaaagcctgccgttcgaggttaccagcatgaaagacatccaaggtctgccgtgcattaccgacgacgtacgtcctgtgatcgaagagatcatcgaagtaggcgagagcagccgtgttaaagaaatcctcaatgacgagcgctacaaggcctttaagcagttcaccagcgtgttcggtgtgggcgtcaagaccgcggaaaagtggtaccgtatgggcctccgtacgctggaagaagcaaaggccagtaagagtctgaagctgaacaagatgcagaaggcgggcttcctgtactacgaggatctggcgagcggtgttagtaaagaagaagccgatgccgttctggatatcgtgaaggaaacggtgcgcactgttagtccggatgcgctggtgaccatcgccggcggtttccgccgtggcaaacctcagggccacgacgttgacctgctgatcacgattccgggccgtcctacggatccggagctgctccacaaagtggttgatctgctcaagaagcaaggtctgctgctgtacggggacatccgtgagcgtacgttcgtggaggggcaactgccaaatcctaaacctgaccagctggacaaccatcagaagtgcttcgccattctcaagctgtaccgtccgaaggtggataacagtgcggttgggacgtcgaagaaagtcgacatggctgaggttaaggattggaaagcggttcgtgtggatctggtggtcgctccagatgagcagttcgcctatgcgctgctcggttggacgggcagcggcatgtttcgtcgcgatactcgtcgctacgcggaggaagagcgcgacatgctgctcgacaaccatggtctctacgacctgaaaggtggcatctttctgagtgcggacagcgaagaagagattttcggtcatctggacctggattatctggagccgtgggaacgcaacgcg

SEQ ID NO: 5914 - protein, 394 aa, synthetic construct
  REGION 1..394: note = Variant of terminal deoxynucleotidyl transferase
MHHHHHHGGSGHPEGNTPEKEVPSVIARHVSPYACQRKTTLNNYNKKITDALEIMAENYKFKENLQARLEARRAASVLKSLPFEVTSMKDIQGLPCITDDVRPVIEEIIEVGESSRVKEILNDERYKAFKQFTSVFGVGVKTAEKWYRMGLRTLEEAKASKSLKLNKMQKAGFLYYEDLASGVSKEEADAVLDIVKETVRTVSPDALVTIAGGFRRGKPQGHDVDLLITIPGRPTDPELLHKVVDLLKKQGLLLYGDIRERTFVEGQLPNPKPDQLDNHQKCFAILKLYRPKVDNSAVGTSKKVDMAEVKDWKAVRVDLVVAPDEQFAYALLGWTGSGMFRRDTRRYAEEERDMLLDNHGLYDLKGGIFLSADSEEEIFGHLDLDYLEPWERNA

SEQ ID NO: 5915 - DNA, 1182 bp, synthetic construct
  misc_feature 1..1182: note = Variant of terminal deoxynucleotidyl transferase
  source 1..1182: mol_type = other DNA
atgcaccatcatcaccatcacgggggctccggccatccggaaggtaataccccggagaaggaggtgccgagcgttatcgcccgtcatgttagtccgtacgcgtgccagcgcaagaccacgctgaataactacaacaaaaagatcaccgacgcgctggaaatcatggccgagaactacaagtttaaagagaacctgcaggcgcgcctggaggcccgtcgcgccgcgagtgtcctgaaaagcctgccgttcgaggttaccagcatgaaagacatccaaggtctgccgtgcattaccgacgacgtacgtcctgtgatcgaagagatcatcgaagtaggcgagagcagccgtgttaaagaaatcctcaatgacgagcgctacaaggcctttaagcagttcaccagcgtgttcggtgtgggcgtcaagaccgcggaaaagtggtaccgtatgggcctccgtacgctggaagaagcaaaggccagtaagagtctgaagctgaacaagatgcagaaggcgggcttcctgtactacgaggatctggcgagcggtgttagtaaagaagaagccgatgccgttctggatatcgtgaaggaaacggtgcgcactgttagtccggatgcgctggtgaccatcgccggcggtttccgccgtggcaaacctcagggccacgacgttgacctgctgatcacgattccgggccgtcctacggatccggagctgctccacaaagtggttgatctgctcaagaagcaaggtctgctgctgtacggggacatccgtgagcgtacgttcgtggaggggcaactgccaaatcctaaacctgaccagctggacaaccatcagaagtgcttcgccattctcaagctgtaccgtccgaaggtggataacagtgcggttgggacgtcgaagaaagtcgacatggctgaggttaaggattggaaagcggttcgtgtggatctggtggtcgctccagatgagcagttcgcctatgcgctgctcggttggacgggcagcggcatgtttcgtcgcgatactcgtcgctacgcggaggaagagcgcgacatgctgctcgacaaccatggtctctacgacctgaaaaagggcatctttctgagtgcggacagcgaagaagagattttcggtcatctggacctggattatctgggtccgtgggaacgcaacgcg

SEQ ID NO: 5916 - protein, 394 aa, synthetic construct
  REGION 1..394: note = Variant of terminal deoxynucleotidyl transferase
MHHHHHHGGSGHPEGNTPEKEVPSVIARHVSPYACQRKTTLNNYNKKITDALEIMAENYKFKENLQARLEARRAASVLKSLPFEVTSMKDIQGLPCITDDVRPVIEEIIEVGESSRVKEILNDERYKAFKQFTSVFGVGVKTAEKWYRMGLRTLEEAKASKSLKLNKMQKAGFLYYEDLASGVSKEEADAVLDIVKETVRTVSPDALVTIAGGFRRGKPQGHDVDLLITIPGRPTDPELLHKVVDLLKKQGLLLYGDIRERTFVEGQLPNPKPDQLDNHQKCFAILKLYRPKVDNSAVGTSKKVDMAEVKDWKAVRVDLVVAPDEQFAYALLGWTGSGMFRRDTRRYAEEERDMLLDNHGLYDLKKGIFLSADSEEEIFGHLDLDYLGPWERNA

SEQ ID NO: 5917 - DNA, 1182 bp, synthetic construct
  misc_feature 1..1182: note = Variant of terminal deoxynucleotidyl transferase
  source 1..1182: mol_type = other DNA
atgcaccatcatcaccatcacgggggctccggccatccggaaggtaataccccggagaaggaggtgccgagcgttatcgcccgtcatgttagtccgtacgcgtgccagcgcaagaccacgctgaataactacaacaaaaagatcaccgacgcgctggaaatcatggccgagaactacaagtttaaagagaacctgcaggcgcgcctggaggcccgtcgcgccgcgagtgtcctgaaaagcctgccgttcgaggttaccagcatgaaagacatccaaggtctgccgtgcattaccgacgacgtacgtcctgtgatcgaagagatcatcgaagtaggcgagagcagccgtgttaaagaaatcctcaatgacgagcgctacaaggcctttaagcagttcaccagcgtgttcggtgtgggcgtcaagaccgcggaaaagtggtaccgtatgggcctccgtacgctggaagaagcaaaggccagtaagagtctgaagctgaacaagatgcagaaggcgggcttcctgtactacgaggatctggcgagcggtgttagtaaagaagaagccgatgccgttctggatatcgtgaaggaaacggtgcgcactgttagtccggatgcgctggtgaccatcgccggcggtttccgccgtggcaaacctcagggccacgacgttgacctgctgatcacgattccgggccgtcctacggatccggagctgctccacaaagtggttgatctgctcaagaagcaaggtctgctgctgtacggggacatccgtgagcgtacgttcgtggaggggcaactgccaaatcctaaacctgaccagctggacaaccatcagaagtgcttcgccattctcaagctgtaccgtccgaaggtggataacagtgcggttgggacgtcgaagaaagtcgacatggctgaggttaaggattggaaagcggttcgtgtggatctggtggtcgctccagatgagcagttcgcctatgcgctgctcggttggacgggcagcggcatgtttcgtcgcgatactcgtcgctacgcggaggaaggtcgcgacatgctgctcgacaaccatggtctctacgacctgaaaaagggcatctttctgagtgcggacagcgaagaagagattttcggtcatctggacctggattatctggagccgtgggaacgcaacgcg

SEQ ID NO: 5918 - protein, 394 aa, synthetic construct
  REGION 1..394: note = Variant of terminal deoxynucleotidyl transferase
MHHHHHHGGSGHPEGNTPEKEVPSVIARHVSPYACQRKTTLNNYNKKITDALEIMAENYKFKENLQARLEARRAASVLKSLPFEVTSMKDIQGLPCITDDVRPVIEEIIEVGESSRVKEILNDERYKAFKQFTSVFGVGVKTAEKWYRMGLRTLEEAKASKSLKLNKMQKAGFLYYEDLASGVSKEEADAVLDIVKETVRTVSPDALVTIAGGFRRGKPQGHDVDLLITIPGRPTDPELLHKVVDLLKKQGLLLYGDIRERTFVEGQLPNPKPDQLDNHQKCFAILKLYRPKVDNSAVGTSKKVDMAEVKDWKAVRVDLVVAPDEQFAYALLGWTGSGMFRRDTRRYAEEGRDMLLDNHGLYDLKKGIFLSADSEEEIFGHLDLDYLEPWERNA

SEQ ID NO: 5919 - DNA, 1182 bp, synthetic construct
  misc_feature 1..1182: note = Variant of terminal deoxynucleotidyl transferase
  source 1..1182: mol_type = other DNA
atgcaccatcatcaccatcacgggggctccggccatccggaaggtaataccccggagaaggaggtgccgagcgttatcgcccgtcatgttagtccgtacgcgtgccagcgcaagaccacgctgaataactacaacaaaaagatcaccgacgcgctggaaatcatggccgagaactacaagtttaaagagaacctgcaggcgcgcctggaggcccgtcgcgccgcgagtgtcctgaaaagcctgccgttcgaggttaccagcatgaaagacatccaaggtctgccgtgcattaccgacgacgtacgtcctgtgatcgaagagatcatcgaagtaggcgagagcagccgtgttaaagaaatcctcaatgacgagcgctacaaggcctttaagcagttcaccagcgtgttcggtgtgggcgtcaagaccgcggaaaagtggtaccgtatgggcctccgtacgctggaagaagcaaaggccagtaagagtctgaagctgaacaagatgcagaaggcgggcttcctgtactacgaggatctggcgagcggtgttagtaaagaagaagccgatgccgttctggatatcgtgaaggaaacggtgcgcactgttagtccggatgcgctggtgaccatcgccggcggtttccgccgtggcaaacctcagggccacgacgttgacctgctgatcacgattccgggccgtcctacggatccggagctgctccacaaagtggttgatctgctcaagaagcaaggtctgctgctgtacggggacatccgtgagcgtacgttcgtggaggggcaactgccaaatcctaaacctgaccagctggacaaccatcagaagtgcttcgccattctcaagctgtaccgtccgaaggtggataacagtgcggttgggacgtcgaagaaagtcgacatggctgaggttaaggattggaaagcggttcgtgtggatctggtggtcgctccagatgagcagttcgcctatgcgctgctcggttggacgggcagcggcatgtttcgtcgcgatactcgtcgctacgcggaggaagagcgcgacatgctgctcgacaaccatggtctctacgacctgaaaaagggcatctttctgagtgcggacagcgaagaagagtgtttcggtcatctggacctggattatctggagccgtgggaacgcaacgcg

SEQ ID NO: 5920 - protein, 394 aa, synthetic construct
  REGION 1..394: note = Variant of terminal deoxynucleotidyl transferase
MHHHHHHGGSGHPEGNTPEKEVPSVIARHVSPYACQRKTTLNNYNKKITDALEIMAENYKFKENLQARLEARRAASVLKSLPFEVTSMKDIQGLPCITDDVRPVIEEIIEVGESSRVKEILNDERYKAFKQFTSVFGVGVKTAEKWYRMGLRTLEEAKASKSLKLNKMQKAGFLYYEDLASGVSKEEADAVLDIVKETVRTVSPDALVTIAGGFRRGKPQGHDVDLLITIPGRPTDPELLHKVVDLLKKQGLLLYGDIRERTFVEGQLPNPKPDQLDNHQKCFAILKLYRPKVDNSAVGTSKKVDMAEVKDWKAVRVDLVVAPDEQFAYALLGWTGSGMFRRDTRRYAEEERDMLLDNHGLYDLKKGIFLSADSEEECFGHLDLDYLEPWERNA

SEQ ID NO: 5921 - DNA, 1182 bp, synthetic construct
  misc_feature 1..1182: note = Variant of terminal deoxynucleotidyl transferase
  source 1..1182: mol_type = other DNA
atgcaccatcatcaccatcacgggggctccggccatccggaaggtaataccccggagaaggaggtgccgagcgttatcgcccgtcatgttagtccgtacgcgtgccagcgcaagaccacgctgaataactacaacaaaaagatcaccgacgcgctggaaatcatggccgagaactacaagtttaaagagaacctgcaggcgcgcctggaggcccgtcgcgccgcgagtgtcctgaaaagcctgccgttcgaggttaccagcatgaaagacatccaaggtctgccgtgcattaccgacgacgtacgtcctgtgatcgaagagatcatcgaagtaggcgagagcagccgtgttaaagaaatcctcaatgacgagcgctacaaggcctttaagcagttcaccagcgtgttcggtgtgggcgtcaagaccgcggaaaagtggtaccgtatgggcctccgtacgctggaagaagcaaaggccagtaagagtctgaagctgaacaagatgcagaaggcgggcttcctgtactacgaggatctggcgagtggtgttagtaaagaagaagccgatgccgttctggatatcgtgaaggaaacggtgcgcactgttagtccggatgcgctggtgaccatcgccggcggtttccgccgtgttaaacctcagggccacgacgttgacctgctgatcacgattccgggccgtcctacggatccggagctgctccacaaagtggttgatctgctcaagaagcaaggtctgctgctgtacggggacatccgtgagcgtacgttcgtggaggggcaactgccaaatcctaaacctgaccagctggacaaccatcagaagtgcttcgccattctcaagctgtaccgtccgaaggtggataacagtgcggttgggacgtcgaagaaagtcgacatggctgaggttaaggattggaaagcggttcgtgtggatctggtggtcgctccagatgagcagttcgcctatgcgctgctcggttggacgggcagcggcatgtttcgtcgcgatactcgtcgctacgcggaggaagagcgcgacatgctgctcgacaaccatggtctctacgacctgaaaaagggcatctttctgagtgcggacagcgaagaagagattttcggtcatctggacctggattatctggagccgtgggaacgcaacgcg

SEQ ID NO: 5922 - protein, 394 aa, synthetic construct
  REGION 1..394: note = Variant of terminal deoxynucleotidyl transferase
MHHHHHHGGSGHPEGNTPEKEVPSVIARHVSPYACQRKTTLNNYNKKITDALEIMAENYKFKENLQARLEARRAASVLKSLPFEVTSMKDIQGLPCITDDVRPVIEEIIEVGESSRVKEILNDERYKAFKQFTSVFGVGVKTAEKWYRMGLRTLEEAKASKSLKLNKMQKAGFLYYEDLASGVSKEEADAVLDIVKETVRTVSPDALVTIAGGFRRVKPQGHDVDLLITIPGRPTDPELLHKVVDLLKKQGLLLYGDIRERTFVEGQLPNPKPDQLDNHQKCFAILKLYRPKVDNSAVGTSKKVDMAEVKDWKAVRVDLVVAPDEQFAYALLGWTGSGMFRRDTRRYAEEERDMLLDNHGLYDLKKGIFLSADSEEEIFGHLDLDYLEPWERNA

SEQ ID NO: 5923 - DNA, 1182 bp, synthetic construct
  misc_feature 1..1182: note = Variant of terminal deoxynucleotidyl transferase
  source 1..1182: mol_type = other DNA
atgcaccatcatcaccatcacgggggctccggccatccggaaggtaataccccggagaaggaggtgccgagcgttatcgcccgtcatgttagtccgtacgcgtgccagcgcaagaccacgctgaataactacaacaaaaagatcaccgacgcgctggaaatcatggccgagaactacaagtttaaagagaacctgcaggcgcgcctggaggcccgtcgcgccgcgagtgtcctgaaaagcctgccgttcgaggttaccagcatgaaagacatccaaggtctgccgtgcattaccgacgacgtacgtcctgtgatcgaagagatcatcgaagtaggcgagagcagccgtgttaaagaaatcctcaatgacgagcgctacaaggcctttaagcagttcaccagcgtgttcggtgtgggcgtcaagaccgcggaaaagtggtaccgtatgggcctccgtacgctggaagaagcaaaggccagtaagagtctgaagctgaacaagatgcagaaggcgggcttcctgtactacgaggatctggcgagcggtgttagtaaagaagaagccgatgccgttctggatatcgtgaaggaaacggtgcgcactgttagtccggatgcgctggtgaccatcgccggcggtttccgccgtggcaaacctcagggccacgacgttgacctgctgatcacgattccgggccgtcctacggatccggagctgctccacaaagtggttgatctgctcaagaagcaaggtctgctgctgtacggggacatccgtgagcgtacgttcgtggaggggcaactgccaaatcctaaacctgaccagctggacaaccatcagaagtgcttcgccattctcaagctgtaccgtccgaaggtggataacagtgcggttgggacgtcgaagaaagtcgacatggctgaggttaaggattggaaagcggttcgtgtggatctggtggtcgctccagatgagcagttcgcctatgcgctgctcggttggacgggcagcggcgcgtttcgtcgcgatactcgtcgctacgcggaggaagagcgcgacatgctgctcgacaaccatggtctctacgacctgaaaaagggcatctttctgagtgcggacagcgaagaagagattttcggtcatctggacctggattatctggagccgtgggaacgcaacgcg

SEQ ID NO: 5924 - protein, 394 aa, synthetic construct
  REGION 1..394: note = Variant of terminal deoxynucleotidyl transferase
MHHHHHHGGSGHPEGNTPEKEVPSVIARHVSPYACQRKTTLNNYNKKITDALEIMAENYKFKENLQARLEARRAASVLKSLPFEVTSMKDIQGLPCITDDVRPVIEEIIEVGESSRVKEILNDERYKAFKQFTSVFGVGVKTAEKWYRMGLRTLEEAKASKSLKLNKMQKAGFLYYEDLASGVSKEEADAVLDIVKETVRTVSPDALVTIAGGFRRGKPQGHDVDLLITIPGRPTDPELLHKVVDLLKKQGLLLYGDIRERTFVEGQLPNPKPDQLDNHQKCFAILKLYRPKVDNSAVGTSKKVDMAEVKDWKAVRVDLVVAPDEQFAYALLGWTGSGAFRRDTRRYAEEERDMLLDNHGLYDLKKGIFLSADSEEEIFGHLDLDYLEPWERNA

SEQ ID NO: 5925 - DNA, 1182 bp, synthetic construct
  misc_feature 1..1182: note = Variant of terminal deoxynucleotidyl transferase
  source 1..1182: mol_type = other DNA
atgcaccatcatcaccatcacgggggctccggccatccggaaggtaataccccggagaaggaggtgccgagcgttatcgcccgtcatgttagtccgtacgcgtgccagcgcaagaccacgctgaataactacaacaaaaagatcaccgacgcgctggaaatcatggccgagaactacaagtttaaagagaacctgcaggcgcgcctggaggcccgtcgcgccgcgagtgtcctgaaaagcctgccgttcgaggttaccagcatgaaagacatccaaggtctgccgtgcattaccgacgacgtacgtcctgtgatcgaagagatcatcgaagtaggcgagagcagccgtgttaaagaaatcctcaatgacgagcgctacaaggcctttaagcagttcaccagcgtgttcggtgtgggcgtcaagaccgcggaaaagtggtaccgtatgggcctccgtacgctggaagaagcaaaggccagtaagagtctgaagctgaacaagatgcagaaggcgggcttcctgtactacgaggatctggcgagcggtgttagtaaagaagaagccgatgccgttctggatatcgtgaaggaaacggtgcgcactgttagtccggatgcgctggtgaccatcgccggcggtttccgccgtggcaaacctcagggccacgacgttgacctgctgatcacgattccgggccgtcctacggatccggagctgctccacaaagtggttgatctgctcaagaagcaaggtctgctgctgtacggggacatccgtgagcgtacgttcgtggaggggcaactgccaaatcctaaacctgaccagctggacaaccatcagaagtgcttcgccattctcaagctgtaccgtccgaaggtggataacagtgcggttgggacgtcgaagaaagtcgacatggctgaggttaaggattggaaagcggttcgtgtggatctggtggtcgctccagatgagcagttcgcctatgcgctgctcggttggacgggcagcggcatgtttcgtcgcgatactcgtcgctacgcgacggaagagcgcgacatgctgctcgacaaccatggtctctacgacctgaaaaagggcatctttctgagtgcggacagcgaagaagagattttcggtcatctggacctggattatctggagccgtgggaacgcaacgcg

SEQ ID NO: 5926 - protein, 394 aa, synthetic construct
  REGION 1..394: note = Variant of terminal deoxynucleotidyl transferase
MHHHHHHGGSGHPEGNTPEKEVPSVIARHVSPYACQRKTTLNNYNKKITDALEIMAENYKFKENLQARLEARRAASVLKSLPFEVTSMKDIQGLPCITDDVRPVIEEIIEVGESSRVKEILNDERYKAFKQFTSVFGVGVKTAEKWYRMGLRTLEEAKASKSLKLNKMQKAGFLYYEDLASGVSKEEADAVLDIVKETVRTVSPDALVTIAGGFRRGKPQGHDVDLLITIPGRPTDPELLHKVVDLLKKQGLLLYGDIRERTFVEGQLPNPKPDQLDNHQKCFAILKLYRPKVDNSAVGTSKKVDMAEVKDWKAVRVDLVVAPDEQFAYALLGWTGSGMFRRDTRRYATEERDMLLDNHGLYDLKKGIFLSADSEEEIFGHLDLDYLEPWERNA

SEQ ID NO: 5927 - DNA, 1182 bp, synthetic construct
  misc_feature 1..1182: note = Variant of terminal deoxynucleotidyl transferase
  source 1..1182: mol_type = other DNA
atgcaccatcatcaccatcacgggggctccggccatccggaaggtaataccccggagaaggaggtgccgagcgttatcgcccgtcatgttagtccgtacgcgtgccagcgcaagaccacgctgaataactacaacaaaaagatcaccgacgcgctggaaatcatggccgagaactacaagtttaaagagaacctgcaggcgcgcctggaggcccgtcgcgccgcgagtgtcctgaaaagcctgccgttcgaggttaccagcatgaaagacatccaaggtctgccgtgcattaccgacgacgtacgtcctgtgatcgaagagatcatcgaagtaggcgagagcagccgtgttaaagaaatcctcaatgacgagcgctacaaggcctttaagcagttcaccagcgtgttcggtgtgggcgtcaagaccgcggaaaagtggtaccgtatgggcctccgtacgctggaagaagcaaaggccagtaagagtctgaagctgaacaagatgcagaaggcgggcttcctgtactacgaggatctggcgagcggtgttagtaaagaagaagccgatgccgttctggatatcgtgaaggaaacggtgcgcactgttagtccggatgcgctggtgaccatcgccggcggtttccgccgtggcaaacctcagggccacgacgttgacctgctgatcacgattccgggccgtcctacggatccggagctgctccacaaagtggttgatctgctcaagaagcaaggtctgctgctgtacggggacatccgtgagcgtacgttcgtggaggggcaactgccaaatcctaaacctgaccagctggacaaccatcagaagtgcttcgccattctcaagctgtaccgtccgaaggtggataacagtgcggttgggacgtcgaagaaagtcgacatggctgaggttaaggattggaaagcggttcgtgtggatctggtggtcgctccagatgagcagttcgcctatgcgctgctcggttggacgggcagcggcatgtttcgtaaggatactcgtcgctacgcggaggaagagcgcgacatgctgctcgacaaccatggtctctacgacctgaaaaagggcatctttctgagtgcggacagcgaagaagagattttcggtcatctggacctggattatctggagccgtgggaacgcaacgcg

SEQ ID NO: 5928 - protein, 394 aa, synthetic construct
  REGION 1..394: note = Variant of terminal deoxynucleotidyl transferase
MHHHHHHGGSGHPEGNTPEKEVPSVIARHVSPYACQRKTTLNNYNKKITDALEIMAENYKFKENLQARLEARRAASVLKSLPFEVTSMKDIQGLPCITDDVRPVIEEIIEVGESSRVKEILNDERYKAFKQFTSVFGVGVKTAEKWYRMGLRTLEEAKASKSLKLNKMQKAGFLYYEDLASGVSKEEADAVLDIVKETVRTVSPDALVTIAGGFRRGKPQGHDVDLLITIPGRPTDPELLHKVVDLLKKQGLLLYGDIRERTFVEGQLPNPKPDQLDNHQKCFAILKLYRPKVDNSAVGTSKKVDMAEVKDWKAVRVDLVVAPDEQFAYALLGWTGSGMFRKDTRRYAEEERDMLLDNHGLYDLKKGIFLSADSEEEIFGHLDLDYLEPWERNA

SEQ ID NO: 5929 - DNA, 1182 bp, synthetic construct
  misc_feature 1..1182: note = Variant of terminal deoxynucleotidyl transferase
  source 1..1182: mol_type = other DNA
atgcaccatcatcaccatcacgggggctccggccatccggaaggtaataccccggagaaggaggtgccgagcgttatcgcccgtcatgttagtccgtacgcgtgccagcgcaagaccacgctgaataactacaacaaaaagatcaccgacgcgctggaaatcatggccgagaactacaagtttaaagagaacctgcaggcgcgcctggaggcccgtcgcgccgcgagtgtcctgaaaagcctgccgttcgaggttaccagcatgaaagacatccaaggtctgccgtgcattaccgacgacgtacgtcctgtgatcgaagagatcatcgaagtaggcgagagcagccgtgttaaagaaatcctcaatgacgagcgctacaaggcctttaagcagttcaccagcgtgttcggtgtgggcgtcaagaccgcggaaaagtggtaccgtatgggcctccgtacgctggaagaagcaaaggccagtaagagtctgaagctgaacaagatgcagaaggcgggcttcctgtactacgaggatctggcgagcggtgttagtaaagaagaagccgatgccgttctggatatcgtgaaggaaacggtgcgcactgttagtccggatgcgctggtgaccatcgccggcggtttccgccgtggcaaacctcagggccacgacgttgacctgctgatcacgattccgggccgtcctacggatccggagctgctccacaaagtggttgatctgctcaagaagcaaggtctgctgctgtacggggacatccgtgagcgtacgttcgtggaggggcaactgccaaatcctaaacctgaccagctggacaaccatcagaagtgcttcgccattctcaagctgtaccgtccgaaggtggataacagtgcggttgggacgtcgaagaaagtcgacatggctgaggttaaggattggaaagcggttcgtgtggatctggtggtcgctccagatgagcagttcgcctatgcgctgctcggttggacgggcagcggcatgtttcgtcgcgatactcgtcgctacgcggaggaagagcgcgacatgctgctcgacaaccatggtctctacgacctgaaaaagggcatctttctgagtgcggacagcgaagaagagattttcggtcatctggacctggtttatctggagccgtgggaacgcaacgcg

SEQ ID NO: 5930 - protein, 394 aa, synthetic construct
  REGION 1..394: note = Variant of terminal deoxynucleotidyl transferase
MHHHHHHGGSGHPEGNTPEKEVPSVIARHVSPYACQRKTTLNNYNKKITDALEIMAENYKFKENLQARLEARRAASVLKSLPFEVTSMKDIQGLPCITDDVRPVIEEIIEVGESSRVKEILNDERYKAFKQFTSVFGVGVKTAEKWYRMGLRTLEEAKASKSLKLNKMQKAGFLYYEDLASGVSKEEADAVLDIVKETVRTVSPDALVTIAGGFRRGKPQGHDVDLLITIPGRPTDPELLHKVVDLLKKQGLLLYGDIRERTFVEGQLPNPKPDQLDNHQKCFAILKLYRPKVDNSAVGTSKKVDMAEVKDWKAVRVDLVVAPDEQFAYALLGWTGSGMFRRDTRRYAEEERDMLLDNHGLYDLKKGIFLSADSEEEIFGHLDLVYLEPWERNA

SEQ ID NO: 5931 - DNA, 1182 bp, synthetic construct
  misc_feature 1..1182: note = Variant of terminal deoxynucleotidyl transferase
  source 1..1182: mol_type = other DNA
atgcaccatcatcaccatcacgggggctccggccatccggaaggtaataccccggagaaggaggtgccgagcgttatcgcccgtcatgttagtccgtacgcgtgccagcgcaagaccacgctgaataactacaacaaaaagatcaccgacgcgctggaaatcatggccgagaactacaagtttaaagagaacctgcaggcgcgcctggaggcccgtcgcgccgcgagtgtcctgaaaagcctgccgttcgaggttaccagcatgaaagacatccaaggtctgccgtgcattaccgacgacgtacgtcctgtgatcgaagagatcatcgaagtaggcgagagcagccgtgttaaagaaatcctcaatgacgagcgctacaaggcctttaagcagttcaccagcgtgttcggtgtgggcgtcaagaccgcggaaaagtggtaccgtatgggcctccgtacgctggaagaagcaaaggccagtaagagtctgaagctgaacaagatgcagaaggcgggcttcctgtactacgaggatctggcgagcggtgttagtaaagaagaagccgatgccgttctggatatcgtgaaggaaacggtgcgcactgttagtccggatgcgctggtgaccatcgccggcggtttccgccgtggcaaacctcagggccacgacgttgacctgctgatcacgattccgggccgtcctacggatccggagctgctccacaaagtggttgatctgctcaagaagcaaggtctgctgctgtacggggacatccgtgagcgtacgttcgtgtatgggcaactgccaaatcctaaacctgaccagctggacaaccatcagaagtgcttcgccattctcaagctgtaccgtccgaaggtggataacagtgcggttgggacgtcgaagaaagtcgacatggctgaggttaaggattggaaagcggttcgtgtggatctggtggtcgctccagatgagcagttcgcctatgcgctgctcggttggacgggcagcggcatgtttcgtcgcgatactcgtcgctacgcggaggaagagcgcgacatgctgctcgacaaccatggtctctacgacctgaaaaagggcatctttctgagtgcggacagcgaagaagagattttcggtcatctggacctggattatctggagccgtgggaacgcaacgcg

SEQ ID NO: 5932 - protein, 394 aa, synthetic construct
  REGION 1..394: note = Variant of terminal deoxynucleotidyl transferase
MHHHHHHGGSGHPEGNTPEKEVPSVIARHVSPYACQRKTTLNNYNKKITDALEIMAENYKFKENLQARLEARRAASVLKSLPFEVTSMKDIQGLPCITDDVRPVIEEIIEVGESSRVKEILNDERYKAFKQFTSVFGVGVKTAEKWYRMGLRTLEEAKASKSLKLNKMQKAGFLYYEDLASGVSKEEADAVLDIVKETVRTVSPDALVTIAGGFRRGKPQGHDVDLLITIPGRPTDPELLHKVVDLLKKQGLLLYGDIRERTFVYGQLPNPKPDQLDNHQKCFAILKLYRPKVDNSAVGTSKKVDMAEVKDWKAVRVDLVVAPDEQFAYALLGWTGSGMFRRDTRRYAEEERDMLLDNHGLYDLKKGIFLSADSEEEIFGHLDLDYLEPWERNA

SEQ ID NO: 5933 - DNA, 1182 bp, synthetic construct
  misc_feature 1..1182: note = Variant of terminal deoxynucleotidyl transferase
  source 1..1182: mol_type = other DNA
atgcaccatcatcaccatcacgggggctccggccatccggaaggtaataccccggagaaggaggtgccgagcgttatcgcccgtcatgttagtccgtacgcgtgccagcgcaagaccacgctgaataactacaacaaaaagatcaccgacgcgctggaaatcatggccgagaactacaagtttaaagagaacctgcaggcgcgcctggaggcccgtcgcgccgcgagtgtcctgaaaagcctgccgttcgaggttaccagcatgaaagacatccaaggtctgccgtgcattaccgacgacgtacgtcctgtgatcgaagagatcatcgaagtaggcgagagcagccgtgttaaagaaatcctcaatgacgagcgctacaaggcctttaagcagttcaccagcgtgttcggtgtgggcgtcaagaccgcggaaaagtggtaccgtatgggcctccgtacgctggaagaagcaaaggccagtaagagtctgaagctgaacaagatgcagaaggcgggcttcctgtactacgaggatctggcgagcggtgttagtaaagaagaagccgatgccgttctggatatcgtgaaggaaacggtgcgcactgttagtccggatgcgctggtgaccatcgccggcggtttccgccgtggcaaacctcagggccacgacgttgacctgctgatcacgattccgggccgtcctacggatccggagctgctccacaaagtggttgatctgctcaagaagcaaggtctgctgctgtacggggacatccgtgagcgtacgttcgtggaggggcaactgccaaatcctaaacctgaccagctggacaaccatcagaagtgcttcgccattctcaagctgtaccgtccgaaggtggataacagtgcggttgggacgtcgaagaaagtcgacatggctgaggttaaggattggaaagcggttcgtgtggatctggtggtcgctccagatgagcagttcgcctatgcgctgctcggttggacgggcagcggcatgtttcgtcgcgatactcgtcgctacgcggaggaaaggcgcgacatgctgctcgacaaccatggtctctacgacctgaaaaagggcatctttctgagtgcggacagcgaagaagagattttcggtcatctggacctggattatctggagccgtgggaacgcaacgcg

SEQ ID NO: 5934 - protein, 394 aa, synthetic construct
  REGION 1..394: note = Variant of terminal deoxynucleotidyl transferase
MHHHHHHGGSGHPEGNTPEKEVPSVIARHVSPYACQRKTTLNNYNKKITDALEIMAENYKFKENLQARLEARRAASVLKSLPFEVTSMKDIQGLPCITDDVRPVIEEIIEVGESSRVKEILNDERYKAFKQFTSVFGVGVKTAEKWYRMGLRTLEEAKASKSLKLNKMQKAGFLYYEDLASGVSKEEADAVLDIVKETVRTVSPDALVTIAGGFRRGKPQGHDVDLLITIPGRPTDPELLHKVVDLLKKQGLLLYGDIRERTFVEGQLPNPKPDQLDNHQKCFAILKLYRPKVDNSAVGTSKKVDMAEVKDWKAVRVDLVVAPDEQFAYALLGWTGSGMFRRDTRRYAEERRDMLLDNHGLYDLKKGIFLSADSEEEIFGHLDLDYLEPWERNA

SEQ ID NO: 5935 - DNA, 1182 bp, synthetic construct
  misc_feature 1..1182: note = Variant of terminal deoxynucleotidyl transferase
  source 1..1182: mol_type = other DNA
atgcaccatcatcaccatcacgggggctccggccatccggaaggtaataccccggagaaggaggtgccgagcgttatcgcccgtcatgttagtccgtacgcgtgccagcgcaagaccacgctgaataactacaacaaaaagatcaccgacgcgctggaaatcatggccgagaactacaagtttaaagagaacctgcaggcgcgcctggaggcccgtcgcgccgcgagtgtcctgaaaagcctgccgttcgaggttaccagcatgaaagacatccaaggtctgccgtgcattaccgacgacgtacgtcctgtgatcgaagagatcatcgaagtaggcgagagcagccgtgttaaagaaatcctcaatgacgagcgctacaaggcctttaagcagttcaccagcgtgttcggtgtgggcgtcaagaccgcggaaaagtggtaccgtatgggcctccgtacgctggaagaagcaaaggccagtaagagtctgaagctgaacaagatgcagaaggcgggcttcctgtactacgaggatctggcgagcggtgttagtaaagaagaagccgatgccgttctggatatcgtgaaggaaacggtgcgcactgttagtccggatgcgctggtgaccatcgccggcggtttccgccgttataaacctcagggccacgacgttgacctgctgatcacgattccgggccgtcctacggatccggagctgctccacaaagtggttgatctgctcaagaagcaaggtctgctgctgtacggggacatccgtgagcgtacgttcgtggaggggcaactgccaaatcctaaacctgaccagctggacaaccatcagaagtgcttcgccattctcaagctgtaccgtccgaaggtggataacagtgcggttgggacgtcgaagaaagtcgacatggctgaggttaaggattggaaagcggttcgtgtggatctggtggtcgctccagatgagcagttcgcctatgcgctgctcggttggacgggcagcggcatgtttcgtcgcgatactcgtcgctacgcggaggaagagcgcgacatgctgctcgacaaccatggtctctacgacctgaaaaagggcatctttctgagtgcggacagcgaagaagagattttcggtcatctggacctggattatctggagccgtgggaacgcaacgcg

SEQ ID NO: 5936 - protein, 394 aa, synthetic construct
  REGION 1..394: note = Variant of terminal deoxynucleotidyl transferase
MHHHHHHGGSGHPEGNTPEKEVPSVIARHVSPYACQRKTTLNNYNKKITDALEIMAENYKFKENLQARLEARRAASVLKSLPFEVTSMKDIQGLPCITDDVRPVIEEIIEVGESSRVKEILNDERYKAFKQFTSVFGVGVKTAEKWYRMGLRTLEEAKASKSLKLNKMQKAGFLYYEDLASGVSKEEADAVLDIVKETVRTVSPDALVTIAGGFRRYKPQGHDVDLLITIPGRPTDPELLHKVVDLLKKQGLLLYGDIRERTFVEGQLPNPKPDQLDNHQKCFAILKLYRPKVDNSAVGTSKKVDMAEVKDWKAVRVDLVVAPDEQFAYALLGWTGSGMFRRDTRRYAEEERDMLLDNHGLYDLKKGIFLSADSEEEIFGHLDLDYLEPWERNA

SEQ ID NO: 5937 - DNA, 1182 bp, synthetic construct
  misc_feature 1..1182: note = Variant of terminal deoxynucleotidyl transferase
  source 1..1182: mol_type = other DNA
atgcaccatcatcaccatcacgggggctccggccatccggaaggtaataccccggagaaggaggtgccgagcgttatcgcccgtcatgttagtccgtacgcgtgccagcgcaagaccacgctgaataactacaacaaaaagatcaccgacgcgctggaaatcatggccgagaactacaagtttaaagagaacctgcaggcgcgcctggaggcccgtcgcgccgcgagtgtcctgaaaagcctgccgttcgaggttaccagcatgaaagacatccaaggtctgccgtgcattaccgacgacgtacgtcctgtgatcgaagagatcatcgaagtaggcgagagcagccgtgttaaagaaatcctcaatgacgagcgctacaaggcctttaagcagttcaccagcgtgttcggtgtgggcgtcaagaccgcggaaaagtggtaccgtatgggcctccgtacgctggaagaagcaaaggccagtaagagtctgaagctgaacaagatgcagaaggcgggcttcctgtactacgaggatctggcgagcggtgttagtaaagaagaagccgatgccgttctggatatcgtgaaggaaacggtgcgcactgttagtccggatgcgctggtgaccatcgccggcggtttccgccgtggcaaacctcagggccacgacgttgacctgctgatcacgattccgggccgtcctacggatccggagctgctccacaaagtggttgatctgctcaagaagcaaggtctgctgctgtacggggacatccgtgagcgtacgttcgtggaggggcaactgccaaatcctaaacctgaccagctggacaaccatcagaagtgcttcgccattctcaagctgtaccgtccgaaggtggataacagtgcggttgggacgtcgaagaaagtcgacatggctgaggttaaggattggaaagcggttcgtgtggatctggtggtcgctccagatgagcagttcgcctatgcgctgctcggttggacgggcagcggcatgtttcgtcgcgatactcgtcgctacgcggaggaagagcgcgaccagctgctcgacaaccatggtctctacgacctgaaaaagggcatctttctgagtgcggacagcgaagaagagattttcggtcatctggacctggattatctggagccgtgggaacgcaacgcg

SEQ ID NO: 5938 - protein, 394 aa, synthetic construct
  REGION 1..394: note = Variant of terminal deoxynucleotidyl transferase
MHHHHHHGGSGHPEGNTPEKEVPSVIARHVSPYACQRKTTLNNYNKKITDALEIMAENYKFKENLQARLEARRAASVLKSLPFEVTSMKDIQGLPCITDDVRPVIEEIIEVGESSRVKEILNDERYKAFKQFTSVFGVGVKTAEKWYRMGLRTLEEAKASKSLKLNKMQKAGFLYYEDLASGVSKEEADAVLDIVKETVRTVSPDALVTIAGGFRRGKPQGHDVDLLITIPGRPTDPELLHKVVDLLKKQGLLLYGDIRERTFVEGQLPNPKPDQLDNHQKCFAILKLYRPKVDNSAVGTSKKVDMAEVKDWKAVRVDLVVAPDEQFAYALLGWTGSGMFRRDTRRYAEEERDQLLDNHGLYDLKKGIFLSADSEEEIFGHLDLDYLEPWERNA

SEQ ID NO: 5939 - DNA, 1182 bp, synthetic construct
  misc_feature 1..1182: note = Variant of terminal deoxynucleotidyl transferase
  source 1..1182: mol_type = other DNA
atgcaccatcatcaccatcacgggggctccggccatccggaaggtaataccccggagaaggaggtgccgagcgttatcgcccgtcatgttagtccgtacgcgtgccagcgcaagaccacgctgaataactacaacaaaaagatcaccgacgcgctggaaatcatggccgagaactacaagtttaaagagaacctgcaggcgcgcctggaggcccgtcgcgccgcgagtgtcctgaaaagcctgccgttcgaggttaccagcatgaaagacatccaaggtctgccgtgcattaccgacgacgtacgtcctgtgatcgaagagatcatcgaagtaggcgagagcagccgtgttaaagaaatcctcaatgacgagcgctacaaggcctttaagcagttcaccagcgtgttcggtgtgggcgtcaagaccgcggaaaagtggtaccgtatgggcctccgtacgctggaagaagcaaaggccagtaagagtctgaagctgaacaagatgcagaaggcgggcttcctgtactacgaggatctggcgagcggtgttagtaaagaagaagccgatgccgttctggatatcgtgaaggaaacggtgcgcactgttagtccggatgcgctggtgaccatcgccggcggtttccgccgtggcaaacctcagggccacgacgttgacctgctgatcacgattccgggccgtcctacggatccggagctgctccacaaagtggttgatctgctcaagaagcaaggtctgctgctgtacggggacatccgtgagcgtacgttcgtggaggggcaactgccaaatcctaaacctgaccagctggacaaccatcagaagtgcttcgccattctcaagctgtaccgtccgaaggtggataacagtgcggttgggacgtcgaagaaagtcgacatggctgaggttaaggattggaaagcggttcgtgtggatctggtggtcgctccagatgagcagttcgcctatgcgctgctcggttggacgggcagcggcatgtttcgtcgcgatactcgtcgctacgcggaggaagagcgcgacatgctgctcgacaaccatggtctctacgacctgaaaaagggcatcttttgtagtgcggacagcgaagaagagattttcggtcatctggacctggattatctggagccgtgggaacgcaacgcg

SEQ ID NO: 5940 - protein, 394 aa, synthetic construct
  REGION 1..394: note = Variant of terminal deoxynucleotidyl transferase
MHHHHHHGGSGHPEGNTPEKEVPSVIARHVSPYACQRKTTLNNYNKKITDALEIMAENYKFKENLQARLEARRAASVLKSLPFEVTSMKDIQGLPCITDDVRPVIEEIIEVGESSRVKEILNDERYKAFKQFTSVFGVGVKTAEKWYRMGLRTLEEAKASKSLKLNKMQKAGFLYYEDLASGVSKEEADAVLDIVKETVRTVSPDALVTIAGGFRRGKPQGHDVDLLITIPGRPTDPELLHKVVDLLKKQGLLLYGDIRERTFVEGQLPNPKPDQLDNHQKCFAILKLYRPKVDNSAVGTSKKVDMAEVKDWKAVRVDLVVAPDEQFAYALLGWTGSGMFRRDTRRYAEEERDMLLDNHGLYDLKKGIFCSADSEEEIFGHLDLDYLEPWERNA

SEQ ID NO: 5941 - DNA, 1182 bp, synthetic construct
  misc_feature 1..1182: note = Variant of terminal deoxynucleotidyl transferase
  source 1..1182: mol_type = other DNA
atgcaccatcatcaccatcacgggggctccggccatccggaaggtaataccccggagaaggaggtgccgagcgttatcgcccgtcatgttagtccgtacgcgtgccagcgcaagaccacgctgaataactacaacaaaaagatcaccgacgcgctggaaatcatggccgagaactacaagtttaaagagaacctgcaggcgcgcctggaggcccgtcgcgccgcgagtgtcctgaaaagcctgccgttcgaggttaccagcatgaaagacatccaaggtctgccgtgcattaccgacgacgtacgtcctgtgatcgaagagatcatcgaagtaggcgagagcagccgtgttaaagaaatcctcaatgacgagcgctacaaggcctttaagcagttcaccagcgtgttcggtgtgggcgtcaagaccgcggaaaagtggtaccgtatgggcctccgtacgctggaagaagcaaaggccagtaagagtctgaagctgaacaagatgcagaaggcgggcttcctgtactacgaggatctggcgagcggtgttagtaaagaagaagccgatgccgttctggatatcgtgaaggaaacggtgcgcactgttagtccggatgcgctggtgaccatcgccggcggtttccgccgtggcaaacctcagggccacgacgttgacctgctgatcacgattccgggccgtcctacggatccggagctgctccacaaagtggttgatctgctcaagaagcaaggtctgctgctgtacggggacatccgtgagcgtacgttcgtggaggggcaactgccaaatcctaaacctgaccagctggacaaccatcagaagtgcttcgccattctcaagctgtaccgtccgaaggtggataacagtgcggttgggacgtcgaagaaagtcgacatggctgaggttaaggattggaaagcggttcgtgtggatctggtggtcgctccagatgagcagttcgcctatgcgctgctcggttggacgggcagcggcatgtttcgtcgcgatactcgtcgctacgcggaggaagagcgcgacatgctgctcgacaaccatggtctctacgacctgaaaaagggcatcttttttagtgcggacagcgaagaagagattttcggtcatctggacctggattatctggagccgtgggaacgcaacgcg

SEQ ID NO: 5942 - protein, 394 aa, synthetic construct
  REGION 1..394: note = Variant of terminal deoxynucleotidyl transferase
MHHHHHHGGSGHPEGNTPEKEVPSVIARHVSPYACQRKTTLNNYNKKITDALEIMAENYKFKENLQARLEARRAASVLKSLPFEVTSMKDIQGLPCITDDVRPVIEEIIEVGESSRVKEILNDERYKAFKQFTSVFGVGVKTAEKWYRMGLRTLEEAKASKSLKLNKMQKAGFLYYEDLASGVSKEEADAVLDIVKETVRTVSPDALVTIAGGFRRGKPQGHDVDLLITIPGRPTDPELLHKVVDLLKKQGLLLYGDIRERTFVEGQLPNPKPDQLDNHQKCFAILKLYRPKVDNSAVGTSKKVDMAEVKDWKAVRVDLVVAPDEQFAYALLGWTGSGMFRRDTRRYAEEERDMLLDNHGLYDLKKGIFFSADSEEEIFGHLDLDYLEPWERNA

SEQ ID NO: 5943 - DNA, 1182 bp, synthetic construct
  misc_feature 1..1182: note = Variant of terminal deoxynucleotidyl transferase
  source 1..1182: mol_type = other DNA
atgcaccatcatcaccatcacgggggctccggccatccggaaggtaataccccggagaaggaggtgccgagcgttatcgcccgtcatgttagtccgtacgcgtgccagcgcaagaccacgctgaataactacaacaaaaagatcaccgacgcgctggaaatcatggccgagaactacaagtttaaagagaacctgcaggcgcgcctggaggcccgtcgcgccgcgagtgtcctgaaaagcctgccgttcgaggttaccagcatgaaagacatccaaggtctgccgtgcattaccgacgacgtacgtcctgtgatcgaagagatcatcgaagtaggcgagagcagccgtgttaaagaaatcctcaatgacgagcgctacaaggcctttaagcagttcaccagcgtgttcggtgtgggcgtcaagaccgcggaaaagtggtaccgtatgggcctccgtacgctggaagaagcaaaggccagtaagagtctgaagctgaacaagatgcagaaggcgggcttcctgtactacgaggatctggcgagcggtgttagtaaagaagaagccgatgccgttctggatatcgtgaaggaaacggtgcgcactgttagtccggatgcgctggtgaccatcgccggcggtttccgccgtggcaaacctcagggccacgacgttgacctgctgatcacgattccgggccgtcctacggatccggagctgctccacaaagtggttgatctgctcaagaagcaaggtctgctgctgtacggggacatccgtgagcgtacgttcgtggaggggcaactgccaaatcctaaacctgaccagctggacaaccatcagaagtgcttcgccattctcaagctgtaccgtccgaaggtggataacagtgcggttgggacgtcgaagaaagtcgacatggctgaggttaaggattggaaagcggttcgtgtggatctggtggtcgctccagatgagcagttcgcctatgcgctgctcggttggacgggcagcggcatgtttcgtcgcgatactcgtcgctacgcggaggaagagcgcgacatgctgctcgacaaccatggtctctacgacctgaaaaaggatatctttctgagtgcggacagcgaagaagagattttcggtcatctggacctggattatctggagccgtgggaacgcaacgcg

SEQ ID NO: 5944 - protein, 394 aa, synthetic construct
  REGION 1..394: note = Variant of terminal deoxynucleotidyl transferase
MHHHHHHGGSGHPEGNTPEKEVPSVIARHVSPYACQRKTTLNNYNKKITDALEIMAENYKFKENLQARLEARRAASVLKSLPFEVTSMKDIQGLPCITDDVRPVIEEIIEVGESSRVKEILNDERYKAFKQFTSVFGVGVKTAEKWYRMGLRTLEEAKASKSLKLNKMQKAGFLYYEDLASGVSKEEADAVLDIVKETVRTVSPDALVTIAGGFRRGKPQGHDVDLLITIPGRPTDPELLHKVVDLLKKQGLLLYGDIRERTFVEGQLPNPKPDQLDNHQKCFAILKLYRPKVDNSAVGTSKKVDMAEVKDWKAVRVDLVVAPDEQFAYALLGWTGSGMFRRDTRRYAEEERDMLLDNHGLYDLKKDIFLSADSEEEIFGHLDLDYLEPWERNA

SEQ ID NO: 5945 - DNA, 1182 bp, synthetic construct
  misc_feature 1..1182: note = Variant of terminal deoxynucleotidyl transferase
  source 1..1182: mol_type = other DNA
atgcaccatcatcaccatcacgggggctccggccatccggaaggtaataccccggagaaggaggtgccgagcgttatcgcccgtcatgttagtccgtacgcgtgccagcgcaagaccacgctgaataactacaacaaaaagatcaccgacgcgctggaaatcatggccgagaactacaagtttaaagagaacctgcaggcgcgcctggaggcccgtcgcgccgcgagtgtcctgaaaagcctgccgttcgaggttaccagcatgaaagacatccaaggtctgccgtgcattaccgacgacgtacgtcctgtgatcgaagagatcatcgaagtaggcgagagcagccgtgttaaagaaatcctcaatgacgagcgctacaaggcctttaagcagttcaccagcgtgttcggtgtgggcgtcaagaccgcggaaaagtggtaccgtatgggcctccgtacgctggaagaagcaaaggccagtaagagtctgaagctgaacaagatgcagaaggcgggcttcctgtactacgaggatctggcgagcggtgttagtaaagaagaagccgatgccgttctggatatcgtgaaggaaacggtgcgcactgttagtccggatgcgctggtgaccatcgccggcggtttccgccgtggcaaacctcagggccacgacgttgacctgctgatcacgattccgggccgtcctacggatccggagctgctccacaaagtggttgatctgctcaagaagcaaggtctgctgctgtacggggacatccgtgagcgtacgttcgtggaggggcaactgccaaatcctaaacctgaccagctggacaaccatcagaagtgcttcgccattctcaagctgtaccgtccgaaggtggataacagtgcggttgggacgtcgaagaaagtcgacatggctgaggttaaggattggaaagcggttcgtgtggatctggtggtcgctccagatgagcagttcgcctatgcgctgctcggttggacgggcagcggcatgtttcgtcgcgatactcgtcgctacgcggaggaagagcgcgacatgctgctcgacaaccatggtctctacgacctggctaagggcatctttctgagtgcggacagcgaagaagagattttcggtcatctggacctggattatctggagccgtgggaacgcaacgcg

SEQ ID NO: 5946 - protein, 394 aa, synthetic construct
  REGION 1..394: note = Variant of terminal deoxynucleotidyl transferase
MHHHHHHGGSGHPEGNTPEKEVPSVIARHVSPYACQRKTTLNNYNKKITDALEIMAENYKFKENLQARLEARRAASVLKSLPFEVTSMKDIQGLPCITDDVRPVIEEIIEVGESSRVKEILNDERYKAFKQFTSVFGVGVKTAEKWYRMGLRTLEEAKASKSLKLNKMQKAGFLYYEDLASGVSKEEADAVLDIVKETVRTVSPDALVTIAGGFRRGKPQGHDVDLLITIPGRPTDPELLHKVVDLLKKQGLLLYGDIRERTFVEGQLPNPKPDQLDNHQKCFAILKLYRPKVDNSAVGTSKKVDMAEVKDWKAVRVDLVVAPDEQFAYALLGWTGSGMFRRDTRRYAEEERDMLLDNHGLYDLAKGIFLSADSEEEIFGHLDLDYLEPWERNA

SEQ ID NO: 5947 - DNA, 1182 bp, synthetic construct
  misc_feature 1..1182: note = Variant of terminal deoxynucleotidyl transferase
  source 1..1182: mol_type = other DNA
atgcaccatcatcaccatcacgggggctccggccatccggaaggtaataccccggagaaggaggtgccgagcgttatcgcccgtcatgttagtccgtacgcgtgccagcgcaagaccacgctgaataactacaacaaaaagatcaccgacgcgctggaaatcatggccgagaactacaagtttaaagagaacctgcaggcgcgcctggaggcccgtcgcgccgcgagtgtcctgaaaagcctgccgttcgaggttaccagcatgaaagacatccaaggtctgccgtgcattaccgacgacgtacgtcctgtgatcgaagagatcatcgaagtaggcgagagcagccgtgttaaagaaatcctcaatgacgagcgctacaaggcctttaagcagttcaccagcgtgttcggtgtgggcgtcaagaccgcggaaaagtggtaccgtatgggcctccgtacgctggaagaagcaaaggccagtaagagtctgaagctgaacaagatgcagaaggcgggcttcctgtactacgaggatctggcgagcggtgttagtaaagaagaagccgatgccgttctggatatcgtgaaggaaacggtgcgcactgttagtccggatgcgctggtgaccatcgccggcggtttccgccgtggcaaacctcagggccacgacgttgacctgctgatcacgattccgggccgtcctacggatccggagctgctccacaaagtggttgatctgctcaagaagcaaggtctgctgctgtacggggacatccgtgagcgtacgttcgtggaggggcaactgccaaatcctaaacctgaccagctggacaaccatcagaagtgcttcgccattctcaagctgtaccgtccgaaggtggataacagtgcggttgggacgtcgaagaaagtcgacatggctgaggttaaggattggaaagcggttcgtgtggatctggtggtcgctccagatgagcagttcgcctatgcgctgctcggttggacgggcagcggcatgtttcgtcgcgatactcgtcgctacgcggaggaagagcgcgacatgctgctcgacaaccatggtctctacgacctgaaaaagggcatctttcagagtgcggacagcgaagaagagattttcggtcatctggacctggattatctggagccgtgggaacgcaacgcg

SEQ ID NO: 5948 - protein, 394 aa, synthetic construct
  REGION 1..394: note = Variant of terminal deoxynucleotidyl transferase
MHHHHHHGGSGHPEGNTPEKEVPSVIARHVSPYACQRKTTLNNYNKKITDALEIMAENYKFKENLQARLEARRAASVLKSLPFEVTSMKDIQGLPCITDDVRPVIEEIIEVGESSRVKEILNDERYKAFKQFTSVFGVGVKTAEKWYRMGLRTLEEAKASKSLKLNKMQKAGFLYYEDLASGVSKEEADAVLDIVKETVRTVSPDALVTIAGGFRRGKPQGHDVDLLITIPGRPTDPELLHKVVDLLKKQGLLLYGDIRERTFVEGQLPNPKPDQLDNHQKCFAILKLYRPKVDNSAVGTSKKVDMAEVKDWKAVRVDLVVAPDEQFAYALLGWTGSGMFRRDTRRYAEEERDMLLDNHGLYDLKKGIFQSADSEEEIFGHLDLDYLEPWERNA

SEQ ID NO: 5949 - DNA, 1182 bp, synthetic construct
  misc_feature 1..1182: note = Variant of terminal deoxynucleotidyl transferase
  source 1..1182: mol_type = other DNA
atgcaccatcatcaccatcacgggggctccggccatccggaaggtaataccccggagaaggaggtgccgagcgttatcgcccgtcatgttagtccgtacgcgtgccagcgcaagaccacgctgaataactacaacaaaaagatcaccgacgcgctggaaatcatggccgagaactacaagtttaaagagaacctgcaggcgcgcctggaggcccgtcgcgccgcgagtgtcctgaaaagcctgccgttcgaggttaccagcatgaaagacatccaaggtctgccgtgcattaccgacgacgtacgtcctgtgatcgaagagatcatcgaagtaggcgagagcagccgtgttaaagaaatcctcaatgacgagcgctacaaggcctttaagcagttcaccagcgtgttcggtgtgggcgtcaagaccgcggaaaagtggtaccgtatgggcctccgtacgctggaagaagcaaaggccagtaagagtctgaagctgaacaagatgcagaaggcgggcttcctgtactacgaggatctggcgagcggtgttagtaaagaagaagccgatgccgttctggatatcgtgaaggaaacggtgcgcactgttagtccggatgcgctggtgaccatcgccggcggtttccgccgtggcaaacctcagggccacgacgttgacctgctgatcacgattccgggccgtcctacggatccggagctgctccacaaagtggttgatctgctcaagaagcaaggtctgctgctgtacggggacatccgtgagcgtacgttcgtggaggggcaactgccaaatcctaaacctgaccagctggacaaccatcagaagtgcttcgccattctcaagctgtaccgtccgaaggtggataacagtgcggttgggacgtcgaagaaagtcgacatggctgaggttaaggattggaaagcggttcgtgtggatctggtggtcgctccagatgagcagttcgcctatgcgctgctcggttggacgggcagcggcatgtttcgtcgcgatactcgtcgctacgcggaggaagagcgcgacagtctgctcgacaaccatggtctctacgacctgaaaaagggcatctttctgagtgcggacagcgaagaagagattttcggtcatctggacctggattatctggagccgtgggaacgcaacgcg

SEQ ID NO: 5950 - protein, 394 aa, synthetic construct
  REGION 1..394: note = Variant of terminal deoxynucleotidyl transferase
MHHHHHHGGSGHPEGNTPEKEVPSVIARHVSPYACQRKTTLNNYNKKITDALEIMAENYKFKENLQARLEARRAASVLKSLPFEVTSMKDIQGLPCITDDVRPVIEEIIEVGESSRVKEILNDERYKAFKQFTSVFGVGVKTAEKWYRMGLRTLEEAKASKSLKLNKMQKAGFLYYEDLASGVSKEEADAVLDIVKETVRTVSPDALVTIAGGFRRGKPQGHDVDLLITIPGRPTDPELLHKVVDLLKKQGLLLYGDIRERTFVEGQLPNPKPDQLDNHQKCFAILKLYRPKVDNSAVGTSKKVDMAEVKDWKAVRVDLVVAPDEQFAYALLGWTGSGMFRRDTRRYAEEERDSLLDNHGLYDLKKGIFLSADSEEEIFGHLDLDYLEPWERNA

SEQ ID NO: 5951 - DNA, 1182 bp, synthetic construct
  misc_feature 1..1182: note = Variant of terminal deoxynucleotidyl transferase
  source 1..1182: mol_type = other DNA
atgcaccatcatcaccatcacgggggctccggccatccggaaggtaataccccggagaaggaggtgccgagcgttatcgcccgtcatgttagtccgtacgcgtgccagcgcaagaccacgctgaataactacaacaaaaagatcaccgacgcgctggaaatcatggccgagaactacaagtttaaagagaacctgcaggcgcgcctggaggcccgtcgcgccgcgagtgtcctgaaaagcctgccgttcgaggttaccagcatgaaagacatccaaggtctgccgtgcattaccgacgacgtacgtcctgtgatcgaagagatcatcgaagtaggcgagagcagccgtgttaaagaaatcctcaatgacgagcgctacaaggcctttaagcagttcaccagcgtgttcggtgtgggcgtcaagaccgcggaaaagtggtaccgtatgggcctccgtacgctggaagaagcaaaggccagtaagagtctgaagctgaacaagatgcagaaggcgggcttcctgtactacgaggatctggcgagcggtgttagtaaagaagaagccgatgccgttctggatatcgtgaaggaaacggtgcgcactgttagtccggatgcgctggtgaccatcgccggcggtttccgccgtggcaaacctcagggccacgacgttgacctgctgatcacgattccgggccgtcctacggatccggagctgctccacaaagtggttgatctgctcaagaagcaaggtctgctgctgtacggggacatccgtgagcgtacgttcgtggaggggcaactgccaaatcctaaacctgaccagctggacaaccatcagaagtgcttcgccattctcaagctgtaccgtccgaaggtggataacagtgcggttgggacgtcgaagaaagtcgacatggctgaggttaaggattggaaagcggttcgtgtggatctggtggtcgctccagatgagcagttcgcctatgcgctgctcggttggacgggcagcggcatgtttcgtcgcgatactcgtcgctacgcggaggaagagcgcgacatgctgctcgacaaccatggtctctacgacctgaaaaagggcatccttctgagtgcggacagcgaagaagagattttcggtcatctggacctggattatctggagccgtgggaacgcaacgcg

SEQ ID NO: 5952 - protein, 394 aa, synthetic construct
  REGION 1..394: note = Variant of terminal deoxynucleotidyl transferase
MHHHHHHGGSGHPEGNTPEKEVPSVIARHVSPYACQRKTTLNNYNKKITDALEIMAENYKFKENLQARLEARRAASVLKSLPFEVTSMKDIQGLPCITDDVRPVIEEIIEVGESSRVKEILNDERYKAFKQFTSVFGVGVKTAEKWYRMGLRTLEEAKASKSLKLNKMQKAGFLYYEDLASGVSKEEADAVLDIVKETVRTVSPDALVTIAGGFRRGKPQGHDVDLLITIPGRPTDPELLHKVVDLLKKQGLLLYGDIRERTFVEGQLPNPKPDQLDNHQKCFAILKLYRPKVDNSAVGTSKKVDMAEVKDWKAVRVDLVVAPDEQFAYALLGWTGSGMFRRDTRRYAEEERDMLLDNHGLYDLKKGILLSADSEEEIFGHLDLDYLEPWERNA

SEQ ID NO: 5953 - DNA, 1182 bp, synthetic construct
  misc_feature 1..1182: note = Variant of terminal deoxynucleotidyl transferase
  source 1..1182: mol_type = other DNA
atgcaccatcatcaccatcacgggggctccggccatccggaaggtaataccccggagaaggaggtgccgagcgttatcgcccgtcatgttagtccgtacgcgtgccagcgcaagaccacgctgaataactacaacaaaaagatcaccgacgcgctggaaatcatggccgagaactacaagtttaaagagaacctgcaggcgcgcctggaggcccgtcgcgccgcgagtgtcctgaaaagcctgccgttcgaggttaccagcatgaaagacatccaaggtctgccgtgcattaccgacgacgtacgtcctgtgatcgaagagatcatcgaagtaggcgagagcagccgtgttaaagaaatcctcaatgacgagcgctacaaggcctttaagcagttcaccagcgtgttcggtgtgggcgtcaagaccgcggaaaagtggtaccgtatgggcctccgtacgctggaagaagcaaaggccagtaagagtctgaagctgaacaagatgcagaaggcgggcttcctgtactacgaggatctggcgagcggtgttagtaaagaagaagccgatgccgttctggatatcgtgaaggaaacggtgcgcactgttagtccggatgcgctggtgaccatcgccggcggtttccgccgtggcaaacctcagggccacgacgttgacctgctgatcacgattccgggccgtcctacggatccggagctgctccacaaagtggttgatctgctcaagaagcaaggtctgctgctgtacggggacatccgtgagcgtacgttcgtggaggggcaactgccaaatcctaaacctgaccagctggacaaccatcagaagtgcttcgccattctcaagctgtaccgtccgaaggtggataacagtgcggttgggacgtcgaagaaagtcgacatggctgaggttaaggattggaaagcggttcgtgtggatctggtggtcgctccagatgagcagttcgcctatgcgctgctcggttggacgggcagcggcatgtttcgtcgcgatactcgtcgctacgcggaggaagagcgcgacatgctgctcgacaaccatggtctctacgacctgaaaaagggcatctttctgagtgcggacagcgaagaagagattttcggtcatctgactctggattatctggagccgtgggaacgcaacgcg

SEQ ID NO: 5954 - protein, 394 aa, synthetic construct
  REGION 1..394: note = Variant of terminal deoxynucleotidyl transferase
MHHHHHHGGSGHPEGNTPEKEVPSVIARHVSPYACQRKTTLNNYNKKITDALEIMAENYKFKENLQARLEARRAASVLKSLPFEVTSMKDIQGLPCITDDVRPVIEEIIEVGESSRVKEILNDERYKAFKQFTSVFGVGVKTAEKWYRMGLRTLEEAKASKSLKLNKMQKAGFLYYEDLASGVSKEEADAVLDIVKETVRTVSPDALVTIAGGFRRGKPQGHDVDLLITIPGRPTDPELLHKVVDLLKKQGLLLYGDIRERTFVEGQLPNPKPDQLDNHQKCFAILKLYRPKVDNSAVGTSKKVDMAEVKDWKAVRVDLVVAPDEQFAYALLGWTGSGMFRRDTRRYAEEERDMLLDNHGLYDLKKGIFLSADSEEEIFGHLTLDYLEPWERNA

SEQ ID NO: 5955 - DNA, 1182 bp, synthetic construct
  misc_feature 1..1182: note = Variant of terminal deoxynucleotidyl transferase
  source 1..1182: mol_type = other DNA
atgcaccatcatcaccatcacgggggctccggccatccggaaggtaataccccggagaaggaggtgccgagcgttatcgcccgtcatgttagtccgtacgcgtgccagcgcaagaccacgctgaataactacaacaaaaagatcaccgacgcgctggaaatcatggccgagaactacaagtttaaagagaacctgcaggcgcgcctggaggcccgtcgcgccgcgagtgtcctgaaaagcctgccgttcgaggttaccagcatgaaagacatccaaggtctgccgtgcattaccgacgacgtacgtcctgtgatcgaagagatcatcgaagtaggcgagagcagccgtgttaaagaaatcctcaatgacgagcgctacaaggcctttaagcagttcaccagcgtgttcggtgtgggcgtcaagaccgcggaaaagtggtaccgtatgggcctccgtacgctggaagaagcaaaggccagtaagagtctgaagctgaacaagatgcagaaggcgggcttcctgtactacgaggatctggcgagcggtgttagtaaagaagaagccgatgccgttctggatatcgtgaaggaaacggtgcgcactgttagtccggatgcgctggtgaccatcgccggcggtttccgccgtggcaaacctcagggccacgacgttgacctgctgatcacgattccgggccgtcctacggatccggagctgctccacaaagtggttgatctgctcaagaagcaaggtctgctgctgtacggggacatccgtgagcgtacgttcgtggaggggcaactgccaaatcctaaacctgaccagctggacaaccatcagaagtgcttcgccattctcaagctgtaccgtccgaaggtggataacagtgcggttgggacgtcgaagaaagtcgacatggctgaggttaaggattggaaagcggttcgtgtggatctggtggtcgctccagatgagcagttcgcctatgcgctgctcggttggacgggcagcggcatgtttcgtcgcgatactcgtcgctacgcggaggaagagcgcgacatgctgctcgacaaccatggtctctacgacctgaaaaagggcatctttctgagtgcggacagcgaagaagagattttcggtcatctggcgctggattatctggagccgtgggaacgcaacgcg

SEQ ID NO: 5956 - protein, 394 aa, synthetic construct
  REGION 1..394: note = Variant of terminal deoxynucleotidyl transferase
MHHHHHHGGSGHPEGNTPEKEVPSVIARHVSPYACQRKTTLNNYNKKITDALEIMAENYKFKENLQARLEARRAASVLKSLPFEVTSMKDIQGLPCITDDVRPVIEEIIEVGESSRVKEILNDERYKAFKQFTSVFGVGVKTAEKWYRMGLRTLEEAKASKSLKLNKMQKAGFLYYEDLASGVSKEEADAVLDIVKETVRTVSPDALVTIAGGFRRGKPQGHDVDLLITIPGRPTDPELLHKVVDLLKKQGLLLYGDIRERTFVEGQLPNPKPDQLDNHQKCFAILKLYRPKVDNSAVGTSKKVDMAEVKDWKAVRVDLVVAPDEQFAYALLGWTGSGMFRRDTRRYAEEERDMLLDNHGLYDLKKGIFLSADSEEEIFGHLALDYLEPWERNA

SEQ ID NO: 5957 - DNA, 1182 bp, synthetic construct
  misc_feature 1..1182: note = Variant of terminal deoxynucleotidyl transferase
  source 1..1182: mol_type = other DNA
atgcaccatcatcaccatcacgggggctccggccatccggaaggtaataccccggagaaggaggtgccgagcgttatcgcccgtcatgttagtccgtacgcgtgccagcgcaagaccacgctgaataactacaacaaaaagatcaccgacgcgctggaaatcatggccgagaactacaagtttaaagagaacctgcaggcgcgcctggaggcccgtcgcgccgcgagtgtcctgaaaagcctgccgttcgaggttaccagcatgaaagacatccaaggtctgccgtgcattaccgacgacgtacgtcctgtgatcgaagagatcatcgaagtaggcgagagcagccgtgttaaagaaatcctcaatgacgagcgctacaaggcctttaagcagttcaccagcgtgttcggtgtgggcgtcaagaccgcggaaaagtggtaccgtatgggcctccgtacgctggaagaagcaaaggccagtaagagtctgaagctgaacaagatgcagaaggcgggcttcctgtactacgaggatctggcgagcggtgttagtaaagaagaagccgatgccgttctggatatcgtgaaggaaacggtgcgcactgttagtccggatgcgctggtgaccatcgccggcggtttccgccgtggcaaacctcagggccacgacgttgacctgctgatcacgattccgggccgtcctacggatccggagctgctccacaaagtggttgatctgctcaagaagcaaggtctgctgctgtacggggacatccgtgagcgtacgttcgtggaggggcaactgccaaatcctaaacctgaccagctggacaaccatcagaagtgcttcgccattctcaagctgtaccgtccgaaggtggataacagtgcggttgggacgtcgaagaaagtcgacatggctgaggttaaggattggaaagcggttcgtgtggatctggtggtcgctccagatgagcagttcgcctatgcgctgctcggttggacgggcagcggcatgtttcgtcgcgatactcgtcgctacgcggaggaagagcgcgacatgctgctcgacaaccatggtctctacgacctgtgtaagggcatctttctgagtgcggacagcgaagaagagattttcggtcatctggacctggattatctggagccgtgggaacgcaacgcg

SEQ ID NO: 5958 - protein, 394 aa, synthetic construct
  REGION 1..394: note = Variant of terminal deoxynucleotidyl transferase
MHHHHHHGGSGHPEGNTPEKEVPSVIARHVSPYACQRKTTLNNYNKKITDALEIMAENYKFKENLQARLEARRAASVLKSLPFEVTSMKDIQGLPCITDDVRPVIEEIIEVGESSRVKEILNDERYKAFKQFTSVFGVGVKTAEKWYRMGLRTLEEAKASKSLKLNKMQKAGFLYYEDLASGVSKEEADAVLDIVKETVRTVSPDALVTIAGGFRRGKPQGHDVDLLITIPGRPTDPELLHKVVDLLKKQGLLLYGDIRERTFVEGQLPNPKPDQLDNHQKCFAILKLYRPKVDNSAVGTSKKVDMAEVKDWKAVRVDLVVAPDEQFAYALLGWTGSGMFRRDTRRYAEEERDMLLDNHGLYDLCKGIFLSADSEEEIFGHLDLDYLEPWERNA

SEQ ID NO: 5959 - DNA, 1182 bp, synthetic construct
  misc_feature 1..1182: note = Variant of terminal deoxynucleotidyl transferase
  source 1..1182: mol_type = other DNA
atgcaccatcatcaccatcacgggggctccggccatccggaaggtaataccccggagaaggaggtgccgagcgttatcgcccgtcatgttagtccgtacgcgtgccagcgcaagaccacgctgaataactacaacaaaaagatcaccgacgcgctggaaatcatggccgagaactacaagtttaaagagaacctgcaggcgcgcctggaggcccgtcgcgccgcgagtgtcctgaaaagcctgccgttcgaggttaccagcatgaaagacatccaaggtctgccgtgcattaccgacgacgtacgtcctgtgatcgaagagatcatcgaagtaggcgagagcagccgtgttaaagaaatcctcaatgacgagcgctacaaggcctttaagcagttcaccagcgtgttcggtgtgggcgtcaagaccgcggaaaagtggtaccgtatgggcctccgtacgctggaagaagcaaaggccagtaagagtctgaagctgaacaagatgcagaaggcgggcttcctgtactacgaggatctggcgagcggtgttagtaaagaagaagccgatgccgttctggatatcgtgaaggaaacggtgcgcactgttagtccggatgcgctggtgaccatcgccggcggtttccgccgtggcaaacctcagggccacgacgttgacctgctgatcacgattccgggccgtcctacggatccggagctgctccacaaagtggttgatctgctcaagaagcaaggtctgctgctgtacggggacatccgtgagcgtacgttcgtggaggggcaactgccaaatcctaaacctgaccagctggacaaccatcagaagtgcttcgccattctcaagctgtaccgtccgaaggtggataacagtgcggttgggacgtcgaagaaagtcgacatggctgaggttaaggattggaaagcggttcgtgtggatctggtggtcgctccagatgagcagttcgcctatgcgctgctcggttggacgggcagcggcatgtttcgtcgcgatactcgtcgctacgcggaggaagagcgcgacatgctgctcgacaaccatggtctctacgacctgaaaaagggcatctttctgagtgcggacgaggaagaagagattttcggtcatctggacctggattatctggagccgtgggaacgcaacgcg

SEQ ID NO: 5960 - protein, 394 aa, synthetic construct
  REGION 1..394: note = Variant of terminal deoxynucleotidyl transferase
MHHHHHHGGSGHPEGNTPEKEVPSVIARHVSPYACQRKTTLNNYNKKITDALEIMAENYKFKENLQARLEARRAASVLKSLPFEVTSMKDIQGLPCITDDVRPVIEEIIEVGESSRVKEILNDERYKAFKQFTSVFGVGVKTAEKWYRMGLRTLEEAKASKSLKLNKMQKAGFLYYEDLASGVSKEEADAVLDIVKETVRTVSPDALVTIAGGFRRGKPQGHDVDLLITIPGRPTDPELLHKVVDLLKKQGLLLYGDIRERTFVEGQLPNPKPDQLDNHQKCFAILKLYRPKVDNSAVGTSKKVDMAEVKDWKAVRVDLVVAPDEQFAYALLGWTGSGMFRRDTRRYAEEERDMLLDNHGLYDLKKGIFLSADEEEEIFGHLDLDYLEPWERNA

SEQ ID NO: 5961 - DNA, 1182 bp, synthetic construct
  misc_feature 1..1182: note = Variant of terminal deoxynucleotidyl transferase
  source 1..1182: mol_type = other DNA
atgcaccatcatcaccatcacgggggctccggccatccggaaggtaataccccggagaaggaggtgccgagcgttatcgcccgtcatgttagtccgtacgcgtgccagcgcaagaccacgctgaataactacaacaaaaagatcaccgacgcgctggaaatcatggccgagaactacaagtttaaagagaacctgcaggcgcgcctggaggcccgtcgcgccgcgagtgtcctgaaaagcctgccgttcgaggttaccagcatgaaagacatccaaggtctgccgtgcattaccgacgacgtacgtcctgtgatcgaagagatcatcgaagtaggcgagagcagccgtgttaaagaaatcctcaatgacgagcgctacaaggcctttaagcagttcaccagcgtgttcggtgtgggcgtcaagaccgcggaaaagtggtaccgtatgggcctccgtacgctggaagaagcaaaggccagtaagagtctgaagctgaacaagatgcagaaggcgggcttcctgtactacgaggatctggcgagcggtgttagtaaagaagaagccgatgccgttctggatatcgtgaaggaaacggtgcgcactgttagtccggatgcgctggtgaccatcgccggcggtttccgccgtggcaaacctcagggccacgacgttgacctgctgatcacgattccgggccgtcctacggatccggagctgctccacaaagtggttgatctgctcaagaagcaaggtctgctgctgtacggggacatccgtgagcgtacgttcgtggaggggcaactgccaaatcctaaacctgaccagctggacaaccatcagaagtgcttcgccattctcaagctgtaccgtccgaaggtggataacagtgcggttgggacgtcgaagaaagtcgacatggctgaggttaaggattggaaagcggttcgtgtggatctggtggtcgctccagatgagcagttcgcctatgcgctgctcggttggacgggcagcggcatgtttcgtcgcgatactcgtcgctacgcggaggaagagcgcgacatgctgctcgacaaccatggtctctacgacctgaaaaagggcatctcgctgagtgcggacagcgaagaagagattttcggtcatctggacctggattatctggagccgtgggaacgcaacgcg

SEQ ID NO: 5962 - protein, 394 aa, synthetic construct
  REGION 1..394: note = Variant of terminal deoxynucleotidyl transferase
MHHHHHHGGSGHPEGNTPEKEVPSVIARHVSPYACQRKTTLNNYNKKITDALEIMAENYKFKENLQARLEARRAASVLKSLPFEVTSMKDIQGLPCITDDVRPVIEEIIEVGESSRVKEILNDERYKAFKQFTSVFGVGVKTAEKWYRMGLRTLEEAKASKSLKLNKMQKAGFLYYEDLASGVSKEEADAVLDIVKETVRTVSPDALVTIAGGFRRGKPQGHDVDLLITIPGRPTDPELLHKVVDLLKKQGLLLYGDIRERTFVEGQLPNPKPDQLDNHQKCFAILKLYRPKVDNSAVGTSKKVDMAEVKDWKAVRVDLVVAPDEQFAYALLGWTGSGMFRRDTRRYAEEERDMLLDNHGLYDLKKGISLSADSEEEIFGHLDLDYLEPWERNA

SEQ ID NO: 5963 - DNA, 1182 bp, synthetic construct
  misc_feature 1..1182: note = Variant of terminal deoxynucleotidyl transferase
  source 1..1182: mol_type = other DNA
atgcaccatcatcaccatcacgggggctccggccatccggaaggtaataccccggagaaggaggtgccgagcgttatcgcccgtcatgttagtccgtacgcgtgccagcgcaagaccacgctgaataactacaacaaaaagatcaccgacgcgctggaaatcatggccgagaactacaagtttaaagagaacctgcaggcgcgcctggaggcccgtcgcgccgcgagtgtcctgaaaagcctgccgttcgaggttaccagcatgaaagacatccaaggtctgccgtgcattaccgacgacgtacgtcctgtgatcgaagagatcatcgaagtaggcgagagcagccgtgttaaagaaatcctcaatgacgagcgctacaaggcctttaagcagttcaccagcgtgttcggtgtgggcgtcaagaccgcggaaaagtggtaccgtatgggcctccgtacgctggaagaagcaaaggccagtaagagtctgaagctgaacaagatgcagaaggcgggcttcctgtactacgaggatctggcgagcggtgttagtaaagaagaagccgatgccgttctggatatcgtgaaggaaacggtgcgcactgttagtccggatgcgctggtgaccatcgccggcggtttccgccgtggcaaacctcagggccacgacgttgacctgctgatcacgattccgggccgtcctacggatccggagctgctccacaaagtggttgatctgctcaagaagcaaggtctgctgctgtacggggacatccgtgagcgtacgttcgtggaggggcaactgccaaatcctaaacctgaccagctggacaaccatcagaagtgcttcgccattctcaagctgtaccgtccgaaggtggataacagtgcggttgggacgtcgaagaaagtcgacatggctgaggttaaggattggaaagcggttcgtgtggatctggtggtcgctccagatgagcagttcgcctatgcgctgctcggttggacgggcagcggcatgtttcgtcgcgatactcgtcgctacgcgggggaagagcgcgacatgctgctcgacaaccatggtctctacgacctgaaaaagggcatctttctgagtgcggacagcgaagaagagattttcggtcatctggacctggattatctggagccgtgggaacgcaacgcg

SEQ ID NO: 5964 - protein, 394 aa, synthetic construct
  REGION 1..394: note = Variant of terminal deoxynucleotidyl transferase
MHHHHHHGGSGHPEGNTPEKEVPSVIARHVSPYACQRKTTLNNYNKKITDALEIMAENYKFKENLQARLEARRAASVLKSLPFEVTSMKDIQGLPCITDDVRPVIEEIIEVGESSRVKEILNDERYKAFKQFTSVFGVGVKTAEKWYRMGLRTLEEAKASKSLKLNKMQKAGFLYYEDLASGVSKEEADAVLDIVKETVRTVSPDALVTIAGGFRRGKPQGHDVDLLITIPGRPTDPELLHKVVDLLKKQGLLLYGDIRERTFVEGQLPNPKPDQLDNHQKCFAILKLYRPKVDNSAVGTSKKVDMAEVKDWKAVRVDLVVAPDEQFAYALLGWTGSGMFRRDTRRYAGEERDMLLDNHGLYDLKKGIFLSADSEEEIFGHLDLDYLEPWERNA

SEQ ID NO: 5965 - DNA, 1182 bp, synthetic construct
  misc_feature 1..1182: note = Variant of terminal deoxynucleotidyl transferase
  source 1..1182: mol_type = other DNA
atgcaccatcatcaccatcacgggggctccggccatccggaaggtaataccccggagaaggaggtgccgagcgttatcgcccgtcatgttagtccgtacgcgtgccagcgcaagaccacgctgaataactacaacaaaaagatcaccgacgcgctggaaatcatggccgagaactacaagtttaaagagaacctgcaggcgcgcctggaggcccgtcgcgccgcgagtgtcctgaaaagcctgccgttcgaggttaccagcatgaaagacatccaaggtctgccgtgcattaccgacgacgtacgtcctgtgatcgaagagatcatcgaagtaggcgagagcagccgtgttaaagaaatcctcaatgacgagcgctacaaggcctttaagcagttcaccagcgtgttcggtgtgggcgtcaagaccgcggaaaagtggtaccgtatgggcctccgtacgctggaagaagcaaaggccagtaagagtctgaagctgaacaagatgcagaaggcgggcttcctgtactacgaggatctggcgagcggtgttagtaaagaagaagccgatgccgttctggatatcgtgaaggaaacggtgcgcactgttagtccggatgcgctggtgaccatcgccggcggtttccgccgtggcaaacctcagggccacgacgttgacctgctgatcacgattccgggccgtcctacggatccggagctgctccacaaagtggttgatctgctcaagaagcaaggtctgctgctgtacggggacatccgtgagcgtacgttcgtggaggggcaactgccaaatcctaaacctgaccagctggacaaccatcagaagtgcttcgccattctcaagctgtaccgtccgaaggtggataacagtgcggttgggacgtcgaagaaagtcgacatggctgaggttaaggattggaaagcggttcgtgtggatctggtggtcgctccagatgagcagttcgcctatgcgctgctcggttggacgggcagcggcatgtttcgtcgcgatactcgtcgctacgcggaggaagaggtggacatgctgctcgacaaccatggtctctacgacctgaaaaagggcatctttctgagtgcggacagcgaagaagagattttcggtcatctggacctggattatctggagccgtgggaacgcaacgcg

SEQ ID NO: 5966 - protein, 394 aa, synthetic construct
  REGION 1..394: note = Variant of terminal deoxynucleotidyl transferase
MHHHHHHGGSGHPEGNTPEKEVPSVIARHVSPYACQRKTTLNNYNKKITDALEIMAENYKFKENLQARLEARRAASVLKSLPFEVTSMKDIQGLPCITDDVRPVIEEIIEVGESSRVKEILNDERYKAFKQFTSVFGVGVKTAEKWYRMGLRTLEEAKASKSLKLNKMQKAGFLYYEDLASGVSKEEADAVLDIVKETVRTVSPDALVTIAGGFRRGKPQGHDVDLLITIPGRPTDPELLHKVVDLLKKQGLLLYGDIRERTFVEGQLPNPKPDQLDNHQKCFAILKLYRPKVDNSAVGTSKKVDMAEVKDWKAVRVDLVVAPDEQFAYALLGWTGSGMFRRDTRRYAEEEVDMLLDNHGLYDLKKGIFLSADSEEEIFGHLDLDYLEPWERNA

SEQ ID NO: 5967 - DNA, 1182 bp, synthetic construct
  misc_feature 1..1182: note = Variant of terminal deoxynucleotidyl transferase
  source 1..1182: mol_type = other DNA
atgcaccatcatcaccatcacgggggctccggccatccggaaggtaataccccggagaaggaggtgccgagcgttatcgcccgtcatgttagtccgtacgcgtgccagcgcaagaccacgctgaataactacaacaaaaagatcaccgacgcgctggaaatcatggccgagaactacaagtttaaagagaacctgcaggcgcgcctggaggcccgtcgcgccgcgagtgtcctgaaaagcctgccgttcgaggttaccagcatgaaagacatccaaggtctgccgtgcattaccgacgacgtacgtcctgtgatcgaagagatcatcgaagtaggcgagagcagccgtgttaaagaaatcctcaatgacgagcgctacaaggcctttaagcagttcaccagcgtgttcggtgtgggcgtcaagaccgcggaaaagtggtaccgtatgggcctccgtacgctggaagaagcaaaggccagtaagagtctgaagctgaacaagatgcagaaggcgggcttcctgtactacgaggatctggcgagcggtgttagtaaagaagaagccgatgccgttctggatatcgtgaaggaaacggtgcgcactgttagtccggatgcgctggtgaccatcgccggcggtttccgccgtggcaaacctcagggccacgacgttgacctgctgatcacgattccgggccgtcctacggatccggagctgctccacaaagtggttgatctgctcaagaagcaaggtctgctgctgtacggggacatccgtgagcgtacgttcgtggaggggcaactgccaaatcctaaacctgaccagctggacaaccatcagaagtgcttcgccattctcaagctgtaccgtccgaaggtggataacagtgcggttgggacgtcgaagaaagtcgacatggctgaggttaaggattggaaagcggttcgtgtggatctggtggtcgctccagatgagcagttcgcctatgcgctgctcggttggacgggcagcggcatgtttcgtcgcgatactcgtcgctacgcggaggaagagcgcgacatgctgctcgacaaccatggtctctacgacctgaaaaagggcatctttctgagtgcggacagcgaagaagagattttcggtcatgtggacctggattatctggagccgtgggaacgcaacgcg

SEQ ID NO: 5968 - protein, 394 aa, synthetic construct
  REGION 1..394: note = Variant of terminal deoxynucleotidyl transferase
MHHHHHHGGSGHPEGNTPEKEVPSVIARHVSPYACQRKTTLNNYNKKITDALEIMAENYKFKENLQARLEARRAASVLKSLPFEVTSMKDIQGLPCITDDVRPVIEEIIEVGESSRVKEILNDERYKAFKQFTSVFGVGVKTAEKWYRMGLRTLEEAKASKSLKLNKMQKAGFLYYEDLASGVSKEEADAVLDIVKETVRTVSPDALVTIAGGFRRGKPQGHDVDLLITIPGRPTDPELLHKVVDLLKKQGLLLYGDIRERTFVEGQLPNPKPDQLDNHQKCFAILKLYRPKVDNSAVGTSKKVDMAEVKDWKAVRVDLVVAPDEQFAYALLGWTGSGMFRRDTRRYAEEERDMLLDNHGLYDLKKGIFLSADSEEEIFGHVDLDYLEPWERNA

SEQ ID NO: 5969 - DNA, 1182 bp, synthetic construct
  misc_feature 1..1182: note = Variant of terminal deoxynucleotidyl transferase
  source 1..1182: mol_type = other DNA
atgcaccatcatcaccatcacgggggctccggccatccggaaggtaataccccggagaaggaggtgccgagcgttatcgcccgtcatgttagtccgtacgcgtgccagcgcaagaccacgctgaataactacaacaaaaagatcaccgacgcgctggaaatcatggccgagaactacaagtttaaagagaacctgcaggcgcgcctggaggcccgtcgcgccgcgagtgtcctgaaaagcctgccgttcgaggttaccagcatgaaagacatccaaggtctgccgtgcattaccgacgacgtacgtcctgtgatcgaagagatcatcgaagtaggcgagagcagccgtgttaaagaaatcctcaatgacgagcgctacaaggcctttaagcagttcaccagcgtgttcggtgtgggcgtcaagaccgcggaaaagtggtaccgtatgggcctccgtacgctggaagaagcaaaggccagtaagagtctgaagctgaacaagatgcagaaggcgggcttcctgtactacgaggatctggcgagcggtgttagtaaagaagaagccgatgccgttctggatatcgtgaaggaaacggtgcgcactgttagtccggatgcgctggtgaccatcgccggcggtttccgccgtggcaaacctcagggccacgacgttgacctgctgatcacgattccgggccgtcctacggatccggagctgctccacaaagtggttgatctgctcaagaagcaaggtctgctgctgtacggggacatccgtgagcgtacgttcgtggaggggcaactgccaaatcctaaacctgaccagctggacaaccatcagaagtgcttcgccattctcaagctgtaccgtccgaaggtggataacagtgcggttgggacgtcgaagaaagtcgacatggctgaggttaaggattggaaagcggttcgtgtggatctggtggtcgctccagatgagcagttcgcctatgcgctgctcggttggacgggcagcggcatgtttcgtcgcgatactcgtcgctacgcggagtctgagcgcgacatgctgctcgacaaccatggtctctacgacctgaaaaagggcatctttctgagtgcggacagcgaagaagagattttcggtcatctggacctggattatctggagccgtgggaacgcaacgcg

SEQ ID NO: 5970 - protein, 394 aa, synthetic construct
  REGION 1..394: note = Variant of terminal deoxynucleotidyl transferase
MHHHHHHGGSGHPEGNTPEKEVPSVIARHVSPYACQRKTTLNNYNKKITDALEIMAENYKFKENLQARLEARRAASVLKSLPFEVTSMKDIQGLPCITDDVRPVIEEIIEVGESSRVKEILNDERYKAFKQFTSVFGVGVKTAEKWYRMGLRTLEEAKASKSLKLNKMQKAGFLYYEDLASGVSKEEADAVLDIVKETVRTVSPDALVTIAGGFRRGKPQGHDVDLLITIPGRPTDPELLHKVVDLLKKQGLLLYGDIRERTFVEGQLPNPKPDQLDNHQKCFAILKLYRPKVDNSAVGTSKKVDMAEVKDWKAVRVDLVVAPDEQFAYALLGWTGSGMFRRDTRRYAESERDMLLDNHGLYDLKKGIFLSADSEEEIFGHLDLDYLEPWERNA

SEQ ID NO: 5971 - DNA, 1182 bp, synthetic construct
  misc_feature 1..1182: note = Variant of terminal deoxynucleotidyl transferase
  source 1..1182: mol_type = other DNA
atgcaccatcatcaccatcacgggggctccggccatccggaaggtaataccccggagaaggaggtgccgagcgttatcgcccgtcatgttagtccgtacgcgtgccagcgcaagaccacgctgaataactacaacaaaaagatcaccgacgcgctggaaatcatggccgagaactacaagtttaaagagaacctgcaggcgcgcctggaggcccgtcgcgccgcgagtgtcctgaaaagcctgccgttcgaggttaccagcatgaaagacatccaaggtctgccgtgcattaccgacgacgtacgtcctgtgatcgaagagatcatcgaagtaggcgagagcagccgtgttaaagaaatcctcaatgacgagcgctacaaggcctttaagcagttcaccagcgtgttcggtgtgggcgtcaagaccgcggaaaagtggtaccgtatgggcctccgtacgctggaagaagcaaaggccagtaagagtctgaagctgaacaagatgcagaaggcgggcttcctgtactacgaggatctggcgagcggtgttagtaaagaagaagccgatgccgttctggatatcgtgaaggaaacggtgcgcactgttagtccggatgcgctggtgaccatcgccggcggtttccgccgtggcaaacctcagggccacgacgttgacctgctgatcacgattccgggccgtcctacggatccggagctgctccacaaagtggttgatctgctcaagaagcaaggtctgctgctgtacggggacatccgtgagcgtacgttcgtggaggggcaactgccaaatcctaaacctgaccagctggacaaccatcagaagtgcttcgccattctcaagctgtaccgtccgaaggtggataacagtgcggttgggacgtcgaagaaagtcgacatggctgaggttaaggattggaaagcggttcgtgtggatctggtggtcgctccagatgagcagttcgcctatgcgctgctcggttggacgggcagcggcatgtttcgtcgcgatactcgtcgctacgcggaggaagagcgcgacatgctgctcgacaaccatggtctctacgacctgaaaaagggcatctttctgagtgcggacagcgaagaagagttgttcggtcatctggacctggattatctggagccgtgggaacgcaacgcg

SEQ ID NO: 5972 - protein, 394 aa, synthetic construct
  REGION 1..394: note = Variant of terminal deoxynucleotidyl transferase
MHHHHHHGGSGHPEGNTPEKEVPSVIARHVSPYACQRKTTLNNYNKKITDALEIMAENYKFKENLQARLEARRAASVLKSLPFEVTSMKDIQGLPCITDDVRPVIEEIIEVGESSRVKEILNDERYKAFKQFTSVFGVGVKTAEKWYRMGLRTLEEAKASKSLKLNKMQKAGFLYYEDLASGVSKEEADAVLDIVKETVRTVSPDALVTIAGGFRRGKPQGHDVDLLITIPGRPTDPELLHKVVDLLKKQGLLLYGDIRERTFVEGQLPNPKPDQLDNHQKCFAILKLYRPKVDNSAVGTSKKVDMAEVKDWKAVRVDLVVAPDEQFAYALLGWTGSGMFRRDTRRYAEEERDMLLDNHGLYDLKKGIFLSADSEEELFGHLDLDYLEPWERNA

SEQ ID NO: 5973 - DNA, 1182 bp, synthetic construct
  misc_feature 1..1182: note = Variant of terminal deoxynucleotidyl transferase
  source 1..1182: mol_type = other DNA
atgcaccatcatcaccatcacgggggctccggccatccggaaggtaataccccggagaaggaggtgccgagcgttatcgcccgtcatgttagtccgtacgcgtgccagcgcaagaccacgctgaataactacaacaaaaagatcaccgacgcgctggaaatcatggccgagaactacaagtttaaagagaacctgcaggcgcgcctggaggcccgtcgcgccgcgagtgtcctgaaaagcctgccgttcgaggttaccagcatgaaagacatccaaggtctgccgtgcattaccgacgacgtacgtcctgtgatcgaagagatcatcgaagtaggcgagagcagccgtgttaaagaaatcctcaatgacgagcgctacaaggcctttaagcagttcaccagcgtgttcggtgtgggcgtcaagaccgcggaaaagtggtaccgtatgggcctccgtacgctggaagaagcaaaggccagtaagagtctgaagctgaacaagatgcagaaggcgggcttcctgtactacgaggatctggcgagcggtgttagtaaagaagaagccgatgccgttctggatatcgtgaaggaaacggtgcgcactgttagtccggatgcgctggtgaccatcgccggcggtttccgccgtggcaaacctcagggccacgacgttgacctgctgatcacgattccgggccgtcctacggatccggagctgctccacaaagtggttgatctgctcaagaagcaaggtctgctgctgtacggggacatccgtgagcgtacgttcgtggaggggcaactgccaaatcctaaacctgaccagctggacaaccatcagaagtgcttcgccattctcaagctgtaccgtccgaaggtggataacagtgcggttgggacgtcgaagaaagtcgacatggctgaggttaaggattggaaagcggttcgtgtggatctggtggtcgctccagatgagcagttcgcctatgcgctgctcggttggacgggcagcggcatgtttcgtcgcgatactcgtcgctacgcggaggaagagcgcgacatgctgctcgacaaccatggtgcgtacgacctgaaaaagggcatctttctgagtgcggacagcgaagaagagattttcggtcatctggacctggattatctggagccgtgggaacgcaacgcg

SEQ ID NO: 5974 - protein, 394 aa, synthetic construct
  REGION 1..394: note = Variant of terminal deoxynucleotidyl transferase
MHHHHHHGGSGHPEGNTPEKEVPSVIARHVSPYACQRKTTLNNYNKKITDALEIMAENYKFKENLQARLEARRAASVLKSLPFEVTSMKDIQGLPCITDDVRPVIEEIIEVGESSRVKEILNDERYKAFKQFTSVFGVGVKTAEKWYRMGLRTLEEAKASKSLKLNKMQKAGFLYYEDLASGVSKEEADAVLDIVKETVRTVSPDALVTIAGGFRRGKPQGHDVDLLITIPGRPTDPELLHKVVDLLKKQGLLLYGDIRERTFVEGQLPNPKPDQLDNHQKCFAILKLYRPKVDNSAVGTSKKVDMAEVKDWKAVRVDLVVAPDEQFAYALLGWTGSGMFRRDTRRYAEEERDMLLDNHGAYDLKKGIFLSADSEEEIFGHLDLDYLEPWERNA

SEQ ID NO: 5975 - DNA, 1182 bp, synthetic construct
  misc_feature 1..1182: note = Variant of terminal deoxynucleotidyl transferase
  source 1..1182: mol_type = other DNA
atgcaccatcatcaccatcacgggggctccggccatccggaaggtaataccccggagaaggaggtgccgagcgttatcgcccgtcatgttagtccgtacgcgtgccagcgcaagaccacgctgaataactacaacaaaaagatcaccgacgcgctggaaatcatggccgagaactacaagtttaaagagaacctgcaggcgcgcctggaggcccgtcgcgccgcgagtgtcctgaaaagcctgccgttcgaggttaccagcatgaaagacatccaaggtctgccgtgcattaccgacgacgtacgtcctgtgatcgaagagatcatcgaagtaggcgagagcagccgtgttaaagaaatcctcaatgacgagcgctacaaggcctttaagcagttcaccagcgtgttcggtgtgggcgtcaagaccgcggaaaagtggtaccgtatgggcctccgtacgctggaagaagcaaaggccagtaagagtctgaagctgaacaagatgcagaaggcgggcttcctgtactacgaggatctggcgagcggtgttagtaaagaagaagccgatgccgttctggatatcgtgaaggaaacggtgcgcactgttagtccggatgcgctggtgaccatcgccggcggtttccgccgtggcaaacctcagggccacgacgttgacctgctgatcacgattccgggccgtcctacggatccggagctgctccacaaagtggttgatctgctcaagaagcaaggtctgctgctgtacggggacatccgtgagcgtacgttcgtggaggggcaactgccaaatcctaaacctgaccagctggacaaccatcagaagtgcttcgccattctcaagctgtaccgtccgaaggtggataacagtgcggttgggacgtcgaagaaagtcgacatggctgaggttaaggattggaaagcggttcgtgtggatctggtggtcgctccagatgagcagttcgcctatgcgctgctcggttggacgggcagcggcatgtttcgtcgcgatactcgtcgctacgcggaggaagagcgcgacatgctgctcgacaaccatggtctctacgacctgaaaaagggcatctttctgagtgcggacagcgaagaagagattttcggtcatctgtggctggattatctggagccgtgggaacgcaacgcg

SEQ ID NO: 5976 - protein, 394 aa, synthetic construct
  REGION 1..394: note = Variant of terminal deoxynucleotidyl transferase
MHHHHHHGGSGHPEGNTPEKEVPSVIARHVSPYACQRKTTLNNYNKKITDALEIMAENYKFKENLQARLEARRAASVLKSLPFEVTSMKDIQGLPCITDDVRPVIEEIIEVGESSRVKEILNDERYKAFKQFTSVFGVGVKTAEKWYRMGLRTLEEAKASKSLKLNKMQKAGFLYYEDLASGVSKEEADAVLDIVKETVRTVSPDALVTIAGGFRRGKPQGHDVDLLITIPGRPTDPELLHKVVDLLKKQGLLLYGDIRERTFVEGQLPNPKPDQLDNHQKCFAILKLYRPKVDNSAVGTSKKVDMAEVKDWKAVRVDLVVAPDEQFAYALLGWTGSGMFRRDTRRYAEEERDMLLDNHGLYDLKKGIFLSADSEEEIFGHLWLDYLEPWERNA

SEQ ID NO: 5977 - DNA, 1182 bp, synthetic construct
  misc_feature 1..1182: note = Variant of terminal deoxynucleotidyl transferase
  source 1..1182: mol_type = other DNA
atgcaccatcatcaccatcacgggggctccggccatccggaaggtaataccccggagaaggaggtgccgagcgttatcgcccgtcatgttagtccgtacgcgtgccagcgcaagaccacgctgaataactacaacaaaaagatcaccgacgcgctggaaatcatggccgagaactacaagtttaaagagaacctgcaggcgcgcctggaggcccgtcgcgccgcgagtgtcctgaaaagcctgccgttcgaggttaccagcatgaaagacatccaaggtctgccgtgcattaccgacgacgtacgtcctgtgatcgaagagatcatcgaagtaggcgagagcagccgtgttaaagaaatcctcaatgacgagcgctacaaggcctttaagcagttcaccagcgtgttcggtgtgggcgtcaagaccgcggaaaagtggtaccgtatgggcctccgtacgctggaagaagcaaaggccagtaagagtctgaagctgaacaagatgcagaaggcgggcttcctgtactacgaggatctggcgagcggtgttagtaaagaagaagccgatgccgttctggatatcgtgaaggaaacggtgcgcactgttagtccggatgcgctggtgaccatcgccggcggtttccgccgtggcaaacctcagggccacgacgttgacctgctgatcacgattccgggccgtcctacggatccggagctgctccacaaagtggttgatctgctcaagaagcaaggtctgctgctgtacggggacatccgtgagcgtacgttcgtggaggggcaactgccaaatcctaaacctgaccagctggacaaccatcagaagtgcttcgccattctcaagctgtaccgtccgaaggtggataacagtgcggttgggacgtcgaagaaagtcgacatggctgaggttaaggattggaaagcggttcgtgtggatctggtggtcgctccagatgagcagttcgcctatgcgctgctcggttggacgggcagcggcatgtttcgtcgcgatactcgtcgctacgcggaggaagagcgcgacatgctgctcgacaaccatggtctctactcgctgaaaaagggcatctttctgagtgcggacagcgaagaagagattttcggtcatctggacctggattatctggagccgtgggaacgcaacgcg

SEQ ID NO: 5978 - protein, 394 aa, synthetic construct
  REGION 1..394: note = Variant of terminal deoxynucleotidyl transferase
MHHHHHHGGSGHPEGNTPEKEVPSVIARHVSPYACQRKTTLNNYNKKITDALEIMAENYKFKENLQARLEARRAASVLKSLPFEVTSMKDIQGLPCITDDVRPVIEEIIEVGESSRVKEILNDERYKAFKQFTSVFGVGVKTAEKWYRMGLRTLEEAKASKSLKLNKMQKAGFLYYEDLASGVSKEEADAVLDIVKETVRTVSPDALVTIAGGFRRGKPQGHDVDLLITIPGRPTDPELLHKVVDLLKKQGLLLYGDIRERTFVEGQLPNPKPDQLDNHQKCFAILKLYRPKVDNSAVGTSKKVDMAEVKDWKAVRVDLVVAPDEQFAYALLGWTGSGMFRRDTRRYAEEERDMLLDNHGLYSLKKGIFLSADSEEEIFGHLDLDYLEPWERNA

SEQ ID NO: 5979 - DNA, 1182 bp, synthetic construct
  misc_feature 1..1182: note = Variant of terminal deoxynucleotidyl transferase
  source 1..1182: mol_type = other DNA
atgcaccatcatcaccatcacgggggctccggccatccggaaggtaataccccggagaaggaggtgccgagcgttatcgcccgtcatgttagtccgtacgcgtgccagcgcaagaccacgctgaataactacaacaaaaagatcaccgacgcgctggaaatcatggccgagaactacaagtttaaagagaacctgcaggcgcgcctggaggcccgtcgcgccgcgagtgtcctgaaaagcctgccgttcgaggttaccagcatgaaagacatccaaggtctgccgtgcattaccgacgacgtacgtcctgtgatcgaagagatcatcgaagtaggcgagagcagccgtgttaaagaaatcctcaatgacgagcgctacaaggcctttaagcagttcaccagcgtgttcggtgtgggcgtcaagaccgcggaaaagtggtaccgtatgggcctccgtacgctggaagaagcaaaggccagtaagagtctgaagctgaacaagatgcagaaggcgggcttcctgtactacgaggatctggcgagcggtgttagtaaagaagaagccgatgccgttctggatatcgtgaaggaaacggtgcgcactgttagtccggatgcgctggtgaccatcgccggcggtttccgccgtggcaaacctcagggccacgacgttgacctgctgatcacgattccgggccgtcctacggatccggagctgctccacaaagtggttgatctgctcaagaagcaaggtctgctgctgtacggggacatccgtgagcgtacgttcgtggaggggcaactgccaaatcctaaacctgaccagctggacaaccatcagaagtgcttcgccattctcaagctgtaccgtccgaaggtggataacagtgcggttgggacgtcgaagaaagtcgacatggctgaggttaaggattggaaagcggttcgtgtggatctggtggtcgctccagatgagcagttcgcctatgcgctgctcggttggacgggcagcggcatgtttcgtcgcgatactcgtcgctacgcggaggaagagcgcgacatgctgctcgacaaccatggtctctacgacctgaaaaagggcatctttctgagtgcggacagcgaagaagaggctttcggtcatctggacctggattatctggagccgtgggaacgcaacgcg

SEQ ID NO: 5980 - protein, 394 aa, synthetic construct
  REGION 1..394: note = Variant of terminal deoxynucleotidyl transferase
MHHHHHHGGSGHPEGNTPEKEVPSVIARHVSPYACQRKTTLNNYNKKITDALEIMAENYKFKENLQARLEARRAASVLKSLPFEVTSMKDIQGLPCITDDVRPVIEEIIEVGESSRVKEILNDERYKAFKQFTSVFGVGVKTAEKWYRMGLRTLEEAKASKSLKLNKMQKAGFLYYEDLASGVSKEEADAVLDIVKETVRTVSPDALVTIAGGFRRGKPQGHDVDLLITIPGRPTDPELLHKVVDLLKKQGLLLYGDIRERTFVEGQLPNPKPDQLDNHQKCFAILKLYRPKVDNSAVGTSKKVDMAEVKDWKAVRVDLVVAPDEQFAYALLGWTGSGMFRRDTRRYAEEERDMLLDNHGLYDLKKGIFLSADSEEEAFGHLDLDYLEPWERNA

SEQ ID NO: 5981 - DNA, 1182 bp, synthetic construct
  misc_feature 1..1182: note = Variant of terminal deoxynucleotidyl transferase
  source 1..1182: mol_type = other DNA
atgcaccatcatcaccatcacgggggctccggccatccggaaggtaataccccggagaaggaggtgccgagcgttatcgcccgtcatgttagtccgtacgcgtgccagcgcaagaccacgctgaataactacaacaaaaagatcaccgacgcgctggaaatcatggccgagaactacaagtttaaagagaacctgcaggcgcgcctggaggcccgtcgcgccgcgagtgtcctgaaaagcctgccgttcgaggttaccagcatgaaagacatccaaggtctgccgtgcattaccgacgacgtacgtcctgtgatcgaagagatcatcgaagtaggcgagagcagccgtgttaaagaaatcctcaatgacgagcgctacaaggcctttaagcagttcaccagcgtgttcggtgtgggcgtcaagaccgcggaaaagtggtaccgtatgggcctccgtacgctggaagaagcaaaggccagtaagagtctgaagctgaacaagatgcagaaggcgggcttcctgtactacgaggatctggcgagcggtgttagtaaagaagaagccgatgccgttctggatatcgtgaaggaaacggtgcgcactgttagtccggatgcgctggtgaccatcgccggcggtttccgccgtggcaaacctcagggccacgacgttgacctgctgatcacgattccgggccgtcctacggatccggagctgctccacaaagtggttgatctgctcaagaagcaaggtctgctgctgtacggggacatccgtgagcgtacgttcgtggaggggcaactgccaaatcctaaacctgaccagctggacaaccatcagaagtgcttcgccattctcaagctgtaccgtccgaaggtggataacagtgcggttgggacgtcgaagaaagtcgacatggctgaggttaaggattggaaagcggttcgtgtggatctggtggtcgctccagatgagcagttcgcctatgcgctgctcggttggacgggcagcggcatgtttcgtcgcgatactcgtcgctacgcggaggaagagcgcgacatgctgctcgacaaccatggtctctacgacctgaaaaagggcatctttctgagtgcggacagcgaagaagagattttcggtcatctggacctggattatctggatccgtgggaacgcaacgcg

SEQ ID NO: 5982 - protein, 394 aa, synthetic construct
  REGION 1..394: note = Variant of terminal deoxynucleotidyl transferase
MHHHHHHGGSGHPEGNTPEKEVPSVIARHVSPYACQRKTTLNNYNKKITDALEIMAENYKFKENLQARLEARRAASVLKSLPFEVTSMKDIQGLPCITDDVRPVIEEIIEVGESSRVKEILNDERYKAFKQFTSVFGVGVKTAEKWYRMGLRTLEEAKASKSLKLNKMQKAGFLYYEDLASGVSKEEADAVLDIVKETVRTVSPDALVTIAGGFRRGKPQGHDVDLLITIPGRPTDPELLHKVVDLLKKQGLLLYGDIRERTFVEGQLPNPKPDQLDNHQKCFAILKLYRPKVDNSAVGTSKKVDMAEVKDWKAVRVDLVVAPDEQFAYALLGWTGSGMFRRDTRRYAEEERDMLLDNHGLYDLKKGIFLSADSEEEIFGHLDLDYLDPWERNA

SEQ ID NO: 5983 - DNA, 1182 bp, synthetic construct
  misc_feature 1..1182: note = Variant of terminal deoxynucleotidyl transferase
  source 1..1182: mol_type = other DNA
atgcaccatcatcaccatcacgggggctccggccatccggaaggtaataccccggagaaggaggtgccgagcgttatcgcccgtcatgttagtccgtacgcgtgccagcgcaagaccacgctgaataactacaacaaaaagatcaccgacgcgctggaaatcatggccgagaactacaagtttaaagagaacctgcaggcgcgcctggaggcccgtcgcgccgcgagtgtcctgaaaagcctgccgttcgaggttaccagcatgaaagacatccaaggtctgccgtgcattaccgacgacgtacgtcctgtgatcgaagagatcatcgaagtaggcgagagcagccgtgttaaagaaatcctcaatgacgagcgctacaaggcctttaagcagttcaccagcgtgttcggtgtgggcgtcaagaccgcggaaaagtggtaccgtatgggcctccgtacgctggaagaagcaaaggccagtaagagtctgaagctgaacaagatgcagaaggcgggcttcctgtactacgaggatctggcgagcggtgttagtaaagaagaagccgatgccgttctggatatcgtgaaggaaacggtgcgcactgttagtccggatgcgctggtgaccatcgccggcggtttccgccgtggcaaacctcagggccacgacgttgacctgctgatcacgattccgggccgtcctacggatccggagctgctccacaaagtggttgatctgctcaagaagcaaggtctgctgctgtacggggacatccgtgagcgtacgttcgtggaggggcaactgccaaatcctaaacctgaccagctggacaaccatcagaagtgcttcgccattctcaagctgtaccgtccgaaggtggataacagtgcggttgggacgtcgaagaaagtcgacatggctgaggttaaggattggaaagcggttcgtgtggatctggtggtcgctccagatgagcagttcgcctatgcgctgctcggttggacgggcagcggcatgtttcgtcgcgatactcgtcgctacgcggaggaagagcgcgacatgctgctcgacaaccatggtttttacgacctgaaaaagggcatctttctgagtgcggacagcgaagaagagattttcggtcatctggacctggattatctggagccgtgggaacgcaacgcg

SEQ ID NO: 5984 - protein, 394 aa, synthetic construct
  REGION 1..394: note = Variant of terminal deoxynucleotidyl transferase
MHHHHHHGGSGHPEGNTPEKEVPSVIARHVSPYACQRKTTLNNYNKKITDALEIMAENYKFKENLQARLEARRAASVLKSLPFEVTSMKDIQGLPCITDDVRPVIEEIIEVGESSRVKEILNDERYKAFKQFTSVFGVGVKTAEKWYRMGLRTLEEAKASKSLKLNKMQKAGFLYYEDLASGVSKEEADAVLDIVKETVRTVSPDALVTIAGGFRRGKPQGHDVDLLITIPGRPTDPELLHKVVDLLKKQGLLLYGDIRERTFVEGQLPNPKPDQLDNHQKCFAILKLYRPKVDNSAVGTSKKVDMAEVKDWKAVRVDLVVAPDEQFAYALLGWTGSGMFRRDTRRYAEEERDMLLDNHGFYDLKKGIFLSADSEEEIFGHLDLDYLEPWERNA

SEQ ID NO: 5985 - DNA, 1182 bp, synthetic construct
  misc_feature 1..1182: note = Variant of terminal deoxynucleotidyl transferase
  source 1..1182: mol_type = other DNA
atgcaccatcatcaccatcacgggggctccggccatccggaaggtaataccccggagaaggaggtgccgagcgttatcgcccgtcatgttagtccgtacgcgtgccagcgcaagaccacgctgaataactacaacaaaaagatcaccgacgcgctggaaatcatggccgagaactacaagtttaaagagaacctgcaggcgcgcctggaggcccgtcgcgccgcgagtgtcctgaaaagcctgccgttcgaggttaccagcatgaaagacatccaaggtctgccgtgcattaccgacgacgtacgtcctgtgatcgaagagatcatcgaagtaggcgagagcagccgtgttaaagaaatcctcaatgacgagcgctacaaggcctttaagcagttcaccagcgtgttcggtgtgggcgtcaagaccgcggaaaagtggtaccgtatgggcctccgtacgctggaagaagcaaaggccagtaagagtctgaagctgaacaagatgcagaaggcgggcttcctgtactacgaggatctggcgagcggtgttagtaaagaagaagccgatgccgttctggatatcgtgaaggaaacggtgcgcactgttagtccggatgcgctggtgaccatcgccggcggtttccgccgtggcaaacctcagggccacgacgttgacctgctgatcacgattccgggccgtcctacggatccggagctgctccacaaagtggttgatctgctcaagaagcaaggtctgctgctgtacggggacatccgtgagcgtacgttcgtggaggggcaactgccaaatcctaaacctgaccagctggacaaccatcagaagtgcttcgccattctcaagctgtaccgtccgaaggtggataacagtgcggttgggacgtcgaagaaagtcgacatggctgaggttaaggattggaaagcggttcgtgtggatctggtggtcgctccagatgagcagttcgcctatgcgctgctcggttggacgggcagcggcatgtttcgtcgcgatactcgtcgctacgcggaggaagagcgcgacatgctgctcgacaaccatggtctctacgacctgaaaaagggcatctttctgagtgcggacagcgaagaagagattttcggtcatctggacctggatactctggagccgtgggaacgcaacgcg

SEQ ID NO: 5986 - protein, 394 aa, synthetic construct
  REGION 1..394: note = Variant of terminal deoxynucleotidyl transferase
MHHHHHHGGSGHPEGNTPEKEVPSVIARHVSPYACQRKTTLNNYNKKITDALEIMAENYKFKENLQARLEARRAASVLKSLPFEVTSMKDIQGLPCITDDVRPVIEEIIEVGESSRVKEILNDERYKAFKQFTSVFGVGVKTAEKWYRMGLRTLEEAKASKSLKLNKMQKAGFLYYEDLASGVSKEEADAVLDIVKETVRTVSPDALVTIAGGFRRGKPQGHDVDLLITIPGRPTDPELLHKVVDLLKKQGLLLYGDIRERTFVEGQLPNPKPDQLDNHQKCFAILKLYRPKVDNSAVGTSKKVDMAEVKDWKAVRVDLVVAPDEQFAYALLGWTGSGMFRRDTRRYAEEERDMLLDNHGLYDLKKGIFLSADSEEEIFGHLDLDTLEPWERNA

SEQ ID NO: 5987 - DNA, 1182 bp, synthetic construct
  misc_feature 1..1182: note = Variant of terminal deoxynucleotidyl transferase
  source 1..1182: mol_type = other DNA
atgcaccatcatcaccatcacgggggctccggccatccggaaggtaataccccggagaaggaggtgccgagcgttatcgcccgtcatgttagtccgtacgcgtgccagcgcaagaccacgctgaataactacaacaaaaagatcaccgacgcgctggaaatcatggccgagaactacaagtttaaagagaacctgcaggcgcgcctggaggcccgtcgcgccgcgagtgtcctgaaaagcctgccgttcgaggttaccagcatgaaagacatccaaggtctgccgtgcattaccgacgacgtacgtcctgtgatcgaagagatcatcgaagtaggcgagagcagccgtgttaaagaaatcctcaatgacgagcgctacaaggcctttaagcagttcaccagcgtgttcggtgtgggcgtcaagaccgcggaaaagtggtaccgtatgggcctccgtacgctggaagaagcaaaggccagtaagagtctgaagctgaacaagatgcagaaggcgggcttcctgtactacgaggatctggcgagcggtgttagtaaagaagaagccgatgccgttctggatatcgtgaaggaaacggtgcgcactgttagtccggatgcgctggtgaccatcgccggcggtttccgccgtggcaaacctcagggccacgacgttgacctgctgatcacgattccgggccgtcctacggatccggagctgctccacaaagtggttgatctgctcaagaagcaaggtctgctgctgtacggggacatccgtgagcgtacgttcgtggaggggcaactgccaaatcctaaacctgaccagctggacaaccatcagaagtgcttcgccattctcaagctgtaccgtccgaaggtggataacagtgcggttgggacgtcgaagaaagtcgacatggctgaggttaaggattggaaagcggttcgtgtggatctggtggtcgctccagatgagcagttcgcctatgcgctgctcggttggacgggcagcggcatgtttcgtcgcgatactcgtcgctacgcggaggaatctcgcgacatgctgctcgacaaccatggtctctacgacctgaaaaagggcatctttctgagtgcggacagcgaagaagagattttcggtcatctggacctggattatctggagccgtgggaacgcaacgcg

SEQ ID NO: 5988 - protein, 394 aa, synthetic construct
  REGION 1..394: note = Variant of terminal deoxynucleotidyl transferase
MHHHHHHGGSGHPEGNTPEKEVPSVIARHVSPYACQRKTTLNNYNKKITDALEIMAENYKFKENLQARLEARRAASVLKSLPFEVTSMKDIQGLPCITDDVRPVIEEIIEVGESSRVKEILNDERYKAFKQFTSVFGVGVKTAEKWYRMGLRTLEEAKASKSLKLNKMQKAGFLYYEDLASGVSKEEADAVLDIVKETVRTVSPDALVTIAGGFRRGKPQGHDVDLLITIPGRPTDPELLHKVVDLLKKQGLLLYGDIRERTFVEGQLPNPKPDQLDNHQKCFAILKLYRPKVDNSAVGTSKKVDMAEVKDWKAVRVDLVVAPDEQFAYALLGWTGSGMFRRDTRRYAEESRDMLLDNHGLYDLKKGIFLSADSEEEIFGHLDLDYLEPWERNA

SEQ ID NO: 5989 - DNA, 1182 bp, synthetic construct
  misc_feature 1..1182: note = Variant of terminal deoxynucleotidyl transferase
  source 1..1182: mol_type = other DNA
atgcaccatcatcaccatcacgggggctccggccatccggaaggtaataccccggagaaggaggtgccgagcgttatcgcccgtcatgttagtccgtacgcgtgccagcgcaagaccacgctgaataactacaacaaaaagatcaccgacgcgctggaaatcatggccgagaactacaagtttaaagagaacctgcaggcgcgcctggaggcccgtcgcgccgcgagtgtcctgaaaagcctgccgttcgaggttaccagcatgaaagacatccaaggtctgccgtgcattaccgacgacgtacgtcctgtgatcgaagagatcatcgaagtaggcgagagcagccgtgttaaagaaatcctcaatgacgagcgctacaaggcctttaagcagttcaccagcgtgttcggtgtgggcgtcaagaccgcggaaaagtggtaccgtatgggcctccgtacgctggaagaagcaaaggccagtaagagtctgaagctgaacaagatgcagaaggcgggcttcctgtactacgaggatctggcgagcggtgttagtaaagaagaagccgatgccgttctggatatcgtgaaggaaacggtgcgcactgttagtccggatgcgctggtgaccatcgccggcggtttccgccgtggcaaacctcagggccacgacgttgacctgctgatcacgattccgggccgtcctacggatccggagctgctccacaaagtggttgatctgctcaagaagcaaggtctgctgctgtacggggacatccgtgagcgtacgttcgtggaggggcaactgccaaatcctaaacctgaccagctggacaaccatcagaagtgcttcgccattctcaagctgtaccgtccgaaggtggataacagtgcggttgggacgtcgaagaaagtcgacatggctgaggttaaggattggaaagcggttcgtgtggatctggtgcaggctccagatgagcagttcgcctatgcgctgctcggttggacgggcagcggcatgtttcgtcgcgatactcgtcgctacgcggaggaagagcgcgacatgctgctcgacaaccatggtctctacgacctgaaaaagggcatctttctgagtgcggacagcgaagaagagattttcggtcatctggacctggattatctggagccgtgggaacgcaacgcg

SEQ ID NO: 5990 - protein, 394 aa, synthetic construct
  REGION 1..394: note = Variant of terminal deoxynucleotidyl transferase
MHHHHHHGGSGHPEGNTPEKEVPSVIARHVSPYACQRKTTLNNYNKKITDALEIMAENYKFKENLQARLEARRAASVLKSLPFEVTSMKDIQGLPCITDDVRPVIEEIIEVGESSRVKEILNDERYKAFKQFTSVFGVGVKTAEKWYRMGLRTLEEAKASKSLKLNKMQKAGFLYYEDLASGVSKEEADAVLDIVKETVRTVSPDALVTIAGGFRRGKPQGHDVDLLITIPGRPTDPELLHKVVDLLKKQGLLLYGDIRERTFVEGQLPNPKPDQLDNHQKCFAILKLYRPKVDNSAVGTSKKVDMAEVKDWKAVRVDLVQAPDEQFAYALLGWTGSGMFRRDTRRYAEEERDMLLDNHGLYDLKKGIFLSADSEEEIFGHLDLDYLEPWERNA

SEQ ID NO: 5991 - DNA, 1182 bp, synthetic construct
  misc_feature 1..1182: note = Variant of terminal deoxynucleotidyl transferase
  source 1..1182: mol_type = other DNA
atgcaccatcatcaccatcacgggggctccggccatccggaaggtaataccccggagaaggaggtgccgagcgttatcgcccgtcatgttagtccgtacgcgtgccagcgcaagaccacgctgaataactacaacaaaaagatcaccgacgcgctggaaatcatggccgagaactacaagtttaaagagaacctgcaggcgcgcctggaggcccgtcgcgccgcgagtgtcctgaaaagcctgccgttcgaggttaccagcatgaaagacatccaaggtctgccgtgcattaccgacgacgtacgtcctgtgatcgaagagatcatcgaagtaggcgagagcagccgtgttaaagaaatcctcaatgacgagcgctacaaggcctttaagcagttcaccagcgtgttcggtgtgggcgtcaagaccgcggaaaagtggtaccgtatgggcctccgtacgctggaagaagcaaaggccagtaagagtctgaagctgaacaagatgcagaaggcgggcttcctgtactacgaggatctggcgagcggtgttagtaaagaagaagccgatgccgttctggatatcgtgaaggaaacggtgcgcactgttagtccggatgcgctggtgaccatcgccggcggtttccgccgtggcaaacctcagggccacgacgttgacctgctgatcacgattccgggccgtcctacggatccggagctgctccacaaagtggttgatctgctcaagaagcaaggtctgctgctgtacggggacatccgtgagcgtacgttcgtggaggggcaactgccaaatcctaaacctgaccagctggacaaccatcagaagtgcttcgccattctcaagctgtaccgtccgaaggtggataacagtgcggttgggacgtcgaagaaagtcgacatggctgaggttaaggattggaaagcggttcgtgtggatctggtggtcgctccagatgagcagttcgcctatgcgctgctcggttggacgggcagcggcatgtttcgtcgcgatactcgtcgctacgcggaggaagagggggacatgctgctcgacaaccatggtctctacgacctgaaaaagggcatctttctgagtgcggacagcgaagaagagattttcggtcatctggacctggattatctggagccgtgggaacgcaacgcg

SEQ ID NO: 5992 - protein, 394 aa, synthetic construct
  REGION 1..394: note = Variant of terminal deoxynucleotidyl transferase
MHHHHHHGGSGHPEGNTPEKEVPSVIARHVSPYACQRKTTLNNYNKKITDALEIMAENYKFKENLQARLEARRAASVLKSLPFEVTSMKDIQGLPCITDDVRPVIEEIIEVGESSRVKEILNDERYKAFKQFTSVFGVGVKTAEKWYRMGLRTLEEAKASKSLKLNKMQKAGFLYYEDLASGVSKEEADAVLDIVKETVRTVSPDALVTIAGGFRRGKPQGHDVDLLITIPGRPTDPELLHKVVDLLKKQGLLLYGDIRERTFVEGQLPNPKPDQLDNHQKCFAILKLYRPKVDNSAVGTSKKVDMAEVKDWKAVRVDLVVAPDEQFAYALLGWTGSGMFRRDTRRYAEEEGDMLLDNHGLYDLKKGIFLSADSEEEIFGHLDLDYLEPWERNA

SEQ ID NO: 5993 - DNA, 1182 bp, synthetic construct
  misc_feature 1..1182: note = Variant of terminal deoxynucleotidyl transferase
  source 1..1182: mol_type = other DNA
atgcaccatcatcaccatcacgggggctccggccatccggaaggtaataccccggagaaggaggtgccgagcgttatcgcccgtcatgttagtccgtacgcgtgccagcgcaagaccacgctgaataactacaacaaaaagatcaccgacgcgctggaaatcatggccgagaactacaagtttaaagagaacctgcaggcgcgcctggaggcccgtcgcgccgcgagtgtcctgaaaagcctgccgttcgaggttaccagcatgaaagacatccaaggtctgccgtgcattaccgacgacgtacgtcctgtgatcgaagagatcatcgaagtaggcgagagcagccgtgttaaagaaatcctcaatgacgagcgctacaaggcctttaagcagttcaccagcgtgttcggtgtgggcgtcaagaccgcggaaaagtggtaccgtatgggcctccgtacgctggaagaagcaaaggccagtaagagtctgaagctgaacaagatgcagaaggcgggcttcctgtactacgaggatctggcgagcggtgttagtaaagaagaagccgatgccgttctggatatcgtgaaggaaacggtgcgcactgttagtccggatgcgctggtgaccatcgccggcggtttccgccgtggcaaacctcagggccacgacgttgacctgctgatcacgattccgggccgtcctacggatccggagctgctccacaaagtggttgatctgctcaagaagcaaggtctgctgctgtacggggacatccgtgagcgtacgttcgtggaggggcaactgccaaatcctaaacctgaccagctggacaaccatcagaagtgcttcgccattctcaagctgtaccgtccgaaggtggataacagtgcggttgggacgtcgaagaaagtcgacatggctgaggttaaggattggaaagcggttcgtgtggatctggtggtcgctccagatgagcagttcgcctatgcgctgctcggttggacgggcagcggcatgtttcgtcgcgatactcgtcgctacgcggaggaagagcgcgacatgctgctcgacaaccatggtctctacgacctggtgaagggcatctttctgagtgcggacagcgaagaagagattttcggtcatctggacctggattatctggagccgtgggaacgcaacgcg

SEQ ID NO: 5994 - protein, 394 aa, synthetic construct
  REGION 1..394: note = Variant of terminal deoxynucleotidyl transferase
MHHHHHHGGSGHPEGNTPEKEVPSVIARHVSPYACQRKTTLNNYNKKITDALEIMAENYKFKENLQARLEARRAASVLKSLPFEVTSMKDIQGLPCITDDVRPVIEEIIEVGESSRVKEILNDERYKAFKQFTSVFGVGVKTAEKWYRMGLRTLEEAKASKSLKLNKMQKAGFLYYEDLASGVSKEEADAVLDIVKETVRTVSPDALVTIAGGFRRGKPQGHDVDLLITIPGRPTDPELLHKVVDLLKKQGLLLYGDIRERTFVEGQLPNPKPDQLDNHQKCFAILKLYRPKVDNSAVGTSKKVDMAEVKDWKAVRVDLVVAPDEQFAYALLGWTGSGMFRRDTRRYAEEERDMLLDNHGLYDLVKGIFLSADSEEEIFGHLDLDYLEPWERNA

SEQ ID NO: 5995 - DNA, 1182 bp, synthetic construct
  misc_feature 1..1182: note = Variant of terminal deoxynucleotidyl transferase
  source 1..1182: mol_type = other DNA
atgcaccatcatcaccatcacgggggctccggccatccggaaggtaataccccggagaaggaggtgccgagcgttatcgcccgtcatgttagtccgtacgcgtgccagcgcaagaccacgctgaataactacaacaaaaagatcaccgacgcgctggaaatcatggccgagaactacaagtttaaagagaacctgcaggcgcgcctggaggcccgtcgcgccgcgagtgtcctgaaaagcctgccgttcgaggttaccagcatgaaagacatccaaggtctgccgtgcattaccgacgacgtacgtcctgtgatcgaagagatcatcgaagtaggcgagagcagccgtgttaaagaaatcctcaatgacgagcgctacaaggcctttaagcagttcaccagcgtgttcggtgtgggcgtcaagaccgcggaaaagtggtaccgtatgggcctccgtacgctggaagaagcaaaggccagtaagagtctgaagctgaacaagatgcagaaggcgggcttcctgtactacgaggatctggcgagcggtgttagtaaagaagaagccgatgccgttctggatatcgtgaaggaaacggtgcgcactgttagtccggatgcgctggtgaccatcgccggcggtttccgccgtggcaaacctcagggccacgacgttgacctgctgatcacgattccgggccgtcctacggatccggagctgctccacaaagtggttgatctgctcaagaagcaaggtctgctgctgtacggggacatccgtgagcgtacgttcgtggaggggcaactgccaaatcctaaacctgaccagctggacaaccatcagaagtgcttcgccattctcaagctgtaccgtccgaaggtggataacagtgcggttgggacgtcgaagaaagtcgacatggctgaggttaaggattggaaagcggttcgtgtggatctggtggtcgctccagatgagcagttcgcctatgcgctgctcggttggacgggcagcggcatgtttcgtcgcgatactcgtcgctacgcggaggaagagcgcgacatgctgctcgacaaccatggtctctacgacctgaaaaagggcatctttctgagtgcggacagcgaagaagagattttcggtcatctggagctggattatctggagccgtgggaacgcaacgcg

SEQ ID NO: 5996 - protein, 394 aa, synthetic construct
  REGION 1..394: note = Variant of terminal deoxynucleotidyl transferase
MHHHHHHGGSGHPEGNTPEKEVPSVIARHVSPYACQRKTTLNNYNKKITDALEIMAENYKFKENLQARLEARRAASVLKSLPFEVTSMKDIQGLPCITDDVRPVIEEIIEVGESSRVKEILNDERYKAFKQFTSVFGVGVKTAEKWYRMGLRTLEEAKASKSLKLNKMQKAGFLYYEDLASGVSKEEADAVLDIVKETVRTVSPDALVTIAGGFRRGKPQGHDVDLLITIPGRPTDPELLHKVVDLLKKQGLLLYGDIRERTFVEGQLPNPKPDQLDNHQKCFAILKLYRPKVDNSAVGTSKKVDMAEVKDWKAVRVDLVVAPDEQFAYALLGWTGSGMFRRDTRRYAEEERDMLLDNHGLYDLKKGIFLSADSEEEIFGHLELDYLEPWERNA

SEQ ID NO: 5997 - DNA, 1182 bp, synthetic construct
  misc_feature 1..1182: note = Variant of terminal deoxynucleotidyl transferase
  source 1..1182: mol_type = other DNA
atgcaccatcatcaccatcacgggggctccggccatccggaaggtaataccccggagaaggaggtgccgagcgttatcgcccgtcatgttagtccgtacgcgtgccagcgcaagaccacgctgaataactacaacaaaaagatcaccgacgcgctggaaatcatggccgagaactacaagtttaaagagaacctgcaggcgcgcctggaggcccgtcgcgccgcgagtgtcctgaaaagcctgccgttcgaggttaccagcatgaaagacatccaaggtctgccgtgcattaccgacgacgtacgtcctgtgatcgaagagatcatcgaagtaggcgagagcagccgtgttaaagaaatcctcaatgacgagcgctacaaggcctttaagcagttcaccagcgtgttcggtgtgggcgtcaagaccgcggaaaagtggtaccgtatgggcctccgtacgctggaagaagcaaaggccagtaagagtctgaagctgaacaagatgcagaaggcgggcttcctgtactacgaggatctggcgagcggtgttagtaaagaagaagccgatgccgttctggatatcgtgaaggaaacggtgcgcactgttagtccggatgcgctggtgaccatcgccggcggtttccgccgtggcaaacctcagggccacgacgttgacctgctgatcacgattccgggccgtcctacggatccggagctgctccacaaagtggttgatctgctcaagaagcaaggtctgctgctgtacggggacatccgtgagcgtacgttcgtggaggggcaactgccaaatcctaaacctgaccagctggacaaccatcagaagtgcttcgccattctcaagctgtaccgtccgaaggtggataacagtgcggttgggacgtcgaagaaagtcgacatggctgaggttaaggattggaaagcggttcgtgtggatctggtggtcgctccagatgagcagttcgcctatgcgctgctcggttggacgggcagcggcatgtttcgtcgcgatactcgtcgctacgcggaggaagagcgcgacatgctgctcgacaaccatggtctctacgacctggggaagggcatctttctgagtgcggacagcgaagaagagattttcggtcatctggacctggattatctggagccgtgggaacgcaacgcg

SEQ ID NO: 5998 - protein, 394 aa, synthetic construct
  REGION 1..394: note = Variant of terminal deoxynucleotidyl transferase
MHHHHHHGGSGHPEGNTPEKEVPSVIARHVSPYACQRKTTLNNYNKKITDALEIMAENYKFKENLQARLEARRAASVLKSLPFEVTSMKDIQGLPCITDDVRPVIEEIIEVGESSRVKEILNDERYKAFKQFTSVFGVGVKTAEKWYRMGLRTLEEAKASKSLKLNKMQKAGFLYYEDLASGVSKEEADAVLDIVKETVRTVSPDALVTIAGGFRRGKPQGHDVDLLITIPGRPTDPELLHKVVDLLKKQGLLLYGDIRERTFVEGQLPNPKPDQLDNHQKCFAILKLYRPKVDNSAVGTSKKVDMAEVKDWKAVRVDLVVAPDEQFAYALLGWTGSGMFRRDTRRYAEEERDMLLDNHGLYDLGKGIFLSADSEEEIFGHLDLDYLEPWERNA

SEQ ID NO: 5999 - DNA, 1182 bp, synthetic construct
  misc_feature 1..1182: note = Variant of terminal deoxynucleotidyl transferase
  source 1..1182: mol_type = other DNA
atgcaccatcatcaccatcacgggggctccggccatccggaaggtaataccccggagaaggaggtgccgagcgttatcgcccgtcatgttagtccgtacgcgtgccagcgcaagaccacgctgaataactacaacaaaaagatcaccgacgcgctggaaatcatggccgagaactacaagtttaaagagaacctgcaggcgcgcctggaggcccgtcgcgccgcgagtgtcctgaaaagcctgccgttcgaggttaccagcatgaaagacatccaaggtctgccgtgcattaccgacgacgtacgtcctgtgatcgaagagatcatcgaagtaggcgagagcagccgtgttaaagaaatcctcaatgacgagcgctacaaggcctttaagcagttcaccagcgtgttcggtgtgggcgtcaagaccgcggaaaagtggtaccgtatgggcctccgtacgctggaagaagcaaaggccagtaagagtctgaagctgaacaagatgcagaaggcgggcttcctgtactacgaggatctggcgagcggtgttagtaaagaagaagccgatgccgttctggatatcgtgaaggaaacggtgcgcactgttagtccggatgcgctggtgaccatcgccggcggtttccgccgtggcaaacctcagggccacgacgttgacctgctgatcacgattccgggccgtcctacggatccggagctgctccacaaagtggttgatctgctcaagaagcaaggtctgctgctgtacggggacatccgtgagcgtacgttcgtggaggggcaactgccaaatcctaaacctgaccagctggacaaccatcagaagtgcttcgccattctcaagctgtaccgtccgaaggtggataacagtgcggttgggacgtcgaagaaagtcgacatggctgaggttaaggattggaaagcggttcgtgtggatctggtggtcgctccagatgagcagttcgcctatgcgctgctcggttggacgggcagcggcatgtttcgtcgcgatactcgtcgctacgcggaggaagagcgcgacatgctgctcgacaaccatggtctctacgacctgaaaaagggcatctttctgagtgcggacagcgaagaagagattttcggtcatctggacctggattatctggagccgtgggttcgcaacgcg
